United States Patent Application Publication US 2012/0017338 A1 - sequence listing, part 5

SEQ ID NO: 15531 - DNA, 240 bp, Zea mays
  Peptide Sequence Number=SeqID_57310
atggcgcagataatggttaagctaggctaccaggctaaaccttcctcgagcggagcgagagaaagacaaagaaggaagaccgtctggggatgcaagatccctcgtcgaagatgcaaagctgtcgatctgtttccagccatatgcaacctcgccttcacctctacaactgtggaacatggagaaccacccgggaaaacagtgctaccacaagggtttaatgggacgcccttggctgattaa

SEQ ID NO: 15532 - DNA, 2424 bp, Zea mays
  Peptide Sequence Number=SeqID_57311
atggccaacctagcggcccagctcgctgccgtgctccaggcctgcatcaagcgtagcggtggccgcaagcccagccgctcaaacgccaaggccgcgcacgcgcgcgtcctcgccgccggcctcgccgcagataccttcctcctcaaccgcctcgtcgagctctactccctctcgggcctgccatgccacgcgctccgcgccttccgcgcgctgccccaccccaacgtctactcctacaacgccgccatctcagctgcctgccgcgcgggggacctcgccgccgcccgggacctgctcggccgaatgcccgaccggaacgccgtctcctggaataccgtcatcgccgccgtcgcgcggtcgggctccccgggggaggcgctagagatgtaccaggggatgctgcaggagggcctcgcgccgacgaacttcacgctggccagcgtgctcagcgcgtgcggcgccgtggccgcgctcgacgacgggaggcgctgccatgggctcgccgtcaaggtcgggctcgacgggcaccagttcgtcgagaacgggctcctcggcatgtacacaaagtgcgggagcgtcgccgacgcggtcaggctgttcgacgggatgcctagcccgaacgaggtgtcgttcacggcgatgatgggcgggttggcgcagggcggggccgtcgacgatgccctcaggttgttcgcgcggatgagcaggaccgggattcgtgttgatccggtagcggtctccagtgttctcggcgcctgcgcgcaggcctgcgctggtgactacaatgtcgctcgtgcaatccagctcgcacagtccatccatgcattggttgtcagaaaaggttttggatcggaccaacacgtgggtaactcgttggttgatctgtacgcgaagggcatgaagatggatgaggccatcaaagtctttgagtcgttgtccagtgttagtattgtttcttggaacattcttataactgggtatggtcagctgggatgctatgagagggccatggaagttcttgagtttatgcaagagtcaggctttgagcccaatgaggtaacctacagtaacatgcttgcttcttgtattaaggcaagggatgttccgtctgctcgtgcaatgtttgacaagataccaaagccaagtgtgactacatggaacaccctattatctggctacggccaggaggaactgcatcaagaaacaatcgacttgtttaggagaatgcaacatcaaaatgtgcagcctgaccggacaactttagctgtgatactcagttcatgttctagattaggaaatttcgaactgggcaagcaagtgcattctgcttcagtaagactactgcttcataatgacatgtttgttgcgagtggtctgatagatatatattcaaagtgtggtcaggttggcatcgcactgatcattttcaacatgatgaccgagagagatgtggtatgctggaattccatgatctcaggtttggctatccattctttgagtgaagaggccttcgatttcttgaagcagatgagggaaaatgggatgttccccacagaatcctcttatgctagtatgatcaatttgtgtgctagattgtcatccatacctcaaggtaggcagatgcatgcacaggttctgaaggatggttatgatcagaatgtatacgttggctgttccctgatcgacatgtatgctaaatctggcaacatggatgatgcacgccttttctttaactgcatgattgtgaagaacttagtggcatggaatgagatgatccatggatatgcccagaatggttttggagagaaagctgtggaattgtttgagtacatgctaaccacaaaacagaagcctgacagtgtgactttcattgctgtactgacaggatgcagtcactctgggctcgttgatgaagcagttacattctttaattccatggagagcaattatgggattacaccattagttgagcattacacttgcctgatagatgcactggcgcgggctgctcgttttgctgaagttgaggcagtgataggtaaaatgccatacaaggatgatcctatactgtgggaagttctactagctgcatgtgttgtacatcacaatgctgagttgggggaattttctgccaagcatctattccgccttgatccaaaaaatccatcaccttatgtgcttctatcaaacatatatgctactttgggtagacatggtgatgcctcagctgttagggcgctgatgagtagtcgcggtgttgtgaaaggccgcggatacagctgggtgaatcacaaggatggttctcgtgcctttatggtagctgatgatcttggaacggatgttggagaacgcacaatgttcagtgataatggggacacttctgggatgacagaagtgcacatagatgaaacctgtgctggatga

SEQ ID NO: 15533 - DNA, 450 bp, Zea mays
  Peptide Sequence Number=SeqID_57312
atggctccgccctcgccctccccctgtccacgttcgctgtcttgggggtcctgcatcgttgcgacgatagtggtcggtgtcgcactcggctgcctatgcgcgtttctctaccccgccggcctcttccctcgtgcccccgactccgccagccattggccccgccagtccgctaccgccactcgctacgaggaagcctgggcacggagaagcatcgcggtcgccgccctgctcctcacgctcgcctacgtcagggggctgctcatgttctttcttgacgagaggctatccggctgctctatgggcggggcggcggtgggaggcccatgcccggcagtgacgatggcctcctccgtccgtccgtcggccctccccaaccccgaggacgcgttccctcacgttcaacctgtatcgttgtaccgcaacgaccactttgtgtttgagcgtctctag

SEQ ID NO: 15534 - DNA, 360 bp, Zea mays
  Peptide Sequence Number=SeqID_57313
atgacattaccatatagggatgagattcaaatgaggtttgaaggttgtgcatactttccagactttgtaaaaccaggaaactgcaattttaggccataccaatatgtcattgagttgcttggcacactgctactgaggaaaagaccagcagtagtagcaggtttagggcttagggtgctcgaccgactcgagagtttgccgacacttgaagaaggaccaaatgtgagcttttacacacttgatgaacatcttgagctcttgagaaaggtgggggcatttctgtacccactggtcgtagttttgttggctattactaatcgtgagcagatggccccattcacctctaccaacaggtgctga

SEQ ID NO: 15535 - DNA, 708 bp, Zea mays
  Peptide Sequence Number=SeqID_57314
atggggaatacttctccgtccccatccccgtttacccatcaagagaagaattttctccatatacatcctcgtggggaaacaaacttccccatccccgtcctccaatggaggaattccccgcggggaatcggggatcgaaccccattgtcatctctacctggaagccacatcacattcggctcccttgacttcctcgccatcgtcactgacgaactccgcctcatcgatctcgacattcctgtcaccacagtcgcagaacccacatgctccaccaggagcaagacagagaagcggcaccttaatcggctcgccgccgccatcaagcagcaggcaataggagcctcgtcttcaacactcgtggctgttattagccaccaaccaacatacgtactcgacctgatcgaggaagactcgagccacggctcgactgagtccgactctgacgccgacgatgtggctgaaagggcgaggaaggtctgtgaccagctcgtcgagggccacaacgaggcgcagtacttcctcaaccttggtcagaatatggattaccactttgcttgccgcatggcgagaatcaaggacgaccacctcatcatccagttcctccccatccaccttgcgaagggggcgagggcctcgctcaagcatctaccaatcgacaccatccacgactgggctgtcctcaggaaggttttcgtcggatccttttga

SEQ ID NO: 15536 - DNA, 318 bp, Zea mays
  Peptide Sequence Number=SeqID_57315
atgtctatgatccttccccttgcacccctcgccgaagggggtgtgagttccgtttctacggagatcacattcttagaggaaacgacgtccgtccttgctcgtggggagtcccaaaccttactgtcgagccttgggggccagttaggcgtccagcccgctccagacaactcagttgaaggcgatgacaccctggctctatgcagggagctgagcgaggagagcgatgcaactgagaaggcgttgcaggacggccttgaacaactcttgcaccacggctataattcaccgggctatccggtgtgccagctgcgcgcctag

SEQ ID NO: 15537 - DNA, 1518 bp, Zea mays
  Peptide Sequence Number=SeqID_57316
atggcagcgtccttccccaccaccaccgcgctctccgtcatcctgctgctctccctgttcgtcgccgtggtccgctccgacacggcggccacgccggtgacgccgtccacggcgtgcaacgggacgacggaccccaacttctgccggagcgtgctcccgtcgaacggcaccagcagcctctacacctacgggcgcttctccgtcgccaagtccctcgccaacgccaacaagttcctcggcctcgtgaaccggtacctcgcccgcggcggcctctcccccggcgccgtcgccgcgctgcaggactgccagctcctctcggggctcaacatcgacttcctgtccgccgcgggcgccacgctcaacacgtcggccaacagcacgctcctggacccgcagtccgaggacttgcagacgctgatgtcggcgatcctgaccaaccagcagacgtgcgccgacggccttcaggcggccgcctccgcgtggtccgtgcgcaacggcctcgccgtgcccatggtcaacagcaccaagctgtacagcgtctcgctgtcgctcttcaccagggcgtgggtgcgctcgtccaaggccaacaagccgccccgccacggcggccacgggagggtcctgttcgacgccattgacgacgagatggtccgcaggatggcgctcgagggcgtcgcggccgcggtgtccgtggtcggcgaggtgacggtggaccagagcggcgcggggaactacacgaccatcggcgcggccgtggcggcggcgcccagcaaccttggcgggagcagcggctacttcgtcgtacgcgtgcccgcgggcgtgtaccaggagaatgtggtggtgcccaagaacaagaagtacgtcatgatggtcggagacggcatcggccagtcggtggtcaccgcattaattttctatatatatgtcctagctagtcaaaagaaaacattccgaacgcttgaaatgcaatgcaatgcagctgttctcgggaccgggtttgttgcggtgaacatgacgttccggaacacggccgggccggcgaagcaccaggcggtggcgctgcgctccggcgcggacctctcgacgttctaccagtgcagcttcgaggcgtaccaggacacgctgtacgcgcactccctccggcagttctaccgcggctgcgacatctacggcaccgtggactacgtgttcggcaacgccgccgtggtgttccaggactgcaacctctactcgcggctgcccatgcaggggcagagcaacacgtcggaggtggacacgctggtcgaccccgccggctggatgccgtgggacggcgacttcgcgctcagcacgctcttctacgccgagtacaacaactccggcgccggcgcggacacgagcaggagggtggcctggccgggcttccacgtgctcaacagcaccgcggatgccgccaactttaccgtcggcaacatggtgctcggggacttctggctgccccaaaccggcgtgcctttcaccagcggactcatcaactga

SEQ ID NO: 15538 - DNA, 3033 bp, Zea mays
  Peptide Sequence Number=SeqID_57317
atggtggacggcggcgggcgggagatggactccccgcggttccgcgcgatcctgcgcgccaccagcgggcgccggaagcgcgcacccgaggtgaagagtttctcgcacgagctgagctcgaggggcggcggcggcggcgtgccggcgatgcgcaagatggtgcgcggcggcgggctcggcagcaccaccccggaggagttcatcggcgccatccggaccaagttcatccgcctcaaggaggaggtggacagcgagctgggcgtcttcgcgggggacctcgtcgacatgctggcgcggtcgggcgaccaccgggacgactgtcgcgtcgcgctggaggacctgctggtggtggcacagcggtgcgcggagatgagccccgaggagctgtggacccgctgcgagggcgtagtgcagggcctcgacgaccgccggcaggacctccccgcaggcctcccgaagcaggcgcacacgcgcatcctcttcatcctcacgcgcttcacccgcctcctgcagttccgcaagggcgccgccgcggggtgccgctacgccgccgacgccgacgacgacgacaggcacaacgtgctcggcctgcacaacctcagcgacctcggcctctacccgatccacgtcgacggcggggatctcggccccaagagcacctccagcctcaccgagctcaaggagcgcctcatcaggcggcgaatgttggagcacaggcagctcaccgtcgacttctccccggctaggatcttttcgccgttcggggacgggtcggccgttgacggccactccccgagcagcaagatggcgtcgtggaagaagctcccttcccccgccgagaagaacaagaccgccgccgccgccggggatgccacggccgccgccgccaagggagacgacagcccgtcgaagaagaagcccatcacccggcacggcaaggcgacggtggacgagatcgtggagcgcgtggacgcggcgagcatccacatccgcccggatgggctggcgtgcttgggcggcgacgaggccattagcctggagatcccgtcccggtacccggaggcgcagcagatcatggtggacgggaagccccggatgatctgccgcatctgcgacttcgagatccccatggcgtgcgccgagggccacttcgtggtgtgcacgctcgccgatcgctgcgacgccaaagggcacagcgcggaccagcggctactgcgcgtggccgaggtgctcgaccgcgtgctcgcgtgcttcggccccctcggcggcgggagggcgagcacgtcgtccgagtcggactccaacgccgccgaccacgaagccctgtcccacctgctgaccgtgccgtccacggagctcttctcggagggcgcgctgacgccggcgtcggggagcctgccgcagtcgccgctgctgacgccgcggacgagccacgcggagtcgcagctgaccaagcacagggcgttcgcggatctggagagctcccagcagatcgagagccttgtcgccatcgcccgtggcgtggagggcgtgaagagctccgagtacaactcgctggaggacctcagctcgtacctggaggacctgaacgccgtgatcgacacgcgcaaggtggacgccctcgtcgtggagacgttcgggcggaggatcgccaagctcctgcaggagaagttcatgcagctgtgcgtgcagatcgacgacacgggcggcgcggcggagcagcagcagctgctgctgcagcacctgcacccgatcgacgaggagggcccgactacgacggagagcggcggcgggacgacggcgagctcgcgggcgacgctgagcggcaacaggttcaaggaccgcacgtccatcgaggacttcgagatcatcaagcccatcagccgcggcgccttcggccgcgtgttcctggccaagaagagggtgaccggcgacctgttcgccatcaaggtgctccggaaggcggacatgatccggaagaacgcggtggagagcatcctggcggagcgcgacatcctcatctccgcgcgcaaccccttcgtggtccgcttcttctactccttcacgtgcagggagaacctgtacctggtcatggagtacctcaacgggggagacctctactccctgctcaggaacctcggctgcctcgacgaggacatggccaggacatacatcgccgagctcctgcaatggaagcaggttcttgcgctggagtacctgcactccatgaacgtgatccaccgcgacctgaagcctgacaacctgttgatctctcgcgacggccacatcaagctgaccgatttcgggctctccaaagtgggcctgatcaacagcacggacgacctgtcgggcccggacgtgagctgcgccctcgtcggcgagcaccagccggcggacgcggagcagcgggagcagaagcggcggcagcggcagaagcaggcggcggtgggcacgccggactacctggcgccggagatcctgctgggcatggcccacggttcgtcttcctcgctcgtcgcctgctgcatcttgaacgacggcccgactgcggattggtggtcggttggcgtcatcctgttcgagctgctggtggggattcctcccttcaacgctgagcacccgcagataatattcgacaacataatgaaccgagagataccctggccacatgtgccagaggagctgagctctgaagcctacgatttgatcgacaggttgctgatggagaacccggtgcagagattgggcgcgacaggtgccggagaggtgaaggctcatccgttcttcaaggacatcaactgggacatgcttgccaggcagaaggtcgcgttcatcccttccacagacgacgagtacgacacgagctacttcgcctgccgccacgcctggagcggcgccggcgagcatggcggcgcggccggcagcgactacgacgaccggagcgaggccagcagcatgagctgcggcagcagtccgcgcagtgactacgaggaagatgtgggtggcgtgacctgcatcatccatccccgatag

SEQ ID NO: 15539 - DNA, 537 bp, Zea mays
  Peptide Sequence Number=SeqID_57318
atggcacaggggctggcgccgaggaggggcgaccaagacgtcgcaagggccctagccgagccgccggccagccgccgcaccgagggaacgagggggggagatagggggcacagggagacgggagagaagggagaggggctgcgagaacacgacgaaaaacgaagaagaaaaacgaagaacaatgggggttgctcaccggagaaggaaacctcgccggagctgagaagaaaaccgtcgattgacgtcaaatcagagatcggatcgacgaatcgaaatcaccaagatgaagccctcaacgagacgaacgcagtggtactcttggatttcgccaatgacgcacggattgaaagtaattgctcgctggagttgtcgtcggagttggaactgctcagaacttcgggtgttataaggctcatgcgtgtcctcctactgccccactcctttcctaacagcagtcatcggccccgcaagggtggccacaggggcagtggctctaccggtggtggccccaccgagcgtggtgatggctcggcgtga

SEQ ID NO: 15540 - DNA, 486 bp, Zea mays
  Peptide Sequence Number=SeqID_57319
atggcgcctcctgttgacgtggccggtccgcgccctaggttgggcgatgtggaggctcctccgaggtcgaggtcgagtctgtcttccgagggcgaggtcgagtctgagcccctgggtcgggcgaggcggagaccgtcggctgaggctagggctgagtccgagccctggggtcgggcgaagcggagttcgtcgtcttccggggctgagcccgtgttcgagccctgggtcgggcggagcggagttcgccgtcttccggggcttagcccgagtctgagccctgggtcgggcggagcggagttcgccatcttccggggcttagcccgagccgagccctgggtcgggcgaagcggagtttcctatggccggtcagtggagcggcgaagtgactgcggtcacttcggctctgtcgactggaggacgtgcgtcagaataaaggaccttcggcgacgaagcatggtcccaacagtagccccttcacggtgctag

SEQ ID NO: 15541 - DNA, 1461 bp, Zea mays
  Peptide Sequence Number=SeqID_57320
atgcagggcgccagccacatgctcctggaggagcccttccgcctcgcctccgtcctctcccccgccaagcctaaagtattcccatcactcaccaagatagttgggacgctcgggcccaattcacactcggttgagattattcaggaatgcctcactgctggaatgtcagttgcacggtttgatttctcatggatggatgctgcgtatcaccaggagacccttgataatttgaggaaagcggcacagaatgtgaagaagttgtgccctgctagagttgaaacccaacaaaaaccacaagtcaaggttcaggtaatgttggatactcttggtccagaaattcaggttcacaattccactggtgagccaattgagttgaaagctgggaatcatgttatcataactccagatatttgtaaagctctctctgctgagatcctaccaattaagtttggtgatcttgcaaaagctgtgaagaagggtgatactctttttatgggccaatatctcttcacaggaagtgaaacaacatctgtctggctagaagttgtggaaacttctggggaaaatgtaaattgtctagtgaagaatgcagctacacttgacggccccatattcactctgcatgcttcacaagttcacatcaatttgcccactttgagtgaatatgataaacatgtcatttcaacttggggttcatgtaacagtgttgacattatatcactttcccatacccgctctgctgaagatgtcagggagctcagggcctttttacaagcacacgcccttcccgacacacaaatatacgcgaagattgaaaattcagagggtttggatcattttgatgacattctcaacgcggcagatggtatcattatttctcgaggagacctgggtattgaccttcctccagaaaacgttttcatgttccaaaagacagctattcataaatgcaatttggagggtaaacctgtgatcatcactagagttgtggacagcatgattgacaatctacgccctacccgtgcagaggcaactgatgttgcaaatgctgtcctagatggcactgatggcattttgcttggtgcggagacacttcgagggctttatcctgttgatgcagttggttctgcaatcaaagtaaaagctgctgccattgttgtgttcacattctcagggagagctgcgaggttagttgccaagtataggccaacaatgccaattttagcagttatcttcccacgtgaaggatccgatccatcaaagtggcgttcttatggcacaacacaggcaagacaatgtttcgcagtgagaggcgtgtaccctttgatggggagtactgatgaggccgaaactggtgggctaacaaaggaagagtatgggataaaacttgcgatgagctatggtcggtcggttggcatagtgaagtcttttcgacaggttgatatctttgaaagattgtga

SEQ ID NO: 15542 - DNA, 366 bp, Zea mays
  Peptide Sequence Number=SeqID_57321
atgggcaaaggcaagagaggtcacggctcgccccgccatgctggcaacaagcggaagcgcgatccaagtcctccctcggaggactttggcgactctaagtactcggaggaggaggtttcctccgagttcgaagggtcgctagccctcgcctctcccccggcgtcgtctgatgactcggacaactcccaggggatagctacggaggagcggagcgatgacgacagcgacgatgagggcgacatcgacgacggtggcagggaaggaggtgacgacgacggcggcaggggcggtgaaggcgacgtcggcggcaaaggcggcagtggcagcggtggcggtaaggccagtggcaaggcgccactggtttaa

SEQ ID NO: 15543 - DNA, 255 bp, Zea mays
  Peptide Sequence Number=SeqID_57322
atggagatcaacggcgcagagcttatcccctacctccgacggaactttggtgacgacagagagtgccgcggcgggccaccatggtcggagtgcccacagcgctccatggttcacggcacaagtgctacgatcctcgacggcttcccggacacggttcgtgcacctggaattttggcgaagacgataatggtgctggcggccgattcccagccgcagttcaagcctgagccacctgcaattgccgcgatttgctag

SEQ ID NO: 15544 - DNA, 255 bp, Zea mays
  Peptide Sequence Number=SeqID_57323
atggagatcaacggcgcagagcttatcccctacctccgacggaactttggtgacgacagagagtgccgcggcgggccaccatggtcggagtgcccacagcgctccatggttcacggcacaagtgctacgatcctcgacggcttcccggacacggttcgtgcacctggaattttggcgaagacgataatggtgctggcggtcgattcccagccgcagttcaagcctgagccacctgcacttgccgcgatttgctag

SEQ ID NO: 15545 - DNA, 477 bp, Zea mays
  Peptide Sequence Number=SeqID_57324
atggaatcaccacccctcacagctgaagcaattgcttttaccgagaaaaagatggacatgactttggaggatataatcaagatgtcaaagaaaaagaatcctggaggcaagaacccccctaggcagccgatcaaaaagcgtccattccagaatgccaacactaataaagggaatggcaaggttcaacggtttatggaatctagatcaaccattagacaaggtgttcttgcacagagaaggtcaaatcttggtggaagtcagtttgctgctacaaagcaggctgcaaagaaggctgctgctatgccaatgcgcagcggggctgtctattggaagaagcctagccatgttttcatctcaataaattgttatggacagggtagtgatgctatagcaggacaattgtatgcctccaaggagtacattttgcttctgcctcctattaaagttggctgtatccataacagcattctatcataa

SEQ ID NO: 15546 - DNA, 318 bp, Zea mays
  Peptide Sequence Number=SeqID_57325
atgtgcaagtaccttagtgcagaggagctcttagaagcgatatgcaaccaaagaaaaggccgagaagctcaagtgaagcgattcagtgcagacgaacaggggaagcagacagataactcaagctgtttagtgcagacaggcagctcaagcaggagtcggaattggatgatgaatcggattagggagggagagatcaaaggaggggaagagatagggaggcgggggccggggagggagatgagagggtggtcaggaggattacctggtggtggtggtggccggtggcaattcgtgagggtggcggcgcgcaaccgctga

SEQ ID NO: 15547 - DNA, 207 bp, Zea mays
  Peptide Sequence Number=SeqID_57326
atgagggtacccctaggtgtgcggtcggatacaaaacaccgacaactggctcactcgaaaggagaagtagggaagaagaaggggcgaaaactttgcccggggccacacgccagtcgccccctctatgacatcccatcgtgggccaagcaaatgggaatagtggaagcaggccgacccaagagcgtgatgggcccacacccgagctaa

SEQ ID NO: 15548 - DNA, 663 bp, Zea mays
  Peptide Sequence Number=SeqID_57327
atggcgcttcctgttgacgtggctggcctgtgccctaggttgggcgacgtggaggctcctccgaagtcgaggtcgagtctgtccttcatggccgaggccgagtccgagcccttgggtcgggcgaggcggaggtcgtcggcagaggccagggcggtgtccgagccctggggtcgggtgaagcggagttcgtcgtcttctgggcctgagcccgagtccgagccctgggtcgggcggagccgagttcgccgtcttccgagccttagcccgagtccgagccctgggtcgggcggagcggaattcgccgtcttccgagccttagcccgagtccgagccctgggtcgggcggagcggagttcgccgtcttccggggctgagcccgagtccgagccctgggtcgggcgacgcttcctacggcgcctttggcagggcctggcttcctttgtcgttaaatgctcctgcgactcgctttatgctgatgggggttaccagctgagaattaggcgtcttgagggtacccctaattatggtccccgacaccacccaatcaagttatcgtacctcacgaaagatcaggcctccccctctatcagtaaggaatacatcacattcagggataagtcgagagatgtggagctcaaggatggtgttcgacgactgaggtga

SEQ ID NO: 15549 - DNA, 411 bp, Zea mays
  Peptide Sequence Number=SeqID_57328
atggctgtccgcccgcggctcgccggcgcggcgcgctcgcgcggctgtggcgcggcccggctttggtccccgcccggcgcggcctcccccgcccggcgcgcggcccggcgtggccgcggtgttccggcgcgcgcccggcgtcccgccccggctttccccgcccgcggcgctcgaccccggcccctgcgcggcctcgcccgcccgcgcagccccgatcccggcgtggcctcggcgtgcgcgcggagccccggcgcggcccgtgcacgcacggtacccccggcgagctcgccgcacccgtggctcgcgaccatggcggctcggtcccgctcgccttggcgtgtcccgcccctgcgcagcgcggccccggcccggcgcggctttggctcgcacggccgtggtgcccctgcgtag

SEQ ID NO: 15550 - DNA, 786 bp, Zea mays
  Peptide Sequence Number=SeqID_57329
atggagttcctctccgacgaagcattggccatttttgtgcccatcctcgtgtactgggtgtactcgggcatgtacatggcgcttgggcagtccatggacaggtacaggctgcacccgaggaaggaggaggacagcaagaacctggtgtccaagcgggaagtcgtcaagggcgtcctcttgcagcagctagtgcaggcgggagtggctgccgtcgtgttcacgctcacgggagatagcagcagctcagcggcttcatacgataaagaagcagcacaaggatacttctactacctgacggtggcacggcagttcggggtggccatggtcgttctagacgggtggcaatacgcgtggcacaggtacatgcacctgaacaggttcctttaccggcacatccactcgtggcaccaccgtctcgtcgtgccctacgcgttcggctcgcagtacaaccaccccgtggagggcctgctgctcgacacgctcggcggggcgctggccttcgtcgtctccggcatgtcgccgcgcgcgtccatcttcttcttctcgctctgcaccgccaagggcgtggacgaccactgcggcctctggctgccggccggcaacttgttccatctcttcttctggaacaacacggcgtaccacgacgtgcaccaccagctgcgcggcagcaggttcaatttctcgcagccgttcttcgtgacctgggacaagctcttcggcacgcatatgccgtacgtgctggaggagaggcccggtggtgggctccaagcgcgccccttgtgctga

SEQ ID NO: 15551 - DNA, 141 bp, Zea mays
  Peptide Sequence Number=SeqID_57330
atggacattgcttatgtggaactcattgtgcataacttagagacaactggtcaatccaaggatggaggcaataagagcttcgatgtaccaagtgcacaggagaaggtcaaggaggctgagggtgttggagatgatagataa

SEQ ID NO: 15552 - DNA, 669 bp, Zea mays
  Peptide Sequence Number=SeqID_57331
atgaaaaagcttcggctatggttaaatttttcagcagcacaacagtgcaatggcaatgaatgttgtggtgtgaaggtgaatcgtcaagttgtccgcaacccgctgaacagttactcgcacccactgaacggtggaccactcggcgtgtgggaggtgaatcaccagatcgcgcgtatctaccgcatggtgaacagtatccctgtactgttcacgctggcttgtattcgctcgtgcgtcacgtttggacttttaccttctgtcaagccgaaggtattaatatatattaaagtccatataattactcatgctatttctcatgtttcatatgtttcttctttcattaacacatactgtgatgatgaaggtttttgctttgggatgggctgcacgttagagctggggcccggggctaatgtatggactgagacattgggagtgggaaggccgaaggccgctcaatcgctcaaggctgcaggttgggctcaaaactggattgctaaaacggtattttcccggaacaaaacggtaactgtaaaaacgaacgaaaaatcagttaaaccgttttcgataccgttcccgaatacaatctacctgttttcgttccgaaaccgaaaaatacccgaagtaaatgaaaatggtcggaaaaatggtattcggaacgggacgtga

SEQ ID NO: 15553 - DNA, 270 bp, Zea mays
  Peptide Sequence Number=SeqID_57332
atggaggaggtggtcctcacccgcactgatgcgacaggggaagaggtggaagttgtgtcttatacttggagtaccgtgcagctgtatctaggttgtacatgccctgacggaatgggcccagctactttgaattcgcagtcgcagtcgtgtgctggggaccagtcattcgcacttctgcaagttggcaaggaagagagatctgaacgacaagggagaagacaaacttgcccctaccgatggaaggcagggagacgctacctgcttatataa

SEQ ID NO: 15554 - DNA, 825 bp, Zea mays
  Peptide Sequence Number=SeqID_57333
atggccctaagtggttttcacaatggagacttcaagactgtctgcctgcctgcctgcctgcctgatctgggtacggcggtgcccgccgagtgcaagtccgggctcggccacgacctcgggtacacttttccctcgcccgagctcggcttcggcctcgatatctgcaatggaaagacgtccgacgtcatcgtacgtgatcgggccctcgtccctgaccttgtctcagcagaaatcgggtgtctccaccaagcaaaagtcaacaacaagtacaaaacccatgcttcgggccatgctgtctacgggggctcgactacacctcctcaccgcaccataggaagctccgcttcgcccgacccagggctcggactcgggctcagccccggaagacgacgaactccgctccgcccgacccagggctcggactcgggctcagccctggaagacgacgaactccgctccgcccgacccagggctcggactcgggctcagccccggaagacggtgaactccgctccgcccgacccagggctcggactcgggctcagccccggaagacggcgaactccgctccgcctgacccagggctcggacttgggctcagccccagaagacgacaaactccgctccgcccgaccaagggctcggacttgggctcagccccggaagacgacgaactccgcttcgcccgaccccagggctcggactcagccctggcctcagccgacggtctccgcctcgcccgacccaggggctcggactcgaccacggccacggaagacagactcgacctcgacctcggaggagcctccacatcgcctaacctag

SEQ ID NO: 15555 - DNA, 174 bp, Zea mays
  Peptide Sequence Number=SeqID_57334
atggctgaacctggaatcgttgtcgtgtccaccatgtcagagtcatttgggtccatgtcttggtttttagagcaggcacagcaacaaccattcgttttccctcaatttcagtcgtcgatgccttggtggggattacatgctccgtcacctccacctcagaatccaaaccagtaa

SEQ ID NO: 15556 - DNA, 348 bp, Zea mays
  Peptide Sequence Number=SeqID_57335
atgggggaggctggaggacaggcgctggtgcgagattgggaaagggagcgagaaaacgtggctgttgcagggcatcatggcggggacgaccggctccaagagcagcaaggggaaacgacgaccggctataggaaggggaccgagcacgtctgggaaggatcctgggcgctgcggccatcagcagagaggggaaggggatgggatgccgacctgctgcagaaaaggaccagagagccgccatgggggaggctacagccaggacgagcgccagagagatggctggcgagcagggaaatgcgagagggagatgggcgcgagaggaagggaaactccctagccgagcactag

SEQ ID NO: 15557 - DNA, 150 bp, Zea mays
  Peptide Sequence Number=SeqID_57336
atgggggtgtggagtgccgccgctgggcatgccacgcgcgccgagacgcagccgggagtgggggcgaacggccatgcagggggcgtgcacgctggccgctgcgagggcgcgccgccgaggggagcataccgaattgttgaccacctctaa

SEQ ID NO: 15558 - DNA, 477 bp, Zea mays
  Peptide Sequence Number=SeqID_57337
atggattcaatgcgccttcctgaatcattgtcgtgcacgctgagccaccgctccagacagcccttgtgcaagtttgagagattttgtggggtctcattggaggcttgtcttggaggagaaggggctcatggcaatgtcagaggcgaagtcctcgacgagggcacactgtccggtcgcggatctgagcactggggagaggcgagcgatgcgaggaagcgcgggcggggtgggcgttcgtggcgggtgtgggtggatcgcgagcggggtgcccagagcgcggttgcacgacatctctcaggcaggggttggggcggcatcatgcgacgggggtggtggttctggcgcgggagaggccccgggtggcacctagtgtctgctgtgaggatgggggttgggaagcaggcggaggtggatctcgcggatgtcccacggtcccagagtctcggcgggtattatgggtggatgggtgggcactag

SEQ ID NO: 15559 - DNA, 270 bp, Zea mays
  Peptide Sequence Number=SeqID_57338
atggattcatttgttctaactagaggggctctttatgaagtattcctcagcgaaggggcaaattactggatctacactgtaagggagattttgattgtctggacgcgtctaggctggcctgatgtcatccgaaccatcccagcggtgcaattcgggaaggtcttcatggttatggtggccacccatgcctcctatcctttctatctgctgaggatgagctatgtcctgctgttagctgtcatgcctgtggtttggttgcaagatctctag

SEQ ID NO: 15560 - DNA, 189 bp, Zea mays
  Peptide Sequence Number=SeqID_57339
atggcttgcccagggaatggctggagtgggctggccacggtggccgaagctctggcggcaatggcgggcggaaatacgctcgccggagctaaggaacggtggctggccggtgaggagatatggagccaggaaatctggtctgtctccctgcctaaacccgaggcaaatcccaagttttgtcgtgtctag

SEQ ID NO: 15561 - DNA, 351 bp, Zea mays
  Peptide Sequence Number=SeqID_57340
atgaggagagaggctgacagacagtttgccagtcagactggacagctgacccagagacaagttgaactggtattcaccagagagttcaagagagaaaacccaggttcaactggcccggaggcaggttcaactagttttgaccagagagtttcacagttgaagttaagttcaactcagctgaagtcaaagctcaactcagatgaattcaagtttaactcgggtgaagtcaagttcaacccagctaaagaaaagatcaacttagctaaagtcaagttcaacccagctgaagaaaagctcaactcagctgaagtcaaagctcaactcagccgaagtcaagttcacgtcagctga

SEQ ID NO: 15562 - DNA, 378 bp, Zea mays
  Peptide Sequence Number=SeqID_57341
atgggcaagggtaccaagcgcaagcacgagccgactcctccgtcggatgatttcgacgactcccaggggattgccgcggaggtctggacgtacgtccgggccgtcgagcgctccgggctcgagggctcggatgagtctgagttctcctcggacgaggaggactcggacggcggcgaggacgaagatgacgacgacgacgacggcgacgacgacgacggtggcgacggcgacggtgacggcagcaacggcggcgggggcagcggcggcaagggcagcaccagaggcggcagcagtacgggcagcaccagaggcggcagcagcaagggcagcaccaagggcggcggcggcaagggcagcggcagcaaggccagtggctaa

SEQ ID NO: 15563 - DNA, 134 bp, Zea mays
  Peptide Sequence Number=SeqID_57342
atggcgacccggacaatagacaataagcatacgaacgcggtgcgcaagcctatccggacaaaagtcctcactcaatttgaaggtttttaccctaatcgaagcttgttcacggtcacagtggcgcaaaggctccg

SEQ ID NO: 15564 - DNA, 483 bp, Zea mays
  Peptide Sequence Number=SeqID_57343
atggagggtgtcccagggttgtggcgggcccgtacttatgggggcgagggatcctggtcccatagtcgtgacctattgacgcgcaaccgaatatttctacttatgaaaattcaacaaaagttgttccttatgctcctcgaactcgagttgttcttcagccaacaaggtttcccaagtcggctcaatgatattgctagggagacattagagttatcccttgaatcggccattgagggccaatctgatatgtatatatgcgaagtccacagtggagtcgccaaaaaatgtgttggcgctaatcactgcgatgagaaccagcggcagtgctctctacgggggcgcggacagtccgtgaccattggccggacggtccgtgacctggcgcaggggctggtgttcctgcctaatgagtcggatggtctgcgcctggtggtcggacgatccgcgcgtgcacgggcggtagagttcaccggcagcgcctaa

SEQ ID NO: 15565 - DNA, 1843 bp, Zea mays
  Peptide Sequence Number=SeqID_57344
gtatgttgatgttattcttcagcttatagacaaagctggagattttgtaagtgatgatatatggtatcgagttgtacaatttgtcacgaacaacgaagatctacagtcatatgctgcagctaaggcaagagaatatcttgacaagcctgctttacatgagacaatggtcaaggtgagtgcctaccttcttggggagtatggccatcttttggcccggagacctggctgtagccctaaggaattgtttgctattataaatgataaacttccgacagtatcgacaagtactgtagctattcttctctcaacctatgccaagatattgatccacactcaacctcctgatgttggactgcagcaacaaatcctcacaatatttaaaaagtacgagagctatattgatgttgaaatacaacagagagcagttgagtattttgaactaagcaggaaaggccctgctttggcagatgtgttggctgaaatgccaaaattccctgagcgtgagtctgcacttctgaagaaggctgaagacgctgagattgacacagcagagcaaagtgctataaagctacgcagtcagcaacaaacttccagtgctcttgttgtagctgatcactcccctgcaaatggatctgcaccaccagctaatcatctcactcttgtgaagatgccaagccaaattgtttctgacactcaggagagtggggtaattcatgaagaagttcctaatcctcctgttgaagctcccaaagaaaatgggactcccgtcgaagtggaaagcagggacacaaacattactggaatcaacaatgaggttaaaactgaaccaccctctacatcgcattctacctctcccgcggacctcctggcagatcttttgggtcctcttgcgatagagggccctcctgccgtagagcaaaatcctacccaaggattgaatagtaatcaaagtccagttggtgacttggcacttgctacccttgatgatcaatccaactcagttcagccaattgtcaacgtcgaggaaaagttccatatattgtgcacaaaagatagcggagtgctgtacgaggatcctcacattcagattggtatgaaagcagagtggcgtgcccatcatggccgtcttgttcttttcctgggtaacaaaaatacttcagcccttacgtcagtgcgggtgctgattttgcctcctagtcatttgaaaatggaactttcgtctgttcccgatactattcctccaagggcgcaggtgcaagttccacttgaggttgcaaatctccgtgcaagtagagatgttgcggttttagatctctcatatacttttggaacttcactggtggatggcaaacttcgacttcctgttgtattgaataaatttttgcagcctataactcttacccctgaagaatttttcctccagtggaaagcgctgactgttcacttgctgaaggttcaagaagtggttaaaggtgtgaaaccaatgcctctttctgagatggctaatcttttcatgagccttcacttggcggtcgctcctggacttgataacaacccgaacaatctggttgcatgcacgacattcttttctgaagcaacacgggccatgctttgtctgataagacttgaaacagatccacaagacaggacccaactgcggctgacagttgcctcgggcgatcaacatttgacattcgagttgaaagagttcgtcaaggaacatttgattgatatcccaaggactcaggctgccccacctatggcaatggtccagccacagttgcttactgcagcacctgccacatacaatgaccctggtgccatgcttgctggattgctatga

SEQ ID NO: 15566 - DNA, 6132 bp, Zea mays
  Peptide Sequence Number=SeqID_57345
atgggtaaattcttcagtgtcagggggacaaagggcttctgcgacacatgttatgggactatacttctcatagaatccaaagatgaaagtgcaataaaggttgattttgatgacatactcagctgggagtacctgttcaagctatattggttagatctgaaagggaagctttcattaacattggaagaacttactattgccaagactagatggaatgttcctagcacttctgctaggaaagaaaaagatgagtcgtctgatgacctgtatgacgctaataatgatgatgatgctggtactgactgctcctcaggaaaacgaaggcgaactaattcaaggaaaaagggtcaaaaatgccggaaggtaaataaagattgtagtgttcctgcaaaaaaggtcgagcttccaattacaaatactgagagcgttcccacagaagtgacaaatgaacgagtgccattgccagtagacacaaaagtaccaaatggatgggtacccttgccagtagacacaaaagtaccaaatgaatcagtgcccttgccagcaaacacaaaatgggcatcaccagagctactggagtttgtaggacatatgagagatggcgatcaatctttcatttctcagtttgatgttcagactcttctgcttgattatatcaagaagaataaccttcgcgatcctcagaggaaaagccaaattatttgtgacttgagacttcatcgcttgttcaggaaagcacgggttgctcactttgagatgttaaagcttttggaaatgcattttcttatgaatgagacttcaacagtaactgatagtagacaagtgactatcgatctcaattcagcttatgtagataccaatggatacaatgacatggctgcaaaattttctcctgataagaggagaaagatccatagaaagatggaaagagatacccaagttaatcttgaggactatgcagcaattgacatgcataatataaatttgatttttatgaggcgcagcctgatggaggatttagttgatgatgccaaattctcagacaaaattcatggtggttttgtgaggattaaaatttctgatgtgtatcagaaacaagacatataccgtctagtaaaagttactggaacgcacaaggttccagaaaagtatagcattggaaagaagatgacaaattttgcactcgagatattgaatttaaacaaaaaggagattattacaatggatacaatatctaatcatgattttacagaggaagagtgcaaacgtttaaggcagagcatgaagtgtggcgtgattagcagactaaaagtgggggatatcctagagaaagcaaagatattgcaatctgtaaaagtgaatgattggtttgaaaatgaaaagcagaggcttgggcatcttcgtgaccgtgcaagtgaaactggacgcagaaaggaatatcctattagaccatactatgatgtgcttctcaacgattctgaggaaagaacccgcaggattaatgaagttctggaagtgcatgttgactcacatatggatcctaattatgagtctgctgaagaaacagatgagaaaagaactgttggaaagtcggtagatcggacaagaccagatacaaccatatcacgacgaatatcaagatatcttagcactatgcagaaccatcctcaaaaagtttctgattgtagccaccatccaaaaaacttgtcaacagaaagtacaatatgtggatcaggagcaagaagtttggagaacagcacagcaaacagaactatgtatgaagctggatcattttcatcttctggagtaacaatgtcaaatgacacggagccggagaaagtctggcactacaaggatccttctgggaatgttcagggtccatttactcttttgcaactatcaaagtggacaagttacttcccacgtgatctgagagtatggcttacatttgagagtgaggagagatctttgctgttgactgaagtgctttcaaaacagcagaaagatttcactcaggctgcatcacatacaagcagcaaggcaacgctggttggcactggacatacaaggaacaaccctagtgtggatcagaccaatgctttctcccctgctggtcatagtgtggttagttcttcaggaataactgttcagtataataagtattctgttccagaaagggaaagtgtgtactctccagatgatagcttgtcgctgtcaactagttcggttccgccgaaggatgcttgtactgtgaatagccaaacacactgccagaataagcattctgttttcattcaatctcctggaagtgcatatgggcacacagacttgaaccatgatggaatacagggaggatgctctggtgaatcaaaccaccatcacagcagcggagccctatggagtcctaccgtggtacaggtgagttgtggacatggtaatgtggaatctcatcagagccagcatgtttcctggtcacaaagtcaacatgaatctaaaaatagttcacaacgacctgttaaagatctgaattcaaggcgggatctatcgaaaaacctacctactcaacgtatagggaaagatgtctccagtcctttgtttgcttgtgcttggagtccggccgagtcgaggacagcttcaagtcaacatgacggctcttgcttaagttcaacaactaatccaaactttctcgatgaacttcattattctattgcttccgcaaagcctaagagctgcgctccagcaacccctattgaagacagaggttctagttcaccatcaggcatgctgagtcatgcagaaagagttccaatctgcagtccacaatcaacccctttggcatctgctttcgatatgtgcaagatggaggagatcatgaatcagcaaagaacactggagccggatacatcaaatgcttcaattaaccagtctcccgaatcaaagattttccctgtatcctctcctgataaccatgatattgaccgtgagtttcctagtccagttccaagatctgagaataaggacattgcggttgacagctcaggattaacaccagcatcacctgaaaatattactacgaatttgcctggttcagatacatgcaagatggaggtcatgagtcagcaacaagtaactgaggctgtcgtatcgaattcttcagataatcattcccctcaatctaaggtttcccctgtatcatctcctaataacgaagatatgaaacatcagtaccccagttcaacccgaaggtctgagaataagattcctgctgtggacaatttactttcaacatcagctgctcgtgaaaatctaacgacaacttctgcccatgattctgatacatgcaaaatggtggagttagtgaatcagccaaaaacacctgaagtggatgcatcaaatgctccactttgtcaatctcctcattctcacacttcccaggtaccttctgacaatcaagatattgaacgtgaatgtccaggtccaactccaagatctgacagtaaagaacctcttgtaaacaactcagcgacaacttctgcatcagcctctgatacaatcaaaatggaggagtttgtgaatcagcaaaaaacagttgaagcagatgcatcaaatgctccacttaatcaatctcattctcacatttttccagtaccttctgacagtcaagatattgagcatgaatgtccaggtccaactccaagatctgacactaaggaacctcttctgaacaactcagtgttaacattagcagcgtctgaaattctaacaacaacctctgcggcctctgatacatgcaaaatggaggactcagtgaatcagcaaaaaacgcttgaagcagatgcattgaatgctccacttaatcatcatcctcattctcacgttcttcctgtatcatttgataatcaagacattcagcatgaatatcctagcccaactccaaaatctgacagtaaggaacctcttgtggacaactcagtattaacatcagtagggcctgaaatgctagcgacaacttctgtctctgatacatgcaaaacggaggagtttgtgaatcagcaaaaagcagttgaagcagatgcatcaaacgcttcacttaatcagcctcacatttccgctgtaccttccgataaacaagatattgaatgtgaatgttctagcccaactccaaggtctgactgtaaggaacctcttatggacaactcagtattaacatcagcggtgcctgaaattctagcaacatcttctgcttctgataaatgcaaaatggaggagtttgtgaatcagcaaagaccaattgaagtggatgcatcaaatgcttcacttaatcagtattctcgttgtcacattttcaatgtatcttctgataatcaatatgttgagcgtgaatgttctagcacaactccaagatctgactgtgaggaacctcttatggacaactcaatattaacatcagcggtgcctgaaatactagcaacatcttctgcttctgcttctgataaatgcaaaatggaggagtttgtgaatcagcaaagaccaattgaagcggatgcatcaaatgcttcgcttaatcagcctcatcgttgtcacattttcactgtatcttctgataatcaagatattgagtgtgaatgtcctagcccaacttcaagatctgacagtaaggaatcccttgtggacaacttagtgttaacatcagcagtgcctgaaaatctaccgacaagttttgcagttgcctctgattcatgcaagatggagatcttgaataagaaaagaacacttgaagcagatgcatcaaatgcttcacttgatcagccttctcactctagcgttttcacttcatcttctaatgataatcaaggaaatgcgtgtgaacgtcctagtccaaatccaagacctgagggtgagcagcctctcatggataactcagggttaacatcaccagtgcctcaaaatctaacttctgcttccgacatatgcaagatgggggagatcttgaatgagaacaggacacttgaagcaaacccatcaaatggttcaattactcaatctcatcaatccaaggttttccttgtaccatctattgatatcctagagcgtgaatgttccagtgaaacgcctaggcctcagtttaaggaacctgttgtggacagctctgggttaacatcagcagcacctgaaagtttaacagctaagcaacatgtccactcaccagatgcctttataccaccaaagcatggtgctccaactggggaattaggtgatgcaaaatcagattttaaaggtgaagaaattattcaaaaagaacaatattgtgaaagagaacctattgttgctacaagagagaatttgctaattgatctttcctgtggtgccgagtcgatagatgtgtcagatgtattggaatctttaatggaagaaaggagtgtaacttcgtacgtgccagtatcaatagaggacttcctagccgcttcagcagtggaagaaccacaatactctagccctatagcgttatctccttggggtgaacctagttactaccaaggtgatgctggtgattctgcgctatggggtattcaagattcgatcaatgatatgtggtcattgctttcaccaagacctatgctccaagcttcatctggtattggaactgaggggaaggaaacttttgatatcaacgaggtggctgtgacccatgttaatagtgattttttccaaagaggatcgatgcttggggaggaaaatatgaatcaggcaaacttgagtgttgctgcagataggatgctgctgcctgagcaggtcccatcaataccaaatggtatgtcaacatcatcagtagacgagggcaccagagttataggttctcaagcatcaatcaatcagagcttagactggggtactacatggaggactagtcagaatctcagcgtgtatagcaatgaaatagcagggccctcgagtaaaagctattgggaagaatcaaggaagcaggaagccaccaattcgggcgtttctatttcaggggaagccattagaaacaagcgcttgaaccctcctgataatgctattcggggcagccatcatcaccgtggcagtttgtataggctaattaaaattaagtcaacagagcgtaaatga

SEQ ID NO: 15567 - DNA, 2040 bp, Zea mays
  Peptide Sequence Number=SeqID_57346
atggcgaccacgttgacgcccacgcagcgctatgcggcggggacgctcctggcgctggcgctccgccaggcgcagatccaccagtccgagcccctcggctccggccccgacgacgaggagcgcgccagcagcgccagcgggagctcctcctccaccatatccagcaccggctccgacactacctcgggcgccggcctctggacgcacgattcccgcggcctcctccgccccgtcttcaggttcctgggagatcgagcccaaggcatgggcggggatggaggagacggccgcgtcgccggacgccgccaagcatcacatcggtgcggtacggcccttccatccctcccacccgatcgtgttatatgtgttcacctactttcacagcagttgggtgagggactggattcgaagtatcccatagtctcatttcactccttggtttcgcagtttataagcatactctttgaggaagacggcgagagctcttcagacaggctagagcaggagatcgcattggcgaaagcagttgatgtgatggtcatgagcttgggcagcgacactgcaccagatgagaatatcaaagacgagtttaaatactccacggcctgtacctatgcgaccttggagtctacggaggcaggctcatccgagaacttgcttggaatcgtcaagctgtccttggaaaatgttcctgtgaatgagcaccgcaagatggtgttgctgtatgcgcttctctctgcatgtatcgctgataagcctgtatcgcaagaggaagaggacaggaagtcgtctcacttcaggaagggctatgatgctcggcatcgtgttgctcttcggttgatagcagcatggcttgacgtcaagtggatcaaaatggaagctatggaggtgatggtcgcatgctctgccatggctgcggcaaaagaacaagaacaagagcgtgaaaatgcatcaccaagaagcaagtgggagaaatggaagcgtgggggaattattggtgccgctgccttgactggtggagcgttgctggctattactgggggtttagctgcaccagccattgctgcaggatttggtgctctagctccaacactgggcacacttgtccctttcataggggctagtggatttgctgctatggctgctgcggcaggatctgttgctggctctgtggcagttgctgcctcatttggagctgctggggctggcttgacgggtaccaaaatggcaagacgaattggtaaagtgaaagaatttgagttcaaacctattggtgataaccataatcagggtcgccttgctgttggcatcttggtttctggatttgcttttgatgaggaggatttctggaaaccttgggaaggatggaaggataacctagagaagtatggaatgtacatccttcaatgggagtccaagcacataattgcagtgagtacagcaatacaggattggctgacatcaaggcttgcaatggaattgatgaaacaaggtgctatgagaactgtcttaagtggccttcttgcagcatttgcttggcctgctacgttgcttgccgctacagattttattgatagtaaatggtctgttgctatcgacagtgtacctaacagcttgtttagcgaactgatgaactgtatcctctcagatcagataaggcaggaaaaatgcttgcagaagtgcttcttaagggactgcaaggaaacagagggacttgtcgagagggttgtactccttggtgcacccgtttcagtgaaaggtgagaggtgggagcctgccaggaagatggttgcagggagatttgtgaatgtgtactcgagagatgactggattctcggtgtaaccttccgagcaagcctgcttacccaaggactggctggcatccaggccattgatgtgcctggtgttgagaacgtggatgttaccgggcttgttgatggccattcttcgtacctgtcagctgcccagcagatcctggagcaccttgaactgaatacctactatcctgtttttgttccccttccggaggtcaacaaataa

SEQ ID NO: 15568 - DNA, 462 bp, Zea mays
  Peptide Sequence Number=SeqID_57347
atggcgatgccgagggcgccgggcgcggggtcgctccgcttcctgggcctgctgaagcagccggagtccgacgccgccgccccattcgagctcgacgagcgcgacgtgttgtggcccgacgggcggggggcagcaggacgcttcgggctgtcgtcgctgctcgccgaagactgcggcggtggggtgcccgtgcccgtgccggggagggcgatggcgatggcgccgagcgccgcgccgaggcagtcggcgccggtgcgcgtgccggcgccgtggccaggcggcaggagggccgacgaggacgaggaggacggcgaggaggtggtgccgccgcacgtggtcgcggcgcggcgccacgcgcggtcgtcgtccgtgctggagggcgccgggcgcacgctcaagggccgcgacctccgcagcgtccgcaacgccgtgctccggcagaccgggttcttggacctgtga

SEQ ID NO: 15569 - DNA, 207 bp, Zea mays
  Peptide Sequence Number=SeqID_57348
atggcgacaaacttggtctcattaatcctttctccagcaagtcctgcaattgcgtcttcagttctgccaattcattgggtggtatacggtatgcaatgcttctcaacaaaagctttgctcatgaaagggcttagtgttggcctctgcctccttgctgatgaatttgatttccagccatttctcgaagaaactgagtattatcagtag

SEQ ID NO: 15570 - DNA, 378 bp, Zea mays
  Peptide Sequence Number=SeqID_57349
atggctagtataggccaagtgtttgatctaagaataggaaggaatctagatgcaggggatctggaggctagggttgaacgtctaacgatggaactgcaccatggaagcagggagcatgcgagtgatatacgtcgtgttgctgagtttccagcagaggttgaccatttgcagtgggagattgcggagctgttgcatccaagcgtgccaccagatattgcggcgatgggagctagaacatcaggagcagctggcagaggaccttatggggagttggatctctttggagcccctccttctatgaacatcgcggatgatcgttctcccaaaacaagcagtggagcgggagcagccatggacgcggataacttgattagatag

SEQ ID NO: 15571 - DNA, 150 bp, Zea mays
  Peptide Sequence Number=SeqID_57350
atggccgaagatgaccttcgagtgaagcagcttgctaagaagcttcaacagaacataagagctgcgaaggagcaggtcctcaagacaaagatattgtctgaaagcgacaatgacgaatgccgaagctacagccgaagaacgacagtgtaa

SEQ ID NO: 15572 - DNA, 624 bp, Zea mays
  Peptide Sequence Number=SeqID_57351
atgcgccacaaccgcggccgagccgagccccagccccacctcgacgccatggccacgaccgcacgcaacgcgcaaggacccgacgtccgtttcttcaccgacatagagttctccctcccctacccgagctctacttcctccccaagctccctctctctcccactcgcccacgtcggagtccgtggagcctcgccggagtcgacgccatcacgctcggaattcgcccacgtcgtcgcagtccgcctcgccgtcggtggagactcaccggagcagcgccctgctcgccgtcgtgcctcgctgtcgtgcctcgtcggagacgtgtccgaacccgtcaaacctcgtcgttccctgaccattgaaccctccctgctcgtcgacattcatccgtgcaggaacgaaaacacaagacctgccatcctcgcgcctagggagctgactggtgggccgctcccgtcagctctatcccctctcaacaacttcaccggcatgctcggcggaaagatcaccggccgactcggcgccgaaccacgcgggtccctcaaagtcagcctcacaactactcgactgagcatgtgcgccgtggcttcgcggtggggccctcaggtcggaattgtcctcatctag

SEQ ID NO: 15573 - DNA, 213 bp, Zea mays
  Peptide Sequence Number=SeqID_57352
atgtcgcgcgcgttcgatgactactatatcaaggattgtggtgtcatctcggcgctggaggtgacgcagaggatgaccgataataatgaccactcgccattgtcagggggacttaagctgtttcctgagtacctctccgtaaggacctgttcgttgagtgaccacccggataatagtacaaccttgagggtggaatgggatgcccttagctga

SEQ ID NO: 15574 - DNA, 240 bp, Zea mays
  Peptide Sequence Number=SeqID_57353
atgacagagtggcctgctcctaccaacatatctgggtcaaatgaagcaggagatcacattttgtgggatggtacacacatcagtatgatgaatccatacacccatgagaaggtgaccgttggcgctgcaggcgtttacaccggacagtctggacgtcacaccggacagtctggtggcttatctccaccagtgctacctggaattagccattgggctactgttcctgagtgcaccagatag

SEQ ID NO: 15575 - DNA, 420 bp, Zea mays
  Peptide Sequence Number=SeqID_57354
atggagctaaccatagtaacccaaaaggtaatcaaggacaagaggaccggcaagcaagggatcttgtcagggcctggccgccgcgctgggcatgcgcaaggctgtcgcgctgcccgcacccagaacaaggaggtcgcaggcacagggccatggccggaccacggccaaccggcttcgctgcgcagggacgcgctcacgtcgggagagggcacacgaggggagggacggaggtgccgcgcctgctggtggcctggcctatccgcgcaggggattgggtgcggtgccgcgccgccgcacgcaaggaagcagacgatgggacgagggaaccgcggctatggcccctcggcacgcatgccgggaatggagtggcacgacgaatcggctacccccaacgaggaagaaggcaaaatcgaaggttag

SEQ ID NO: 15576 - DNA, 945 bp, Zea mays
  Peptide Sequence Number=SeqID_57355
atgaacgcgcgcaacactccagtaagtttgtgcgtcctgacgacatgtcatttgagcgtacacgtggcctacgaccaggcggcgtaccgtcgccgcggggacgcggcgcggctcaacttccctgacgacgcggcgtccagggcgacgctcgaccccgtcgtcaacgccaagctcgaggccatcagtgccaccatcgccaccgccgccgcgtcgtcgtccaagaatgccgccagggccaagagcaaggccgtgccaatcaacgcacccatcctggaagcggtggcgtctccgagcagcagctcctcctccgacgaaggctccgggtcagacgacgagatgtccatgtcctcgccctccccgacgccggtggtggcagaattggggcagcttgacttcggcgaggtgccgtgggacgaggccgagaacttcgtcgattggccgccatgcccggccgtcgcagatgaggcgtctcttatctctttgtaccggcagaaatgccggtggttgaagggtggctgttcatatgatggacgtcctaggaggcgttcacagccgtggtgttctgccgccccgcatcccgccagcggccgcacctcgccccgcatcccgcccgcggccgcctcccgcccgcggccttccttcaacggcgcaccaatcaacgcccgcgaccaccaatcaaccccgcgccccaccctcgaccttccttcaacgggacatcccgtccgcggccacatccaccccacggccttccatcaatgccgcatcttgcccgcacatgcccgccaaaatcttctttgcggtcatataaggttagagatcctgcacatgggagcgacgaggaccgcccccgcccactcctccggccgtgtgcggaggtggatgagcaggcagatggccttgcccatgcactaccccaataggaagcagggcgagggcccagcatga

SEQ ID NO: 15577 - DNA, 552 bp, Zea mays
  Peptide Sequence Number=SeqID_57356
atggatttgaatagcaaggggattccttccccattctatatcatttgtatagccttgtgttcacagtactgtgattgtcatagccttgtgttcattatttcttctgaatttgagtttcaggacaaagaacatcaacatgtggaggaagttgaccagaagtcaagcagcaagcatgttgagatcagtgcacatgatatgaattcgagcaggaaccctgtcaaagccatcatgcaggaaatgatcaacatttgtttggataataaagatatggaggcctctgatggaagcaagctcggcatcaatggtccaggtatcatcctcagcaagcataatgatgagtgcggtggtggtgcccaagaggctgaatcgatggagaacacgccgacgacacagctgatgatgcatcaagaccaactctgtagcaatttctgcatcctgcatatcatccaccattgtgaacaaatgcttggcattaccactgacataactcctgacctaataaatcatgcaggtcttatagttagcaggctgaatgtccccaaggaattgtag

SEQ ID NO: 15578 - DNA, 363 bp, Zea mays
  Peptide Sequence Number=SeqID_57357
atggtgattccagacgattacgttgagaagaaggctttgtcccttggacttgagaaactattcttgcttaccacaaggacagcggattggtttgttcgtcgcggctttaaggagtgctcgttcgattccctgcctttggtgaggagaaaacgtatcgacctctcgcgcgggtcaaaatattacatgaagtggctccaggcagcagaggtggaggaatatcttgaggaggaagacatcaagcatgagttttccgctccctacactccacaacaaaatggtgtaatggagagaatgaaccggacgctcattgatatggcaaaaacactgttcagagaatgcaagacgtcagagcagttttggtag

SEQ ID NO: 15579 - DNA, 1665 bp, Zea mays
  Peptide Sequence Number=SeqID_57358
atggaagaagatgtaatgaccattggctgccaggatatatcccttcttcatggtctcgggatcaaatttgttcttgttcctggaacacatgtccagattgataagctcttggctgagagagggaagaaggctaagtatgctggtcgctaccgcattactgattcagattcattagatgctgcaatggaggcagctggccgaatacggctaactatagaagcgaagctgtctcctggaccaccaatgttaaatctccgtaggcatggtgttaatggccgttggcatgaaatctctgataatgttgcaagtggaaatttccttggtgctaagaggcgaggggttgttggtggcattgattatggattcaccggtgaagttaaaaaaatagatgtttcacggataagagaaaggcttgatagagacagcatagttgttgtgagcaacatggggtactccagcgcaggagaggtcttgaattgcaatacctatgaagttgctacagcatgtgctttatccatagaggcggacaagcttatttgcattgttgatggccaaatatttgatgagcatggtagagtcaatcgttttatgtctattgaagaagcagatatgttgatcagaacacgtgctaagcagagtgaaattgctgcaaattatgtgaaggttgttgatgaggaggacatcaatcatgtccgctgcctcccaatgaaacatggtacagaacatggtatgaatggaagggaccatattaatgggtatactgcatcttttcggaatggtgtgggtttcaatgatggaaatggtctgtctggtgagcaagggtttgctattggcggggaggagcgcttgagcaggtcaaatggttacctatcagagttagcagcggcagcatacgtatgccatggtggtgtccaaagagtgcatatcatagatggtactgttggtggagcattgttgctagaactattcactagagatggtgttggaacgatgatagctagggatatgtatgaaggaacaagaatggccagagaggaagatctttctggtattagaaagatcattcgtcctctagaagaatctggtgtcctgcttcttgaagcattgacatcatttattgtcgtggaaagagatggctcaatcatagcgtgtgctgccctcttcccttttcttgaggataaatctggggaagttgctgctattgctgtatctgaagaatgtcgaggccaaggtcaaggagacaaattacttgtcacaacgggagcaccgcaaacgatgagactagagcagaagccgacggttggaatccccccgcagtcgcagcgtcgtgagagtgcgagtgttgtgtcgttggggagccccgttagggagactgacggcaacgcgcgcgtctgcgctggtcagggtggccacacccgcggcagagtagaagaggtaaagacggatccggccaggaaggccacgacaacgacgaatccagaggtcgcaacaacggtgaatccggccgggaaggccgcgacagcgccaaatccaatgaaggtgacgaagaagggggaaaggcgatggggcggttctagccggacaggggcctgcgtcgagcctggcagggggtttgacggcgaggacaagagatgcttaaaggtgggatgtcacacctggttttag

SEQ ID NO: 15580 - DNA, 696 bp, Zea mays
  Peptide Sequence Number=SeqID_57359
atggcggcagggctgccgctcaagatggtcggcttctgcgtcgtctgggcgctcttctggctcgccggctccgccaccgtgagcacgagcaccaccgccttcgccggcggcgaggcggtggtcgtggactcgcggtccgtcgtcgccgtcaccgacgacgacttcgtctgcgccacattggactggtggccgccggagaaaaggaaaacggggcctgccacctacagagcctcgtcgggtctcgtcacccttcggtcgaccgctgactgtgacgccgaagctgtcccggtctccggactgcggtgcaagggaggcggctctgcggagaccacggtggcggtgttggactcagccggggatggagcgcatcacgggcggtggcggtggcggttgcgataccaagtcgagatcgaaagtaaatcgagggtgatgtcgaggcgggatggagagaaaaccgacggacggaggaggttcgaggggaagtgtgggcaacagaacgaacggtccagattgatgggaggcagaacggtgggaaggcagaaccagaggaggcagactactcttaggttgttaataagtagtagagatttcatagataactataatatagaacagagaaaacatagaagacaagaaagtgggaagtcatgtggcaaactccaaactggcaattcaaaggataataatattgtttaa

SEQ ID NO: 15581 - DNA, 1893 bp, Zea mays
  Peptide Sequence Number=SeqID_57360
atgggacgggagaagataagcagcttgcagctttatctggtggttgtcgggggagctgctgcgttccttagcgatgtacgcgggtccaccggaaccagaagtgggcttcgagtgccagtccgacgggaccgcggcccaaaagtccctgcgcgttacggtgctgggagggaggttgttggtgggcatcaaactcgtgcagttggattggggatctcgcgagtcatggagtgcggtcggctcgtcgacaaggaggcgaatgcgagcacctcaaaacgcgtccgagggtgggacaatactgcatggttggtggatggtagccgtctaggagtgggcaggtcaggtcaacaaaaggcaggacgcaaggactggagagtggagacggaggccgccgggggccggcgcgactcggcggctgaacctcatataaattgtgtgattaatagtaccttctcagcctttgtaggtatttatctgagggaagaagaaactatacaattcatcatgtcaggagggtcgtctgaatcttccccgttatctggacaaaatagccttagttctctatcaatttccaaggacaatgaactatcttcagagtctggctgcttgtccattgttgtactaggcgcttctggagaccttgctaagaagaaaactttcccagcgctctttcaccttttccagcagggatttctgcaatctggagaagtccatatatttgggtacgcaagatcaaatctttctgatgatggattaagagaacgcattcgtggatacctcaagggagcttcagatgaacatctttctcagtttttgcagttagtaaaatatgttagtggctcctatgatagggtggaaggatttgagttattaaataaggcaatctctgagtatgaaacttcaaaaaacaatgactcgggaagctaccgcagattattttatttggcattgcctccatcagtctacccatcagtatgcaaaatgataagatcatattgcatgagtccatcttcacacaccggttggacaagggttattgttgaaaagccctttggaaaggatttgaacactgcagaggaactgagtgctgaacttgggcagctgtttcaagaagaacaactctatagaattgaccactatttaggaaaagagcttgtccaaaacctgcttgtgcttcgttttgcaaaccgcttatttttgcctctctggaaccgtgataacatagctaacgtacagatcgtatttaaggaggactttggaactgaaggacgtggaggatattttgatcaatatggtatcattcgtgatatcattcagaaccacttgttgcaggtcttctgtttggtggctatggaaaagcctgtctctcttaaacccgagcacattagagatgaaaaagtcaaggttctgcaatcggtggagcctataaagcatgaagaggtagtcatcggacaatatgatggctacaaggatgaccctactgtgccagatgactccaacacccctacttttgcatctgttgtactgagggtacacaacgaaagatgggagggggttccattcatcctcaaggctggcaaagcactaaattcgaggaaagcagagatacgtgtacagttcaaggatgctcctggtgacatttttagatgcaagaaacaaggcaggaatgagtttgtcatacgcctgcagccatcagaagccatgtacatgaaactaacggccgcatgggaaatcttcactcctttgcttcacgacatcgatggtggcaagctcaggtccgttccgtacaagccgggaacccgaggaccgcaggaagccgacgagttgagcaggaggatggggtatgtgcagacccatgggtatgtatgggttccgccgaccctttctaaggtttag

SEQ ID NO: 15582 - DNA, 192 bp, Zea mays
  Peptide Sequence Number=SeqID_57361
atggcctcaatgacaatttcattgggcactgttggcgcttgtgccctcaggcgtatcttcggactcgtatcagagagggagaagctcaaaaagatacgaaagttgacacagcgccgaagctgtgaagcaggaaaagctttcggcatgttcgcagaaaagggaaccgacttgaagatgaaaaggcccatttag

SEQ ID NO: 15583 - DNA, 1248 bp, Zea mays
  Peptide Sequence Number=SeqID_57362
atgggtaatgccgtcattcctgcaatctggttgtgtttctggattttgatcgttggtgattacttttttactgattgttttttttttggcttggttgcttgtgtttgtgctctggtatatgcagccaagatcaagatcgggatcaatgggttcggcaggatcggaaggctggtggccagggtggctctgcagagtgacgatgtcgagctcgtcgccgtgaacgaccccttcatcagcaccgactacatggccatctgtttatttcttagggaatcctatgttaatgttgttaaggttcagtcaaatctcatgatgtggattagattctatttcattgctgttgatgttatagtgtatgatgaaacctacatgttcaagtacgacactgtacacggacagtggaagcaccatgaagtcaaggtgaaggactccaaaacccttctctttggtgagaaggaggttgctgtgtttggctgcaggaaccctgaggagatcccgtggggttcggttggtgctgaatatgttgttgagtctactggtgttttcactgaccaggagaaggctgcagctcacttgaagggtggtgccaagaaggttgtcatctctgctcctagcaaggatgcccccatgtttgtcgttggtgtcaacgagaaggagtacaagtctgacattaacattgtctccaatgctagctgcacaaccaactgccttgctcctcttgctaaggtcatcaatgacaagttcggtatcgttgagggtctgatgaccactgtccatgccatcactgctacccagaagactgttgatgggccctcatctaaggactggaggggtggaagggctgctagtttcaacatcattcccagcagcactggagctgctaaggctgttggcaaagtgcttcctgtccttaacggaaagttgactggaatgtctttccgtgtcccaaccgtcgatgtttctgttgttgatttgactgttaggcttgaaaagtcagcaacctatgatgagatcaaggctgcggtcaaggccgaggcagaaggtagcctcaagggcatcctgggttacgttgaggaggaccttgtttccaccgatttccagggtgacagcaggtctagcatctttgatgctaaggctggcattgccttgaacggcaacttcgtgaagctcgtgtcctggtacgacaacgagtggggatacagcacccgcgtggtcgacctgatccgccacatgaacagcaccaactaa

SEQ ID NO: 15584 - DNA, 675 bp, Zea mays
  Peptide Sequence Number=SeqID_57363
atgagggatgaagaagtggaggacctcgccggcctagagagttcgatggcaagaaagaacgctgaggtggagacgagtgcggaagagcagtcttcgctcaaggaaggcgacgctgaggaccctacgacaatggggacatctgtgcaggttccagtgtctggaccttcgcaagcaaactttgatgataacgagaatgatgaatcgttaatgtgtcgaagtgtgatagttcttagtagtgatgaatctgatgatgaatacgatgttgagtcatggccttcggagggtgaggggttgagaccgtttactgagatggacgacgagtcttcggaagatgatctagattattttgtggcgctagatttgtctttcgctgagtctccgtcaaggtttgctcctactgtggttgtggagacatcacctagggttgcctcgagtgagccatggggattggggtgtcaaaatgaagtgtgggaatgcttgggaacccgaggaatcatccttgctctgacggccgggtcatgtttcggagagggggatctgcgggctctttttgacggcgaggagttgagactgatgttgttcaacttccatgaagccagccttatcccgaatgaagagccgataaatatgatatgcccgtttgttggggacttgttctcaaatgctatgaattaa

SEQ ID NO: 15585 - DNA, 573 bp, Zea mays
  Peptide Sequence Number=SeqID_57364
atggaactatgtttgttcagggtgtccgaatgctacgacaaggaggtttcggaacatttcaaggagtctatgatgaggtttttcgaggacgaaaccgagaaggtgaaagggttcacgtcagaatccaccgtcagctacagggaccggctcaagatcatggtcgggctggtcaacccggacgacctccagctgggctctacggagaggaagctcgtccaggcgtacaacgagaagccagtcctctcgcggccccagcacagcttctacgagataaaccacctaccttcgaatctgccatctttgcatcgccagggagaggactaccttgaggtggaccttgacatccaccggttcagctacattgctaggaaggggctggactcgttcagggcacgcctcaaggacgacatcctcgatctggggttaacgatccaggcccagaagcagtcgaagctccctgagcaggtcctctgctgcgtcaggctgaacaagatcgatttcactgaccaagaagttccaacaatagtcaccgttgatgctgaagtgccagaggtgacccttttgcggggatga

SEQ ID NO: 15586 - DNA, 231 bp, Zea mays
  Peptide Sequence Number=SeqID_57365
atggcgtggggaggaagacaacaggggacccccagagttaatagaggacgcggtctgccagccgattggctcacctgggcggcatggcacattggactagaggcgcggcgatcgtcgagtggctggtcgtggccggcgcttcaggccaagcaccacgcgacagccatggccactgcagcacgtgagatgagatatggtgatatcaagttggttcggataagaattaattag

SEQ ID NO: 15587 - DNA, 753 bp, Zea mays
  Peptide Sequence Number=SeqID_57366
atggagtttggtacatcgaggatttactcgagccgcatgctcgagatgcagcgtctgggttattttggggatggagttgggatggcgccaggggttgaagatgtccgggagttggagggggagttggttgtgtacgaggcatttttcgcggctagccttcgcttgccggcgcatcgatttgtagtggaagtgcaacaaaatttcaaaattcaaattcatcagttgatgccgagcgctatggtggcattggcgaaaggggactctgctgacgtcggggacgatcgaggaaaacaagtgaaaacccgatctgaagagggcacctcaaagggaaaggctatggttgcaggagttgacggagacgtgcgctgggaccgaggaggttatgacttcgctcgagctctaggaaacatcttcgcgcatgctgaagggcaggagttgtccgtggatgattacctggtgcgtggtgtaaccatgttcgacgcccagaccagactgccgcttattggggcggaggctgggcgactaggggtggcgtcgtcgaaggtgcctgccggcccggggagtctagagaagggtgatgccgggacctcgctggacccatggttgaaattttgcgccactgccgatggcggaagcgaagtcgctttagctgctgcagccgatggcgtagcagcatgtgtcgcgcagcaactgcgatatgtaagtgtgaactcttttttgaccttggcgaattgtgatatcaggcagctgtaa

SEQ ID NO: 15588 - DNA, 117 bp, Zea mays
  Peptide Sequence Number=SeqID_57367
atggctccgcgcgctgccggcttgctgttttgtgttgcgcaccccatccgtgacgccgtcgaaacccgtggtgagaaacccccgctgttctcgatgtttattttccaatgtgtatga

SEQ ID NO: 15589 - DNA, 318 bp, Zea mays
  Peptide Sequence Number=SeqID_57368
atggcagctaaatcaacccgagaacctccttgcatgcaatcccctactgcccttgcccctttcggaacattattgggtaaaaagtggtcaagggcacaacttgccttcaatgagctcctgctccgctacttctatctgctgctcatcaggatcctcggtcacagggggctcggggtaagatttctaaggcacagggaacagtccagtggaccgcgggttgattcccaacgtcccgaggggctctttaacaaaagtgccagcgcgaaagggtatcctttaatctggaccgtccgatctagtgcctacatgccagattag

SEQ ID NO: 15590 - DNA, 219 bp, Zea mays
  Peptide Sequence Number=SeqID_57369
atggcagctaaatcaacccgagaacctccttgcatgcaatcccctactgcccttgcccctttcggggggctcggggtaagatttctaaggcacagggaacagtccagtggaccgcgagttgattcccaacgtcccgaggggctctttaacaaaagtgccagcgcgaaagggtatcctttaatctggaccgtccgatctagtgcctacgtgccagattag

SEQ ID NO: 15591 - DNA, 2001 bp, Zea mays
  Peptide Sequence Number=SeqID_57370
atggcgcgccagcggcgggcgatcggcggtgcccgcgcggcggtcccgttcgcgctgcttgcgctgctcgcctccgcgctgcctggccttatggcgcagaacctggcgggggaccgcgcggcgctgctggcgctgcggagcgcactggacagccggggcctcctcccgtgggacaccacggagctgtcgccgtgcggatggcgcggcgtcgtgtgcgacaaccagacccaggcggccgggcccgggtcccgccgcgtcgtcgagctgcggctgcccgggaagcggctggtcgggacgataccgctcggcacggtcgggaacctcaccgtgctgcagacgctgtcgctccgccgcaacgcaatcaccgggggtatcccggccgacatcggcaactgcgcccagctaaccgtcgtcaacctgacggccaaccagttcaccggcgccgtgccggagggcctcttctcgctcgcggcgctcaggcaggtcgatctctctcggaaccgccttgtcggcggcgtgtcggaggagtttaacaggctcaagcagctggacacgttgttcctcgacagcaacgacttggccggcctgcttccgccgggcctttaccttcccaacctttcgcgcttcaacgtgtcgttcaacgcgcagctcattggccccgtgccggcgtcgctcgctaggatgccggcgagcgcgttccgcggcacggggctctgcgacggccctctccccgcgtgcaccgactccacgcccccggcgcctccaccggcggcttcgtctgcgggtggcgaaaagaagaagcacctgtcccgttgggcaatcgtcggcatcgtcggcggcgcggcgctcgttctcctgctcatcatggcgctcgtcgcttgctttcgccgacgccaggcggcggcggcggcggcggcggggaggcccgcgggtgctgcggcggcaaatgtgcacgaggcaaccgcgcctgtaacggtgaccttggcgaggacggacagtgacgccgtgaagcagtcgcacgccccgccgctcgcgccggcgatgataagcgagggcaagaagctggtgttcctggggagcacgccggagaggccgtacgacctggagacgcttctgcgagcgtcggccgaggtgctcgccaagggcccgctcggcacgacgtaccgcgccacactagacggcggcgagcccgtgctcgccgtcaagcggctccgcgaggtgcacctctccgaggacgagttctgcaacaaggcgaccgcgcttggtgcgctccatcaccacaacttgacccgcctgcgcgcctacttctacagcaaggaggagaagctcctcgtctacgacttcgtcggcgccggcagcctctccgccgtcctccacgacggaggcgcggagggccgtgcgcggctggacttcacggcgcgcgcccgcatcgcgctagcggcggcgcgcggtgtggccttcatccaccactccggggccaagtcgtcccatggcaacatcaagtcatccaacatcgtcgtcaccgggacgcgcgacggcgcctacgtctccgattacggcatcgctcagctcacgggtgccgcagcgccgccgaggcggggcgccgggtacaacgccccggaggtgaacgacgcccgcagcgtgccgcagagcgccgacgtgtacagtttcggcgtggtggtactggagctgctcagcggacgcgctccgttgcacgcgctgcgcgaaggcgccgacggcgtgaacctgccacgatgggtgcgctccgtggtgcaggaggagtggacgtccgaggtgttcgacgccggcatcgccaacgagccgcgcgtcgagggggagatgatgcggctgctgcagctcggcatggagtgcacagagcagcgccccgacaggcggccaaccatgaccctggtggaggcgaggatcgagcgcatcgttgaggatgcctgccagaaagccgatttcagcagcacggacggcagccggagcgtttcggcgtga

SEQ ID NO: 15592 - DNA, 1377 bp, Zea mays
  Peptide Sequence Number=SeqID_57371
atgggctcgaacgcgcgcccccacgcggtgctcatcccgtacccggcgcagggccacgtcacgccgctgctgcagctggccaaggtgctgcactcgaggggcttcttcgtcacctacgtcaactccgagtacaaccaccgccgcctgctccggtcccgcggcgcggactcgctggcgggcctcgacgacttccggttcgagaccatccccgacggcctgcctccgtccggcagcgacgacgacgtcacgcaggacatccccgcgctctgcgagtcgctctcccggagcggcgccgcgccgttccgtgacctcctggcgaggctcaacggcatgccgggccgtcctcctgtcacctgcgtcgtactggacaacttcatgagcttcgcgcagagggtggccagcgagatgggcatcctggcagtcgtgttctgcaccatgagcgcgtgtggcttcatggggtacctccacttcaaggagctcatggacagaggctacgtgccactgaaagatgagagctacctgaccaacgggtacctggacacggtgctcgactgggtgcccgggatgcggggcatccgtctgcgagacatgcccagcttcatccgcacgacggacccggacgagttcatggtccacttcgacagcggggaggcccagaacgcgcgccgcgcgcaggggatcatcgtcaacacgttcgacgcgctggagcaggacgtcgtgggcgcgctgcgcggcgtcttccctcgcgtctacaccatcggcccgcttctcacgttcgccagagacatggggcccggctcggtcgtgtacgtcaacttcggcagcatcacggtcatgacgccggctcagctcgccgagttcgcgtgggggctggcgaactgcggcaggccgttcctgtgggtcatcaggccggacctcgtcacgggcgagaaggctatgctgccggaggagttctacgcggagacgagagagagagggctcttcctcagctggtgcccgcaggaacaggtcctgtcgcatccgtccaccgggctgttcctgacgcactctgggtggaactctacgctggagagcatacgcgccggcgtgccgatgatctgctggccgttcttcgcagagcagacgaccaactgccgatatgcctgcgcgaactggggcattggactggagatcgacaacaatgtcacgagggacgaggtggcacggctcatagaagaagccatggacggcgagaaaggcaaagacatgaaggcgaaggcaacagtgtggaaggagaaggccgtggcagcaacagaaagcggcgggacctcgagcgtcagcattgatcgtttggtcgagttcctgcttgaaggaaacgttcctacagctgcaggctaa

SEQ ID NO: 15593 - DNA, 450 bp, Zea mays
  Peptide Sequence Number=SeqID_57372
atgaccagcatcagccgccgccccaagtcgaccagcctctacggcgccacgagcccacaacgtccgccagcagcaacgaccagcatatccaccggatacccgatacccgacgggtacccggtggacacgggtacgggtccatttttttacccgattggcttgcgtgatgtcggtacgctcggcctcggcgacgcgatctggattctggcatgcgtgctgcgtgcgacccgcgtggaacggcagatggctaataagcacgaggcccgtgagcctggcacgaagcccgctgtttgggttcggtctgagcctggcacgatccggttctatgcgggcccaggccgacccggcacgaataagcggaccgggctcggacaagaaactaggtacggtgatctagcccggcacggcccgtttacctctaagctcgttgagcccgcttttttgcactaa

SEQ ID NO: 15594 - DNA, 294 bp, Zea mays
  Peptide Sequence Number=SeqID_57373
atgacgacccctggtgaaaagatctcgtcgtggatgaactcggagcactatggccgctctttcgcccatccacttgccggcgacgtggccgagcggccgtcgtcgaggttcgtcgtgaacaggcatgctccggtccggattagtgcaattagttggagaattagtgtcatcaggggtggaattaggtgtcaaacaaaggaggggcctagccgttgcttttctggccagtacgagttcgccggagatgtactcgccgccgtccaccgtcgtggacctggctctgcgaagaaatag

SEQ ID NO: 15595 - DNA, 810 bp, Zea mays
  Peptide Sequence Number=SeqID_57374
atggccccctgtgatgtggtcggtccgagccctgggtcgggcgaggcggaggctcctccgaggccgaggtcgaatctgtcttccgaggtcgaggtcgagtccgagccctgggtcgggcgaggcggagaccgtcgtccgaggccaaggctgagtccgagccctaggctcgggcgaggcggagttcgtcgtcttccggagccaaggctgagtccgagccctggggtcaggcgaggcggagttcgtggtcttccggagccgaggctgagtccgagccctggggtcgggcgaggcggagttcgtcgtcttccggagccgaggctgagcctgagccctggggtcgggcgaggcggagaccgtcgtccgaggccaaggctgagtccgagccctagggtcgggcgaggcggagttcgtcgtcttccggagccgaagctgagcccgagccctgggggtcgggcgaggcggagtccatcgtccgaggccgagacgggggccgagccctggggtcgggctaggcggagcttcctatggcgcccgaggccagacttggctgatgtcagcctcactctgtcgagtggcacagcagtcggaacgacgcaggcggcgctgtcttcttgtcagctttgtgctgatgggggttaccagctgagattaggagtcttgggggtacccctaattatggtccccgacaccattattggtacaatggaagttaaaaaggaggaaaaagcgaaagcctacaatgtctttaaggaccttgataacaggcaaattttcttgagtgcatgtgatgatgatgacgagttgcattga

SEQ ID NO: 15596 - DNA, 336 bp, Zea mays
  Peptide Sequence Number=SeqID_57375
atggctaccgaagcggtgatgcggtgggcggccgtcggctacggcttgcggcctccagaggtgtggcaggggcatcaaggattgaggagggccatgtggatctcttccctggaggcatctctgatggaactgccgtggggaggttgctggatctcgcagccgactgcggtccaggcgtcggtccaccccactggccactacgagttcgtcacggcagttccccagttgtttattgtaaataatgcttcaccttcggttgggcatcaacagcaacaaaaggaagtgcggtggaactacttccaccctggtcaaaaagttgaaattgctcgaagctga

SEQ ID NO: 15597 - DNA, 1539 bp, Zea mays
  Peptide Sequence Number=SeqID_57376
atggatgcgctcacgtactacctgtacctcttcttggccttccttcccctcttgctcctgaagctcaagaggcgagacaacaacgatggcctgaggctgccgccgagcccatggagtctgccggtgatcggcagcctccaccacctgctcgtcggcagcccgctcccgcaccgtgccatggctcacatctcgcacaggctcaaggcgcccctcatctacctcaagctcggtgaggtccccgtcgtggtcgcgtcgtcgcccgacgctgctcgggagatcctgaagacgcacgacgccaacttcgccacgcggccgtggagcccgacgatgaaggtgatgatggcggatggggagggcctggcgttcgcgcgctacggcgccctgtggcggcagctccgcaagatcagcatcctggagctgctcagcgcccgccgcgtgcagtcgttccgcggcgtccgggaggaggaggtcggccgcctcgtggctgccatcgcggagtactccccgcggggcgaggccgtgaacctcagccagaggatcgccgagctcatgaacgacacggccgtgcgcgccatgatcggcgaccggttcgagaggcgggacgagttcctggagaacgtcgcggagggagtgaagatcagcaccgggttcagcctcggcgatctgttcccgtcgtcgaggctggcgagcctcgtcggcggcacggctcgccgggcggcggtaaaccaccgcaagatgttcaagctgatggactacgccatcgagaagcacgaggagcggagggcagccatgaccacagatgcagagggcgtcgtgaaggaggatctggtggatgtgcttcttaggatacagaaggaaggaggcctggaggtgccactcaccatgggaatgatcaaggccgtcattctcgaccttttcggtgccggcagcgagacgtctgcaagtacactccaatgggccatgtcggagctcgtaagcaacccaagagtgatggaaagggcacaggccgaggtacgtgagaagctccaagggaagccaacggtgaccgaagatgacttggtcgacatgaggtacatgaagctcatcatcaaagagaccctaaggatgcatccggtggtgccattgcttctcccaagggagtgccgagagccatgcagggtgatggggtacgacgtgcccaagggaactaccgtgttcgtgaatgtctgggcgatcagcagggatcccaagcactgggaggacgctgcgacgtttagaccggaacgattcgaggccgcgggtacggttgattttaagggcacggactttgaatacacgccgtttggggcgggccggaggatgtgccccggcatggcgtttgcgcaggcaagcatggagctcgtgcttgcagcgctcctgtaccatttcgactggaagctgcctggtgggatgctgccgagtgaattggacatggcggaggagatgggcatcactgcccgaaggaagcgcgacctttacctgcatccagtcgttgtcagtgtgccaccacatgtctcataa

SEQ ID NO: 15598 - DNA, 369 bp, Zea mays
  Peptide Sequence Number=SeqID_57377
atgggggacggagttcacccgtgcgcgacggcgaagtcggcatgcggcccggttgttgcgcccgagttaggtgatagtcctcacaagtgggcccccggtgtcaacgactcgcacccccttacctgtggccctggacgctatgggtcatggactgcggctgtcctgtgggcctcgtctatcggcacacccgcgagccccgttgatcgcgtccccaggaggctgacatgtcgggcccgcatgtcggcgccgctgcaggagttgtgccgcacggtggaaaatgggaattgggctgaaagagaagatctaaaacccttctactctggtaagaagttagatgaaactccactagatcagcaggcactgaagtga

SEQ ID NO: 15599 - DNA, 189 bp, Zea mays
  Peptide Sequence Number=SeqID_57378
atggtggtggcggtgggagctgaggccaagaagcttgtgaatggcttgccgaagaaacagaagctgcagcccctaccgcctctgccccttggagttggtggcctaaaggagctttgtgctgctgtcccgaagactgtgatgtgtgatgtggcctctaaagctgacttcctttgtcatcattctgactag

SEQ ID NO: 15600 - DNA, 111 bp, Zea mays
  Peptide Sequence Number=SeqID_57379
atgaccccaacggcttgcgacggagcggcgagatcggaaccagagacccacggacgtttaaaatccaaaattttgaattcaaatttcgtaggagaatttatactcatttaa

SEQ ID NO: 15601 - DNA, 180 bp, Zea mays
  Peptide Sequence Number=SeqID_57380
atgtctgggaaccctgcttattgctcggtggatgctagcgccgccgtggactgcgcggctctgagaagtcgaggtcgtcgcgacatatcccagtttggggcattggcgtgccgggttgccgttctccggcgggagcgccgcagcgggaaagccaacaccaccgcctggggtcgcgggtag

SEQ ID NO: 15602 - DNA, 228 bp, Zea mays
  Peptide Sequence Number=SeqID_57381
atgtgcacgtcgctggtgatggcagcatgtggttgtgccgctggccgccgtgtggcccctgttgccaataaggatggaaatctccgcattggcctttgtatagcttctcagaaatcaaagcgagaagttcttcccgcccccttctgggttcatttggaagaacatcgcctcgaagggtttggttctttatttggcttgcctccaaggatagattgcaaactcgggtaa

SEQ ID NO: 15603 - DNA, 1014 bp, Zea mays
  Peptide Sequence Number=SeqID_57382
atgggcgaggaggacgcgagcgccgggggagatccgcagcggctgaagcggatcgccgctgcggcgtacgactacgagaacgatgcgcggtgggccgggtactggtccaacgtcctcgtgccgccccacctcgcctcccgccccgacgtcgtcgaccacttcaagcgcaagttctaccagcgatacatcgtgagcttcccccacccctacctccctaaacctccgcgtactgtcgctgccagattggatgcgtctctggggtcaattggattggatgcgcctcatgctgcattgagctcgatccgtctgactttattctctgcacttgtgccgggaagaatgatttgttccatgaaagagcccgttaccattttccctcttagtgtttcaatttatatccctgttgctgcatatagcagcttctgtagagttagatcagtttttaatgttataaaatgctgctgcttgtgcttgacctttttaaggttatatgacaaccaggatcctggtttggttgttgaaccgatgtcctccatgacttcaactcagtctagcagaccagcagcgaagtcttcagctacaccatctagtgagaatgtcagagctcgggactcagttgctctacttcctgtgctttgctgggcgcttgatcatgttgctcgattcctaaggcgtaattttacacactcttctttatacaggtcgagacgcaatataatccagacatttatgtactttcatcttttgaagttgatgtaccattctcctgtgacatctggttaccaccagagcgtgtgggcaagaataggccgggctgtaaacccgtacatttaccgctatgcgccattcctgaacacacctatttcggcagtccagagatggtggctgagacgtgacatcaggatgaccagaagacctgatgcggtgtcaagtccaaagatgatgccacttgtggaattctatccgatgatagagcatattcagtttggaaatggaaaaattaccgtccattaa

SEQ ID NO: 15604 - DNA, 1278 bp, Zea mays
  Peptide Sequence Number=SeqID_57383
atggcgacctacgacaaggcgatcgagtcctacaagaaggcggtgaccacggcggcgtcgctggcggcgtcggcgatgctggtgcgcggcgtggtgaacgagctggtcccctacgaggtgcgggacctgctcttctccggcctgggctacctgcggtcgcgcatgtcgtcgcggcacacggtggtgatcgaggagacggaggggtggaccagcaaccagctgtacgacgcggcgcgcacgtacctggccacccggatcaacaccgacatgcagcgcctccgcgtcagccgcgtcgacgagggcaagagcctcatgttcagcatggaggagggcgaggagatggccgacgtgcacgccggcgccgagttcaggtggcgcctcgtctgccgcgacggagccggcaacggcgtgggcaacggcggcggcaacggccacggccacggccacgcccgcggcggcagctaccgcgtcgaggtccgctccttcgagatgagcttccacaggcggcacaaggagaaggccatcgcgtcctacctcccgcacatcctcgccgaggccaagaagatcaaggaccaggaccgggacgctcaagatctacatgaacgagggcgagtcctggcggatcggcaaggcctggaaacggggctacctgctctacggccccgccccgggaccggcaagtccagcctcattgccgccatggccaactacctcaagttcgacgtctacgatctcgagctcaccgaggtcaactggaactccacgctccggaggttgctcatcgggatgaccaaccgctccatcctcgtcatcgaggacatcgactgctcgctcgatctgcaacaacgtgcagacgaagctcaggatgctggtaccaaatccaatccttcagaggacaaggtgacactctctgggctgctcaacttcgtggacggcctctggtcaacaagcggagaggagaggatcatcatcttcacgaccaactacaaggagcggctcgacccggcgctgcttcggcccggcaggatggacatgcacatccacatggggtactgctgcccagagtcgttcaggatcctggcctccaactaccactccatcaccgaccacgacacgtaccctgagatagaagccctgatcacggaggtgatggtgaccccagcagaggtcgctgaagtgctcatgaggaatgaagacaccgacgtcgcgcttgagggcctcatccagttcctcaatgggaagaaagaccacgccaaggatgatagtcgtcaaggttaa

SEQ ID NO: 15605 - DNA, 375 bp, Zea mays
  Peptide Sequence Number=SeqID_57384
atgggaaagaacaagaagggcagaagttcgtcgcaccactctggcgacaagcggaagcgcgagccaagtccccctcggaggactttggggatcgctgtcgaggtgtggacgtacatccaggccatcgagcgctccgggctcgagggctcggatgagtcagagatctcctcatacgaggagaactcctcctactcgtccgaggaggggagcggtggtgacggcgacaacgaaggcgacggcggcgatggaggcgacgacggcggtggaggcgatggcgacgacaagggcgacgacgacgacggcaagggcgacggtggcagtggcaagggtgacagcggcagtagcaaggccagtggcaaagcgccactggcttaa

SEQ ID NO: 15606 - DNA, 267 bp, Zea mays
  Peptide Sequence Number=SeqID_57385
atgacgacaacggccgccgggtacggctgctgctgggcggggattccgcccttcgcgttgttgccgcggattctctcgacccgccgggagactcctcctcctcctcctcctcgcgcttcccttgtcgcctcctcctcgaagctcagggcgctggcaccacggctgagagtttcgaaccgtccaaggaggctcattgtctccgcttcctcctccggcgaggccaattcggacgcggcgccgtcgccaacgattgtcagggtgaattga

SEQ ID NO: 15607 - DNA, 660 bp, Zea mays
  Peptide Sequence Number=SeqID_57386
atggccatgggagtgatgtggtccctgtgcctgcttgtgtgctccctgatcggtgcggcacgctccgagtcgcgggcccttcagaatgctcccgcgccaccgcgggttgcccgtgctctctcggccccttccatcgcgcacgatggccgcctcgtcgcctgctccggaaaggacctcctcggctttgaacccaacgggtccttcgcctggatcgtgcccctcggccacacgtgcaacgacagcatcggccctgtattccagggagagcaggtgtatctggtggcagaggacaaggtcataaaggtcacaccacggaacgtgcacacggccaagccagcatcggaggttttcttcagccacaatgcgacgtcttcagggaggtccgaggagatcattggcctggccgtcagtggcagctactcgtctctcttcctcaccatcagaaaccggggactcttcgccttctcgctccgaggcgagctccaatggagcgctgggcctgcgcttgatttcttcggttaccgtcttggctgcaagagaaacgtctccggctgctatttcgattcggctcctgttgttgatcagtgcgagggggtgctctatgtaaggttggatgtcaattggttcgctagatggggccctctactcgatttctcctga

SEQ ID NO: 15608 - DNA, 2988 bp, Zea mays
  Peptide Sequence Number=SeqID_57387
atggacactgatgacaagtcacaaatcaaatcgctatcattttcaaatcacacgtcaatgatcaaattacctgctgctaatcctccgcgccatcttgaaattattaagaccgacattacaagtctatctgtacatgagcacacctgggccccccttgccagggggcgcttgtcgaccgttgcagcctgggcaggagcaggaccaggtctacgggcaggcgagaactacgcagccgaccgttggagcccgatccctccctgggatttcaaactcgccgtccgtcctcgcccgagtaccgatccgacggtcctggagacctcctctcgctacccagctacccgattatcaccagtcactctacctacaaccgacgaaagtctccccagaacccagatcaagaaccccgaaatcccagcgagcgagtcttttttgctcctcagcgttgaggaactcgtcgacgtttcggcgcgctggttcgagcatcttgtttgggatcccaggaagttcgttacttggaacttctgtcccgaggaagggcgcgcggttcgatgctggggcggagcagcggcttgcgacactcagatctggtgtgaggaggagatgccggtggtgacacggtcgcggctctccgccgcccgcggcgacggcgcgggcgcgctgccgtggggctcggcgtcggcggcgccggctctgaggcacgacgccggggcgccgcgggaaggcgtcgcgagcaagaaccaccaccaccaccacgggctcaaggagaagctgcgcgcactcacccaggactacgagcagcaaaagcagaagctcgccgcgtcgcagctccgccgcagcatccggtgcctcaacgcgtgggaggcgatcaacgacgagaacgccgaggaggaggaggacggcggcagggtggccaagttccgctacgacgccttcgctcaggtccccgagtccgcggtgctgagggagaacgtggcgccaccgcaggcgcgagcaccgtccaacgacggcgccgtgctcgcgcggacgactgaaccgcaggcgaaggagaacgcggtgggccgcggcgccaacgccatgtcctgccccatcaagaaggcggtaccggcgctcccggtgcttccggtgccaccggcgaggaaactctctttgggaggggctgtgggcggcaagctgaaggccgccggggaggtcggggccggcactgccgaggcggcggagagccggatcctcgtgttcgtgaggctgcgccccatgtcgaggaaggagaaggaggccgggtcgaggagttgcgtcaagatcgtcaacaggaaggaggtgttcctcacggagtccgcctcagagaacgactacctccggctgaagcgtggccgcgattcccatttctgcttcgactcggttttccctgattctacgacacaggcagaagtctacagcacctcaacagcagaccttgtggagggtgttctgcaaggtaggaatgggacagtgttctgctatggagctacaggggctggcaagacctacaccatgcttgggacaatggaaaaccccggggtaatggtgcttgcaataaatgatttgttctccaaggtgacgcagaagtaccactcaattaagctgtcatacctcgagatatacaatgagacggtgagggatttgctgtctcctggtagcccccttaacctgagagaagataagcagggaattgttgctgctggtcttacccaaagaagtgtatactccacggatgaggtcatggagttacttcagaaaggcaacaagaatcgaacaactgaaccgactcgagtaaacgagacctcatcgcgttctcatgcggtactgcaggttgtcgtagaatacagatccttggatggagttaacgtaaaacgagccgggaaactatctctcatcgatcttgctggatccgaaagagctctggcaacagatcaacgcacacagaggtcgatcgaaggagcaaacattaaccgctctcttcttgcactcagcagctgcattaacgcccttgtggagggcaagaagcacataccgtatcgcaattccaagctgacccaactcctcaaggactcgcttggaggagcctgcaacaccgtcatgatcgccaacattagcccctctaacctttccttcggcgagacacagaacacgcttcactgggctgatcgtgccaaggagataaaaacaaagacgcaacaaaccactgtgaatgaggaggttctggaccaaccagactctgaaactatgcttgtactggagcttcagaaggaaaaccgcgtgctgagggagcagttggcgaagcaacaacagaaattactgactgccgaggctcagctactcgcttcaaaaacctcgccacaacgatctcctgctccctcgtctcacgtctcaactccaggatcaactcaaaggaagaccagacgatctatcttggctgctggtggggggaactacttcagcacactggactcaaagaggcatgcagccgacaacgcacaggtcagggagctgcagaggaaagtgagcacgttggagtccgagatcgagaagatgaaaaaggagcacctattgcagctgaagcggaaggacgagttcatccgtgacttgatcaacaggaaggatcctaataacaacagtgaagaaacagcaacagttgatagaagagttgtcacgagggcgagcgtgcgaaaggcacagagagacgcatcagccgcagtcgagctgaaaagccccagccggggtgttcacatcaccggcgccaactgcaaaagaagcgtactttcctggggacattcggagggcaacagccccttcagttcttgctgccaacgggatgataagactcgaagccatgtggcaacagagacaccgaagaaaagcatcctccaagctgcttcagccaggatttgcacggcaaacatcgacccatcaaagattcacatgaaagactgcctacaactcattcattactaa

SEQ ID NO: 15609 - DNA, 615 bp, Zea mays
  Peptide Sequence Number=SeqID_57388
atgatctccccggacgcagcccgcaacgtagtcggcatcatcggcaatgtcatctccttcggcctcttcctgtccccagtgctgacgttctggcggatctacaaggccaaggacgtggaggagttcaagccggacccttacctggcgacgctgctcaactgcatgctctgggtgttctatggcatccccgtcgtccaccccaacagcattctcgtcgtcaccatcaacggcatcggcctcgtcatcgaggccgtctacctcactatcttcttcctctattccgacagccagaagcgcaagaaggcgttcgcgatcctgcccgtggagattctgttcatggtcgccgtggtgctcggtgtgatcctcggcgcgcacactcacgagaaacgttccatgatcgtcggcatcctctgcgtcatcttcggctcgatgatgtacgcctcaccactcactatcatgatcccgaacgccctgggcgcattcttcggcctcgtccagctgatcctctacttctgctactacaagtcgacccccaagaaggagaagaacgtggagctgcccaccgtctccagcaacgtcggcggcggcaacgtcaccgtcagcgttgagcgatag

SEQ ID NO: 15610 - DNA, 903 bp, Zea mays
  Peptide Sequence Number=SeqID_57389
atggagagcagagaggaggagaggaagggcagcggtggcgccgccgccggcggcggctcgacccctggggcgaatctaagggacctggtgtcgagggaatactacggccacaagaagaagtctaaggttaaagatattgaactgaaaggccacacagatagtgtagatcagctttgctgggatccaaatcatcctgatacagttgctactgcagctgctgacaaatctattcgtctttgggatgctcgaagtggaaaatgtcaagttgttgaacttagtggagaaaacatcaacatcacatataaacatgatggcactcagatagctgttggaaacaaggaggatgagctgacgatattggatgttaggacacttaaagttgctaagaaacacaagtctacttacgagatgaatgagattgcttggaataaagctggagatctattcttcattactactgggttagggcacgttgaggtggttaaggatcttgagtttttaaagccctgcaagctgaatgctcatacagcagggtgttattgcattgcaatggatccacttgataggtatttcgctgttggaagtgcagattcacttgtcagtctttggaatgtcaaagagttgttatgcattagaaccttcacaaaacttgagtggcctgtaagaacagttagcttcagtcatactggagaattcattgcatatgccagtgaagatcctttcattgacattgccaatgttgagactggacgatcaattcatcagattccatgtaaagcagctatgaatagcgttgaatggaatcctaagtacaacctcctggcctatgcgggagacgacaagaacaagtatatgactgatgaaggtgttttccgggtatttggcttcgaaacacataattga

SEQ ID NO: 15611 - DNA, 315 bp, Zea mays
  Peptide Sequence Number=SeqID_57390
atgccgcgacactgcttagacgtggggttgttgtcaaggcgcgcatcgtcgtggtcagagaggacagtcacgttcagggctggcgaggacgaaccccaacacatcttctcaaagtggaagctgcctgtggtccgcgctagagcagggggcacaacagcagcgtcaaatcagcctccatggggacaaatcacggatggtgtcaagcggaggctagggctcgcggtcgaatgcgaccttcgcctgactgaaggacaaccatacacccgtgcccatgcctccgcgtgccgcgacggcatggcgacctgcgaggcgtga

SEQ ID NO: 15612 - DNA, 351 bp, Zea mays
  Peptide Sequence Number=SeqID_57391
atgcttgacacaaaaggtgctaaaaaagagccacacaaggggttaaagaccactaaacctatcacaactaaagattgtgtgagcttcttcaacttttttagtccacttaaattccctaatgatgagaagaaaattgatgacgatataatcatgcttctatggtctatatacatgatgagcttggagccttggaggcttgaacatattgtgaaacatgagtaccaattggtgtcatatgacatgttgatttggattccaggttcacaatacctcttggagcaagtcctggtcaccctacggtcacctttagatgctgagcaagagctgaacaccctcgagtcccttgtctag

SEQ ID NO: 15613 - DNA, 288 bp, Zea mays
  Peptide Sequence Number=SeqID_57392
atggagagtcatgatctccgggcagaatgggaatcacggcttgtgggtggtgatgagactgatggttctggttatgactatggtgctggtaagtggtattctttccgtttggaaagggttgtcagcattgcaaccactgctcaagcaaagatgaagccgtggaaggagactttcaggagttccaagactacgacgagttctaggcatgggttagcggcaacccccaatcggctgcctgcgaaggccgcgtttatctacgtttcttttccgcactttgatttattgtaa

SEQ ID NO: 15614 - DNA, 306 bp, Zea mays
  Peptide Sequence Number=SeqID_57393
atggtggagggcaaggagcaggtggttgtcggcacgctgcatcgcctcacgcttgaggccatcgaggcgggaaagaagaagaagctctacgagaccacctacatcaagaacctcatagcgcgaatggggccattcacggaccgcatcgtcgttgaggtcgcggttgttgcgctgactgagaacctcaccgtctgtgcggactctgcccccatgagtataaaacctgaactcgtgcagtcaggagtgtggctcaaacatggtattcttctcttcggccgggaacaatcacattgtggcagaagctaa

SEQ ID NO: 15615 - DNA, 321 bp, Zea mays
  Peptide Sequence Number=SeqID_57394
atggacgagccgcgcacacgccgaggccgagtcgcgcacacgccgcgcagtgggggcagcgctggggggccgcgcgccataggcacgccgggccgagctcaaggccacgctgggcaggggcagggcacgtcgggcgccgtgagcagggttgggcgtgccacgctgcgccgtcgcgagctacgcagggagggggccgggaccgcgtgccaaggcggtggaaaccgtgccgcggctggggaagcgaggccgggccgcgccgaggcgaggccacgccggggtggggcgggaccgcgcgcgccactgggtgctgaggctaggtag

SEQ ID NO: 15616 - DNA, 333 bp, Zea mays
  Peptide Sequence Number=SeqID_57395
atgtcgggggcgtggggcggcaccacgcagaagtgcgcgtcgtgcggccggagggtgtaccccgtcgaggagcttgccgccgacggccgcgtctatcaccgcccctgcttccggtgccaccactgcaagagcacactccagggccaacaaagcagtagattctctaatatgtttgtgggcacacaagagaagtgtgttgtttgcaacaagactgtgtacccgcttgagaagataccgtcccagatgtatgctgacatctccataggcttcatcgagggcctccctaaggtccacaggaaacctgtcattcttattgtcgttgaccatctttaa

SEQ ID NO: 15617 - DNA, 555 bp, Zea mays
  Peptide Sequence Number=SeqID_57396
atggatggggtggatgattggcgagtgtggaaatggaaggagagggcagcacagctcaggcgggcctgtggtgcagggagagaggcgtgggactgggagaatagcggaagcgcggacggcgagttggtgcggtctgagtccccaggtcccagcacatcgacgcccaaccaatggcgaggcctcccgcgctggcacgctcgccgcttctctatccggccggcgggcctgcagtggcccgccaaccgccatggtttggagttggactttggaggcaccagcaatcccatcttccgtccttgctctcctcttcgacatcaggaattcgggattccggacaaccttttgacgtggggtgtgggtgtggactgtggagccgtggatcggagcagcgtccgtccgtccgtccgtgctgcctgtaaagcgcagaggctgttctgtttttcggggtcgctggtgcccgtcgccgcgatggacggatattcggctggtgggcgacagccttttgttgcagattctgctggctactgctggtgctgggatgggtgccgcaagtga

SEQ ID NO: 15618 - DNA, 254 bp, Zea mays
  Peptide Sequence Number=SeqID_57397
atgtcgcacggtggaggtccgatcaccagcgaggttaggccgggccggattacgcaagaatcggcgttctcgagcggcagacaccaaatcagaccccctccgagcatttcccctaacttaatcgcgctagtggtcaactatggagctctgggccacggtggcggtaagcatcacggcaagacagccgtgttcccggcgatggggtgggcggtctattctaaattaaagggggtcgggggagcatccgccagaag

SEQ ID NO: 15619 - DNA, 144 bp, Zea mays
  Peptide Sequence Number=SeqID_57398
atggcaggcttactggcgacgagccagcaatatacagcggcttactgcgacgtggtgaagcttcaaggcatgtggcacccgatcggcaggaagccaactctggttttgacatatttgggcttcactttcacccatgagccctaa

SEQ ID NO: 15620 - DNA, 270 bp, Zea mays
  Peptide Sequence Number=SeqID_57399
atggtcgactggccttccatcctttgggggcttttgagctctactttgcgtggggccatgccctcccgagctagttccctctatgtccgctatgcacaagatggccccgaagcagaaaatagctcccaagctgaaagtgatcttgctcttgaagatgatggccatggagttagtgttgatcgacgacacaccccctacctggcgcgccagctgtcggtgttcagtgttcgaccgcacacccaggggtaccctcgtggtgcttttgggtag

SEQ ID NO: 15621 - DNA, 567 bp, Zea mays
  Peptide Sequence Number=SeqID_57400
atggattattcgacaaaggcaaggtgcataaagttcacaattgagaggcaacaaattgatttggagaattctacaaagtttggagcatacaagacttggcacggtctgtggcgcaccgaacactgttcggtgtcccaggctgtagccctcgcgaattggccgctctcgagttttctcaaagccacttcactaaaattcaccagactgtctggtgtgccaccggactgtccggtgagccaatggtgcaatggtcaacttcgcccaacggtcaattgcgctgacgacggaacagtaaacagagcagaagtgagaactgcaacgtcaaaacgcaccggactatccggtgtgccaccagactgtccggtgctgcaagaggacagaagccctcaactgtcaacagctccaaaccccaacggtcggctgacgtggcactcaccagacagtgaacagtgctatatctggtgcaccatcgaactgtccagtgtgcccatcgacagcaaagctagccaatggctaggtgaaagggaaatgtgcccttgggccatttctaagtattttggtgattga

SEQ ID NO: 15622 - DNA, 937 bp, Zea mays
  Peptide Sequence Number=SeqID_57401
atggcgcctcctgtgacgtggtcggtcctttccttgggttgggcgaggtggaggctcctccgaggtcgaggtcgagtctgtcttccgaggccgaggtcgagtccgagcccttgggtcgggcgaggcggagaccgtcggctgaggccagggctgagcccgagccctggggtcgggcgaagcggagttcgtcgtcttccggggctgagcccgagtcggagccctggggtcgggcgaagcggagttcatcgtcttccggggctgagcccgagtccgagccctagggtcgggcgaagcggagttcgtcgtcttccggggctgagcccgagtccgagccctggggtcgggcgaagcggagttcgtcgtcttccggggctgagcccgagtccgagccctggggtcgagcgtggcggagttcgtcgtcttccggggctgagcccgagtccgagccctagggtcgggcgaagcggagttcgtcgtcttccggggctgagcccgagtccgagccctggggtcgggcggagcggagttcgtcgtcttccggggctgagcccgagtccgagccctggggtcgggcgaagcggagttcgtcgtcttccgggactgagcctgtgtccgagcccctggggtcgggcgaaagcggagtttcccatggcgcctagggccggacttggctgctgtcagcctcactctgtcgagtggcacaacagccagagcggcgcaggcggcgctgtcctcttgtcaggccggtcagtggagcggcgaagtgactacggtcacttcggctctgtcaactggagggcgtgcgtcaggataaagctttgtgctgatgggggttaccagctgagatttaggagccttgagggcctcctatctcttaagaaggtcatgaatgtaggattccaaggtgtgaaatccatcttgtctcagagtagaaaag

SEQ ID NO: 15623 - DNA, 357 bp, Zea mays
  Peptide Sequence Number=SeqID_57402
atggtggcccacttggacccaaggaacaagcgatttcaagaccaccatgccatgaccacggttccagtaacaactgggtccgttgagaggtatcccggtgaggccggcacagtagagctcaaggggagggcatgggaaggaccagcaagtcacacaaacatgaccagggagagcgcaaacagaacggtcgacacgatggagtggctcacggcaaagatcaatggcgtcgcggcgagcaacgaggtagacactgcctggtttaaatgggatcacggcgaggaggacaccggtcaacagctacaacagtgtggacatgcagttgcactgcatgagcaccacgcaagacccaagctctag

SEQ ID NO: 15624 - DNA, 198 bp, Zea mays
  Peptide Sequence Number=SeqID_57403
atgaagaagattctagcaccctcccttgaggtcaaggaagaagccacaagcaccccacctgcaccatcgctctctaaggtcaccttggagctacaagagctagtcccgctcggagaagagttcgactccatcctttcatctcagtcgccgccagaagaagagccgagcagtagtcgcatagcccttgaatctgagtag

SEQ ID NO: 15625 - DNA, 240 bp, Zea mays
  Peptide Sequence Number=SeqID_57404
atggggcaagagaaccccctctcacggcgtgaagacgacgcgcccgtgacccgtacctcgaacggctcgcgcacgcgcaacggcaacctcgccaactactcaccccggcgcattaactccgcggctcgacggaaggcgctacgggcgggagcggctggcgacgtttcgccttcgccaaaacgaacacgccgaaaaagggaccgggaaagagggtaccctcaaagggatccttccccgtga

SEQ ID NO: 15626 - DNA, 195 bp, Zea mays
  Peptide Sequence Number=SeqID_57405
atggccgttgctgacgttgtcccagccaagagtcattgggactcgccatcgcgcacgttcgacgactactatatcaaggacggtggcgtcatctcggcgccgaaggtgtgggacgtgctcttcgacgatgagacgatgcaaatcgtggcatatattgaagtctgtacgatacttatggttacaatatattggtga

SEQ ID NO: 15627 - DNA, 228 bp, Zea mays
  Peptide Sequence Number=SeqID_57406
atgaacaaaaaccctggcaatcgaaatgccattacaaacggaactccggttccccctccgcagaccggctccgagcagaagaagccaaaccgccgcgcgtggtgcgcacaaccgcccagcggttacaagcgaccccccacttttgcccagaccaacgggcgggaggggcgggcagccatgcaggcggcatgcaaccgcgccaggtggacgtgcttctccgacttctga

SEQ ID NO: 15628 - DNA, 2265 bp, Zea mays
  Peptide Sequence Number=SeqID_57407
atgccgttcggtttgaggaatgcgggcgcgacgtaccagcggtgcatgaaccatgtgttcggtgaacacatcggtcgcacagtcgaggcctacatcgatgacatcgtagtcaagacaaggaaggcttccgacctcctctccgaccttgaagtgacattccgatgtctcaaggcgaaaggagtcaagctcaatcccgagaagtgtgtcttcggggtgccccgaggcatgctcctggggttcatcgtctccgagcgaggcatcgaagccaacccggagaagatcgcggccatcaccagcatgggacccatcaaggacttaaaaggcgtacagagggtcatgggatgtcttgcggccctgagccgcttcatctcacgcctcggcgaaagagctgatggagaagccctcttggtctacgtcgccgcaaccactcaggtggttagcgccgcgattgtggtcgagaggcaagaggaagggcatgcattgcccgttcagaggccagtctacttcgtcagcgaagtactgtccgagaccaagatccgctacccacaagttcagaagctgttgtatgctgtgatcctgacaaggcggaagttacgacactacttcgagtctcatccggtaactgtggtgtcatccttccccctgggggagatcatccagtgccgagaggcctcgggcaggatcgcaaagtgggcggtggaaatcatgggcgaaacaatctcgttcgcccctcggaaggccatcaagtcccaggtgttggcggacttcgtggccgaatgggtcgacacccagctgccgacggctccgatccaaccggagctctggaccatgtttttcgacgggtcgctgatgaagacgggagccagcgcgggcctgctcttcatctcgcccctcgggaagcacctacgctacgtgctacgcctccatttcccggcatccaacaatgtggccgagtacgaagctctggtcaacgggttgcggatcgccatcgagctaggggtcagacgcctcgacgcccgcggtgactcacagctcgtcatcgaccaagtcatgaagaactcccactgccgcgacccgaagatggaggcctactgcgatgaggttcggcgcctggaagacaagttcttcgggctcgagctcaaccacatcgctcggcgctacaacaagactgcagacgagctggctaaaatagcctcggggcgaacgacggtccccccggacgtcttctcccgggatctgcatcaaccctccgtcaagatcaacgacgctcccgagcccgaggcaccctcggcacagcccgaggcacgctcggcacagcccgaggcaccctcggctcagcccgagggagagctacccctcgaccaagccgaggctcggcgggtagctcgacgcgccaagtcgttcgtcttgctgggcgatgaggaggagctctaccaccgcagcccctcaggcgtcctccagcgatgcatctccatcgccgaagaaggcgcccggggctacacgcacctgctggtcgccatcgacaaattctccaagtggatcgaggcggtggcgttcttcaccaacatcatccatcgcttcggggtcccaaactccatcatcaccgacaacggtacccagttcaccggcaaaaaaatcttggatttttgcgaagaccaccacatccgggtggactgggctgccgtggctcatcccatgacgaatgggcaagtagagcgtgccaacggcatgattctgcaagggctcaagccccggatctacaacggcctcaacaagttcggcaagcgatggatgaaagaactcccctcggtggtctggagcctgaggacaacgccaagccgagccacgggtttcacgccgttcttcctggtctatggggccgaggccatcttgcccactgacctggaatacggctccccgagggcgagggcctacaacgaacaaagcaaccaagctagccgagaagactcactggaccagctggaagaggctcgggacaaggccttactacactcggcgcggtaccagcagtccctgcgacgctaccacgcccgaggggtccggtcccgagacctccaggtgggcgatctggtacttcgactgcggcaagacgcccgagggaggcacaagctcacgcccccctgggaggggccattcatcatcgccaaagtcctgaagcccggaacatacaagctggccaacaatcaaggcgagatctacggcaacgcctggaacatcaaacagctacgtcgcttctacccttaa

SEQ ID NO: 15629 - DNA, 321 bp, Zea mays
  Peptide Sequence Number=SeqID_57408
atggaactcgctgccatcaccgtctgtgtggatgaactaccgctgcgcatgtccaggttgccaccacagtcgacccgcgtcatcctcaccgttgtggcttcgagctgggcgctgtgtggaggcacactgatgatgcacatggaattttcgggcgtgattaggggcaaacggtgccgcaattcctcgccgtgtgcacgacgccgctgcgattccaccctcctccgtgggcagcaaccaccgcacatccaacaccgagctgttgatggggaatccaacggctctgatcctaccataccccttcgtcgtggacgttttgcttaa

SEQ ID NO: 15630 - DNA, 252 bp, Zea mays
  Peptide Sequence Number=SeqID_57409
atgggggagggatctgaggcgaggaggattggtggtggtggattcactatggagatatgttggtgtgtggagttgcaggaggccggatataggagccggcgaggaaagcgccggcggggaagggcactggcgtcgggggcaggggcggacgccgacgtcgaggacgaggccgggtgggcgtcgtcgtgggctgtggcggcgcgggtgctagggatggtgcgggatgtgggcggcagcgacagaatgaaatga

SEQ ID NO: 15631 - DNA, 374 bp, Zea mays
  Peptide Sequence Number=SeqID_57410
ggcggagtcaacggcggcgggtcacttcctctctgcggacgcaattctggaggtggcggcgggtttcttggcagggatgagcggcgcgcaaggttcgggaacccagggttttatggccggtgaggttgggcagttaacggccatcggattccacgaatcccgcgagctagcggacatcagggccatggctgttgcggcggtgaggatcgcgcggataacgctgacagcacgggcccacgcggaagtgagagtcttgcgcgcaggagagagggtgctggcatgtgggcccgacttcacagcgactcaggacgacgcgtgggtgcggcaaagaaccgggccgcgcgtgaggaaaacaccaatgggccaaataggtg

SEQ ID NO: 15632 - DNA, 333 bp, Zea mays
  Peptide Sequence Number=SeqID_57411
atggccgtgatgggttcaacattggaaaagatgtacctctgccagggtcaaccgtgcacccagactccaaacttccacgcgtcaacaccacagggccccgacgaacactactggtcccaccccgagccaccggcgagattcgcgcgtgcggtgagctcaccgtcagttacggtgtctagaggaccagcttgtgggatgcgggatgacgagtgggacccctgcgatgccagtggcgagcacgagcgaaccggtgaggctgcaggcgggacccacagggacacggagacacttcttaaattgagacacgcggaatacatcatgcacatcagatag

SEQ ID NO: 15633 - DNA, 510 bp, Zea mays
  Peptide Sequence Number=SeqID_57412
atggccgaggtgtggcgggaggagcgcgtgcagatgaagctgttggacgccaatctcgcgctggagaaaaagtatgtgcacctcaatcgcttgcaggcggagatggaggccttcctccgcaccaaggatgacgagtccgcctcacactccaccgcgctgcgggaggcacgcctcatcagcgtcatcgtcgccgccacaagctcgtcaccaatggaggtggatgcggaaccacttctaccgactgctgctgtggaaagggaaagggagagagacgatgacgggcacacagttagattggataaaagttttgggtctggatgcgtccgtggaaggaaaccccttaatcccgacggccgaggcgacttgccaggcgacttccgccgcttccatccatattcgctccttcaatctgcgaactttggagccccgattgaagagccattgctttcccgtgaagttccaggaaatcgctccaacttgaaacacatcgaggtttccgtcaaactttga

SEQ ID NO: 15634 - DNA, 672 bp, Zea mays
  Peptide Sequence Number=SeqID_57413
atggtgtcccgcatgctctgtgacgacggcggctctcagcccccttacggaagcaagaggacgtcagcaaggacccaaccgctccgacagttgtccctccgccaggctccatcgctcctccgacggccacaacatcacaccagctgggtgccaaaatctctccggctgccacgacagcatggccctcttagagagggttggccgcgcggggacgaggacgagacaggcgctctcttggggccgctcgcttccctctcccgcgtggacgcttgtaacctcctactgcaagcgcacccgacctgggcgcgggacgaacacgaaggccgcgggattcccacctctctcacgccggtctccggccgcctcgcttctccccccttcgcgctcgccctcgcgctcgacccatctgggctggggcacgcggcgacactcactcgtcggcccgagggaccccccgagatggctcacaagcatcagcatggtgagcgtggtcacaagcctcaccgctggggagaagcgtcgagggtggatccctgtggacctcaactcctcccacacctcgacaggttctacttcctcctcgccgcgctgtcgcttgtcgacctcgccgtctacatcgcttgtaacatgtgggacgatgataataggagaaaggtctcttcgcacatctag

SEQ ID NO: 15635 - DNA, 381 bp, Zea mays
  Peptide Sequence Number=SeqID_57414
atgcccacgcgcccggacgcgctccacgccctcgcgcacacgggggacggccagtgcctcgtccagtggcacggtggcggccgcgagcttgctgtcttcaagctgggctctgatgggtggtggacggaggcaggcgacggtgttagcgaagatgtgctgatcttgtcctcccggacagcggtggcctggctttcggcacggcgacgaagtcttttagagaactactggagttgctctaaagggttctgtaccctacatatagaggatcaaatggtcctctacgctctccagcagcgtcctctaaacggtcctctaaatttagagaacgttgctggattctctatatatagagtttctctaaacgctcctctatccatttga

SEQ ID NO: 15636 - DNA, 276 bp, Zea mays
  Peptide Sequence Number=SeqID_57415
atggcggcggtgggcgaacctgacatggcgtgcgcgtcgtctcctctcgtcagctatacacgggggcgcctagaggaagaacgcattcctcgattgtgtcgcgctcgagtcgccgcaggcttcggaggcggggcggtcggcgctagatccggcgctgaagacgtcgccgtggaggcagaggtggacgggaatgaggccacgaagaaggatgcggatgcgcggagatatgaagtttgctgggcaaatactgggtggcttgctgtgccgctcgtgtag

SEQ ID NO: 15637 - DNA, 348 bp, Zea mays
  Peptide Sequence Number=SeqID_57416
atggccggaagaaagtgcagagcgattcccacggcaatagcgacggccgtcgtcgtcgtcgccgtcctgatggcggtggccgtcgcaggcgtcgcggcgaaggacgcgtcgggtgccccgagctccctcacgacgtggagtgcggccgggtgctcgggggatacgtcgatcgtcgggtcgtgcgggtgcaccgaccttgcgttctacgccgggcaggagttctactaccggggcgagacggccacgctctacaccgggactggctgcaccggcacgccgtaccaagttttcgaggacacccaggcgtgcggcgactttgggtggcgcagcatcaacatcgactgctga

SEQ ID NO: 15638 - DNA, 309 bp, Zea mays
  Peptide Sequence Number=SeqID_57417
atggcttattccaatacccatgtgcccacacctgtccatgcatttgttacaaatatttttctaataagttcatcaaattatcaatcaaaaaatattaaaatacatatcataaacaagaatgttgggggccttcgtcttccgaaggtcctcaaaaacacgactaacatatttcccaagtataatatatgtacaggaaccttcggacatgaaatgaagttatacaataatatggagagcgcggttcgggagaaggatgaatcaatgctgaagctacccgtgaagaagcttcggcttaacgatggaaaatga

SEQ ID NO: 15639 - DNA, 691 bp, Zea mays
  Peptide Sequence Number=SeqID_57418
gggagacttctggggagcttttggagatgctcttaagagcataacgagggcgtccaccatgcccccgcctgctcccaccgtgcccccgtcccatcagcccttcgatgactacgccggaccatacgcgcgtcgcccccttcccggcgtgatggtcgcgccccacccacccacccccatcccttcaacggagccccagcccgtgggcgtccacacccagaaggcccccacctgtccccgcctctgccaacgctcctgccccgcacacccacccgccgctcccgcgttgtccgcccccgtcatgaattgccctcttccatgtgcaccacagaaatctcggcgcaagatccccccgaaacctcgccataccctactgcgaggcgtaccattcgacagcgaggccctccttggcgggaacggcgtggtagtcgtggaggctaagacgctccacctcgactcccaaggcacacgggcctcgcggtggcccaaggacgtcgggcggaagtcgtgccgagctacttccctgcctacgccaaagacgcccaacgcagagaagaggatgcccaccagcgacgtcccgtgctgcgaccgccacgcgaagaaggctgacggcatgccccgctccgatatgcccaacagctgtgttacaaacaacttgtacactttcagtacaggttctgctatctgcatatag

SEQ ID NO: 15640 - DNA, 1635 bp, Zea mays
  Peptide Sequence Number=SeqID_57419
atggccgaatggaaaaagaattgcagatttgtttccaaggttgattggcgcaattcatgtgcaaaggctgtgaaaagggacctgaaggagtggaatattgataaagagttcgccgtggataggaaggggtggaactttggcctttgggatttgatatctggcatcgagctgcagccggaggttgacgacaagcatatcttcagtattgccccaaatggtgtcaatatcctcacacatactgatgaaataaaactcaaagcaaaaaggattgccgcggtggaaaagaagaagcggtgtttaggaatgaagattctatctaccaaggaagcaagtggaggccttcaacggtgtgcagattattttggtatgccaacagctcccagtgaatctaacaaggagccaaggcctgaagagtgtgtaaatgaactgggcattaaacaaccagtacagcatgttgcttccgaggagcaggaaggagttcaagatgatgccaaggcagatgcaaatgttatgaatgtttcttttggtaagggaaaatcagaagattcttttggtacaattaatggtaccaacagtggagataaaatagaatctcctagtggtttagcagaaagaacattgactcagcctaccactaagggttgcagtaagcagcgtggccgtagttctaatggtagaggaaacaggactaaaaaaatagaagaggggaatgcgtctggactaattgctgtggctcccgagtcagaagatgatgatgatgatgccgcatttatagatggaaaccaagcagagggtggtgcactgtgggatatttttcgacgggaagatgtgagcaaactgcatgattatctaatgaagcatgcacatgagtttagacattgcaactttgagccagtgaagcaggttactcatcctatacatgatcagtgtttttatctaacaattgagcacaagagaaagcttaaggaagaatatggagtcgagccttggacatttgaacagaagctaggtgaggcagtatttatcccggcaggatgtccccaccaggttagaaatttgaagtcttgcataaaggttgcactagattttgtttctccggaaaatgtccgagagtgcatcaggttaacagaaggtttccgtctgctgccgaagtggcataaggtgaatgaagataaactggaggttaagaagatagctcttcatgcattcaatcaagctattaaagatatcactgatgaatcatctaatagcaatgaaagggcagtagaagtgaccagggagcaccactggagttcaccacagtcgggcggggtattccctggtacgaatgacttgggtcgcgtgcggaattcctcgccggtggttgctacagccacggatccgttccctgccatcatcggagcatcctgctacctaccacactgtgagaattcgccacacttgtccgccctagtctcctctacacaaaaccaggttctgagcgaagctttcggtgggggattgggcgtttgggtttttggccatggcgctgtcgcacccatgctcggcgtcgtccgtcggtcggacgggggtagaggcaaggccgttcgactgttagatcttaatgggcggccgagatcatatcatgcgccgtag

SEQ ID NO: 15641 - DNA, 2292 bp, Zea mays
  Peptide Sequence Number=SeqID_57420
atggctgcggaggcactgggagctatgcgttcccgttaccgcagtgcggctattgagccccttcgattacgattgagcaacccatctgattctggttgcggaagatacgtgtttcgaaatttgatttccgctatgctactagcatatatgcatatggaaagtggcgaggaaaacctccaggagaaggtgcaggaaggtggcaaggtaaacctcacggagaaggtgcaggaaggtggcgaggaaaacctcacggagaaggtgcaggaaggtggcgaggaaaacctcacggaaaaggagaatgaagggatagtggaggtctcaaaacccccccaaaggcgtcggaaggatcctgttgcagacccctcttctcttgagtctagtggtttcatgcgatttcgggagaggaggaatgcttcagcggttcaggagcaggggcctaagaagagaaggattactgaggattcaaacatgtgccatcagtgccagaggaatgatagcggaagagtttctggaggatatagtgtgtctgaacaagataaaattaaattctcaatgcgtatcgtgcactttttgcttccttggctgaaacaattccatcaagagcagatgcaagagaaaagtgccgaggctgcaactaaaggtattgatgcagacaaactggaggtccctctaaccatttgtggaaaaaaggaacgtatatactgcaacaactgcaggacatctattgttgacttccacagaacctgcaataaatgtaactatgatctctgtctccagtgctgccaggagcttcgtcgaggccttgtttctggtaatgatgccaaggttgatggtggaggcaagcaagattttctatcgggagttagtcatgataaaatcataagcaaagggccatccgatggacagaatgacatgttgatagatagtgtagttcctggtgaaaacaacacttctagcttgagacagtggagtgtgaataaagatggaaccataccttgcccaccaaatgcatttggtggttgtgggagctctcttcttgaactgaagtgcttgtttaaagagaagtttattgctgaattactggagaaagctaattcagcgctcaataatgaaatggaggtgaagatagaaggatcaaaatgtccctgcttcactgaatccggtgacatggatgatggtatatcacggaaatcatcttgcagggagaattcctgtgataactacatatattgcccaaccgctacagatgtccaaaatggaagtttagaccatttccaggagcattggttgaagggtgaacctgtaattgtccgtgatacacttgcgttgacttctggattaagctgggaaccgatggttatgtggcgtgccttacgagaaaagaaagagaaagttgagaggctctcagttcttgctcttgaatgcttgggttggtgtgaggtcgatgtaaatattcatatgttttttgcggggtattcaagtgggcttgttggtccagacgatttgcccctgttgcttaagcttaaagattggccaccacatagttcttttgaggagcggctcccaaggcatggtgcagagtttatgtctgcattgccatttcgtgaatacactgatcctaaatggggacctcttaatctggcagtaaagcttcccgataatgttaataagccagaccttggtccaaagacttatattgcatacggtgtttccaaagagttgggaattggtgattctgtcaccaagcttcactgtgatatgtctgatgcgatctacaacagtagcttagtccctggagatgaagttacaaggagctacaaaaagtttgcaggcctggagcgaaagcaggtcgagcacgtgagatcccaacttgctcttgctaaagaaatcctccatatgctggaaatagcgcaggatggtagagtgctcagccctgctgaacgctggctcaaattcagactcaagaaacagacattattattatcatcttgcaagagaactattgcaaggctgagagcaaggatttcatggctcaaagatggggatgctaatacaaagttattccaccttcacgcccgtcatcgtaagaggaaaatttttgtggcatgtctggttgatggggaacaaatcctaatcagtcacgaggagaaagctgcctgtgtggaccaattctacaccaatctgttggggaacagtacggacagggttcaggcgattgagttagagactcttggaatgcctagttttgatctgaccgatctggaagcccctatttcagaacaggatgtctga

SEQ ID NO: 15642 - DNA, 240 bp, Zea mays
  Peptide Sequence Number=SeqID_57421
atgggtgatgctttctgctttatcagggaagaagggcgttccattcaacacgagttgcgtgagattagtgatattgaaaaccaagcagtaggtctgaagggaattcttgatcagcttcccagagcacatgcatctgaatttcggtcgaagatgtctggcctagcttctcaggttaagaaggagaagcgagtgctcaacgccgccctcacgaagattgtgaactacggtgtccccatctga

SEQ ID NO: 15643 - DNA, 189 bp, Zea mays
  Peptide Sequence Number=SeqID_57422
atgggccatagtggcaatgcctcaaaaagtgcaatgaacaggagtgccgatgaacaacttccatcaaatgagtgggatgtattcctcgaaaaattccaggagctgctgaaagaggcactgcacgagagcgcaagggcagcagcaggtcaaaggatgaagcagcggctgggcacttcatgcaagttttga

SEQ ID NO: 15644 - DNA, 1113 bp, Zea mays
  Peptide Sequence Number=SeqID_57423
atggcgctcgccttgctcttcttctgcgtcctcctgctggcctccggcgccatcgccttcctcctcatccgccactgcctcgcgcgagcacctcctcatcgtcatcgtcaggcacagcccgaagcagcggccaagcagctgcagcagcaagcgttactagccatcaagaaggagccggcaccgcggcggctggcgtggcgggaggtggaggcgctgaccggcggcttcgacgaggccgccgtggtaggccgcggcggctccagcaccgtctacctcgccaggctcctggacggctcgcccgtcgccgtcaaggtgcaccgctggtgcggcggcgagcgccggctgcgcgccttccgccaggagctcgacctgctccgccgactccgacacccgcacatcgtcgcgctcctcgcctactccgacgaccacgaggatgagggcgcgctggtgctggagtacctcggcggcggcacgctggcggacgcgctccacggcacggcggcggccccgctgccgtgggcgcagcgcatgcgcgtcctccacgacgtggcgtgcgcgctggagcacctgcacggcggcggcggcggcggggcctccgtggtgcacggcgacgtgtcggcgtccaacgtgctcctctccgacggcggcgtgcggctctgcgacctgggctccgcctgcgagggcttctcggcggccgtggcgccggcgcgcgccgccgtggcgtcgccgggctacgccgaccctttcttcctgcgcacgggcatcgtgtccagcaggtccgacgtgtacggcttcggcgtgctgctgctggaggccgtcacgggcctgccggcggcgtccgaggccgagaacctgacggcgcggatcctgccacgcgtcagggcgcgcggggtggcggggctcgtcgacggcaggctcggggacggcgggcacgacgaggaggaggccgccggcgtggccaggctcgccgtggagtgcgtggcggcgcagcccgggctgcggccgtcgatggcgcaggtgcgcgccgccatcgcggagaaggcggcgaggtccatcgccaaggcgggttgcggccaccatatccagctcagcaagctgctagagctcacatga

SEQ ID NO: 15645 - DNA, 213 bp, Zea mays
  Peptide Sequence Number=SeqID_57424
atgggtactaatcatgtttttctaagtgctagggacaatatgaagtcgagcctaaaggagcaaaagaaagttggcagcatcggactgtccggtgttcgaccggcctactggtcactcttggactcgctatttcttctgccaactttgtgcaaaagagttatctcggaccgtgattgcaggcttggaaagaatggcacccgtgctaatgtgtaa

SEQ ID NO: 15646 - DNA, 4602 bp, Zea mays
  Peptide Sequence Number=SeqID_57425
atggcctcctcctcctccttcgcccccgacgaccagaccgacgccgacttcttcgacaagctcgtcgacgacgacgaccccgccaccagcctccccgacgacccacccatcccagagccgcaggcgcctcccgagggttcaggcaagggcggcgccggcgtccacactgcggtcaagcaggtgcagtgggcttccttcggaggtggcgcggacgacggtcctgacccatttgctcatctctcgggaggcgccggcgacgacgacggcttcctcgtgaccacggccgggacccagacggcctcggatcacgccttctttggcgggacccagagcttggccgccgaggtgacggaccaggacttcttcgccgggagcaactcctccaatcagcataatgtcagtggtcagcacgaccagggcggcggcagcactgcagtggattcagcagatcccatgtctttggaggccatgtaccctgggtggaagtatgatgaggcctcccagcaatggtaccagcttgacgacagtgtaaattcaactgggaatgcagctcaggtgctggacaacagcactcggtatgcacagcagcagcagcagctccacgcctcttatctgcacaattcagtgcattcagggcttgagacaattgctgaggagggcactaccgcaaccggtgctgtctcaagttggggccaaggggctgcctcagagtacccacccaacatgctcttctatgcagagtaccctggttggtacttcgacaccaacacccagcagtggcactccctcgagttataccagcaggccgccatgcaggctggaacagctagcatgggccagactgttattgcaaacgacggtgttgctgcaacttcctctctgacaggctataatgccgcacaaaatgaggaccttgctgcccatgatcaggtcacccaacacaactcattctcgaatagtttcgctcatcagaaccaatggcagattaccgatgcatttggtaacaatgtacgatctgaatgtgctacagagaacagcctggctagtagttcctatggttttcaacaacacaggaatgctgattctaccagttcatctacgaaccaacgggctggttttaatgcagctgaaactgttactgatcactatggtggacgcaagggcgttgaatcgccaagtattcagagcggttatagcacttctgacattcaacaatccagtcacaaggcattcgaaccttacacgggttatcaggaccattacaaagcatttgaacctgccacaggtcaccatgccagtaacaacatgttcaaacagtccacaggtaaccagggaggttacaaggcgtttgaacctgccatggataaccagagtggctacaaggcatatgaaccttctatgggtcaccatagtgcttcctgggaacccgtgccttccacgggtcaccagactgatttcaaggggtccggagcttcaactgttcatcaggccggatacaaagaatttgaaacttctacaggttacaatacaagtttaaaggcatttgaaccttcttcatctcaacatgctggttacatgggttcccaatctaactacatgggatttgacacttctacaaaccaccatggttatggcgatgcaaatgttgttgcgagcactcaaggctttgtcccaatgcaaaccacataccagggacagacacaagcaattgcaaactcacaagtgcacctgtcaaatagctatttgggtattgacaactccatgaactttaatcagcagcaatttctgggtgcaaatgcctcaaacttgcaattcagtcactccccacatgatggtagagctggacgaccaccacatgctctcgtttcttttgggtttggagggaagctcatagttatgaaagaagctagctccatgcccgcaagctttaacaatggaattcagggtaactctagtggcacagtttcagttcttaatctgtcagaggtggtcatggataaaattgattcttcaagcatcactaatggtagtgcacttagttatttccatgctctgtgccgccaaccagttcctggtcctctggttggtggaagtgctgcatcaaaggatgtaaataagtggattgatgaaatgattgcatggtacgattcttctagtgaactccagagaagtgatactcgcaagttgcttatttcattgctgaagatactgtctcagcactatggaaaactccgttcaccttttgcgtctgacccatcacaagaggagacagatggtccagaaatggcagtaactaagctattttcatcgtttaaaagtactgttaatatgggagattatggatccattgtttcttgcatgaaaaatattccttcagaaagtcagatgcaggctgttgcacaggaggtccaaaatcttctagtttctgggagaagaaaagaggcccttcagtgtgcccagggaggtcaactttggggacctgcaatcatactggcattgcagctcggtgatatgttttatgtggatacagtgaagaaaatggctcacttccattttgtatcggggtcccctctgcgaacgctatgccttctgattgctggacaacctgcagatgtttttaatgtagataacaatgtcaacattgactatggtacatcccatcaacctatggagtgtcatgatttttgggtatcacttaccaataattttcctgcttttctatttactttcttttttgataatttgtttttcctgagtcagcctggtcctaatggtatgttggatgattgggaggagaatttagctattattactgcaaacagaacgaaaggtgacgatctagtaatcacccatcttggtgactgtctctggaaagaaaaaaatgagattgcagctgctcattcgtgctatttagttgccgaactaaatattgattcatactcggaaagcgcaaggttgtgcctcattggtgcagatcacttgaagtgtcctcgaacatttgccagccctgaagccattcagaggacagaggtttatgaatacgcgaaggtgcttggtaattctcagtatatcctactaccctttcagccatataagctgatatatgcatacatgcttgttgaagtggggaaggtttctgattctttgaggtattgccaagcgtctatgaaggtattgaaagcctctggccgtgcccctgaattggaggtgtggaagcaattaatttcttcactggaggagaggatacgcactcaccagcagggtggatatggcacaaatcttgccccagcaaaactagttgggaagatttttacctcgcttgataaatctatatcccgcatgatgggtacaccatctgcaccacttccaccattgccacatggatctgttagcgatagagagagccactctatgcctgaagcagcaaaatttataaatagccaatcagtaatggccatgtcatcgctaatgccatctgcttcaatgcagtcaatgactgagatagcagagaatagtgatggcactggcaggaaaatggcacacaacagaagtgtttctgagccagacttcggtagaacatcaaaacaggtacttgcaaagggtggtggatcagatggcacacagagcagtgcagcaggatctggcagttctcgatttggttggctagtgcagaagactatgggattagtgtcaaaatctcaccgccaggatcctatttctgttctgaaggcaaaattaggggatcagaacaaattttactatgatgaaaagttgaagcggtgggtggaagaaggtgctgtggttcctgccgaggagcctcctcttcctccccctccaacaaaatcatctttccagaatggtatgccagaccataagttgaatggccacatgagcgtaggccatgctcccagtggagtcacagaatggaaatcctcaaattattcagagcaaggtctgggtatgccgccaattccacctagccaaaaccagttttcttctcgtgggcggatgggtgtccgatccagatatgttgacacattcaataaatcaggtgcatctggagcggtgccatcatataacaaaccagctgctccatccgtgacaccaccagctggtgccaagttcttcataccgactgcagcacctgttgctgcagatcagatgatgccacaccaagcagcagagatacacagtgaaaccatgcaacaggatgagagggcagcctcaccgcctgctggaacatcattctcttcaaccccaccacccacacaattttcatcgcccccaccacacacgcaattctcgtcaccaatgcaatcaacaatccatcggcaatctagtatggcgaacatctccaccccttaccagagttccggggtatcatcattaagcagcgacacctcattctcaaaatcacgagctgcatcctggagtggaacatactctgagcagttcagtgcttttgcgggcacaagatcacccgatggacagacggtgcgctcaccactcatgcctggcaaaccatcacacagtcgttccaacagcaactcatcagtgcagctcaatggattgacagaggatcttcatgaggtcgagctctaa

SEQ ID NO: 15647 - DNA, 465 bp, Zea mays
  Peptide Sequence Number=SeqID_57426
atggccatggcgacgcaggggcaggccgaccaccagcagcagcagcacgggcggtctgagcccaccaccagcgtcgccgccaaccgctgggggccctactccggcgccggcgacttcgccagcaacatggccgtcatcctggccgccctgctggccgcgctcgcgctcggcctggcgctcaacgccgccgtgcgctacctgctccgccgccgccgccgccgccgccgcgccggctctggtggtggccagggcaacggcagcggcgtgctgccgtcggacgagccggctgagaagccctccgtggaggtggagctgcaggcgccggcgcgccgccgcccgccctgctggggaaaatatatcctatgcaatcacttatcctggtgcaagcatgcaatcaagcgatctggtgcatccgatctagatctaatgatgactgttattttatatttaaccccttccacctaa

SEQ ID NO: 15648 - DNA, 534 bp, Zea mays
  Peptide Sequence Number=SeqID_57427
atggtggggaagagggagcgggactgcaagaacccggtgcgccggaccacgagcatgacggagttcgcgctcgcggcggtgatggaggaggacgacgaggaggcccagctgcccgacaacggcagcagcagcagccgtggcggtgggcagcaccagcaggactggctgtccgcgctcggcggcggcgccgccgcagcgcaggaggactggatcgcggcgtaccgcgcccgcgcggcgccggcaaaagcggggctccgccgcaactcggccgactactcggccgtcgagaccgccgcgttcctccgcgcctgcgggctctgccggcgccgtctcggccccggccgcgacaccttcgtgtacaagggcgaggcggcgttctgcagcctggagtgcagggagcggcacatcacgcaggaggagtggaaggacaagtgcgcggcgacgtcgatcaaggacgcgggtgcggcgaaggtcgtcagcggccgccgccgcgccggcgaaggcaaggccgggggcacggtggccgcggcatga

SEQ ID NO: 15649 - DNA, 276 bp, Zea mays
  Peptide Sequence Number=SeqID_57428
atggcgtatgacttacccatgattcggttgagggtggtgtcgcccgccggtgtttggtggcttctcggcgacccgactgcgccggcgacaaattccggtcgaacgctaggttacccggcccaagactcccacggacccgatcctagtgatcacgcggagctccagtatgctggtcacaaccaccaggcggacgacccggcggcgagctcgcttcacctggttgaagaaggtgacgagtgggagaggccggccaacgggacccacagcgcagagtag

SEQ ID NO: 15650 - DNA, 276 bp, Zea mays
  Peptide Sequence Number=SeqID_57429
atggcgtatgacttacccatgattcggttgagggtggtgtcgcccgccggtgtttggtggcttctcggcgacccgactgcgccggcgacaaattccggtcgaacgctaggttacccggcccgagactcccacggacccgatcctagtgatcacgcggagctccagtatgctggtcacaaccaccaggcggacgacccggcggcgagctcgcttcacctggttgaagaaggtgacgagtgggagaggccggccaacgggacccacagcgcagagtag

SEQ ID NO: 15651 - DNA, 399 bp, Zea mays
  Peptide Sequence Number=SeqID_57430
atgcagagcttcctatggcgcctgtggccggacttggctgctgtcagcctcgctctgtcgagcggcacagcagtcggagcggcgcaggcggcgctgtcctcttgtcaggccgcgtggcgacttggccaaggttgcttcttggcgaagactgggcctcaggcgagccgaagtctctggactgggcacaagaaaacagggaattgcagggttatcggtgtaaagtttcccaagactcagaacactacttgtacggactgcgggttgatatatgtaaagcacagggtctcttcagcaaaatggcatggcgaaagggtatctgttgatatgggccgtcagattagaaacggacgccccaaattaaatctgatcatcccgaaccggtatgcgctcacaacctga

SEQ ID NO: 15652 - DNA, 324 bp, Zea mays
  Peptide Sequence Number=SeqID_57431
atgtcgaagcgcgggaggggagggacggcggggaacaagttccgcatgtcgctgggtctccccgtcgcagcgaccgtgaactgcgcggacaatacaggcgccaagaacctctacatcatctccgtcaagggcatcaagggtaggctcaaccgcctgccgtccgcctgcgtcggcgacatggtcatggccaccgtcaagaagggtaagcccgacctcaggaagaaggtcatgcccgccgtcatcgtccgccagcgcaagctgtggcgccgcaaggacggagtctacatgtacttcgaaggaccgatttttccccttgcacattaa

SEQ ID NO: 15653 - DNA, 186 bp, Zea mays
  Peptide Sequence Number=SeqID_57432
atggaaaggagacgcctaggcgacgccttaaaaacagtggtgtatatagaagtctacaaagataatgctggagtcattgtgaaccccaagggcgagatgaaaggatctgccatcactggacctattggcaaggagtgcgctgacctttggcctaggattgctagtgcagcaaatgctattgtctga

SEQ ID NO: 15654 - DNA, 1278 bp, Zea mays
  Peptide Sequence Number=SeqID_57433
atggcggaggacctttgtccaacggatgacatctcgagccccatagcggcgcacatcctagacttctacgacgacgacgacggtggctgcggcggcggcggtggcgatctcttcgtgggagtgaacgcggcctcggatatgttcacggtgccatcggaggatgtctcgacgtcatccgtaacgacgcctcctgcaccctgcggcggccatggcgacaacgcgtcgtcgttggacgccgctgcctcggccttctctcccatgccgttcctcgactccaccctctcggctctgctcgaagaagaagacgcaccggttctagacacggaactcctcgccatcgacgactaccggttcgcggcgacggcggtagccggagatgagccacggcccgagcagcagcggttcgcacaggtgccgatggtgcttccggtggcagaacacccgagtagtctgcagacgcagatgagcagcacagcgttcgagctgctgcacgcagcgtcgtcgtcgtcggggtacaccgacaacgactgcttcgcggcggcaatggacgaaggaggaggagggtacgtgggcctagacgaggccctttgccagcagcagcagcatcagctcctgcaacctggcgcgttgctctccgctggcatgatggagactgcagcgcagggttgctacttcgtcaacggcggtccgacagcacagggagtcctgttcggtgccagtggcagcggcgtggtgatgcccatgacggcggggttggaggagatcggcgagtaccagcgcatgatggagagcgccagcgcagcgctggccgccacgcacagccccgacgcggactccgtcgccgcggcgcagcagatggcgtttagcggcaacggcggggaaatgcagatgggcggcggcagcatgagcccggggcggctgccggcggcgacggaggcggcgtcgagcttggaggacaccgacttcaagagcgcccgcatcaccgttgaggagagacgggagaagatccacaggtacatcaagaagcggaacgaacgcaacttcagcaagaagatcaagtacgcttgcaggaagaccctggcggacagcaggccccgcgtgcgcggcagattcgccaagaacgacgactatggcgagccgtcgtcaagggtggcgcacaaccacgacgaatacgaccacatggccgccatgaaggcacaggacatactcgaccccgacgccctgcaggccgccatgaactcctacatgtacaaccacactgttgagtcctggatgtaa

SEQ ID NO: 15655 - DNA, 183 bp, Zea mays
  Peptide Sequence Number=SeqID_57434
atgttgctggcggtgatggcagcggtgggtgcgctgcaaagggggcatggggtggtgatagtgcgtatgggggtgtggggggcggtggtagtgcacatggaggcgggcacgcgtgcgggggcacggggcttcaacaacaatggcttcacgactttccaaggcagctacacgggcttgagctga

SEQ ID NO: 15656 - DNA, 549 bp, Zea mays
  Peptide Sequence Number=SeqID_57435
atggccgaagctctggcggcaatggcgggcggaattgagctcgccggagctaagggaaaggggctggccggtgagggtgagtgcggggcgaagtctactgctaggcatactggagattatgagggccgagaaactgaagctactgagacagcttcgatctcggagattatgaggaattttggaatgattattcagaagggagaggaatctgtgccaaggaatgataccgttgatgccaaagcaaaaactattgatgccgaagctatcggtgatgatgaagagaatgatggtatcttgaacccgagtaagcctagccatattgaatttgacaaatctactgtgaagctagaagacctggttttaatgaagaaactcgactattttggaaagaatgatgatgagttgataaggctccccatgccagatagccgaagtgcaattcagcgttgtggcagaataaataagcactcgagatctggttcaagaatacttggcgaacaaagttctgccaatacagcatgggtgggggatgccgaagctaaaggatga

SEQ ID NO: 15657 - DNA, 498 bp, Zea mays
  Peptide Sequence Number=SeqID_57436
atgaccaacgagcagctgacggcgtccctcgtccacttcaacaacttgggagccttgcaagcccaagtgaccaccatgcaatccggcatgaacaccatgcagtccgacatgttcgcgttgcagtccgacgtggccgcgatgaaagccatcatgttgggctcccagccgcagccgcctctgccatcgtcaaccacgaccgtcgcggctttgacgacgccatcgctactggccctcatgtgcaccccggcagcctcacattcggcagatgtgccgatccaccaggtgaccttcctgcggtcgtcgtcgcaagttccagcatttctgtcacctcacgccggcgggagcagcaggagcgccgccgtcaagggctgtgcttcaactgtgaatgagccattcgtctgtggccatcagtgcaagcaactcttcgacttggagttaggcgacttcgagtttgcggacgaagtcgtggaggacgccataacagaggccaccctgtag

SEQ ID NO: 15658 - DNA, 294 bp, Zea mays
  Peptide Sequence Number=SeqID_57437
atgcagagcatgtgttgtgttcttctctgccttgctatgagatatgaggctctgttgcttccagatgctaaatactgcaacgaccttcacttgaaagtgtcccgtttggagtggctaacttttacaacgtattgtcttgataatggtttctacaccattgtctccaagatatatatcttcttcaacgatgttattcactacgggtccacttctagaaggtatgtatctgagaaatattttccccatcgtaaggcccgtgtcatgacaggccggtcggccaatttggccatctag

SEQ ID NO: 15659 - DNA, 324 bp, Zea mays
  Peptide Sequence Number=SeqID_57438
atggcgacggaaacgggaagagcgacgccgctgttttgctcaggagacagaggcttatggctgtttgtgggacctttcatctgggagtggactgttctggatgcacaacatgtgtttgagctccacccgatggctttttccctttatttttcccacaacatgcaagctgtagctaaagccactgaagatcagacagacgcaacacaacaacatccactcccgccggctttctcattgatttcccacaaggcgaaagctgaagctcaagccgctgttggccaaccatcaacatttgcgtttttactgtacctatttgaaatctaa

SEQ ID NO: 15660 - DNA, 441 bp, Zea mays
  Peptide Sequence Number=SeqID_57439
atgcacatcagagctagggttcaagtactacccttaagggatctcaaatcgatgcatatgaagaaggtctgcgctatggggtttacgaagaacaacactggaagaccaaaatttagcctgggaagtggcccttgcacaatggccgactggcgtcccatgccatggctgccgggtggactgttgaatattcagattggtgaggcatcaaggcgagcatggcttggcgaggaagctgatccacagtactcagatcgactgctcagaccatacaagaggcccgtggaggtttatatggaccaacaggattcaaggtggtttatatccaaggatgcaattgtatctggccttggtcttctaggcatcaagcagggtggacctgagacaacgttgtctaagcctcgtcgaaagagagtcgtccgcaaaaaggtcgcttcaggttga

SEQ ID NO: 15661 - DNA, 366 bp, Zea mays
  Peptide Sequence Number=SeqID_57440
atgggttgcacaagggcctcttcaactcttctcatggtcgtcgtggccatctccgtgctcgcactagaccattccgttgctaatgctcgccaggtgaggagcccgtccatgtcgaccggagagcaccatccgtctaggaacaaggaagcactgcaagcgacgacgacgaaggagcacggcgcggtgcacaccgggggcggcgctggaaccgtgcacatgagtccgggatcaaccggagaagcaggcgtggtcggacaaccgatcttcggcggccgcggagaaaacagcagccccgccgctgccgagaaggtagcagtagtggtcgcgagatatggacccaggcctcaccccaaaaaacacaactaa

SEQ ID NO: 15662 - DNA, 549 bp, Zea mays
  Peptide Sequence Number=SeqID_57441
atggcactaaatcaagatcacaagatccgtggagctgttacaatatcaggaagtcctggactgagagatgaagcaagcagaagacgccgtattgctattgataaatcaagagcccagttcctgatgtgttgtggacttgaatgttttcttcagacatggtactctggaaaactgtggaccagtctacgagagcatcctgagtttaattctctggtgaggacacgcagtaaacacaaaaacatcaaagctctagctaaggttcttgcagactcaagcgtggggagacaaaagtccctgtgggaagacctgaagcacttgaagaggcctttactcgtcgttgctggtgaaaaggacgcaaagttcaaagacatctcgcagaaaatgcgcacggagataatgagccacgcagaatgcggatctgatggtcctaaagggaaggaactttgtgaagtgctcattatcccagatagcggccatgctgtgcatgttgagaaccctcttcctttggtgaagaaaggtttcaaattcgtgccgcccaagaagaactga

SEQ ID NO: 15663 - DNA, 453 bp, Zea mays
  Peptide Sequence Number=SeqID_57442
atgggatgttttctccagattgtgttgttgcgtgaccaatcttattggaaaggcttacaggaaaaggtccaacagtttgatcatcgtagcttggtaaactggaaacatcttaatgacctagtgttcaactacgccactctgagcaggctaatagtagctttgaaattatgcaggtatgactattcaggatatgggcaatcatcaggaaagccgagtgaacacaatacttatgctgacatagaggcagcttacaagtgcctcatagagaaatttggtgccaaggaagaagaaataattctttatggacaatctgttggaagtgggcctactgtagatttggccagtcgtttatctcagctgcgagctgttgtcctgcatagtcctatattgtcagggctgagagttatgtatcctgtgaagcgcacatattggtttgacatctacaagatatga

SEQ ID NO: 15664 - DNA, 657 bp, Zea mays
  Peptide Sequence Number=SeqID_57443
atgtctgcgtgtttgttctctctatctcttcgaatgacatctccattcttcacactatatgcttatccatggtggagagataaagaaattgattctcaagccaagaggtcgcaaggactgtgcccacttactcctgaggaggcatcacttgttttgaaagctctaggatttcaaaaggatgctcttatgtacatcgcagctggtgaaatttatgggggagataggagactagaaccactacggtctgcttttccaaaccttgtacgaaaggagatgctgctagactctgaagttctgcatcaattccaaaatcactcttcccagatggctgcacttgacttcattgtatccacagctagcgatgttttcattcccactttcgatggtaacatggcaaagcttgttgaaggtcaccgaaggttcctgggttttcggagaagtgtggtgctagaccgccggaaattagttgaacttctagatctgtacaccaacaagacaatctcttgggacaaatttgcatcttctgttcgggaagctcataaggaccgtgtagctcaaccatcctgcaggcgaaaacttgaaaacagaccaaaagaagaggattacttctatgctaacccccatgaatgcctagccaattcaaccttgtgcagctaa

SEQ ID NO: 15665 - DNA, 1221 bp, Zea mays
  Peptide Sequence Number=SeqID_57444
atgcagtgcagcagctccatcagcccgtatactattgatcatcccactctccccgttatcttcttcctgttatataggcgtcccgcagcagcagctgagcagagcagcggcgaagaagcagcagcagaatgctttccgttccaggagcagcaggtgcgcccagccacggccaccccgaccccgccccgcgccttcttcgtcttcggcgactcgctggtggacagcggcaacaacaactacctggccacgacggcgcgcgccgactcgccgccgtacggcctcgactacccgacgcaccgcgcgacgggccgcttctccaacggcaagaacgtgccggacatcatcagcgagtacctgggcgcggagccggcgctgccgtacctgagcccgcacctggacgggcggaagctgctggtgggcgccaacttcgcgtcggcgggcgtgggcgtgctcaacgacacgggggtccagttcgccaacatcatccgcgtccagaagcagctgcgctacttccggcagtaccaggaccgcttgagccgcctcgtcggcgaggacgccgccgcgcgcctcgtccgcggagcgctcgtgctcgtcaccctgggcggcaacgacttcatcaacaactactacctggtgcccttctcggcgcggtcccgcgagttcgcgctgccggactacgtgcgctacgtcgtgtccgagtacgccaaggtgctgcggcagctctactcgctgggcgcgcgccgggtgctggtcacggggtcgggcccgctggggtgcgccccagccgagctggcgctgcggggcagccgcgacggggagtgcgacgccgagctgcagcgcgccgccgcgctctacaacccgcagctggtggacatgatcaagggcgtcaacgcggagctcggcgccgacgtcttcgtcgccgtcaacgcctaccggatgcacatggacttcatctccgacccggcggcctacggcttcgtcacctccaaggtcgcgtgctgcggccagggaccatacaacggcgtggggctctgcaccgccgcgtccagcgtctgcccggaccgcagcgtctacgccttctgggacaacttccaccccacggagaaggccaaccgcatcatcgtcagccagttcatggacggcccacaggagtacatgcacccgctcaacctcagcaccatcctcgccgtcgacgcccgcgccgccgccaccttcaactag

SEQ ID NO: 15666 - DNA, 413 bp, Zea mays
  Peptide Sequence Number=SeqID_57445
caaagtcactagattatgataaactgtataaaggcctggaggtgcttgctgagtttgagaaggctgcaaattctagggttgtcgactctggtgtcctgaggggaatgaatttagaagacatcaggaaagctggggagcggcttattcttcagggtggctgtaaaaatttctttcagaagattgtaaaaacaagggagatcctcaatttggatatccatattctttcctactgctggtgtgcagagcttataagatccgccttctcatcagccggctgtctagatggtttgaacatacatgcgaacgagttcgcctttgaggaatctgtttcaactggtgagattgacagaaagatccagtccccgctagacagatatcggtatcgtcgttgggtcaagcacaagcttgcgtag

SEQ ID NO: 15667 - DNA, 228 bp, Zea mays
  Peptide Sequence Number=SeqID_57446
atggcgccataccttgagcaggggcatcgaggccatcatcatgcccatgggcgtagcttgaacgagcatgtgcatgacttcctaggagccaggcaccatctcaggcgcgaaatgctgctgttgcggaggcaccatggttgcaccctgtggcggcgccattaccggagcaccttgctgtggcgcgaccgctacctgctaaggcaccacccaaaacccgggaggacctag

SEQ ID NO: 15668 - DNA, 154 bp, Zea mays
  Peptide Sequence Number=SeqID_57447
gctgcaagtccaccaattcggcctcatctgcgacaacctcgacgcagtcaacaagttcgagcccaattacaggcttatcagaagactacgatacaagagtaaccacatgcttctattcaacctgtcttcaattacatttgatgttagttactaa

SEQ ID NO: 15669 - DNA, 1017 bp, Zea mays
  Peptide Sequence Number=SeqID_57448
atggacgtcttggccctactctttaatagggccgaggattctggtttattgcaacaactgtctggaagatctaaactccatcggatctctatgtatgctgacggtgttgttatttttctgagtccctcggctgcagatatctccattgcaatgagtattttggatttgtttgggaaggcttctaggctccgtaacaacgagcagaaatctaatgttttccccatccggtgctctgaggatgaccttactgctggtccagaatttattgccatagctggtaggagaattatggtacaacatgtgctcaccagtatgattgtctatttggctatggccattgattttcctccatgggcattagatgtagttgataagataagaaaggttttctttggaaaggttgtaaagatgtcaagggaggacattgtttggttgtctgggggatggtgtgcacatttgggagatggcaaatattcggctaagtcgccttatgaaggtctttttgttggttcaacatcctttggtcattaccatcagggaactgctgatgaagtggtggattggtctcatggtaaacaactttgggaactttgcaaagacaagtatgagcccttatggctcaggggaggaaagcactgtgatttggagctctttccggaatacatccggcacctcaagaattttttccactcactagagaaatcgccatcccataggcaagcatggagggagaatgtggaccggattgaaccctcgcggaagagcactgatttctttgaaccctcgcgaaagagcacagaccaaaggaaaaaatcaaggtcaactcgagataagacgagaaacactgaacatagatatagcaacgtcgagaaggtagacaagctaaagatatcatttgatcagttcgagaaatccaggagaagtgttgatatcttcgagaggccaaagaggaacattgagcagctggattgtggccggaagagtgtcgacagattggacaggatctgggctagttaa

SEQ ID NO: 15670 - DNA, 516 bp, Zea mays
  Peptide Sequence Number=SeqID_57449
atgggatgttttctccagattgtgttgttgcgtgaccaatcttattggaaaggcttacaggaaaaggtccaacagtttgatcatcgtagcttggtaaactggaaacatcttaatgacctagtgttcaactacgccactctgagcaggctaatagtagctttgaaattatgcaggtatgactattcaggatatgggcaatcatcaggaaagccgagtgaacacaatacttatgctgacatagaggcagcttacaagtgcctcatagagaaatttggtgccaaggaagaagaaataattctttatggacaatctgttggaagtgggcctactgtagatttggccagtcgtttatctcagctgcgagctgttgtcctgcatagtcctatattgtcagggctgagagttatgtatcctgtgaagcgcacatattggtttgacatctacaagaatattgataaaatccctcaagttacatgtcctgtgctcattatacatgtcaagaacaaggcaacataa

SEQ ID NO: 15671 - DNA, 231 bp, Zea mays
  Peptide Sequence Number=SeqID_57450
atggcgctggtgcaggcgggcatgggccttacccgggtcgttatcctcgtcggcgccggcgttgccggctccgtcgtcctccgcaacggccgcctcgccgagatcctcggcgagctccaggagatactcgacaaggggaagaaggtgaaggatggaggagggggagacggggaaaccgatctcaacgaggctcttacctcgcagttcaggttcaggatggacattgtgtaa

SEQ ID NO: 15672 - DNA, 279 bp, Zea mays
  Peptide Sequence Number=SeqID_57451
atgcaaagatacagttatctagcttgtcagggtgatgtgaggatattagtgatgatcctaacagacccatgtagaatggttgatgtcaacggtagcaatgctgcgcccatctacaagttcttgaaatctagcaaaggtggccttttcggcgacagcatcaagtggaacttttccaagttcttggttgacaaggagggacgtgttgtggatcgctatgctccaaccacttcacccctgagcattgagaaggatatcaagaagctgcttgggagctcttaa

SEQ ID NO: 15673 - DNA, 1371 bp, Zea mays
  Peptide Sequence Number=SeqID_57452
atggagaaggaggggcaggagatagcagcatcggacgggggaaaaggtccagccgagcagcacgccattgacgttggccatgtcgtccagcacggtgatggcaagggcgaggacgacatcgagaaggagagagtggctgtggttgaggacgtgcagacgaagaagaagagcagcaggagagtggcggccctcgatgccttcagagggctaaccattgtgcttatgatactagtggacgatgctggtggggcttacgagcggatggaccactcgccatggaacggctgcaccctggcggacttcgtcatgcccttcttcctcttcatagttggcgttgccatcgccttcgcgttgaagagagttcccaacatcggcgccgccgtgaagaagattaccaccaggacactaaaaatgctcttctggggtgtgcttctccaagtgcttctgttcactgatcatctagctgaaatgacctttgtcactaccgtatttgatggtatatatcttggtatgtacggcgaaggtgggtattctcatgctccggatgacctcgcttatggcgtggacatgaagaagatcagatggtgtggcatcctacagagaattgctttggtatacttctttgttgctctgatagaggcgctcaccgtcaaggtacggcctaccacggtgcggtccggtccatacgccattttcgatgcgtatcggtggcaatggctaggtggccttgttgcatttgtggtatacatggtcacaacattctcactctatgtcccggactggagctttgtctaccacaacgaaggcgacgtcaacgacgggaaacagttcacggtgaaatgcggcgtgagggccagcctggagcaagcctgcaacgcggttggctatgttgacaggcagacccacaaggagaggctgaagcactggcttctgacgggcttctcgctccttgtactcggcatcatcctacacttcacgaatggtactgccatcccgatcaacaagcagctctacagcttcagctatgtctgcttcacaggcggcgcggcaggaattgttctctcggctttctatatactgattgatgtctggggactgaggacgccattcctcttcctggagtggataggcatgaacgccatgcttgtgtttgtcctaggcgcgcagggaatattggccgcatttgtcaatggatggtactacgggtcgccagataacactcttgtcaattggatcgtgaagcatgtgttcgtcaatgtctggcactcccagcggcttggaaccctgctgtatgtcatgttctgtgagattgtgttctggggtgttgcggcaggcgtcttgcacaaattagggatttactggaaactatga

SEQ ID NO: 15674 - DNA, 735 bp, Zea mays
  Peptide Sequence Number=SeqID_57453
atgggctctgcttcatcagatggtctccgggagcacttgctggacgtggacggcggcggagcggcggcggtgcccaagatacgggtgcgcgggctgcggcgccgcgcggacgcgaccggcgaggagatcctccgcggcgtccacctcgacgtgccgcgcggggccgtcatgggcgtcatcggccccagcggcagcggcaagtccacgctgctccgcgcgctcaaccgcctctgggagcccgcgcccggcgccgtgctcctcgacggcgccgacatctgcgccctcgacgtcctcgccctgcgccgcaaggtcggcatgctcttccagctccccgccatgttcgacggaaccgtggctgacaacgtacgatacgggccgcagttgcgcggcaagaagctaaccgaggccgaagtgaagagcctgctgcacctggccgacctggaccctgctctgtgctccaagccggcgtccgagctgtcggtgctcctgctggacgagccgaccagcgcgctggaccccatctcgacgcagaacatcgaggaggccatcgtgcggctgaagaagacgagggggctcaccacggtgatcgtctcccacagcgtgaagcagatccagcgcatcgccgacctggtgtgcctcgtcgtcgccggcgaggtcgtggaggtgctcgcgccgtccgacctgtccgacgccaagcacccgatggccaggcgtttcttggagctcagcggctga

SEQ ID NO: 15675 - DNA, 1251 bp, Zea mays
  Peptide Sequence Number=SeqID_57454
atgcatctgcatggcatgcgcgagagcaagcagggcaggcatcttggttttgttacttcctgcgctgttttgctctcgcggattcggtacgttccccgcgtcgtgggaggagcgttcctcggccgcacgcctgcctcccgccccggccgcacgccgtcgtggcaccgtgctctcagtgccgcgcatcacccacctaccaactgtccggctcaggctgtccgtccccatgccgccgtggcgtggccaggcccggcccgcaacggctatatgtccgcgccggttcttgcttcgaatcctctctcgggggcggggacgagcgcgagggcgaccatgattgcttgctgctgccggtggcgtggcgtggcccgtgcggcgctgggcgcgcgcaccgctctgccagccagccactctgtgcgtgggcgcgaggcccccccgcctggcaccggcacggccgcgatcagttggctgtacgcggcgcagatcgtgctcagctctctctcagcacttgagcaggcctggggtgccgtggcctgtggtctgcggtgccgcctgtgggtgtgtgtcgtgcgcgcgtactgtgctctgatgtacgtacgcattgtatatgcccacgctgcggatttctgtatcggcattacagccgtgagcctgcagagcagggacgtgtccgcatggggtgggcgggcgggcgtggcaggcgccttccccttttggcctcactcgcacgggccggtgctcgaccaccgccatctatctatggccagttcgccatggattcaaacgagtcgcagacagaagcgtctcagcttcttcactgcgctgcgctcggccctcggacacggtcccgacacggctgccctgctcgtgacgcggcctcatgatcgctgccccggtacgaacgacggccacgccgggctgccaccccgactgaaaggaccaccgcgggtggagccaccactcccaccccgcccttgcggggacgacgacctccgttggcggtgggagtcgaacgaggagccgcaggggtggggggtgagctcctcgaggagatgctcattgcagccggcgtggaaagtaggggaagggcacgatttgcttaatgagagccttcaaatggacatactgggggctgaggccacacagaaggttcaacaccagggtacgatcggtgacgggctcgccaaggtcgcggagagaatctgccatgccttcatatggcggcagtacttgctcatggacaggcccccctga

SEQ ID NO: 15676 - DNA, 372 bp, Zea mays
  Peptide Sequence Number=SeqID_57455
atgatcttcatagccctcgggcttgagattcagcaggagaaaggtttatgtcttcatccaaggcgggcggccagcatcgcggcagcgtcagggaggacaggggcggagtgccaagccgggagcacgacggggaggaagaattggttgagaagccaagcattttcaaagcaaaagattttggactttggaattgttgtggagatggagactaggatgggcgcgatcgagactggcaagggtggggttagaacgatagttggactaggtaaaggagcatccaagttcggggagctccgtcacgcagatgtcattgaggctccatccaagtcgacggatcttgaatcatcatcgtcacttgatccacgttcttag

SEQ ID NO: 15677 - DNA, 216 bp, Zea mays
  Peptide Sequence Number=SeqID_57456
atggggccattaggaattgagttagggatcaaggtgaacacgcttgatctttggctcaaggtcatcgcctgcctcgccgactcgctgcttcatcgactccaggaggctacgccaccacctcgtcagctcggacgctacgttaccgcgcacctcaccgaccacttcgtcagcttggggtgctgctgcccacctcaccaagaccactcgaaggaataa

SEQ ID NO: 15678 - DNA, 324 bp, Zea mays
  Peptide Sequence Number=SeqID_57457
atgaagcactgtggctctggcatcggcaagcgctctgccacagattttggagaaggctctaaagccgtcgcgccgatgaaggaagaatctcaaaagcaccaactacacattccatctatggtccaaaggttaactcgtcaaaaggataagtggttgaattttcttaacaaattggcataccttcacgtatcgctgatccagtgtgcgtactgcgactcagaggtgatgcacatgctggcgcagatcctgctgcccggcctcgctgccgtctgtgttgacagtagcatggaggacctgttcaacattcctggggaaatcatgtga

SEQ ID NO: 15679 - DNA, 1014 bp, Zea mays
  Peptide Sequence Number=SeqID_57458
atgaccgcgtcaaaaaagggaccgggaaagggggataccccgaaagggatccttctccgcgaaggaaacaggccccgagcctctctactgatcagaggttcaaaggctggcccctccgaggggttcaacagccgcctcagagcgcttgggctccgcgcccactactggtcagaggttcgaaggccggcccctcggaagggttcaacggccgcctcaggccacttgggctccgcgcccactactgatcagggggttcgtaggctggccctcgaagggttcacagccgcctcagacacagagcgagggatgaccctggaggacagcgccgcctgcgccgctctgactgctgtgccactcgacagagtgaggctgacagcagccaagtccggcctcaggcgccataggaaactccgcttcgcccgaccccagggctcggactcgggctcagcatcggaagacgacgaactccgcttcgcccgaccccagggctcggactcgggctcagccccggaagacgacgaactccgcttcgcccgaccccagggctcggactcgggctcagcctcggaagacgacgaactccgcttcgcccgaccccagggctcggactcgggctcaaccccggaagacgacgaaatccgctccgcccgaccccagggcttggactcgggctcaccccggaagacgacgaactccgctccgcccgaccacagggctctgactcgggctcagccccggaagacgatgaactctgcttcgctcgaccccagggctcggactcagccctggcctcagccgacggtctccgcctcgcccgacccagggggctcggactcgacctcggccttggaagacagactcgacctcgacctcggaggagcctcaacctcgcccaacccagggctcggaccgaccacgtcaacaggaggcgccataaataccctaccccaagctgactcaggctacggggaacaagaccggcgtcccatctggctcgctccgctatacgagtaa

SEQ ID NO: 15680 - DNA, 444 bp, Zea mays
  Peptide Sequence Number=SeqID_57459
atggggttcgacgtggccagccaaattcattcacccccaagccggacaccggatcctatgctccctgaagccacaccatttacagatctcctccgctcctgttccgccacgtggtttcctttgacatctgtgccacgagagcacgggcttccgtccccacgtccactcccgccacgccacgcgtccgtcctcccagatccttcattatcgctctcacgagcgcctccccaaccttccctcttcccctccccgcgtcgcctcgtcattccgcctccaactctgacgagcggccccacctgtcattgtctcccccgccgctcgccggaccggcagggcgacgaggacccgtttcccccttcctgctccggcacccccatcgcgtcctacgctgctgatcgagcgaaccccatcccccctgatcgctccgtccgttcgaccgcctag

SEQ ID NO: 15681 - DNA, 231 bp, Zea mays
  Peptide Sequence Number=SeqID_57460
atgacaatgaatgttgtggtaactccacacctacccgtctgtttatatagtgctgcagcatttgagaacaagtccccaacagtgcctgattactctacctctgaaactaacttcctctgggttgactgttctgacgatactgctgctgatgctgagggtactgcctctagaactgctgctgaggcggacgttggttctgctgcagatatccctgagggtgactctgcttga

SEQ ID NO: 15682 - DNA, 690 bp, Zea mays
  Peptide Sequence Number=SeqID_57461
atggatgcccttggcttcgagtatcccgaccatgacagacttgacgaagaggccgtgggagtgaaaaagaaaagagttgtgagtattctgaaaagacaagcgcaaagatctgtcgagaaggacaagaagaaaaggttaacaaaaagatcgaagttaacaccagaaccttcaacatcaaagaaaagaaagattatagcatcaagccgcgaagaagaaagatcttctccgccgaagcattctacagagaacccttcgacaacttctattggcgtgacagaaattttagagccacagaagaaagatgctagggaaagtgccgaaatagaggcacacaaagggccttcggcacccggtggggggaatgcgtggaagaagcgttgtatgatgaatgtgatgagggctgttcttgataccccgcctccggtaattcaaaagaagactgcaccctctgtggctgacgaagggcctcaacaagccaaaagcagtggaggtccctgtggaacaactttatcagaaattgatagacttattgctaacgtagcgtctgagaagaataccgaggggacgattgctcctgagacttcagtgtcaaagggaaaaagaactgaagaagcctcttcagaagataaaggctttgacttacgtgacctagggggcaacaactttctgaagaggatatatctgaattaa

SEQ ID NO: 15683 - DNA, 4869 bp, Zea mays
  Peptide Sequence Number=SeqID_57462
atgccacaacgtccatggcgagcggagattcgtacgggctgtgtaatttgggggtttagcgagatcccagaatataacagaactgcggccgccgaagatgctcggattggaaggggctcggatgggggcatggggcggaggcgtccgttgatggcggcgcggatggagtcgcgaggtggggcagaggagagggagcgcgtccgtgcccgtcgcggagaggatggaaggggcgcggatggggcggaggagacagaggcaatggcatcagtcgcggagaggaaggcgtcagtcgcggagaggagagggaggcgtcagcgatggggtgctactcctgcaaggaaatctagtatgactgttctgggaaaagtcccaaaaccgattaatttaccaagtcagaggttggaaaacaatggtcttgatcccaatctggaactggttccaaagggcacccacacctggggcagcaaagcaccatctacaacaccaaacgcatggagttcctcatcaattctgtcttccaagaacgatggaagttccacttcatctagtcacttcaatgtccggcccacctctggcggaggctcaaggccatcaacagctggaagtgaatcacttggttcacccaatgcttggggtgcaaattctcgcccatcttcagcatcaggcacatttccatcatctcatctaccaatggccacaaatcgtccccaaagtgcggaaacaagacctggaagttcacaaatttctcgatttgcggataatgcttcagataatgtgaaagcatcgataaggactattgatagatcggaatcttcatcacgtgggcctgggttcacattaagtactggtgatttcccaacgcttggctctgaagcaaacagtcaacgagggcatagttcgaaagggcgcccaacttctagtttgggtaaagaggtgtcgcaaggtgaacaagtgaagagcctagcaactggaactggtgaagtaatttcaccatccaataatcaccctgttgatatcatgaagacagagcatcatgcacacactggaggtgctcctgtcccagccacaagtgtgccaaatgaaggcttgcaacaacagccatatccaccaaattttcctatgcctcctctgcagtttgattcatggcgtgcacctcctggtcacccccctgagggaatgtggcatagaggaccagtgccaggtgggccatacagacctgttggcccccctggtagtttccctgtcgaaccctttggttattatggccagttcccacccaactccgaagctgcaggaaggcagggctcagggcatggtggatatcacactaaaaatgatgtgtatcatcctatgcctcataattcctatattatgaatcagcctgttattccagtcagaccagtttatcagggtccagtgctgtatgatgggtattatggccctcaagcaaatttcaataacaccaatgttagagatcctcattttgttggaggtcctggaatactaaatcaattcccaaatcagaatgacaggtttcaccctggacatcctcaaaacagaccaggcaaacatgaaacggtcccaagggagcagctggaatctgataagctacatgtctttcaccaagaacaccctgggagtttgcatgataatccagatcgtctaggaggttcccgtgaatttgaaaggaatgtgcagccagcaccgccacttcttccacatcctgatggaaaacagactgatatgaacatgagggcagatacaagggacacctttagtgagactgaaagaaccgtggtacttacaaaatcggtgcctaaccagagaggttcggttggtatagaccatttgtctgtttatgaaaacacacgatcccatcacagagaaacttgtgatggcactctgcgcaagaagttcaaggaggatagctcagttgtacttgaccagcatcctgtcattaagaagaatgcagctttaatagagaaaattgagagtttgaacaacaaagccagaaatgtctatgcacagaatctcccagaaccagcttcatccaaggaattcaagaagcataaaaaaactactgatgtttcatctaatgatgtcatcagtacgacatgcacatctgatcaggcagtttctgtttcacatatttctgctgtggtgcagagacgaccaaatgtgaccattgagggtacaattcttggaccggcacattcacatttaactgaatttagcaaagctgagaagcttggtgattcaattaacaatcatttacataggagagttgattcttcgagaaacagttaccatggtccttgtaaagataggccagctaataaattcggaagttgtggacgtggagaaagttacataactaattcattaccagtagctgatttggggaatgatatccatcatggccaacaacctcagattgcctcacagctgcaacctgtgattgtacctgatgatatgccagcttcactcgattatgagtctcagaacaaaaagcaggatgcagcatcaaatgctcaaaacaatcagcgggcaaaaatgaaggagttggctgcagaacgtgcaaaaaggatgaaagctgaggaagaggaacggataaagaaccaaaaagcaaaagcactcgcaaagttggaagaattgaacaggcgatcatcagtacttcagaagaaatcaaatgatacaaaagtagaaactgatgatgcacatgataagcaacagattggacttgatgtgaatgctaaacttgacacttcaactgaacaacatgatgttgttacgcctgataggcttactgctcttctgcctcctaatgatcccaatcatactatggttcagatacaggcccagtctactgcacaatcaaatgctttagatggtggcaaagcgcatgatgctcataccacctcatctttggtcaagaacacacacagcaacatggagcatgttgtgcagaagagtatctcacagtcgcataatatcagtatggtaaagactaagcaaggctacaggaaaagacaggttgtttcagaggagaaaatttctggcgagaaggcaagtgcttcagtaaccactgattccagtgtgcagaaaaatgttgatgttcccgtcgacacagtaacggctgttgttgcaccacatgatgatcccccaactcagaacaagaagggaacccggcatttgaggagtaagaaaaaggtagatgatgcttcagttatttctaaacatccacctgtggtgtttaatgaacagaatacagtgaaaatctctaccgagccaaaaacacatactggtggtgttattatcagtagctctattgttccgattgaaggtactattgtaactgttggaagtataactgttggtggactttcacttacagctatgaatcaggagcatgttaattcagcagatggaacaaatagtactgaaagtggcctatcaagacctcagcaagcaagaaaatctggaaagcatcagcatgttcttcggcctgttgagaagccacatgggaatgatggtgtcttgtgggcaccagatatgctaccattgcataatgagcagtctgatggagccatgccgactgcagcagtagctgacgtcactcagccagctgggaaagccatcaatgatggagagaatgtgacaagaacaaagagggctgaaatggaaagatatgttcccaagcctatgtccaaagagctgcaacaacataatccaagccatgataaggaagcaattgataagcccggtgctgctaaatcacatcctgcagccgaacccaagaaaactagcaaaggacatgggggcaaatctaatccttcttggcgcaagcgggatccagatcaacctgctatggtggcaccaaattctgttgaccaagcagacaactcttatgaatcaaaggaggttcagaactgcaccgatatgaatcagcctgttgaacttggcaaggaagatacacagttaaaatccaatgtagatgctgctgctgagaatagctcagctccagctcaaactgttccactatctgccggtggtgcaaaagaacatagtgcggctaacaggcaaaggcgacagcattttaaggctcaaagaaatgaagcaagtagctactcaaatgagagcaaagttagagagggcaagaacgactctgtctatcaatcagcatcaccggtgattgattcgaactcatccaatcacaagaatgtgccaagatcagatgtgaaaaacagcggcatagtttcacattctagagcctggaagccgaaaaccaattcccatcctcagaacagctcagacggcaagattgctgttgaagggaaagtggattcccatggtggtaggcttgagctgaacatgcccaaaggatctgatacaattacccatcaagacaccagcagtaaaccgatgaaaaggagtgatggcaccgatgaggcctcacacagcaaacaggagaacctgacacaggaagatggtaaccagaagatcgagactggacaggagcaggctaatcctgcaccgcgtcgccaaggccagcccaatgcaaggtatcacaggggaggtggggcacacaggggaaggggcggttatgacactgggaggccaaaccatggcacaaacgcggagaggtggaagggtggcagccatcttgaataccagccggtcggatcccaaaacaaagctggaggcgacttccagctgagtcagggcatggaagatcgaaccgaggggcctcctgcatctggacaagcgttcggggagcgtggccacagcagggggctacgcccagcaggccgctttgtccggcgaaacactgcctctacgtctaccactaattctcaccaacatgaataa

SEQ ID NO: 15684 - DNA, 366 bp, Zea mays
  Peptide Sequence Number=SeqID_57463
atggcgcacgaagcaagtagcctcccagcagtccgggtataccccgcgactatgctagtagaccacactgtgatactcgatagaccaagtgtgtcggttaaggggccggtacaacaagggtctcctccagcagctactccagcaaccgggtcacccagtgttggtgcagggggtgcctccagtaggggcacatgggagcgacgcctcgctgattctacctcctactgccctgctgctccagctcctggcgccgacgctcctgctcctcatgcaggcggtggtgcaacctctccaagtggctggactggccagtcactaggcgatgaagcggatgctccgcaagaagagagggcaagaaaggaatga

SEQ ID NO: 15685 - DNA, 279 bp, Zea mays
  Peptide Sequence Number=SeqID_57464
atggagtacgagggatcggaccggccccatgcgacgcgtgacgccaggggaggagcaccacgagatgaggcgcagacggaggagcaccatgagccgctgcgctcgtgcatcttgttggttgtcatcttcctcacgcgcattttccttgatggatctggtcatttggtcacaaccactagccacctagtcctagatagtaggggtcatgtgagcgtcatcgcagtgccatgccgggatggtgagcaccataaggtcatgagggttgcgtgggatgggtga

SEQ ID NO: 15686 - DNA, 399 bp, Zea mays
  Peptide Sequence Number=SeqID_57465
atggagactacgcctggggagggctgggctcgcctgcgcaccacaaatggcctccttgccacaccttgggggctcgtcgggggcgctcagccatggctgcggcaccgccgcgagcagggctcgaggtcggttgcgcatgtagaggagaagacgaggggcgaggggaccgcggccacgggaagtagagggaggggcatcgagcagggcagaggggctcctcgcctgggttcgtccagggtgtggaggggacggggcgcagggcagacttgggcacaacatgtgcgccgggagcagcggcgacggggcgagaccgggcggctgctacgcgcaggccgcgagccgctggccgcgctggctgatgccatccactttgcgctccatgtcctcgtggcccgctga

SEQ ID NO: 15687 - DNA, 267 bp, Zea mays
  Peptide Sequence Number=SeqID_57466
atggagcaagagcatctccacctagcaatggtccactcgttgtattcatcactaagtcagcttgattccaccaatggtgttcatgctggaacggaggcatttgttatggctcctatattctcgcttagggatctaggtatgtgcatcgtcccacggctttttcctgagggcagaggttgcctttggtgcaatctatgctcaggtaaagaagaaggcgtcgaggcggatctccaggagttccaggactttgtcgagttcgaggattag

SEQ ID NO: 15688 - DNA, 1461 bp, Zea mays
  Peptide Sequence Number=SeqID_57467
atggataaccaccttatgtcgtccttcaccatcctactgctttcttcttttgctgcaacggttgcatatcctgctcgcaatgaattacagcctaaccagatgaaaaaccaccattcttctgtatcatcatacaacccacaaccgaaggatttcccaactgaacaactctaccgcgcctaccttataatccagcgcttcaagaacaccatcattagcgaccccaagaacgtcactgccacctggattggtcatgatctctgcggagaaacgacctatgtggggttctactgcggatcgccggcaggaggagataagaagttgacagtcacaggtgtcattttgaatgggtataatctacatgcaccaacgttggaaggtttcgtcaatcagctccctgatctagctcttttccatgctgcttccaacaattttggtggcgatataccccaactaaccggcctagggtacatgtacgagctcagtgtcgccgttaaagatctgcaattacaggctcggccaaaaagggatatccctccggattctacagtgggtttgggcggcaacactcacggtcacgggcatcttggtaactgtataattgcagattttaacttctcatttaacgtcggaatcggtaagggtcacaaatttccaggttttacggatgccaaggctctccttctcaaccacaacaatttgtccggtccacttccgtcaaacctcggtttctcaaaactgagctaccttgccctcgccaacaacaaactcaccgggccaatcccaccgtcaatcagtaatctggaagactctctcttcgaggtactccttctcaacaaccagctctccggctgcctcccccacgagctcggcatgctcaccaaggcggccgtgattgacgccggcatgaaccagctcaccggcccaatcccgtcatctttctcgtgcctaatcagcgtcgagcagctcaacctggccggaaaccgcctctacggtcaggtacccgacgcgctctgcaagcttgctgggcccgctggccgcctcgccaacctcacgctgtccggcaactacttcacatccgccgggccggcatgcgcggcgctgatcaaagacggagtgctggacgtgaagaacaactgcattccggggctcaccaaccagaggcgcccggccgagtgcgcggcgttccagagccaaccaaagacttgcccggcagcgagcactcaggtgacatgccccgccgccgcagcttccaggaacgcggcggcgccaggggagaggaaggtcaaggattactccagctacgtgaccaatttcgatcagtcggacggtgggtctatcgacccggtggattccaactatgttggagccagagttagtcgatatcgactagtactctatgtggaggagtctctttcttcaaatcttgaagaggttcgagttgctgactccattgatgagtaa

SEQ ID NO: 15689 - DNA, 261 bp, Zea mays
  Peptide Sequence Number=SeqID_57468
atggcactccacaagctctgtgacgacggcggcccccagctctcttacggaaagcagggcgacgtcagcaaggactcgaaccgctccaacagctatccctccgccaggcttcgtcgcacctccgacagccacgacatcacgccagcaaggtatatgtttgcttgtgcctgtttgtattcgttgcgcgacacgaatagattgcgatctattcccgagcttcgaggaatcgacgatcaagatttggtgaaccactggtcctga

SEQ ID NO: 15690 - DNA, 384 bp, Zea mays
  Peptide Sequence Number=SeqID_57469
atgacggtcaattggcagagtccgaagcagttgcaggtgaagaccctgagcaacagttggggactcgagcagttactcgagtgcctctttataaggactggttcgttggatgaccgcccggaaaaacagtgcaaccatgagggtggtgatgacgaggatgatggttttgattatgcttatggtaatggtttctggtactctttccgtttggaaaggttggctcgtcttagacacaccgcacggaagtcagtcattcctttcttgccttctcgtctcgcggagcttccgcttcgtcatccggtgactggtcagtctagccatttggagaggctgcaccaccacttgcacgaggagcaggagcgtcagcaacaggagctagagtag

SEQ ID NO: 15691 - DNA, 252 bp, Zea mays
  Peptide Sequence Number=SeqID_57470
atggggttttcgccacagacgtcctactcggcgccctggtgctcaatccacaacccagaatggttctacacgatgctccagacatgggtaaagcattggattgttatttacctgaggcaaagatggagtggtgagctatccatgcacacggcggtccggtggcgcctgctcggcatcggcgagcaattggtggggccacagagcaccatcgcgacccatacgaccctgaactccaacaatgagagtccgtga

SEQ ID NO: 15692 - DNA, 315 bp, Zea mays
  Peptide Sequence Number=SeqID_57471
atgccagaagcaaggaggttgttcgatcaaatggcccaggtggggatccaagtaaatacaatcacgttcaatgttttgattgatggatatgcaaagagtggacagatggatcaggccagtgcagcctatagggagatgcaagcgaggggattagtgccagactcctgcaccttcaacattattgctgctagagctcacaagttcgggctttgttgggatcatcgattgaatgatgcctgggagcttctgcttggtgctattgaatttggaggtccattgcctgttactggattctctgggtttctttctgcttaa

SEQ ID NO: 15693 - DNA, 1422 bp, Zea mays
  Peptide Sequence Number=SeqID_57472
atgaatcggcttgatgctagtgacttgaatgtggaggctccacataagggaggtattgcttgggcaaggccgagcattattgggtcctccacccattctggtgacctagaagcagaagagcgtgaaaaaattgtaaaggatcccaaatccattgtaccagcagcatttgtttccttccgatcacgttggggtgcagcagtttgtgctcagacacagcaaaccagtaacccaactgtttggttgacagaatgggctccagaacctcgtgatgtgtactgggataatttgtctattccatttgtctcccttacagttcgaaggctgataattgcagtggcattcttcttcctgaacttcttttatgtgttcccaatagcatttgttcagtctcttgcaaatcttgaagggattgagaaggcagcgccgtttctgaagcctctgattgaagagcatactattaaatcattcatccaaggtttccttccgggaattgctctgaagatcttccttatattgctcccaagcatattaatgtttatgtctaaggttgaaggattgacctcaatatcttcactggagagaagatctgcatcaaagtattatattttcatattcttcaatgtgtttctggcaagcattattgcaggatctgctttagagcagctaaaaagctatattcatcagtcagcaaatgaaataccaaggacgattggtgaagcaattccaatgaaggcaaccttttttataacatatacaatggttgatggttgggctggggtagctggtgagatattgagattgaagccactagtgatcttccacctgaaaaactttttcttggtcaagactgagaaagacagggaagaggcaatggaccctggaagtattggttttgactcaagcgaacctcaaattcagctgtatttcttacttggtcttgtctatgcggcagtgacaccatttttgctcccttttgtattgatattctttgggtttgcgtacgttgtataccgccaccagctgcttctccttgggttacttagcacaaaaggcgctggccagtcaacacctgtgctccttgttcttcctgtagtgaccttctatttccacaagtactgcaacaaccgctacaaaccgacttttgtgaaatgcccattgcaggaggcgatgaagaaggataccctggaacgtgccagagagccaggatttgacctcaaaggatacctaatgaatgcctacatccacccggtgttcaaaggtgatggggacgacgacaagttctcagtcgcagatgaaccagaagccgagcaagtcctggtggcaaccaagcggcagtccaggcggaacacccccgtgcccagtaaatacaatgggtcggaatcaccttcgcttcctgaaattgtaaatgaccaacggctataa

SEQ ID NO: 15694 - DNA, 1123 bp, Zea mays
  Peptide Sequence Number=SeqID_57473
attgtctgtgctgattttgaaggaccagaaagctgcttaccgagcatctgttctgttttgtttcaaccctgcttctgtgttctactcatcattgtattcagaaagtctttatgcacttttttctcttgggggcatcttctacgtgttttccggtgctaatactgttgcagtgataatgctcgctctgtctggttcagctaggtcaaatggagcacttaatgctggctatttctgttttcaggccttgctacaagcatatgatgctactgtacaaaagaaaaggcccttgttggcaattcatgcccttgtggctggagctttgcgctccattttcatatttctacctttctttgctttccaagcatatggatatttgaacatatgtgtacatgggagctcagacgaattgaggccatggtgcaaagcaaaagttcccttattgtatggcttcatccaaagccactactggggagttggtttcttgaggtacttccaagtgaagcagctgccgaactttctcttggcttcaccagtgctttctctcgcggtttattctattgtccattacgcaaaactgcttcaccggtgttttcaaagaactagcgtccacaagcagattatcactgctctagagaaaaggccagttgtgtcgtatagaagatctgatgacgcgacaattttgagtgaacctcctgctggactcaccaagaaagcacaagacggtgataagcacacagctgtaccttacagtatttgttggacagggagctctaaggctaaacagagaaaaccagttgctaccgagatagctcctgcgacattccatgacagtaccacgccagctaaccaaaacatcgaagaggatcaggacacgtgctccatactactactcccattcgttctgcatctggccttcatggcattcacagccttgttcgtgatgcacgtccaggtgtccacacggttcctatccgctagccccccggtttactgggctgccgcgcacgttctggcttctccgagccgcgccaacagacgatggggctacctgatctgtgtctatttcatcgcgtacattcttctaggtagcctgctcttctccaacttctaccctttcacgtaa

SEQ ID NO: 15695 - DNA, 432 bp, Zea mays
  Peptide Sequence Number=SeqID_57474
atggaaacgagcacaagccacgggaaggcttcatcaagggagtccggcgccaaaggaagggaagaatcacctccccgcgtcaagtcgcaccggagtggcgacaagaagaagaaaatgaagaaagtggtctactacgagaccgattctttgtcgccctccacatacagctccgacgcgtcgtccgtcacttctaagcgccatgagcgcaagaagtttagcaaaccaccggttttttatggtgaagattattgtatgtggagtgataaaatgaggcatcacctaacctcactccacgctaagatatgggacattgttgagtttgaagcacaggtaccatccgtgggggatgaaggctacgactgggacgagatcgcccaaatccagcacttcaactcccaagccactactatacttgtcggggaccataattag

SEQ ID NO: 15696 - DNA, 471 bp, Zea mays
  Peptide Sequence Number=SeqID_57475
atggaacagcgaatcaggatagaagagatcagaagtgatgaatggtttcagaaaaattatgaacctatcaaagaaatagaaaatgaggaagtcaatctcgatgatgtcaatgcagcttttgatgatcctgaggacgataatgaggatgcttttgaagatgaaacaggtcctctaacacttaatgcattcgacctaatcattctttcgcaaggattgaatcttgcagcgctctttgaccgcagacagatgagggtggaaggtctaaatgccgacaagactagccatctctcagttatggttgaagttttcgaagttgctccatcaatcttcatggtagaactacaaagagcagcaggagatacttcagagtataacacgttcgtaaataactactgcagcaaattagatgatatcatctggaaatttccaactgagaagggaaaatcgaggataccccggttatcaaagtga

SEQ ID NO: 15697 - DNA, 1218 bp, Zea mays
  Peptide Sequence Number=SeqID_57476
atgaagaactcccattgccgcgacccaaagatggaagcctactgcgacgagcccgaggcaccctcggccgccgagggtgaggcactacgcgtcgaggaagagcagaatggggtcccgcctaatcgaaactggcagaccctaaaggagctctaccactgcagcccctcaggcatcctccagcgatgcatgtccatcatcgaaggtcaggagctattgcaagaaatacactcgggggcttgcggtcatcacgcagcacctcgagccctcgttggaaacgccttccaacagggtttctactggccaaccgcgatggccgacaccactaggattgtacgcacctgcctagggtgtcaattctacgcaaggcagacgcacctacccgctcaggccctgcaaacaatacccatcacctggttgtttgctgtgtggggtctggacctcgttggtcccttgcagaaggcacccgggggcttcacgcacctgctggttgctatcgacaaattctccaagtggattgaggcggtggcgttcttcaccaacatcatcgatcgctttggggtcccgaactccatcatcaccgacaacggcacccagttcacgggcaggaagttcctagacttctgcgaggaccaccacatctgggtggactgggtcgtcgtagctcaccccatgacgaatgggcaggtagagcgtgccaacgacatgatcctgcagggacttaagccgaggatctacaatgacctcaacaagttcggcaggcgatggatgaaggaactcccctcggtggtctggagtctgaggacaacgccaagccgagccacgggcttcacgtcgttctttctagtctatggggtcgaggccatcttgcccacagacttagaatacggttccccgaggacgagggcgtacgacgaccaaagcaaccaagccagccgagaagactcactggaccagctggaagaggctcgggacatggccttactacactcggcgcggtatcagcagtccctgcgacgctaccacgcccgaggggtgggcgatttggtgcttcggctacgacaagacgcccgagggcgccacaagctcacacctccctgggaagggccgttcatcatcgccaagattttgaagcccggaacatacaagctggccaacagtcaaggcgaggtctacagcaacgcttggaacatccgacagctacgtcgcttctacccttaa

SEQ ID NO: 15698 - DNA, 852 bp, Zea mays
  Peptide Sequence Number=SeqID_57477
atgctgcgaagcgtacaagacacagacgagctaagtgcacaaagcggcagattgtctgtgctgattttgaaggaccagaaagctgcttaccgagcatctgttctgttttgtttcaaccctgcttctgtgttctactcatcattgtattcagaaagtctttatgcacttttttctcttgggggcatcttctacgtgttttccggtgctaatactgttgcagtgataatgctcgctctgtctggttcagctaggtcaaatggagcacttaatgctggctatttctgttttcaggccttgctacaagcatatgatgctactgtacaaaagaaaaggcccttgttggcaattcatgcccttgtggctggagctttgcgctccattttcatatttctacctttctttgctttccaagcatatggatatttgaacatatgtgtacatgggaggtcagcagaattgaggccatggtgcaaagcaaaagttcccttattgtacggtttcatccaaagccactactggggagttggtttcttgaggtacttccaagtgaagcagctgccgaactttctcttggcttcaccagtgctttctctcgcggtttattctattgtccattacgcaaaactgcttcaccggtgttttcaaagaactagcgtccacaagcagattatcactgctctagagaaaaggccagttgtgtcgtatagaagatctgatgacgcgacaattttgagtgaacctcctgctggactcaccaagaaagcacaaggtactactgcgatctcaacagtatacgttttgctttgttttgagaaaccgttgctcatctatcttgatgccaagtctatttga

SEQ ID NO: 15699 - DNA, 114 bp, Zea mays
  Peptide Sequence Number=SeqID_57478
atgggagacacgacgatgatggcatgggctgaggcgggtggtgaagatcgtgatggtgttggcgacagtatcagaggactgcactactggatatcgttaatccagttaatttga

SEQ ID NO: 15700 - DNA, 2094 bp, Zea mays
  Peptide Sequence Number=SeqID_57479
atggacctcacctcgccgtcgcccgcggcgcgccgcgccgccgccatcgcgcgccacctcgccgcggccgccgcccccatcccggcgagcagccccctggaaccttcctgctgcctcagctacgtcccgccggagtccacggagcggccggcggcgtttgcgccggccgacctcaggcttctgctggacgggcacgacctgcccacgcgggactggctcttccgcgccatggaggagagcccccttttccgcagccggagttcgcggacgggatccagggtgttcgtggcgccggacttcaacgacggcaaggaagggcagcgggaggccaccatgcggcggatcgcgtacctgaatcggcgcggcgtgttccgcgggtggctcaccgaggacggcgctgccgccgagctccgcaaactagcgctcctcgactgcatcgccatctatgaccactctctcgccatcaagattggcgtccacttcttcctctggggcagtgccatcaagtttcttggaacaaagcgccaccatgacaagtggttggttgccacggaaaattatgatatcaagggttgttttgcaatgacagaactaggccatggaagcaatgtgcgaggaatagaaacaatagcaacttatgattcagaaacaagagagttcatcataaatactccatgtgaatcagctcagaagtactggattggtggagctgccaatcatgcaacacatacaatagtcttttgtcaacttcatataaatgggagaaatgaaggagttcatgcttttgtagctcaaattagggatgaagatggaactgtgttgcctaatatccatatagctgactgtggccataagattggactgaatggcgttgataatgggcggatttggtttcagaatatacgtgttcctcgtgagaacttgcttaatttggttgctgatgttttgccagatgggcgatatgttagcatgatagataatccagatcagaggtttgcagctttcctatctccgcttacacttggtcgagtaaacattgcagttaactcagtctacatttcaaaggtcagcctagcaattgctgtgagatacagtttgtcaaggagagccttttcaattgcaccagatgcccctgaaatgttgttgcttgactatcccagtcaccagcgacgccttctaccacttctagcaaaagtatgtctgatgagcagtgctggcaattttatgaaaaatatgtatgtaaagagaactcctgaaatgagcaaagacatacacatttactctagtgctctgaaggcgacactaacttggcagaatatgattacgattcaggagtgtcgcgaggcctgtggaggtcaaggtctaaagactgagaaccgcataggaattttcaaatctgaatttgatgtccagtccacatttgagggtgataacaatgtgctaatgcagcaggtaagcaaagcgctttatgctgaatttttgggtgcacaaaagaagcagcagccattcaagggattgggtttggaacacttaaatggctcgagccctgttattcctgataagctgacaagtagcatattaaggagctccaagttccagatggacctgttctgcttaagggagagagatttactgaagcagtttgtagaggaggtttctctccatcttgcacaaggcgaaagcagagaaaaggctttgatgctgtttctttgtttgtcattgatacaagtgacattttcccagagttatcaagttgctgaagacttggctagagcgtttactgagcgtacgatcctccaaatatttttggaggatgagatgaatgttccttctggttccctaaaggaggtactgggcttgctgagatctctatatgtcatggtgaacatagatgaatccacatcttttctaagatacgggcatttatcacgtgacaatgtagcccttgtgcggaaagaagtcctgaaactgtgcagtgaactcaggccccatgcgcttgctgttgttagttctttcggaatccctgatgccttccttagtccacttgcttttgactggattgaggcaaatgcactgtcaaccgggagccactga

SEQ ID NO: 15701 - DNA, 1305 bp, Zea mays
  Peptide Sequence Number=SeqID_57480
atgaaggccctgggcgcgcacgtcgtagacctgctccgcggcccgcacctcctccgcgccgccgtcctagctttcgccgttgcggtcgccttcctcgtcggctaccactggcccaacgcctacccgcgccttgtcttcttctcgtccgcctcctcctcgttggcgtccaggtcctcccgctctcctgccgtcgcgctctcccccaactccaacatctccttcgaaccgtctctgatccctacccccaccaccccgcctgcttctcctgctcccaatgcctgccccccgccctcgctaccaccaccgactccggcgccgccgcctcccctcctgccccctccaccaccagcgcgcctcggcatcgtcggcgaggacggcgctatgcaggacgacttcgacatcgggagcgtcggcgccaacgacaccgatctggccagcgacgagaccgcgccgcaggagcctagcaacggaggcgccagcggcggaccacccagggttcggattgggaggttcctggtctgtcccgagagcatgagggagtacataccctgcctcgacaacgaggaggagatcaagcggttgccctcgacggagcgcggggagcggtttgagcggcactgccctgcccaggacaagggtctcagctgcctcgtgccggtgcccaagggctacaaggctcccataccctggcctcagagcagagacgaggtctggtttagcaatgtgcctcacacaagattggttgatgacaaaggaggacagaattggatcaccaaggtcaaagataaattcagatttcctggaggcggaactcaattcattcatggagcaaatcgatacctagaccagatttcccagatggtaccaaatgttgcatttggatctcatactagagttgtcctggatgttggttgtggagtagcaagttttggtgcctatttactttcacgtgatgtcctgacattgtcaatagctccaaaagatgttcatgaaaatcagatacagtttgctcttgagcgtggtgttcctgcaatggtagcagcatttgcaacacgccggttattatatccaagccaagcgtttgatatgattcattgctcacgctgccgaataaattggactcgtgatgatggtatcctgctcctggaggttaatagattacttagagctggaggctactttgcttgggcagcacaacctgtttataagcatgaacaggcccaacaagaggcatggaaaggaggtggggttcgaacccatgctctgatgaaagaagggcaggagacactgggtgaagctgtctaa

SEQ ID NO: 15702 - DNA, 195 bp, Zea mays
  Peptide Sequence Number=SeqID_57481
atggagctgagaaccctccttcgtgcggccgtgctcctccatcgcgttctgctcgagctcgagtcgtgcctctgctggacctccaactcccatgcgcaccaccgcgacacatggcccagcgcttcccccagcgagacctcctctgttgatggcacacatatagatatggtgtatattggtgttgaacatgtgtga

SEQ ID NO: 15703 - DNA, 2745 bp, Zea mays
  Peptide Sequence Number=SeqID_57482
atggaggcttccacccccaccgctcgccgaggtggagcccccgccgactacgccgccatgtccctttctccctccccctccttctcccacacgccgaggagcggcgcctcgtcctccgcccacaagccccccaccacaagcaggcaccgggatcgggggcccctcctcttcaacggcaacagtaacagtaacagcagcatcgctgcccagcaggccgcacagctgcagcaaacctccaccaccacctcctccaaggggtcctccggatccggaggcgttaacatccaggtcctcctccgatgcaggccattgagcgatgaggaacgccgcgtcggcactcccgtggtggtcacttgcaatgaccagagacgcgaggtctccgttgcccagaacatcgctaacaagcaaattgatcgcacctttgcattcgacaaggtgctaggaccaaagtctcaacagcaggacgtcttcaaccatgctgttgtgccacttgtcagcgaggttttggacggttataattgcacaatatttgcatatggccaaactggaactggcaaaacatacacaatggaaggaggagggggcaaagcactgaatgctgacctcccgactgatgccggtgtcattccaagggctgttaagtgcatatttgacatcctcgaggcacagagtgcagagtacagcatgaaggtttcttttcttgagctgtacaatgaggagctcacagatcttctagccgcagaggaatcgaaattctccgatgacaagtccaagaagcctttggcactcatggaggatggcaagggtggagtctttgttagagggctcgaggaagagctagtttcttcagctgccgagatctacaggatactggagagaggctctgcaaagagaaaaactgctgaaactcttctcaacaagcaaagcagtcgctcacactctattttctctatcaccatccatattaaggaatgcacacctgagggtgaggaaatgatcaagtgcggaaagcttaatctcgttgaccttgctggctctgaaaacatatctcggtccggtgctagagacgggcgagctcgcgaagcaggagaaattaacaagagtctgcttacacttgggcgtgtcattaatactcttgtcgagcactctggacacataccatacagggatagcaagttaacaagattgttaagagattctttgggagggaagacaaagacttgcattatagcgaccatttcaccttcagtacactgccttgaggagacgctaagcaccctggattatgcgcatcgtgcaaagcacatcaagaataagccagaggtcaatcagaagatgatgaaatctgcgctcatcaaagatttgtattttcaaatggaccgtctcaagcaagaactatatgctgcaagggagaaaaacggtgtttacattccgagggaacaatacatagcagatgaatctgaaaagaagcatgatggaggaattcttcaggctatgtcagagaaactggatcgtttggagcttgttttggaatcaaaagataagcaattggaagagcttcatggactctatgaatctcagaaagtactgagtgcagatctaagtgatcaacttcagacattacagaaaagaatgaaggaaacagagtgcaccctagcggatcttgaaacgagatacatgaaggcaaatgatactattaaggagaagcaatatttgatagaaaatcttcttaaatcagaaaaagttcttgttggtgaagcacaaacactccgatcagagctggagaatacagcaggggatctacatgggctattttcaaaattagaaaggaaggaaaagatcgaagacaaaaatggaagtataattcaatatttccattcccagctgatccaggaaatgaatgtattgcatagaacagtctcaacctcggtctctcaacaggagagacaactaaaagcacttgaagaagagatgcagtcttttgtcacctcaaagggcaaggttgccggaggacttcaagagcatgtaagaaagctcaaagagagctttaattctaggatagcagaattgcatggttttgcaaatgaactcaagcataaatctatgttgagctttgaaaaccttaattcgcaagttaccacacacacatctagccttgaggattgcatgaaggacctattggttgatgccgatgaactactcattgcactacaaaatgggctttctcagcatgaagtgaactttgctacgtttattgagcaacagcatgaggggctctctagaaatttagagggaacaaagtttgtttcggcaactacaatgaacttcttcagaactatagattcacatgcattgggactcctaaagattttggaagaatcaaagatggaacatcaaaagcaactcttccagcttcagaagaagtttgaggccgttgttgctgacgaagagaagtacttgatggagaaggttgcagggttgtttgcagaatcaaacgctcgaaagaaaaatatggttcaagatgacatatgcagcctcaataggactgtttctgagagttcgaacaatttacaaaccgaaactaccaagctgcatgattttacatcttctatgaaagagcaatgggaaggctacatgaagaaaactgaagaggcattccagcaaaatgtatcatctattgaacagaaaagaggcttcttggcagggaattttcagcagtggcaagttgtctatctcaacagttaa

SEQ ID NO: 15704 - DNA, 1419 bp, Zea mays
  Peptide Sequence Number=SeqID_57483
atggtgctgatcactctcgtccgcgactacatcgaccgcatgctccacgacatcccgggcatgaaggtcctcgtcctcgacccccaaaccgtacgtgcgccctcccccgggagacctcagctccggctcgcggcccgctcctccccgatttttgatctgaccagatccgtgccctcccaggttgggatggtgagcgtggtgtacagccagtcggatctgctgcggaaggaggtcttcctcgtcgagaccatggacaacgcctccagctccagggagtccatggcgcacctcaaggccgtctacttcctccgaccctccgctaacaacgtccagaagctccgcaggcaactcgccatgccgcgcttcgccgagtaccacctattcttctccagtatattgaaggtcccgcagattcaaatacttgctgactcggatgaacaggaggttgtgcagcaagttcaggagttctatgctgatttttgtgccattgacccataccatttcactctcaacatacaaaataaccacatgtatatgctcccaacagtggtcgaccctcctggtatgcaaggcttctgtgatcgagccgtcgacggcattgcttctgtcttcttggctttgaagcgccgccctgttattagatatcagaggacatcagatgttgcaaaaaggattgcacaagaaactgcgagattgatgtatgagcaggaaagtggcctgtttgattttagacgaacagaaaactcttctttgttgttggtgatcgacagaagggatgatcctgttacgcctttacttaaccagtggacataccaggctatggttcatgagcttattggaatcgagaacaacaaggtggaccttatgggatttgctaatattcctaaagaccagcaggaggttgttctatcatcggttcaagacgatttttttagagctaacatgtttgagaactttggggaccttggtatgaacctcaaaagaatggtagatgattttcaacatctttccaagagcagccttaatctccagagcatagtggttttaggtgacatggcaaagtttgtgagcaactatcctgaatatcgaaagacacatggaaatgtaacgaaacatgtaaatttggtgagcgagctgagcagaattgtggaggaaaggaaacttatgctagtttcacagacagaacaagagctagcatgtactagtggacaagcagcagcctttgaggctgtcacttccttgctaaacaatgaaagcgtatctgatattgaccgcttacgattagtaatgctctatgctttgcggtatgaaaaagagagtccagttcaattgatgcaacttttcaacaaattagcttctcattctgcgaaatacaagtcaggggtttcagtttcacttggtcgtagcttagctctgtga

SEQ ID NO: 15705 - DNA, 510 bp, Zea mays
  Peptide Sequence Number=SeqID_57484
atggccgaggagaggaacaaggaggagtgccccgtggcggacaagcgggggaaaattgatgaccggacattgaaaatggccgtcctttgctgcatatccttagtcatcgttgccgagttcaaggacgagcagcttcgactcttcaagacaggcatcatgccacatcctctaacatatcagcttcgactttcacgtagcaagcccccatccacccgtaaaccggaagccaagaagcaaaaaggaacaactgaaggcggcgtcaaggctgagacgaacttcaatagtggcgccttcaggaaggagagtaatgtcgaagacgctaacgtcgcctgtctgagatggaccaggttttcacccatggaagatagtgctggggaatccaacgccctcaacacgggatgggaagcagcgcccacaggtgtcgccgaggctttcgcccaagtccccagcacaacgtctgaccaagactcaggtcaaagcaagctacctccaccgtcgtcgctgccctga

SEQ ID NO: 15706 - DNA, 321 bp, Zea mays
  Peptide Sequence Number=SeqID_57485
atggcgggcgagcgacgtcgagggcgatggcgtggagagcagagtcgcagtcgcagtggtgaagccgtgaaggtgagggcgcgcagcatggagagcaggcgggcgcgcggcgtggttcgcgtggtcacgtggagatggtcaggctcgggcggcagtggtgaagtcgtgtatgtgagtgcatggcgtggtctgcatggagatggtcgggtggccggcgttgcgggcggcagcgtggagagcaaagccgaagaggcggttcggaaggaaaacactagccaccgcctctccaccgtgcactcggcctcgccgctgtcagagtag

SEQ ID NO: 15707 - DNA, 318 bp, Zea mays
  Peptide Sequence Number=SeqID_57486
atggaggtggggtcaatttggccggtggacgctcaggatggccggtccatggcgggtggcggctcccgcggcggtgagatcgccggtgaggccatacagtgcaacgggggaggtgaaaatggtgccttgggaccgtggggaggtggtgaagctcaagagctaactcaattggaccctaggctactagagaggggagggagcgctcaccggagcggaggaaggacgcggcgccgcggctcgattgagctcgggggaggggtgtggggaggccgaggccggtgtgaggagttgggggagctcggggcggtccttttatag

SEQ ID NO: 15708 - DNA, 1566 bp, Zea mays
  Peptide Sequence Number=SeqID_57487
atggaggtgctctgcatcggaacagcggataccaagtttgaggagctgcttttcctcgcggcgcaactccgctccgccctcgccgcctctggctccgactcgaaggttcaagtgagcatagtggatgtctccacaactgaaaagacaacggcaaatgatttcaaagacatcatatttatccctagaaatacaattctttcatgtcatttgggtgttgaccaacataatcttccagataacagaggtgaagcaattgcactcatgtcaaaggctcttcagagcttccttaaaaaaagatatgacagtggtatgctggtgggtgctgttggtttaggaggcagtggaggaactgcactaattgctcctgctctgaggttgttgccacttggagtgcctaagcttattgtatctactgttgccagtggtcacactacaccttatgttgaaacatctgatttggtcttgtttccttcggttgttgacatctgtggaataaacagtgtcagtcgtgttatattatctaatgctgcagcagcttttgctggaatggtacatggaatcttgtcggcgtccaatgagtctgatgaaacgtcaacaaagccaactgttggtattactatgtttggtgttacaacaccatgtgtaaatgcggtcaaggatagactgaacaaagaaggttatgagacccttatattccatgccacaggtgtaggaggcaaagcaatggaagacctagttaggggtggttttatacagggcgtgttggatgtaacaacaacagaagttgcagaccatattgtagggggcatcatggcttgtgatgagaccaggtttgatgcaattatagagaataagatccctcttgttcttagtgttggagccttggatatggtaaactttggagctcgagatacaattcctcttgctttcgcagaccgaaatattcatgttcataatgagcagttcgattattcaaagaacttaggagctgagtctagttcaatttttccggttcaagtcctcgtcgaggtttcattgatgcgtacgactgtggaagagaacaagaaatttgctaggttcattgctgataaaataaacaaatcttcatccaaagttactgtttgccttccccagaagggcatatctgcaatagatgctccaggaatgccattctatgatccagaagctacatctacactgttgggtgaattaaacacccttatacagagaaccgatattcgagaggtgaagctgtttccttaccacatcaatgaccctgaattcgcaaatgcattggtagatgcattcttgagtatggatgtacaggcctctagttcagcccaacctaagcaagatcttaatattggaaaatcctgttcaggacagaaaatttcagatagttctattatatggagaactcctgtggattttccagatgcaaaaccagttgaagtagatgatcactttgagagttcatggactcatgagaaaataaggaaaaagttcaatgacccatggtgcattttgttatgtttcatgcaccatccagatgaaccaaaagcttaa

SEQ ID NO: 15709 - DNA, 177 bp, Zea mays
  Peptide Sequence Number=SeqID_57488
atggccagcacctccattacttcgcaacttgatggaacaaagcgggtgagatctctccgggcgtcagacggtggacgtcatcgcccaaaccctagcatcgggcagggcctgacaggtgccagacatgtccaacaaacgcgctggacggacaaggtagccggatccaaagacgtctag

SEQ ID NO: 15710 - DNA, 243 bp, Zea mays
  Peptide Sequence Number=SeqID_57489
atgggctgcctttttggcggtggcacggatcctgagcagggatgggctttcctgtcgatgactaggccggatccggccggatccgcacatctcatggagagacaaggaatagcggggggggctcgtggccggaggaggggccaccgcgcggggttgaggaagggcctccaaccaccatgggcgttgggcgctagacgcagggagggcaaaggggagcggtggaggtttgggcttcaagattga

SEQ ID NO: 15711 - DNA, 190 bp, Zea mays
  Peptide Sequence Number=SeqID_57490
aactggcgctccaatgtagagacgcaggtcaagacatgccagaatgaactccagggtctcaagaaaggacttgactctaaagtggaacagctgaaatcggtgaaaatgaaggcaattaggtctacggtacaggaagagaagggcaatctacctgcacaaaatacgactttagggcttgtttgggacaaag

SEQ ID NO: 15712 - DNA, 561 bp, Zea mays
  Peptide Sequence Number=SeqID_57491
atgcggagttcgtcgtcttccggggctaagcccgagtccgagccctgtggtcgggcgatgcggagttcgtcgtctttcggggctaagcccgagtccgagccctggggtcaggcgatgcggagttcatcgtcttccggggctaagcccgagtccgagccctggggtcgggcgaagcggagttcgtcgtcttccggggctgagcccgagtccgagccctggggttgggcgatgcggagtttcctatggcgcctgaggccggacttggctgctgtcagcctcactctgtcgagtggcacggcagtcggagcggcgcaggcgtcactgtcctcttgtcaggcctgtcagtggagcgacgaagccacctttgcattaaatacccctgcgattcggtcggctggcgtggcgacttggccaaggttgcttcttggtgaagactgggcctcgggcgagccgaagctttgtgctgatgggggttaccagctgagatttaggagtcttgagggtacccctaattatggtccccgacagatacataaccaaggctcgggctacgctcccgag

SEQ ID NO: 15713 - DNA, 390 bp, Zea mays
  Peptide Sequence Number=SeqID_57492
atgagtatgaaatttgtgagaagattatcactactaaatgatgctaagggacattctgagtggcctgccgacctcggatcaccttctggaactctcctccccaatggatccctcccgagaggcgagatctatggttcctgcaaagaagacgacactctgcgtcgtcacggactaccgtcaggagatatacccctagtatttgaccctaaaccggagccaacaaagacaaccgatcaagccaaggatggaggcaagaagagctttgaggtaccgggtgcacgggagaaggtcaaggagaccagaaacccaaagccaggggtgaagaagaagacttgcaaagtcaaggttgatcgagttaagagttatggtgcatcaaggatcactacataa

SEQ ID NO: 15714 - DNA, 453 bp, Zea mays
  Peptide Sequence Number=SeqID_57493
atgaccattgtcaccaccgatctgagctgcgggccgtcgtccaaggcgaaaggagggcagccggcagtgacggtctccggcggcgacaggcaggggaggagcaagatcgagatcaagcgcatcgagaacatgacgaaccggcaagtcaccttctgcaagcgtcgcaacggcctgctcaagaaggcatacgagctctcggtgctctgcgacgccgaggtcgcgctcgtcgtcttctccagcgtggccgcctctacgagtacgccaacaacagatgaggaattagatgatgaggatgatcaaatatttcatcagatgcaaggtgcaaactcaccaaaatctacaaggaactttgctgaagcttcacactctaaacatgatgatcttgttggaaaagatgtcatctctggaggatacaagaagctggagtggttgttctggacaaagaaagcttga

SEQ ID NO: 15715 - DNA, 387 bp, Zea mays
  Peptide Sequence Number=SeqID_57494
atggaggcccaggcccacacgtcatgtaaccggcgcgccggttactacgtgcgagaaactgcaccgccacttgcgccagtaccgcgccctctcgactgtggatccggtgccgcgactcgaggcaaccctgcgcatggccgaacagtgccaaccaagcatatcggtcacgggtcagtcagccgcgggacaaggcgcgacggtcgatatggccaaaagtgggccgacagtaatggcggcgggaccgggaaaggggatactctgaaagggatccttctccgcgaaggaagtgggccccgagccctcctactgatcagaggttcgaaggttggcccctcggaagggttcgacagccgcctcaggccactcgggctccgcatccactactga

SEQ ID NO: 15716 - DNA, 594 bp, Zea mays
  Peptide Sequence Number=SeqID_57495
atggccctagcctcgctcccttctcggatcctgctctcagtcgctagccatattccctgtctccctctttgcccaagcatagccccacacagcgcgtcttctggcctccggccaggagtgctcgccgtctcgcgccggttgcctggtgcacgggcgagaaccggccagagatctaggatgctgaccatggcgagctttggactctcctaccccacatctgcggtgacaaccaggtgttcagtccacggtgtggtgggtggtcgcttagttcagtctgccatggaaggtgcagtcggccaaatgatcatcctgatcctcggcatcgttgtcgtagcacccatgaccttctacaccatcaacttcatggagatgcgagatgtggacatcagtgccagtctcaccggagggttgagcgcgacaggaagaaggccaaatgattggccacctcgccacttgtggccctggtttgagacgggactggcgggggatgaagatccagctgctacttatgattttgttggtttcaagatgtggtacgcgatcttcttgacagcactccggcagagtaacactgcgctcaagactttgctctag

SEQ ID NO: 15717 - DNA, 634 bp, Zea mays
  Peptide Sequence Number=SeqID_57496
atgggtaaaagaaagcggtcgtcatgtcaacgagataaccataatgattctctagccagcaaaataatgagaactagaatcccagatcttcctgaggctgctcttaatccagggattgaagaagtcaccctctggttgttccatacaaggagaatatatgaattcccatgctcacttttatctgatggggttcgaaattcacttcggtaccttaaacttcgttgttgtgctctccgtcccacagttgaacttgcccccatgagaagcctaacaagtttacatttgtcctttgtgagcattaaatggaatgggttaaagcgcctcctttccaactcccttgctctggaggaattagagctagtatgttgtgacaagatcgtttgcctcaagataccttctgccctgcagcgtctcaacagccttaatatttttggatgctcggccctcaaagtgctagagagcaaagctccaaatctctctagtctttctctttcagattttggaggcgggctagtcttctcacttgtgaaaacattgcaaatgaagaaactaatcactgaaagtactgtctatgatgctcgtaccaggctgccatccattatgcccaatcttgaaactcttgtcataaactcat

SEQ ID NO: 15718 - DNA, 480 bp, Zea mays
  Peptide Sequence Number=SeqID_57497
atgggagatctgccgcagccaccattgccagcgaagtacatggagaggtgcgagattcatacgaagaggttgagtgatgattccgccgctgtcgagatcctcggcgccgtgcagacctcggcgccacgccaggagtatgggttcggttggctgttaaccgtgcgccccctctctgctccctctccgcgtcgtcgacctcgccgggtgtacgctccggccgtgaactttccctgctgcgcgccgaagcggtgttcttggaattacctgtcagtgaccatcgtcgccgcggatccagaccttagcgtggctggcttgcgtcccgtcgtcaccattggtgagtcccctgcccaattgagcaccattatcaccgtgacgagtagtgctattaggatcaaagacgagcaaaccactgtgaaatctgaggttcagcaagaagagatagctgagcaggagctcattgaaggcaagttgtgtccttga

SEQ ID NO: 15719 - DNA, 207 bp, Zea mays
  Peptide Sequence Number=SeqID_57498
atggagtccaaccatcaccagaaaggttctcaaaagataaaggggtgtttagactggtctgacgactgtaatctcgctgacggagagtacatcctcgtgccggagcaaggagctgctcaggaggtagccccagatccagcacccgagcctgcaccagaggacctgcctgccactgatttggaaggcaagccccggttttatgcataa

SEQ ID NO: 15720 - DNA, 990 bp, Zea mays
  Peptide Sequence Number=SeqID_57499
atgggcaagcaggcaacatcgtgcgtcggctgtggcgccgtccacctcgccgtcctgttgctcagtttggcgcgcccgtgccactcctcgctctaccgcccgccgccgccgtccgccatggtctaccacgccggcgaggtgctcgacggcgccgtgccggtctccgtcctctactacggcgccttctcgccacaccagaaggccgtcatcgccgacttcctgctctccctctccccgcgcggccgccagccgcagcgccacggatttgggacgccaggacccgcgcctgcgccgtcggtggcccgctggtgggagacggtggaccggtacgcgcgcaaggccggccgggagccgccgcgggtgcttctggccaaccaggtgcacgacgaggcgtgctcgctggggaagacgctgtccagggtccaggtcgagcggctggcggcgcggctcggcgtcgcgccaggaggcgtggccgtcgtgctcactgccgccgacgtcgccgtcgagggacaatgcagcagcgcgtgcgggacgcacggggcctccgcgcctgggggagccgcgcacgtgtgggtgggcgacgccgccgttcagtgcccggggcggtgcgcgtggccattccacccggccgagggcttcgcatacggcgccaggcatgtgcccgggcgcggccgcggcgagacgctggccgcgccaaacggcgacgtcggtgtggacggcatgctgatcaacctcgcggcgctgctggcgggcgcggtcaccaacccatatgggcacggatacttccagggcgaccccggcgcacccgtggaggtggcggctgcatgccccggcgtctacggccgcggcgcgtacccggggtaccccggcgctgtcaggcttgacacggctaccggagctgggtacaacgtggtcggccggaacggcaggaagtatctcgtgccggcgctggtcgatcccgacaccaactcttgtatcatcatgacctaa

SEQ ID NO: 15721 - DNA, 519 bp, Zea mays
  Peptide Sequence Number=SeqID_57500
atgaatgaattaccatatgggccctatccagaggaggtctccaaggatgccgatgatgcagctggtggcaagaaaaggcgccgagcacgggaggtgaagggagtggtgtggcacaggacgcaaaggcatcgactagctttgctgaaggtccgactgagacatgcgcggaaccagtggagctttgatggggaaggaccagagagagtcctcgaagaagaggaaggcccaaaagccccgttgcggctggtggatcatcatcgggccaatgggtcgaagtctaaggacgcgcccacgaaggccgccattgttggtaaggcgatgccgccaccggtgaggcctgccatcgtagttgtgatgttgcagtttctaggtgctatgaaggctctaaggaatgctactgaggctacaaagtctacttttgagcagctacattatgttggcgccttcactagccaagtggcgtcaggtgccttcatcaaatccatcacttcacagctgcggtcgagaaggtggagctag

SEQ ID NO: 15722 - DNA, 162 bp, Zea mays
  Peptide Sequence Number=SeqID_57501
atgggcaagaatgtggagttggtgaaggacaacccgtgcacgccgccgtgtgcggtggccaggccggcggaggcgctcacgttggcatcgctcatcgacgacgagaagaagcttgacgactgtcagttcgacctctggaagcagtcctacgtggccacatga

SEQ ID NO: 15723 - DNA, 681 bp, Zea mays
  Peptide Sequence Number=SeqID_57502
atgtatatcattgttctggactcgatcccttcttatatggccgcaaatccaacgtcttctaaggactttgctgatgtccatggacttgtcatgcatgcttacaacccaccaaatgcagattcacttgttgatcatcttggtttgcacaaggcattgtgtgttcttatgggatgggattatacaaaagtccctgagaactttaagggctaccaatcattaccttctgaccttgtccaagcaagtagggaggacctcattgtctggccgcctactgttatcattcacaatacttcgactgggaggaagaaagatggtcgcttggagggtttagggaacaaagaaatggataaaaaaatgacagaactagggttttctggtgggaagtcgaagtccttgtatggaaaggaaggacatatgggtttgacacttatcaagtttgcaaacaactcatctggcttgaaggaggctgagcgtcttgctgagtatcttgagaggcaagatcgtggacgtatagagggtgtaatattcagaaatccttgtgtgaatttgcgcgaagtagaagatgataaaggctctgaatggatatctcatgagttgatgctgaggtcacagttagatctcaaacggcctaagtctcgctgtgacaaatgtgcagaccagatgtgtgacgaaggaaattga

SEQ ID NO: 15724 - DNA, 174 bp, Zea mays
  Peptide Sequence Number=SeqID_57503
atggacaagctggagaccgtcttgaggcccaaggaggagtcagtccaatccgaccggtatgagccttatccctacgacgtgcctacgacgttctttcggtttttggcttcgggccttaggaaataccatataaaacctcatatgagaactcaggaatatgcaatactaccttga

SEQ ID NO: 15725 - DNA, 462 bp, Zea mays
  Peptide Sequence Number=SeqID_57504
atgagctacattgaaagtcttagagactttgacattgattgtggaaagggtctgagctcgtacagtactatttcccaggtcatagaccatccaaccatgattggcagactgtctgcatctattaaagttagtgcgtgtgaggctcttgtacttgatctagaacacggacgactaacgctttctctagaaaggagcagtggtgggtgccgggctctagtgaccactgctagagaggagtatcagagccggaaacagcgccagggggtgaggtcgcgctcaggggcggagccagtgctcagcatgcccgggctcgtgctcgggctctggtgggcatcgacttcggcgagaggaggaagagcggcagggcacacacgtgacagcgaagagcacgcgaaaccgaggatagcgccattgccccttctctgccattggtgtttcacgttgtgcatcgtggagggatag

SEQ ID NO: 15726 - DNA, 654 bp, Zea mays
  Peptide Sequence Number=SeqID_57505
atggaaataatcaacagtgcccctgaccaaggaccgaattttcttttcttcctcttgcaacaaagaaacatcaatttggcactgctctgcgaaatgcttcagcttgcggagaaacccactgtgttcatccagacttctcatgctcgtgttaaggaattctttggttttgacaagcttgtggccaagagttgttgtcttaaaaaaaccattgtccatgaattcaaacaggattttgaacagttagaacacaacaacgttgtgatgagtgacagacaaggtgcacaactacatggaccaaagatacaagctttactgataaatgaactactaaaaggcttccacaatgtctacagggcaaatctacccataaatagagcccagaatcacatctccaccctccgttttcattccttcttgacccggttccgtgccgccttggctgagctcgaccgctcagcctgggagaacatgatgaagacgtgcatgacccccgtcacaagtgccatccctgcggcagtgaatgccactcatctccatgtcgagaggagctacgtccacttgaagaactcgatggcaccaaacaacagcaggcacgaccaaaatagggtcacctgctccatcagtgggaatagaaagtcagtggccagaggctag

SEQ ID NO: 15727 - DNA, 1284 bp, Zea mays
  Peptide Sequence Number=SeqID_57506
atggcgctccacgccgtctcctccgcggcggtctcctccccgttgcgcgccctctcacgcagcctcccccagcgcccaggctgtggttgtttaccaaagcagtccgtcatgatttactccacaaaatttgcaagacctcaggctggaccggtggacttcgctggcaggcctctggttcttggacgctcggacaagaggcgagtggttacagatagagacattttccccatagcagttttgatgcatgccactattgaagaaatcgaagcggagaaatccctcatcgaagaccaagctaaagaaaagatggagaaggcaatcgaaacagtccaagctaacttcaacactgtgaggacaggacgtgcaaacccggccatgcttgaccggattgaggttgagtactacggaactccagtaaacttgaagagcattgcacagataagcactccagatgcaacttctcttcttattcaaccatatgataagtcaagcctcaagcttattgagaaaactatagttgctgcaaatcttggtgtgacaccaagcaatgatggagaagtaatacgagtgactgtcccaccattgacatctgatcgcagaaaggatatcttttctttaacctttacaatggtaactccgtggaaacaaaaatatatgcaggaattatcaaagacagtagctaaattagctgaagatggcaaggttgctataaggaacataagaagagatgcaatcaaagcttatgataaactagagaaggaaaagaagctttctgaggacaatgtgaaagatttatcagctgatctacaaaaagtcacagatgagtacatgaaaaagatcgaatccatccagaagcagaaggaacagaactcagatgaggctcaaagcaaggactcgatccaaccaaagcgaggcctgcaggagcggctgtcttggcgttgcttccttgtcacaatgcatgggtctctgcctgcttggaaattggaatcggtcagcatgcatgagtacattgcttgcttggaatctacgagaggcgtaggccaacgccttgatgttgctatcggtatcaacagcctaataaagcgttcacagtccaggacggcgcacggttctgccgtcgcgctccatccgtcctccgcgctcgatcctcaattcccgcggcttccatcctcatcccgcatcggctcccatcctcgaaccccgcccgcggatcaagcagtcgcggttccttccatactcgaatcgagcagctccatcctcgaacccagcggctcccattcttga

SEQ ID NO: 15728 - DNA, 1431 bp, Zea mays
  Peptide Sequence Number=SeqID_57507
atgcagctagacatgagactgtcttctccatcagaaccaactattgcactctatgagtattccaccaacgccactaccaagctgcagttgtcgctgcacagcggccccagccgagcgccgtcctcctcgggccgccgctaccacaacatcaactcggcgccctacggccagctctggcgcgcgctccgctccaacctcacctcgggagtgctccacccgacgcgcctgcgccactacgccgccgcgcggcgccgcgcgctacaccgcctcgccgcggacctcagggagcagcagctcgccgacgacggcgtggaggcgctcgcggcggaaagcatccgtagcgcggtgttcggcctcgtctccaccatgtgcttcggcgacggcggcgtcgacgcggccgtggttcgcgccatggccgacgtccagaccgagctggtcctgtccctgtccgcggtgcgcaccttcgcgttcgtgccgttcctcgcggtgtccaagctagtctaccgcgggcggtggaacaagctcgccgcgatacggcggaagcaggaggagctgtacctcccgctcatcgatggctgccgccgcaggcgtggccgtgacgacgacgactccgacgggacgccgccgagttacgtgcgcacgctcctcgacctccgagtcccggtagaactcgacggcgaccacgatagcagtggaggcgagcagacgcagcagcggaggctcgaggacggtgaactcgtgggactatgctcggagttccttggttctggcaccgagtccgtgtcagcggcgctgcagtggatcatggcgaacctgatcaaacggccagacatgcaggacgccgtcaggagggagatcgacgctgctgtggatgccgatgccgaggaggtcggggaggaggtccttgggaagctggatctcctcaacgctgtcatcttggaggcgctcaggctacatcccaccatcaagtttggatttagggaggtgatgcaagaagaccaagtggttcatgatggccaccgtattcctgtcggcaccaagatggtcttccccctggaggctctagcgagggacaagacggcgtgggacgagcctgacgagttcatgccggaacgtttccatggatgctgcgcgggtggagaaagtaccaagaagctactgtccgtggcggcggagatgaagatgctgccgttcggaggcgggaggaggatgtgccctgcgataggcgtctcgttgctccacatcggctatttcatggcgaaccttgtgagggagttcgagtggcgggaagcggagggcggcgagcacgccggcgtccaactccaccccgacgccaccgtcgagatgttcaacttcatggagcgtccactgcgtgctcgcctcgtaccattacgtcgaccgggaggcaagaagttccgttacgtccattaa

SEQ ID NO: 15729 - DNA, 474 bp, Zea mays
  Peptide Sequence Number=SeqID_57508
atggaggagctgatcgagaggtacaaagctgccagcgccggagaagcgacgaccgacggctgcggcaggcacaacaggatggaccccaaacatgaaaccacggtgctgcaacaggaaatcaacctgcttcagaagggactgaggtacatctacgggaacagggcgaacgagcacatgaatgttgacgaactgaacgccctagagaggtacttggagatatggatgtacaacacccgctctgcaaaggaaggcatgttgaaagctgccaacgagattctccaggaaaagatagtagagcagagtagtttgcttgacgtaggcatggtggtagcggaccagcagaatgggcgttttagcacagtcccactggtagaagaggccttagataagcccttcaggagtgcccctggtattgtgtcgtcgtgccttttacttctccagaatgaagaaatattgtctattgaggagatctga

SEQ ID NO: 15730 - DNA, 1194 bp, Zea mays
  Peptide Sequence Number=SeqID_57509
atggctggacgtctgagtgctcctgttcatcggctgcctcctgttcatgcggcgcagtgctctgctgagatgcaggggggccactctcagatgagggccgtagtagaaggcatcgtctggagtccgacattggtgttgacgctggtggcggtgtctgcacagaggagccacatattgatagaagcaacagaccatggattccttctcggatcatcctatgattgtgagcggcagcgtgaggtgttcaaggttaccgcctggtgttccagcccgaactccattcccagggagtttaagcttgaaattgttgatcctgtcacgaccgatggtgggatgctgcgccgttcaactgtctaccctatccgggtgtcggtgaagatcattgatcgaccgaacatgctgcagtccctccagccatcacctcctctggcggaggacgatcccgatcagggaaggcggcggaggcggcgtcgatctaggaggtcgtcctttggtattactgctcccagaaaaagttcgacggcagtggtattgcctcggttgtcggttcatcagcggcttgggccgcgcgtgcagtcctttgtgaaggaaggagtcagggtgcctcgcctgccggtccataaacggctaggccccctagggatattcaacgctgagaaaggtgcatttaagaaggtgaagagagtatgtattcccaagaggaggttgaagtcatctgtgtccgtttggattcctaagacatcgtctgcttttgtgtctccacttccggctgcggttgatgatgcacttttggaagctactagttctattgttgttactgaagatgctttggctggctctccctcgacagtcttatgtcaagaggttattccagtggatgttggagcatgttcggaagctgctattatttctgatgctattggagatgttctggctacctaccccctgtcatctcaatcccggattcccatggtagaatctgaattgcaggacgttactgtctactccgggggagtgggccttcccattgttgaatctaaattgcaggaccttcaccttatggagtcttccttaacaaggaatcatcttatgtcgccaagtctgttagtttattctaggaaaagacctcaaaagatacagctgattgacgatatcgctgagaatggcagtgtcgggctgcagcagatgctatga

SEQ ID NO: 15731 - DNA, 318 bp, Zea mays
  Peptide Sequence Number=SeqID_57510
atggcgttcgaggacgaggagctgctgcagctgctctccagagccgaggcgatggaggcgaagcagatcgaggtgatatcgttgctcatgctggccacggccgagagtctcgcgtcaggggagcttgcacccgaggacccgaagtggaaggcccttggctcgaggtgctccacaaggcagcggaatcggtggagaggtccacgcggatggcgggtggcggccgagtacgtcgtacgcggctggcccggcggggagtcggtggtggtggatgcgcatcggaggctggccgtcagcacggtggcatcatcaaaatcgtag

SEQ ID NO: 15732 - DNA, 318 bp, Zea mays
  Peptide Sequence Number=SeqID_57511
atggcaaagttctgcgctagtgagcaattcctcgagcccagtgcatccccctcgcccgatgattgcccgcttgccacccgcatggtctgccttttaccaaggaatgctagccaagaggagagggtgacacagatttatagccaacaggtgcatcccaacaacccggatggcaagaatcacgggcgcgagtccgtgtcgaggagatcgcaagcagggcgacgcagaaacagggatgtagttccgatctcggtggagaagggatgcgtcgcgcacaggccccacatggcggaggcagtaacatcacaggcgcgtgcctag

SEQ ID NO: 15733 - DNA, 657 bp, Zea mays
  Peptide Sequence Number=SeqID_57512
atgaagacggcagggagccttcgagaggagccagaagaagagcaccacttgtgcgtggagaaggggcaccaacgaggattagttgggaccttgcatggttttagatacctcggtaaaaataccggcgtcgtccacattagcaaaatttttagaagtcctaatttaccacctcttaggcgaccgtgttcctttcaaagggtgatggacacctttggctttgaatactcagactaccataaccagacccaagaagtcgaagctggcgtgaagcaggaaaggaagttagtattttcgaatgggaggctgctaagttggtatatggtggtgtttgatagcaacgcaaaatctatgcactcggagaccaagaagacatctcttgcacaagaggagaagaagaaggctatttctagggaggttgaaaaaggtgaagtaaattcggtcgaaggtgaaaatggttgcagagggaagaaaagtgaagggagtgcctcagcttcatcccttggggctacccaaatattagagaataagggaggaagggagttggctagggatgaagctaaagctaacatgcaaaaggtcgaagtcattgccaagaaggccaagactgttatagaatctcggaaagcaccagaagatgtgacacccttgagcaattga

SEQ ID NO: 15734 - DNA, 351 bp, Zea mays
  Peptide Sequence Number=SeqID_57513
atggctgctagactgttaactccctcatctttggaagcattacaaaaagaaggcatagcttctgacacaaaagtaatgtatgggttggctagtggtgcacccgtgcagccaagagggggtgaattgactgtgaatgtgaggaagaggcaaacatatgaagaggatgaaccagagagcgatacaaagaaagggaatgtggccgacgaggtcatgagtcatgcggaaactggtgatgtcgaatctggtgaacaaaatactggttccaagaaggaaaaagcattggaggaggaaaatgaccttcgtcatacgagggacagttatatcgagatggggaagtccattttcacatga

SEQ ID NO: 15735 - DNA, 138 bp, Zea mays
  Peptide Sequence Number=SeqID_57514
atggaattaggtgtcaaacaaaggagaagcctagccattgcgttttcaggccagtgcaagttcgccggaggcttagcaaatttaaagaaaattctagaaaatgataaaatcattggaccaattttactagactcctaa

SEQ ID NO: 15736 - DNA, 351 bp, Zea mays
  Peptide Sequence Number=SeqID_57515
atggcggctgaggcaatgcggcgaaggagaaaggggaagatatggctcagccatgatccctttatctacgaggggaaggaaagaggggttcggaggttgcatgtacacgagatagttcacgggcaactaatgatgaagtggttcctaaagagcttcgagctatatgacagtaacatactgatgaagtggttcctaatacaagagcatactgatgaagtggtttctaatacaaggactgaagaagtggtgactggagggctgggagtgtctcatcacagattgctacgacagaagttggtagtactatttcagcaggagcaacatcgtctccacgcattgttagatgtttag

SEQ ID NO: 15737 - DNA, 297 bp, Zea mays
  Peptide Sequence Number=SeqID_57516
atggcgatttggcctaggttgcttcttggtgaagactgggcctcgggcgagccgaagatagttcacgggcaactactgatgaagtggttcctaaagagcttcgagctatatgacagtaacatactgatgaagtggttcctaatacaagagcatactgatgaagtggttcctaatacaaggactgaagaagtggtgactggagggctgggggtgtctcatcacagattgctacgacagaagctggtagtactatttcagcaggagcaacatcgtctccacgcattgttagatgtttag

SEQ ID NO: 15738 - DNA, 105 bp, Zea mays
  Peptide Sequence Number=SeqID_57517
atggctctgtctgcgacgctacggatttctcttagcgtcgcgttctttggggttctggcgttcgtgcttggtgtcatcgccgaaaacaaaaagggttatacttag

SEQ ID NO: 15739 - DNA, 429 bp, Zea mays
  Peptide Sequence Number=SeqID_57518
atggaggttggagggctcagtccagttgagttgagtctcccacaattgaggacgcagctgctcctccaaccaaacgaattcgcaactgaccgtgcggactggagcaataggagaatcgaagatttgaaaatttggacctggccgattgcaagaaaaatcctaggggaagaagcgaaaacgcggaagacaccggcagaccgtctcggtaggcggctagggtggacggagggcgtccaccaccgcaccgtgccccgcccgcgattttgggcccccacgcgcgtcttcctcccgcccacgaatcaagccccgcgcgcgtcgccctcgccgccggcccacgcccacgccgccaacgccgctcaactagctttcgcgctcccctggcgtgcaacagctttcgcgctccccctgcccccgccatgcccgcactag

SEQ ID NO: 15740 - DNA, 279 bp, Zea mays
  Peptide Sequence Number=SeqID_57519
atggttggaaatgatattatgctttggaagctggctggtgccaaaggtatgtctcaatggctattgcagcagttgacattcaagtcaattttgtaccttttctcatcatttctgatgtctgaaacaagaatcgagtactttcttatgaaatttgaggcggtgaatttgttgttggctttgatcctgttattcacttcttacaagatatttgagtatagagaacgtgatttagaggacgttgttggagaggaaggagatatagaggatggaatcttttag

SEQ ID NO: 15741 - DNA, 114 bp, Zea mays
  Peptide Sequence Number=SeqID_57520
atgtatgtttttggttatggaaagtacggtgattacatttctgaaaattatgggctaaaggctccagctgatccatactttgcatcccttgctaatgtggaacgtgagccatga

SEQ ID NO: 15742 - DNA, 270 bp, Zea mays
  Peptide Sequence Number=SeqID_57521
atgaaccagaggggaaaggacgaaccaaagggtgtcccaggtgcgggtgatgtgatggagcttaccgagggaatcagcgtgacgagggctcaacgaaggtcgtggaacgggcagcgaacttcgggcgagagagctcggctgagggtgcaagtgagcacagggaagtgggcgagcggggtgtgggctctaaaggggcaagggcgtgaggaggtggccgaagaacgcacggacgttggcgcgtccatggcggggacgtgggcgagaggttag

SEQ ID NO: 15743 - DNA, 2127 bp, Zea mays
  Peptide Sequence Number=SeqID_57522
atggttaacttcgggaagaaattgatggcagatcaaattccagaatggaaaggatattatatcaattacaagttgatgaagaagaaagttaaacagtatggccagcagctccagcagggggaaaaagatcgtcgtcgggttctgaaggatttctcgaagatgcttgatgatcagatagagaagatcgtcctgtttctgttggaacaacaaggactattggcaagcaggattgagaagttaggaaagcaaagggcaatactacaagagcagccagatatatctggcattgctgagttacgagaagcttatagggaagttggtatcaatctcatcaaacttctcaagttcgttgaccttaatgcaactggcattcggaaaatcttgaagaagtttgataagcgttttggctatagatttactgattactatgtgacaagtagatcgaatcacccttactctcagctgcaacaggtctttaagcatgtgggtgtaggagctgttgtaggagctttgtcacgtaaccttgctgaactccaagaacgtcaaggaagctacttatctatttatgatcagccatcttctgctcttaagctgaccgtttttggttttgatcccctgcaggaccccatcattgatatgataaattcttcagttgataagttgacaaggtcaactaattttcttcgctttttggggcaacatgccatgattgtggatgaggagtctcctagcactgcaggagaggaagaaatagaagatcagaaataccatttcatgtcccttatgctgaacctggtgaacacattcctttacatggtcaacacgtacatcattgtgccaactgcagatgactattcagtgagccttggggcagcttctactgtttgtggtgtggtcattggttcaatgactgttgcgcaaatattttcctctatttacttcagtgcatggtccaacaagtcatatttcaaaccgcttgttttcagtagcattgttttgttcttggggaatatatgctatgctatggcatatgatatgaagtctctaacggtccttattatcggccgtttactctgtgggatgggttctgcaagagctgtcaatcgccgatatattagtgattgtgtccctgcaaggatacgcatgcaagcttcggctggatttgttagcgcaagtgcacttggcatggcctgtgggccagcgctagctggtttacttcagtggaaattcaaggtctacatggttacattcaatcaatcgactctaccgggttgggtgatggcagttgcatggctattgtatttgatttggctatggttctcattcaaagaaccgaaccgtgctaccgaggtgaatgaagccccacaaaatcctgcttctggacaaactgttgatattggacgactagagaatggaattgcacagcctctgctcaaggattccgtggataaacaaaatgaagatgaagacgaagttgatgatattgaagaaactgcagatgattctcgcaaacctgcaacatcaattggctcagcataccgattgcttaccccgtcagtgaaggtccagttgttgatatacttcatgctcaaatacgcaatggagattttgctttcggagtcgagtgttatcaccaatcactatttcagttggaatacaagcgcagtggcaatatttctagcaatcctagggttgacagtccttcctgtaaacgctgttgttggaacatacatcagcaatatgtttgaggacaggcaactcctcatggtgtctcaaattacgttgctagtaggcattatcttcagcttcaaagtcacgagcacatactatgtcgtccagtatgttgtctcagcactggtcacatttgtttctgccgaagttcttgaaggcgtcaacctttccctcctatcgagcgtgatgtcgtcccgcctctcccgtggcacgtacaacggtggtctcctctcgacggaggctgggaccctggccagggtggtcgccgactgcaccatcaccgcggcggggtacctgggcgtggggaagctcctcaacgtcaccctgctaccgtcgctggtgatatgtgttgcgtccatcgcctgcaccttcctgacgtacaactcgcttttctga

SEQ ID NO: 15744 - DNA, 1701 bp, Zea mays
  Peptide Sequence Number=SeqID_57523
atggcgacgcggatgaaggacgtggcgcggaggtcgaccaagaagtacgtggaggaggcgctgtaccggcgtctgttccggaaggggtcgacgccgcaggcggttcgagaggaggtggatggcttcctcgacagccggaagcgggcgttcaagtgggaggtgggcgtttgcgtccgccggatgcggcggaacgcgctctaccgcccgtcgctcaagcctgagcagatgcagaacacgacccccagccaggcccgtgggagatgcctcggccgcgcgtatgcgctcgtgcaggactgcaggctggtcctttctgaagttatggcgagaagaggcatgaatcctactgttagtgatcaagcaatccgcctggatctcattgccaaatcgagaggcatcgctgctgccgagaagtactttttggacctcccagaaacatccaagactcatcttacatatggcgctcttctcaattcttactgcaaagagttgatgactgagaaggccgagtcccttatggagaaaatgaaggagctcaactttgctttcactgccatgtccttcaacagcttaatgacgatgtacaccaaagtcaaccaagctgagaaggtccccagtatcattcaggacatgaaggcagatgacgtattgccagatgtctttacttataatgtttggatgagggcgcttgcagctctcaaggacataccaggggttgagagggtgattgaagagatgaaacgggatggccgtgttgctcctgattggacaacatacagcaacctggcttccatatatgttgaggctggaatgtttgagaaggcagaggctgctcttaaggagcttgagaagcggaacaccagcaatgacatcgaagcctaccagttccttattacattgtatgggcgtacacagaacttagtggaagttcaccgtgtctggcgatcgctgaagcgggataaccctagaatggcaaacatgagctaccttaacatgattcaggttttggccaacttgaaggacctgtctgctgccgaagcctgttttaaggagtgggaagcccgacacatccatccacccaagaccaacacaaagggctcgggggcagataatacacctggtgcagatccaaaatctccaagtaacccgcctaataatcagtctggcaccaaggaaaccggggacgagacagcagaggacctccagccgaagcatccaaaatatgacatccgggtagcaaacgctatgatcaaggcgtacattaccgagggcatgcttgacaaagctgtcgccatgaagaagcgtgccaagatgcgcggcggaaggctgaacgccaagacatgggagatcttcatggagcattacctcaagacgggggatctcaagatggcccattggtgcgcggaccgcgcgatgaagaaggggcacagcagcggcaggatttgggtgccgccgcccgccgtgacggagaccctgatgagctacttcgaggagaacaaggacgtcgatggggccgagcggtacgtgggggctctgaagaaggtgcagaaggatctgggcgcaccggtgttcgagccgctggtgcggacgtacgctgccgccgggaagaagttccccgggatgcggcagcggctgaagatcgagaacgtggaggtcggggaggggacggcccagctgcttgactctatctgcgccgatcaatag

SEQ ID NO: 15745 - DNA, 780 bp, Zea mays
  Peptide Sequence Number=SeqID_57524
atgagtcggaaggaggcggagccggcaggacaggatgggtcttcttcgtctgccactgatgggggaggaggaagtggcagtggccgggagctggcagatgcgctggcgcggcgacgtttgtaccgggaggtgacgctggcgctgcactcagggttgcgcgacgccaaggcggacttctccttcctccgcgcgcgtgggctccgcagcctgctcggattccttcgctccaccgcctccgcggccgacgacgcgctgctgctccttttccgccactcccaatccatccccgatctccaaggaaacgtcaggatctggtgggttgataggattgcggatcctaccggggacgtggcgcagcgagagtgggttgttacagtgaattcgttgcatcaaccaaagcaagatcctgttgtgacattggatcatatatttggaacggaaccaatgaagattacaagcccccctacaggttctgaaattgctcttgcacttagagtcttggaaggttgttgccttttatatagccgatgcacagctctggcccacaaatacaaggctgtgaaggtactcttgaatatattagccagccgaggtccaactgagcaaggagtttgcttggacacactgatatcgctgatgttggactcaccctccaatcagatgtgcgcatcacttatatgggcagcaagccggttcggctccaccttggatgcagagcaaaggcagacgaccttgcaaatacaagcaatgagagttgtcgaatccttggaaccctactag

SEQ ID NO: 15746 - DNA, 1569 bp, Zea mays
  Peptide Sequence Number=SeqID_57525
atggggttctgggtgaccacgctcatctttctcctcgccggcgtcgccgcatccctcttcacgctcctctgctgcaaccgcgggccctccacaaacctatctgcatatgcgagcccaactctgaagcccacagggttttggcccaaattccatccaagcacttggtccatctccgactccactctcctgctcctctcctgtgctgcgcagccttgccctgctttctccgccgacccaccggccacctcccatcaccactcagtcagatccagtgctccacctacctaccagctccagccgccggcgatggccgtgtccttacccgtcccgatcccgccggcgctcctccacgcggccgcggcgctcgcgctcgccgccgccgcccacttcctccacctcccttccctcttcctctacgccctccacacctacatccacccggacgccgtcccctccaacaccccgcgcgcagtcctccgcccgccgggctccaacgccggtcccgccccgggttcctccaagcgcggcgccgccaaggacaaggacccgttcgacgccacttccgcgcagctctaccgcctccggctctcccacgccacgctcgcctcccgcccccatttcgccgcctaccacctcgcgctcctcctcccgctcgcgctccttctgcccgcgctcctgctcccggccgcccccggggcctccccgctcgcgccgctcgtccccgcggcctacctcttcgttgcactcctccgccacgtcgtcgtcccgtcgccgcgccccgcgctgctcgccgccgcgctcggcgcgctcctcgttaccactctgctctcatccagccccttcgccggcgcgctcgcgtcgctcgccgcgctcccagccgcgcggttcgcgcgcgcattctggcttggcactgaccagccccgcaccgggctcgccgtgctatcgtcctctgcgccggcgcgcctcatcttccaccttaccgtcctcgtctcctccacggccacgatcctacgatgctgcggattcatggatggcgcggaacaggaggcgaagctgctcgccgccgcggctgggctgcagctgctggcggcgcggcctgccgtgcaaatgtacctcaatgaggctgtgttctgctggtaccagcgtctgcacgcgagccgtgcgccggacactgagtacggccgggccaaggttttcttgcacaaccaccacctctgcgccgtggccacgcagctcgttgcgccgccactgctcgtgctgtcgctgcttgcattgtggcgggttcaagggaaggacttctttgagggcttagaggggatgtactggcttgttggatggtctgttgccatgaaggaggccgcattgcttgcggcccggtggatcgtggctgtgtggtcggcggcgacgggggattcaaagaagaggaaaccagaaacacttgtgtttgcattgcacaagtggtacttcactgccttccagtctctcctccacatagtttacaaggttgattatgctttaaccacctattggtgctggatgttggaccactatgctgttcaaggtctttga

SEQ ID NO: 15747 - DNA, 408 bp, Zea mays
  Peptide Sequence Number=SeqID_57526
atggagattgaagggtttgttggagcacagagcacggcaggaaagcagaatactactagtacgagcacaaggagggaggcaagagctggcaactgcgcagaggcagccatcagagctcttgtaaggtgtagaagtgtagaaacttggatgccaatgaatgtggggtggctaacctccacatcagaagagggaggaggtggcgggggcgcatccgatcatggtcgtggcagtagagcgaacgccagctgcgggtcagagtcagtctcggatccaggatctaccgtagaagctggagctggtactaactcagacagaggctgcgttgcaggagctgttggagctgaagaagtcacagacaccgccacagcagcagtggtaacaacaggagctggtggcactggcggctga

SEQ ID NO: 15748 - DNA, 579 bp, Zea mays
  Peptide Sequence Number=SeqID_57527
atgtcaacgtcgccgctgcggcccaagaacggcgtcgagctggaggtgacggtgctgtcggcggactcgctgcgcctgccgacgtcctactggcctctgccgcggcggctgcggcccacgcgtgggggcgccacgctcgtcgtccccgtgggcgcgggcttcctcgagggccgcgccgacgtccgcgtctccgtgctgtcggagcccgccgcctgctgccggctcgtcggcgccacgccgctgggctggtgcggcatccccgcggccgacgtgctcgacggcctccgcccgccgcgcgcgctccgccgcctcagctactcgctgcgctgcccgcgccgctgcgggggcgggggcgcacccgggcggggccacggcgtcgtgcacctcgccgtgcgcgtgctcggcctgcgcgacgacgcgccggcgaggacggctgcgacagcgccgctggccgcggccactgcgccggtgcagcggggctggtgccgcgtcgcgatgggcatccccgtgtccggggccgcgtcggccgtcgtcggggtgcccttgtcgtcgtggggcgccagcgccacgtcacggtga

SEQ ID NO: 15749 - DNA, 129 bp, Zea mays
  Peptide Sequence Number=SeqID_57528
atgacgccactctatggaaaagatcctcaggcccttgatgcccaccggttagagagagcatgggagaaagacctccgaactacctgggaccaccgttctgtaggaggtgtttatgtttgtagttcatag

SEQ ID NO: 15750 - DNA, 198 bp, Zea mays
  Peptide Sequence Number=SeqID_57529
atgcccaaggcgctgaccgagaagagcaccttctcgacgtctcaaatcgggttcgtcaagctgtccaccgtggtgttcgtcgtggcattgccgcttggcgtcggcgacctatcagaggatgtcactagtgatgctctagaggacatggaggatgatttcggtatatccacatggtcgttgttgacctccttccgttga

SEQ ID NO: 15751 - DNA, 1299 bp, Zea mays
  Peptide Sequence Number=SeqID_57530
atggcgatcgtcgagttggccaacgcccagctgcagcagcaagccgcagcggcggccaagaaagacggcggcggccacgagctggaagatggggcggcggacgcggacacgagcacgacgatgggtatgagctgcaagcggagcgagcagcagcagcagctggtggagtcgtcctcgtcctacgactacgactacggcgccctgatgaaaggcgtgaggcacctctcggacagcggcattaccaggctgcccgacaggtacgtcctgcccgtgtccgaccgccccggcgtcggcctgattgccgcctcgtccaccgcggcggcggcgggcggcgtcggcagggtcaagctccccgtcgtcgacctcgccggcctccgcgacccctcccagcgcgccgccgtgctggcgacgctcgatgacgcgtgccgggagtacggattctttcaggtggtcaaccacggggtcgggagcgacgtgagcggcgggatgctggacgtggcgcggcgcttcttcgagctgccgctggcggagcgggcgcggcacatgtcggcggacgtgcgggcgccggtgcgctacggcaccagcttcaaccaggccaaggacgccgtgctctgctggcgcgacttcctgaagctcgtctgccagccgctgcgggaggtggtcccgcgctggccgcagcagccggcggacctgagggacgtggccaccgggtacgccgcggcgagccacgcgctgttcatggaggtcatggaggcggcgctggaggccctgggcatccccgcccccgcggccggcggcggcgtgctcggggagctggcggccttggcgtcgcacatgatgacggtgaactgctacccggcgtgcccgcagccggagctcacgctggggatgccgccgcactcggactacggcctcctcacgttcgtcctgcaggaccacgtcgaggggctccaggtcttgcacgccggccgctggctcaccgtcgaccccgtcccgggatcgttcgtcgtcaatgtcggcgaccacctagagatctacagcaacgggcggtacaagagcgtgctgcaccgggtgcgcgtgaactcgacgcggccgcgcatctcggtggcgtcgttccacagcctgccggcggagcgggcgatcgggccggcgccggagctggtggacgacgaggccggcaacccgcggcgctacatggacaccgacttcgccaccttcctcgcctacctcgcgtccgccgacggcaagaacaaaaccttcctgcagtcaaggaagctgccgctgcatacgtctagctaa

SEQ ID NO: 15752 - DNA, 621 bp, Zea mays
  Peptide Sequence Number=SeqID_57531
atgccggggaaggcaaactgctgctgcccgccagggtgcagcattccgtcctctgtccgggcgatggtcgcaccgcgtaagggccggccatgtccgggtcttcctcgcgctgacagccgcgccagagggttgcccggcacgtcgtgtgccacgagggcggcgctcatgttctggggcggcctcggcgagggcgggagcgaggagctgccgacgcgctttggggcacctggcacccgctggtgcggtgttgaggtggtggcagccggagaaggtttctctgccgacgagattgcctactccgcccacacccctggacctccgttcccctggcttaaatggctggttctcgtcctccgcgggcgagagcccttcagccgcagcatccgcccggaagccgttgctgcagctgtttcgccgcccggggcggaggtcgttgtcgctgctaccggagtgggcgccggcgagtttccaggggttttgtcgccccgcaggccctccaacatggggggttgtttgtacctacgggggtggaacctgagttccgtttgtaatggcaccttgagtgctggcccgtgtttttcccttattccgagcactaggactctcctgtcggctaactga

SEQ ID NO: 15753 - DNA, 754 bp, Zea mays
  Peptide Sequence Number=SeqID_57532
atggcccctcttgtgacgtggtcgatccgagccctgggtcgggcgaggcggaggctcctccgaggtcggggtcgagtccgagccctggggtcgggcgaggcagagttcgccgtcttccggggccgagcccgagccgagccctggggtcgggcgaggcggagttcgtcgtcttccggggctgagcccgagtccgagccctggggtcgggcgaggcggagttcgtcgtcttcgggggccgagcccgagtctgagccctggggtcgggcgaagcggagttcgtcgtcttccggggccgagcctgagtccgagccctgggtcgggcgaggcggagttcgtcgtcttccgaggccgagcccgagtccgagccctggggtcgggcaaagcagagttcatcgtcttccggggccgagcccgagtccgagccctggggtcagacaaggcggagtttcctatggcgcccgaggccagacttggctgctgtcagcctcactcttcgagtggcacagcagtcggagcgacgcaggcggcgctgtcttcttgtcaggccggataaggtgtcaggtcatccttgcattaaatgctcctgcgatttggttggttggtgtggcgatctggccaaggttgcttcttggcgaagactgtgcctcgggcgagccgaagcttagtgctgatgggggttaccagctgagattgggagtcttgggggtacccctaattatggtccccgacaacggccttctatataagttcgttg

SEQ ID NO: 15754 - DNA, 480 bp, Zea mays
  Peptide Sequence Number=SeqID_57533
atgcgaaaggccggctgccagagagccagagaaatagcacccatctacttcaagcagataaggcggtcctcctaccacgacgtcgtccgcgtatcggaggtggaggacgtgctccacatctccggcgtgcagacatacgtcatcaacagcgcccgggcgctcttcctcaacgagaggccccagccgcgcggcgccggcgcggccgcgggcaaggccgccgcgtccccctacaactgcgagatctgcggccgcgcgctgctcgaccccttccgcttctgctcgctcggatgcaagctggtggacaccaagaggagcaacggccacgcggctagttccgcggacggaggcggcggcggcggcggcgcagccagtggcaatgacgagacgacggaggccggcgggagcaagaacggcccgggggcgcggccgcacggacggcggcggaaggggaccccacaccgcgcgcccttctggtcctga

SEQ ID NO: 15755 - DNA, 753 bp, Zea mays
  Peptide Sequence Number=SeqID_57534
atggttagctctcctcctcactgggggcgctgggttgcgtcaccccggaggtgctccagagctgggtgcgcgtggacttcagggaggccgtgtggtaagttcaaggccggcgcgcagatcttctctgagggcgggctggactacctgggcaaccccaacctggtgcacgcgcatagcatcctcaccgtgctcggctcccaggtcgtcctcatgggcctcgtcgagggcttccgcgtcaacggccacgacggcgtcgacgacggaaacagcctctaccccggcggccagtacttcgacccctcagtctcgccgacgaccccgtcaccttcgccgagctcaagccagcgatggagcaaggccaggggattcgccggattcaccgagcgggctctggtggcggccggcgctgccgtcgtgtccgccattcttgtcaaccccctcgacgtcgccaagcgtgtccccgtcgttcaccttagcctgctgctgaatgccacctcgcctccctcgctgcgtcgctgcgcgtgcctcgaccgtggcgacgtgcccaagcacgtgaccgaggccaacctgctccccttgttctgcgaggtcgccaccgtcgacgaggtcaccatcatcaaggacaaggccaccaaggtctctcgagaagtaatattgctcgaaaatgtagagctgactcttgaagcctttgactacatgcagctgccattcacgctgaaaggtggtatcaattttttaatccgactgcattga

SEQ ID NO: 15756 - DNA, 1233 bp, Zea mays
  Peptide Sequence Number=SeqID_57535
atggggtcgtccacggaccacggtggcgccggttggcggggcaagaagcaggggtcgcagctgtggaagaaggcgctgctgcattcctccctctgcttcgtcatgggcttcttcaccggcttcgcgccgtcgtccgtgtccgactggacgtccgcggcggcggcggcgggcagcagcagcagcagcagccacgtggtacgggcgctgccggcgggcggggccttgaaccggagcctgctggcgcacggcgcggggcctggctacgaccgggcagcgtctccgcgcccgctcctggtggtcgtcacgacgacggagtcgacgcccgtggcgtccggcgagcgggccgccgcgctgacgcggacggcgcacgcgctgcggctggtggcgccgccgctgctgtgggtggtcgtggaggccgccccggacgcgccggccacggcgcggcagctgcgcgccacggggctcatgtaccgccacctgacgtacagggacaacttcaccgccgcgggcgcgggcaaggagcgccaccaccagcgcaacgtggcgctcgggcacgtcgagcaccaccgcctcgccggcgtcgtcctcttcgcgggcctcgacgacgtgctggacctccgcctcttcgaccagatcagggagatcagcgcgttcggtgcgtggccggtggcgacgatgtggcgggacgagagggaggtcgtcgtgcggggccccgcgtgcagctcgtccgcggtcaccggctggttctcccaggacctgagcgacggcaccgcggctgctgcctctaccacctccaccgcgagggcgaggccttctggcgaggtggacgtccacggcttcgccttcaacagctccgtgctctgggaccccgagcgctggggccgctacccgacctccgagcccgacaagtcccaggactccacgaagttcgtccagcaagtggttctggaagatcttagcaaggtgaagggcattccttccgattgttcagaggtcatgaagtttactccaatgcaatgcaatgcaatgcaaggtgtccaattcgtagaaaggatagacacctgtaccaacaagcatgcttcggaagcgcacaaagctaaggcattgttcttagtggcccctctgtacccgctcttgagtgccatggcatgggcagtgggctgttgttttgttggcccgtcgccgtcgtgcgggaaaatcaactatggtgagaggctaggaagtaggaactag

SEQ ID NO: 15757 - DNA, 216 bp, Zea mays
  Peptide Sequence Number=SeqID_57536
atgacacagccactggactttccgcctgagcctgagcctgagcctgagcctgagcccttcgggcctgccatgcggccggcgcgacaagtgacacccgcgccagacctcaactactatactataggagtattccagttcagaagatcactgaaggatcaaatcaaaccgccatattccccggcccacggcaccacgccatcgatcccgctttcgtag

SEQ ID NO: 15758 - DNA, 1689 bp, Zea mays
  Peptide Sequence Number=SeqID_57537
atgacgtggcacgaggacctggccactcacgtggggaacacgggcgttcgcctccccggcgccggaggtcacgcgccggcggcggcgaatgttgctgcggcgggggccgggtggtacggggaggaggaagaggggagggcggaggaggggtgggcgcagcaggcgaaggggttcgcggagtcgacggcggagatgctgcgggagctgggccgggggctgtgggacgtcgccgcgcagagcctcgccggcgccgaggacagcgaggtggcgcggcggctccggaagcgggcggcggctacggggaagcgcctcagcttcatgaacgagtacctccccgaggagcgcgacccggtgaggtgttggctcaccgtcgccgcagtcgcattcgtctcgctcctagttttaggttttgggagtggcaatgaaactccagtagagcttccaaagaaacttatcatcggccccccaagtgctgatagaatccaacttcctgatggacggcatctggcttatcaagaacaaggagtttcagctaacagagcaagattttcactgatttatcctcattcttttctttcatcaaggctagcaggaatccctggaattagagcatctcttctggaagaatttggagtacgacttgtgacctatgatcttcctggttttggtgagagcgatccacacataggccggaatctcaattcttctgcaatggacatgctctatctggctaatgctctcaatattccggagaagttctgggttgtgggctattctggaggtggaatgcatgcctggagtgctcttcgttacattcctgatcgcattgctggtacctacttcatgttttttcttctacattgttttggattttcaaaagcacttattgcttttctattcaaagaacacagaccttacatgcttattgtatatgttactggtgcagcaatgttcgcacctatggcaaatccatatgactccaagatgaccaaagatgagaggcgtaaaacatgggatagctggtcaacgaaacggaaactgatgcacattttagctcggaggtttccatcactactaccattcttttatcgccaaacctttctttctggaaagcaaggacatccagagagttggttgtcgctgtcattggggaagaaggacaaaactttactggaaggtcctgcgttcaatgcattctgggaaaggaatgttgcagagtctgtgcgccagggagatgcaaggccatttgtggaggaagctgtgctgcaagtatctgactggggtttcagcctatctgacatccaaatgcagaagaaagaggctcgaggcttttttgaactcatcaagtctctcttcaatcaggctgaaagagagtgggtgggatttctgggcccaatacatatatggcaggggatggatgaccgagtgatctcgccgtcagtggctgaatttgtgcggcggttggttccaggagccacggtccacaagcttcttgatgaaggtcacttctcatacttctgcttctgtgacgagtgccacaggcagatattctccaccctcttcggcattccccagggccctatgaaccctgcaccgcaacccagcgaggtcgtttcagagctcaacgaagaaataacagtaccagacaatgtcacagatcaggaacaaggaaaatcaggcctgccctga

SEQ ID NO: 15759 - DNA, 471 bp, Zea mays
  Peptide Sequence Number=SeqID_57538
atgccccgtggccaagcggcagctgccggcacggcggccgggtcctacctacagctacaggggcacttggcgtaccaggcggcgccagctcagggcggcatggtgccggtgtacccgttctaccactacccgtaccacgcctcgcactcgcagggcctgggcgtccccgccgcgcacttcctccccccggtctccgccgccgccgtcgtctcctccaagcccaccgtcgtggccactcccaaaggtagacagcatatcatagtacagcacctaaatctatacaagcgcaacacatcgcatatgtgcaaccgatgcggcgccacccgtgcagctcagctctgcatgtgctcgcagtggagtggagcgggtgacgggttgcagctgaaggcacgaggcgatggtggtggtggcggcggcgactatgggcggcgcaatgaaaggcgctctgctctgttaacaagctgcacatga

SEQ ID NO: 15760 - DNA, 369 bp, Zea mays
  Peptide Sequence Number=SeqID_57539
atgcacatgtcgcacgcgcgcgagcgcatggccggcgaggggccgagggcggcacggcaggcgttaggcgcgagatcaagttgggcacaccgggcagagtcaacacatcttctcgcacaaaaattatgccgtgctgctgggcagtgcgcactgaatgttgtcgtcgatgttttgttcaaggaaaaagatgtgagcaaatcacgtttcactacaagaaactggttaaagaacgtgggtgaaaaaccgtcgaacttaataagtaagttcgacggtccccacgttcttaaggttaagaacgtgggtaccgtcgaacttaacattaagaacgtgggtaccgtcgaacttaaggttaagaacgtgggtttttaa

SEQ ID NO: 15761 - DNA, 153 bp, Zea mays
  Peptide Sequence Number=SeqID_57540
atgctacccgaggatgccgagtgggcggccatcgctgggcttgggttccgaggcgccatgcttggggccatcttcgtcacgcgctattttggccgtcggaggtggttgctgcaattccccgtcgtgcagtcccttattggatttcatttctag

SEQ ID NO: 15762 - DNA, 338 bp, Zea mays
  Peptide Sequence Number=SeqID_57541
gccgacgcgctataattcaccggactgtccggtgtacaccggacagtgtccggtgcgccaaggaagagcggcctcaggaactcgccagcttcgggaaactccaatggctagtccgctataattcaccggactgtccggtgcaactccggagcaacggctatctccgcgccaacggctacctgcagcgcattaattgcgcgcgcagaagtcaggtgcgcccatactggcacaccggacaaggaacagtgcatgtccgcaaacccaccgtgggcctcaccacccatgctctacacagcgtcacagtgaatagagttgcgggcagcaaacgccaggaatag

SEQ ID NO: 15763 - DNA, 492 bp, Zea mays
  Peptide Sequence Number=SeqID_57542
atgccgcgagtcggacatgatcggggcctgctggagcggccacgcgcgctggtgcggtcggcggacccggccgtgcagatcgccggcaacttcgcaccggtcggcgagcaggcgccggtgcggtcgctgccagtgtcgggccgcatcccgccgttcatcttgggcgtgtacgcacgcaacagggccaacccctacttcgaaccgtcgacggggcaccacctgttcgacgacgacgggatggtgcgcgcggagcgcgcgctggggcgggccgtgttccccaaggccatcggcgagctgcacgggcactccgagatcgcgcgcctgacgctgttctacgcccgcgagctgtgcgggctcgttgacccgtcccgcggcacgggggtcgccaacgccggccttgtctacttcaacggccgtctcctggccatgtccgagcaagccctgattgccgctgtcggctctccacttctccagttctgggtgaagaagtaa

SEQ ID NO: 15764 - DNA, 552 bp, Zea mays
  Peptide Sequence Number=SeqID_57543
atgtcctatgattttgcattaccatttgaatcatcttcattccagggagttggccaagattgtgctgcacagttccgtaaggatttgtctaggctccctgacatggaacgcctgcttgcacgtcttttctcaagctgtgatgaaaacaagagaagttcatcagttgttctttatgaagatgcatcaaagaaactgcttcaacagtttacttctgcgctttgtggatgccagcagatgttccatgcatgttcttctattagtacattgatatgctcagagggatctcaacttattgatttgctgtcaccaggcaaaggcctatcaaatatttcatctattttagaccgattcagagatgcatttgattggtcagaagcagaccgcaatggtcggatcattccttctgaaggttgtgatcctgaatatgatgccacttgcaatgcaatagaagagatcaaatccagtctaaaagagtacttgaaggagcaacgaaagcttttgagacctgcatcggtagtgctacaccatacttctttttcaagctttgcatga

SEQ ID NO: 15765 - DNA, 744 bp, Zea mays
  Peptide Sequence Number=SeqID_57544
atggcgtcgcgccgagccagcaacggccgctctcccctcgtgcggaaacagagtcagatcaccgcctttttctcctcccctaccccctctccgtccccctcgggcccgagccccggcgcatccaagccctctccatcgccgctgaaccctagtgcgaggacgaggtccccacttgccgcggtatccccctcctctcccaagctgccacagccgcagcagaaacagaaggaggtaaagaaggttaaggaggagcatgatgccgccttggtgcctgcgcccgcggccgcggaggtggtggggaggtgtttgcgggtgtactggccgctggacgacgcgtggtacaagggcaaggtggaggcctacgacgcggcctcccgcaggcaccgcgtgaagtatgacgacggcgacgaggaggaggtcgatctcaggaaggagaagttcgagtgggccgccgtcgttgaggagtcgaccttgctgccggcgaggaagctgcggcgtctccggcggatgtctgatatctcggtggcaaaatcaccggctgaggcagaggatggcgcaggggattccactgaggacgaggactggaagagggatactgttgtggaggatgcttctgaggaggtggagctggatgaggaagacgaggaggaagttgttgcagggcaaactacggggaatgactacactgctcctactggggatgcagctgagcgctttgggcagcgggagctacgattcgcttga

SEQ ID NO: 15766 - DNA, 381 bp, Zea mays
  Peptide Sequence Number=SeqID_57545
atggatgatctgggcatcgaagcaaaggaggctgcggcgcgcgaggtggtcacagaacccaagttctaccccaccgacgatgtcaagcctcgtgttcacagcattcgcaagcctaagcccaccaaactcaaatcgggcatcatgcctcggacggtgctgatcctcctcgtggggcgcttcatggtgaagagagtggtgttcctcaagcagctcaagtccggcctgctcctaagactaggagtgattgcaaggctcggactcgggctcagcccccagaagacggcgaactccgctccgcccgacccagggctcggactcgggctaagtcccggaagacggcgaactccgctccgcccgacccagggctcggactcgggctaa

SEQ ID NO: 15767 - DNA, 321 bp, Zea mays
  Peptide Sequence Number=SeqID_57546
atgaggctggagctggtaaacgagccctgggatcaggcataccagcaaggttttagtgttcgtacccatggtgattgtttgaattgccacctgaccttttttttagagttggaaggcgaatgtcctggccgtctcgatcctgcaactgctcctcgagactgggcaccatcacgccaaatactagctgattccttggatttgagtggcagggcgttttggatctgctgcgtgcgtgggcgatccaatccaacagggctcagggctaagaggtcggcaactcagcatctagagaatcaaaggatgtccagtgactcttcttag

SEQ ID NO: 15768 - DNA, 413 bp, Zea mays
  Peptide Sequence Number=SeqID_57547
atggtggagcggagggcgaagaagcggatggtgttcgtgatgaacaagctcatgtggctggtgtgcctcttcatctcggtggccttcatcgcgctgacctacgtggtggtggggcacgacgactggtggctggcctggtgcaccatgggcatcggcgccgcgatcatgctcaccaccctcggctccatgtgctactgcatcgtcgcgcacaggttggaggagaagaacaccaggaagatcaggagggcctccgcgagccagtcccgcggctcgtggtcccgatcagtcgactcggacaaggagatacttaacagcgagtacaagacgaagataggctgcggcaccacatcagtcttcttcaaccaaaggactgaaggcccttcctgcggaaccaagttcaggtcacttgaccg

SEQ ID NO: 15769 - DNA, 246 bp, Zea mays
  Peptide Sequence Number=SeqID_57548
atgtctggagatcacaccaagagggagattgtcaccggcgacaaagccataggctcagaaaggactctgtcaagggagtccggcgacaaatacaaggaggaatattcttcctcattcaagtcatatattaaggatgaagacccatttgggacccgacacccgaatgagtatgggtatatgatgaatcttatacccattatgggtatggagataaagatagttatagctttatgggaatgggtatga

SEQ ID NO: 15770 - DNA, 849 bp, Zea mays
  Peptide Sequence Number=SeqID_57549
atgctatcatatggtatgaaaagtagcacgtctcagaaagatctccaaaagcctaatgcttcagagcttccttcacaaggaaaagctgcatcagaattgacacttgatgggtgggatagtattgctctggaatattctattgactggcctctgcagctcttcttcactcctgatgttctgtccaagtatcgcaaggtttttcagtatctcatccgattgaagaggacacaaatggaacttgagaaatcctgggcagctgtaatgcataaagaccatgctgatttttctgattattgcaaggatcggaaaaataactctgcaacacaactgcgtcgacaacggtctaagcctttgtggcgagtaagggagcatatggcattcttgatcagaaacctacaattttacatccaggttgatgtaattgagtcacagtggaatgttttacaatctcacgtgcaagattcacatgattttacagagctagtgagctttcatcaagaatatttgtcagcgctggtttcccaatccttcttggacatcggatcagtctctaggatactggatagcataatgaagctttgcttgcagttctgctggagcatagagcaatatgaaactcggccaaatatttctgagattgatcacataactgaggagttcaacaagaagtccaattcgctgtacactatcttgaggagtagtcgcctcgcggaccaccgcaaggggagtgatgaattcaggaaggctgcgaccaatcactgcaggtgctcagctgtaacggtgatgttcctgtggcctgaactgtaccttcgcaaattatacgctcgttcaccgtggggatctggctga

SEQ ID NO: 15771 - DNA, 1644 bp, Zea mays
  Peptide Sequence Number=SeqID_57550
atgctgcacgagctcctcctcgcgctgctcggcttcaccggcgacttcgtcctcgacgtctctctgccgcggcgccgcgccgcctcccaggacgccggcgaggatggaaacggagacggtgaggtgggcccctccttccgcctcgcgccggacctcaccttcctccagccatcagagaggactgctattgagaggctcatatctctgggattttactacagagaactgaatcgctttgcaaccgagtcccgcgacctgagctggattcagtcttctatagatgtttcatcacctcattctgataatacccagaaggggaaagtgagaaaagggagtgtgtacaggagggcaattgccaatggtatcactgagattctgtcagtatacagatcagctgttctgcaggttgagcaaaaccttttatcagatccgttgcctatcctcgcgacagtaactcacgggttgaacaagcataaagacatcaagggtggccagcttcttaatcttttgcacaaacggtgccattgtggggttccagaactgcaaagctgcattcagaggcaagatgacagggatgtggagaatgaatcatctcagcgtgatgtttctgataagttaaagcagaaattagctaaagacacatccctggctagttggcatacgggatttcatgtatcattggacatgttgcctgagtatatccacatgcgaattgcagagtccattctcttcgctggcaaagcaataagggtgcttcgaaatccaagtcctagtgctacattgcaggatcctgtaatcagaactgtaggatctcatggaatgcaaagctctgtaggaggttctggtgtaccaaaagaactggcaaacttctctaacatcagagcagaagaactactgccacaagcagaagctgataaaattgattctatgctcaaggagctaaagcattcttctgaatttcacaaacgaccttttgagtctgctgtcggctcaatacgtacaattgcagctaatcatctctggcagctagtggtggtacgtgctgatctcaacggtcatttgaaggcattgaaagattattttcttttagcaaaaggtgactttttccaggactccctcgctagggaacaccaggccgcctccgatcttgagcgcactgcggtcgtcgcccacaacgccgccttcccaccaccccagggcggcgtcccgaccaacgacgccagtgctgttgaagaccccaacttcaaggcttccctcatcgccaaccttaacgcgcaggcgcgagtatctagaaccttcgtgcccttcatgaatgccgtcgttctgtcctgtgtgctgggcacactctcccccgagctgatggagtctgctcgcagctctggtggcattgcgcgccacgcctggcttgccattgaggagcaattcctcggcaatcgcgaagctcgcgcactttgcctcgatgtcgagtttcgtgtcttcatgcagcgcgatatctccatcggcgactgttgtcgcaagatgaaggggatggccgaggcccttgtgatcttggcgctaaggcggttgtctggtgcacttgctcgcctaggcgccttaagaacacgactgtaccctcgtcttgaacgtgctgcatggcctgaatga

SEQ ID NO: 15772 - DNA, 579 bp, Zea mays
  Peptide Sequence Number=SeqID_57551
atggagcgctacctccgcatcgtgcgctccgcggagcccttcccacatggattctcaaacagcatgctgcactcccttctatcctcatccccgcatgatgcgctcccaagtcccaaaactgccgccctccatgatgaaaggcccgaggattcgaaggagggacgtgtaggtcaagatgcagatcttcatgaagaccccaatcggagcgtaggcatggccgccgtcgcggagcaggagaaggagctcctctcgtcggtggtggacgacaccagctcctactccggctccgatcccctccacccatggttgtggtacggcaccaccgcctatcgctccatcccggagacgttgacaaaccgtcgggtggtctccttccgctccgggaccgtggcgttggggcgcgtgagccgcaagctctcggtgccgccatcgccgtccatgcggcagaggaaccccgccagggtctgtgcgaaccgctggcggtggagcgggtccgtgacgaggccacaccaggccttggagatgcacttgaagcggtggagggagttggcatccataggcggtcgaacatctcgatga

SEQ ID NO: 15773 - DNA, 195 bp, Zea mays
  Peptide Sequence Number=SeqID_57552
atggaggacctttcttatgatagaacaaagggaaataaagaatgggagacgaagctggaagacaagggacttcagctgaacatgttgacgaagctcaacaaaacaaatgtgcaaggaaataacagtgatcttagtattggtgctcttaacaaagtgcgtctctgggttgacatattaaatgagacatttggataa

SEQ ID NO: 15774 - DNA, 303 bp, Zea mays
  Peptide Sequence Number=SeqID_57553
atgacgtatgggcccaacttcgccagtcaatgcgagccaccagccgatcacggactctattgcgcatggggccaacctgtcagggtcgccttccctggcgaactccggcgcggtcaggtcctcgggagcgattacttcggcctgcttataagggaacccatgatttctcgccctgctagcctgcccgccgctttaccctcgcatacctcgctaacatcgtgggagttgggtcgccgccgccgagcacgagaggttcgccccagtgggaatcctatcacggacacaatcagggcgcactgctag

SEQ ID NO: 15775 - DNA, 486 bp, Zea mays
  Peptide Sequence Number=SeqID_57554
atgagcggtgtcgtgagtgatgggtctagcgatccatccctccgactcctgctcctccgagaactctgtgttgtggctcgaactgccaccggcaccatcgtcgtcgtctccgtctctgttagggggaagactacctcccagactccacctcttgctaaggtgagggggaagagtcctgctgctcctgctactggagtcggtgctcctgctcctcgtgcaggcgacgatgcagtctctccagtcagcaaggctctgataccacttatgtcacactcggtttcgaaaggcaaaccgaatgcgaaccatgcggcgccgcttctgctcctcggcggtgaggtcgccgaagacaaggggaacgaacatggaagggctctaggggttcggggaaaggctcaggcgtgcttagggcgatatggcggactcagtcatgggcgcaataccggtgcgggggcaccagagggcgaagaacacggcgaggcggcctaa

SEQ ID NO: 15776 - DNA, 357 bp, Zea mays
  Peptide Sequence Number=SeqID_57555
atgagtctcggttcagacgattcattgaacacctacgtgcaaatcggcgctcgcaagagagttcgcgtgcgcagggatgaaccttggctaggcgcgcacacaagggagctccgcggcgagcgcaggggcgagctagggagcaggagcagagggtgggcgagctgcaagggaggagcacgccatggacgcggccatggagacgcccgcatagaggacctcggctggggtcatggcgaggccatggcgagcaaggatctgggcacggtgcacatggagaccagagagaagcgaccgagcgctagggaggaagaggaggagcgcgcaggagataaacatcgcgagcagggaaagagatag

SEQ ID NO: 15777 - DNA, 403 bp, Zea mays
  Peptide Sequence Number=SeqID_57556
atgaagtccatcaagagaagcaaaagtttgttgaaggagcaaagaaagaagtctgagaccatcgtgcccgtcgtatgcagtgaaaactacctctgcgatgcaaaccgtagtggcgagctgccaaacaatctttacttgctggtggcgcagttctttctggtggaggtctgggctctggatacaatgaacagtcacatggcggtctggcggttcaccttcttcccctgcagcaccggggcacttgattgtattgaaaaggaggttgatgtccttgacgaagttataactaaccatagagacttctatgtgctggtagtttctcgtggtatagctgccgccttcatgaaagccggaatgatggcgctaagggttgataagccaaagctgcttctgaaaagccgaa

SEQ ID NO: 15778 - DNA, 327 bp, Zea mays
  Peptide Sequence Number=SeqID_57557
atggcggggcgcccgacgctatggggagagggctgcgcgcggctagagcttgtcgagcacggtgacgaacagctccacggtgagggttccagtggcatggctcgagcacaggtagagaccggcagggagacaacaggacccgtggccacaacaacaaatgtgaggccgacaagcaccagaggagagctcgcgctggagctccaaattgacggcgtgagagccgagcagggtgcggccattggaaggcggttcggtgatcttgtagcgaatccgagctggggttggccgtcgagcatcaaagaatctggcagggactggacaccatga

SEQ ID NO: 15779 - DNA, 168 bp, Zea mays
  Peptide Sequence Number=SeqID_57558
atgtgtcgcccctgctacgagtacaatcgcaaggatgacacccaggcgtgcccgcagtgcaagaccaacaagctccaccaaggtctcgaggtcaagcctggacccactgtcaagtgtgtgcttggacatgactttatcctgcactttccagtgtatatctcattgtaa

SEQ ID NO: 15780 - DNA, 420 bp, Zea mays
  Peptide Sequence Number=SeqID_57559
atgccgccaccaccaggagcccgcgccgccaccgcgtcgtcactgcaaccggtccgtgccgccgccgcaccgccgcaagcgggccatgccaccgccccgactcaccgtcgcaccacacccgttggagcatggagggagagaatcattgtatgcagcggtaagtatggcctcgctcatggcctggtgaaggcattcatggattgtggcgccaaagcagtcatctcatcgtccatcgagcctccggattcccagacaatagtctaccatgggatggatgtcaatggaagcctagagaatgggaagtttgtcatcggggatgaagaagccgatgaatcagagcctgaacctgttagccctgtaagtgactgggaggacaacgacgtggagaaaggtggcaaccatgacatggatgatgagtag

SEQ ID NO: 15781 - DNA, 231 bp, Zea mays
  Peptide Sequence Number=SeqID_57560
atgaccgccaggggggatatgcctcagctcatgatcgtggccatgatcctcgtggacgtgggcacggcgggcgtggggtgcagttgcggcgagaaaaaaggggggaaagggctgacaggcgagacccgtccatgtagccctattgtcattctcatggacaagactagatgttgcaacaaacccttcctttggtacattgtcaccctcatctacaacaagagggtcatgtga

SEQ ID NO: 15782 - DNA, 126 bp, Zea mays
  Peptide Sequence Number=SeqID_57561
atgggggtggctaatttgcttgatactgggttcttccacgctgatccacatacaggcgatatgattagaacacctgtcgaagattatgttgcagaactatatcaactctcacttgatcaattttag

SEQ ID NO: 15783 - DNA, 192 bp, Zea mays
  Peptide Sequence Number=SeqID_57562
atggggctcggtgtatgcggctcgctctgccaaggtggtgacgaggaggatggttatgattatgcttatggtactgggacgccggagcatagtctccacggcgacgctactcgccggcgcaatggccatcacccgctccattgcccaaagctccaaattgatgacgtctactcgttccagagaatacggtga

SEQ ID NO: 15784 - DNA, 846 bp, Zea mays
  Peptide Sequence Number=SeqID_57563
atgccgtccgccgacgccggagatgctgacgcgatgcccgcgccgccgccgcaaacaagggccgccatctcgcatgtcatcttcgacatggacggcctcctcctcggtatcttttctcctccactttcccgtttgcttcccttcactggttttttggcgcgagatgcaaatgtgctgtggctgatattcttttccaatttcacgatggtttctccattgcgagctggtgcagatacggaggggttctacacaacggtacaggagaagatcctgatgaggttcggcaaggtgttcgactggtccgtgaaggccaagatgatgggcaagaccacggccgagtccacgcgcatcttgtttgaggagttcggcctcgccggcctgctcaccccggagcagttcctggaggaacgcgaaaccatgctcaagaagctcttgcccacttgcgttgccatgccaggtctgctacgtttgatcaatcttctccacacaaatggaataccgatagctgttgcaacaggaacccataaacatcactttgcactgaagacacaaaaccacgaggacatattttctctgatgcatcatattgtcacaggagatgatccagaagtgaaggcgggcaagccatctcctgatattttccttgctgctatgagaagatttgaggctaatgtagaacctagtaattgcttggtatttgaagatgcaccgttgggtgtggcagcagccaaaacttcaggaaatccaaggctagatgtttcacatcacaaaggagctgaccaagttctcacttcactattggaattcaatcctagcgaatggggcctgccaccttttgtggattag

SEQ ID NO: 15785 - DNA, 366 bp, Zea mays
  Peptide Sequence Number=SeqID_57564
atggaacgtggtgttaggaagccaccgttcttcgatgggacaaactacccatactggaaggagcaggtggagagccttgtggatgaggagttgtcgcttgtggctagtcagttcacgcggttccacaacaattgtatgagccagcgacgtggcgggttgaacgatggatgctacaactgtggcaacccccaccactttgtcgccagttgccccaagaagggcaagcaggaggctggcccacacgaccaccacttaggtcgatgcaagggcaagatgggcaagttgaacttctttcttgggctacaaatcaagcagacccaagcgggacctttgtgcatcaaggcaagtatacaaaggacatcttga

SEQ ID NO: 15786 - DNA, 201 bp, Zea mays
  Peptide Sequence Number=SeqID_57565
atggcggtcgtggcatgcacggacgctgttggagcagacacggcaaggatggagcatggcctggatttcgagaggctacggttggagcgcccgcgggcgaggatggcgcccacggttggagcacccacggttaccggtgggttcatggccagtggagggggttcgagatttccggcgtttgtgccggttgcaagctacacg

SEQ ID NO: 15787 - DNA, 489 bp, Zea mays
  Peptide Sequence Number=SeqID_57566
atggcgaggcggagcaggcgagctgggcgtgacggatttattgctacgactgatctactgctcctcttcctccttgcccggagagagagagatatggagagggggaggaggagaaggtggtggtggccgcgtgggatggggatggggaatggatcaagtgtcggctccagtggaggaggagggaggccgcagcgagatgaagaagatgggattcgggaggtggttgcattcaagggcacggaggaaaggagctcagttcaatcccgccgggatttgcgttgcgtgagaaaacagcatgatgaattgaaacgaaacctgccacggtccaaccttttcctccactgccagtgtcaaattcggcttggccagggaacggctagaatggacacgaaatcagcttcaaacaagagcagctcgaggaaggagcgcgatcacacagattacgcacaatttctcccgcaaaagtcagcatggattgagaagcaatga

SEQ ID NO: 15788 - DNA, 222 bp, Zea mays
  Peptide Sequence Number=SeqID_57567
atggccttgcgaaataatgggcccgaggcctttcgtgaggccttcttgccttctagtggacccatgggagatctgtcccccacagaccccaaggaatgtcaccttatggccgttaagcgaattcttagatatttggtttctacgccttgcttcgggatctggtatccaaaggggtctaccattgacttaattgaatattcagacttcgactatgctgggtga

SEQ ID NO: 15789 - DNA, 360 bp, Zea mays
  Peptide Sequence Number=SeqID_57568
atggccgccccgcgaactgctcgccccgtcgcattaactccacggcgggacaggcggcgcctctggcaggggaagcgagcgacgcatcgccttcgccataatgaccgcgtcaaaaaagggaccgggaaaagggggataccccgaaaaaggatccttctccgtgaaggaaataggctccgagcctccctactgatcaggggttcgaaggctggcccctcggagggttcgacagccgcctcagagcgcgtgggctccacacccactactggtcagatgttcgaaggccagcccctcggaagggttcaacggctgcctcaggccactcgggctccgcgcccactactgatcaggggttcgtag

SEQ ID NO: 15790 - DNA, 771 bp, Zea mays
  Peptide Sequence Number=SeqID_57569
atgggaatttgcccttgcgcctccacgatctccgtcgtcttcatcaacgagaaggagaaggagtttgacattccctctgttgcgagcaccacaggcggagtggggcacgaggccgtgacttggccgggctccagcgaccggaggcgaagggggcacgaggctatgggcgggttgggctccagcggcgggctgcagaatggtggagggaagagcgagggaagaaggcgactgggaagaagggataggcgcatgagggcaagcgtgccgagcccggagccggactcccacgacgcgctgctcgacccacccggcaaccaaaccctatccaccccgcgtcctctctcccctcatttaaaccgccaccacgacggcacgccgcctcgtcggaaaaaccatcatctaaagttcaacgcccgcaccgcaagcgcaacacgccaacacccgagacccgacgcggccttcgccttccctccgcgcgagggagattcgaggggagagaggttctcaccttcgcgcctgcggttgcttggcgcagagtcgtcgcagatggaccggtaccagagggtggagaagccgcgggaggagtcccctatcggcgccaacgagatccgcatcacggcgcagggccggccccgcaactacatcacctatgcgctcgccctgctccagggttttaagtgcgggttcggcgagcatgcagtcgtgcgggtcgcgcgggctcagattgcggttacgaattattgctccaatggcggcgaggaagggccgtag

SEQ ID NO: 15791 - DNA, 723 bp, Zea mays
  Peptide Sequence Number=SeqID_57570
atgccgctgtgtatgggtggggcaggggttcggggttttcttgacctgtgtgagaaggacaatgcaacagatgacattgtcatcaaggccatgggaagggcgatcaacaagacagttgccatcgtggagcttcttaagagaaggattgctggtctccatcagaatacctctattgaatccattgatataacagacacttgggagccattggaagaaggccttgtcactcttgagaccattcgccatgtgtccttaatcactattaaattgtcaaagaaggagctggatacatcatccccaggttaccagccgcccataccagctgaccaggtcaggccagcagctgactttgatcaggatgcaggccgtaccaagtggtcgtggaagaggacgtggtcgtcgcagcaggggcaggggaaggggaagggcagtggagtagactatgatgatgagattggagagccagaggaggctccgcgtggatatcgtggcagagggaggggccgtggagggcgtggatcttttgcagttggaaggggctatggtggtgataattatgcgatggaagaagctggatcaaatatcatgaaggtggcagaggaaggggcagagggcgtggacgcggtcgtgggcggggaaggcaaggccatggacctcctccgcagcagtagattggttggcacatcacctttgggatgtcataacctccatttctttccataa

SEQ ID NO: 15792 - DNA, 237 bp, Zea mays
  Peptide Sequence Number=SeqID_57571
atggtgatcgccgagtccatcagcggtggcgctcaatttggagaaggcgcgctggcgaccggagggaggggaggttcactggtgcgagctttcgtggctttcaccgaggcagtgtctcaggtgatgaaccagctacctaaggcggcttactgcgacgtggtaaagcttcaaggcacgtggcattcacgcggtaggcagcaaaatccggcgaggttacctggaccgaccgcaaggtaa

SEQ ID NO: 15793 - DNA, 285 bp, Zea mays
  Peptide Sequence Number=SeqID_57572
atgcacgacctcctccttgcgctggagctgcttggttgttctggttggttgctggggcaggacggcgaggtgtctggttgctctgatgttgatattgatttcctccctgctggttgttctgacggtactgctaatgctgttgaggaaactgcctctagtactgctgcttctagttctggcgctgatgctggtgctgacaggggtcatgtaacaccccaggtgttacttagggttttcactcaagcctacactattgaacccatcatcacatgtggtttagtttga

SEQ ID NO: 15794 - DNA, 159 bp, Zea mays
  Peptide Sequence Number=SeqID_57573
atgaccaaggcgacgtccaagggatggctgagcaaacttagggtgtacaaggcctttgggtcccaaaacacatgtggtgatttctacccaaaacacatgtggatgtcaccaaaggcaaagaagcacatggtgaagggggtgtttaagggcctattttag

SEQ ID NO: 15795 - DNA, 831 bp, Zea mays
  Peptide Sequence Number=SeqID_57574
agccgaggtgaccgctgtcactccaccgctccactggccagtctgacagaaggacagcgccgcctgcgccactccgactgcagtgccactcgacagagtgagtctgacaggcaatcaggccttgccaaaggcgccacggcgaactccgctccgcccgaccccagggctcggactcgggctaagacccggaagacggcgaactccgctccgcccgaccccagggctcggactcgggctaagacccggaagacggcgaactccgctccgcccgggcccccaggactagggctcggggagaagacccagggagggggggaaattccgttccgcccgacccccagggctgggactcggggtaagaccccggaagacgggcgaactccgccccgccccgacccccagggctcggactcgggactaagacccggaagacgccgatttttcgtctccgcccgaccccaggggctgggggggggggggaaaaaaaaaaagaagggggcgaactcccgctccgaccgaccccagggctcggactcggggctaagacccggaagacgacgaaactccgcctcgcccgaccccagggctcggactccgccctggcctcggccgaacgacttccgcatcgcccgaccccttggctcgggctcggccacgacaacagaaggcagactcaacctcggcttcggaggaaaccccacgtcgccctgcctagggcacaaaccgccacgtcaacaggaggcgccatcatcatcccaccccgaagaagactcgggtcacggagaacaagaccgacgtctcatccggccagctccgccagagaggcaatga

SEQ ID NO: 15796 - DNA, 164 bp, Zea mays
  Peptide Sequence Number=SeqID_57575
atgaatgcaaacactgacaaattagtaagttctgatgaaactattgtcagcactaacgaaagtcatagcagtggcaagcatctggtgaaggggcttccaccaaagtaccaggccacaagacagttcgtcagcaatgcgaaagaagccaaactcggccttcaaag

SEQ ID NO: 15797 - DNA, 795 bp, Zea mays
  Peptide Sequence Number=SeqID_57576
atgacgctgacggcgccccagactcagcggctcaactggatagacttcctagagcggctgcacggcaagcggatgctgctcatggacaactcgatgaactggaaccagttcgagtccatgctctatgcgaggctttacggaacaaggccagatgttcgagatgcactagcattgtcaggttccattttttttacatataatgctgtaatagaagtcatgtccttgaccagcagaactattgaatcaatgattatggattcatgtgattttggcataatgacgccacgtgatcttcatgaagctgtggccttgtgtcgagggcttaaggagcttaggcttgttggctttccaaaatctgttcaggcttatcacatggaacacattttatgtgacatatgtgacatcctgtactacaatgggatcagaaaggttgagctgcaatcctaccattttacagacacgcatgtttgcactgtagcttgttcatgccagggagctctgcaggaacttatattggatgagtgcccgaacgtcctgggcaactttgtggtgtgcctcagagagtcttggcccaacctaaccaagttgaccttgaatcgtattggaatcagtgatgtccaaatcaggatccttatgcttgtaggatttgaccaacttgaggagtttaatttaacgtggtgctggtgccccttgatcactgacaggttactggctatcttacatgcatcaacattgcctaatgtcacccaggagtctgttgactactaccagcatcgctgtgaagtcgagtactaa

SEQ ID NO: 15798 - DNA, 855 bp, Zea mays
  Peptide Sequence Number=SeqID_57577
atgtcgcgaatcgtgatgtcaatgcggtttggtggatttccttccatggttgggacctggtactcggcagcgcgatgggcggtggtcaagcctcagtcgagcagtgctcaggaccctgaggccagtgggcggctcttcggccttaagcacacgctcagaggatcactgaagatcgctgccatcaaagcccctggttttggagagcgcaagactcagtacttggatgatattgccatccttactggagcaactgtaatcagagatgaagttgggctgtcacttgacaaggccgacaaatcagttcttggaacagctgcaaaggttgtccttacgaaagagtcgacaacaattgttggtgatggcagcacccaggaagaagttactaagagggttgcacagattaaaaatctcattgaggctgcagaacaagaatacgaaaaggaaaagctcaatgagaggatagtgaagcttgctggtggtgttgctgtcattcagcgcgatgggcggtggtcaagcctgagtcgagcagtgctcaggcctcaggaggccagtgggcggctcttcggcctcaagcgcacggtgggagcagcattttcagaagctggtgctcggcggcgcgatgggcggtggtcaagcctcagtcgagcagtgctcaggcctcaggaggccagtgggcggctcttcggccttaagcgcacggtgggagcagcattttcagaagtgtgcgagcctacctgtcagaaattaggcctaccgtccaacacaatagtgctcaggcctcaggaggccagtgggcggctctacttatgtagtatcattggccgttactctatagtttggtcagagaacttttaa

SEQ ID NO: 15799 - DNA, 396 bp, Zea mays
  Peptide Sequence Number=SeqID_57578
atgtcgggagatcacaccaagagggagatggagaccggcgacaagcccactacgagccaagggagcacttcatcggaagagtcccgcaccaagaggaaggagaagaagaaggactcctccaaacggaaggagaaaagatcttcttcttcacaccacaaggagaagaaggagaaatcttcttcccacaagtcgcatcggaaaggagacaagcacaaaaggatgaggaaggtggtctactacgagaccgacacttcatcaacatctacctctgtcacacccggttttggaaggcaaaccgaatgcgaactattccttacggagaggtactcaggaaacagcctgagccccctagagtatcacaagatcatcaacatcatcaggataacagtatcataa

SEQ ID NO: 15800 - DNA, 1367 bp, Zea mays
  Peptide Sequence Number=SeqID_57579
atgtccggtgcaccagaggactcaggtttcaaactcgtcaccttcgggaatttccagaggccactccgctataattcaccggactgtccggtgtgcaccggacatgtccggtgctccaaggaagggcggccccaggaactcgccagcctcgggttttcattccagccgctccgctataattcaccggactgtccggtgcatctgcggagcaacggctacttcaggcgccaacggctacctgcagcgcatttattgcgcgccagcacgcgcagagagccgccgtcggtaaaccggcaccgccgccagccatcccgccgcccccaccatccccctaggtccctaccaaccgcagtaccatctcagccgtcgattcataatgccaactgcccagatcgacccgtcccacttatcaccgtgctcctcacccacctaccgcgccacagcccgcctcaaatccccggctcggaaacaaccaccgatcacaccaccacattgccgtcaccgtcaccgccggcccgccgccaccgcttcccaagctatctcatggcggcctccgcgtcctccctgcttgcagacgccgcatcctcatcctgcggggccatctctccgcgtccccggttgcttcgtggagctccggccgccgccttcgtcccctcgccgtcgcgtcactcctgctgttccctccgcgcttcccccgcgaggcgccatcggagccgctttgtagccagcgccgttcccacgatgcagcctccggcggagtccagggtctccacggtagtcgatgtcgacctcggcgatcgtagctacccgatctacatcggcgcaggcctcctcgacgagccggacctgctgcagaggcatgttcatggtaagagggttctggtggtgaccaacacgaccgtcgcgccgctttacctggagaaggtggcatgggcactcacccacaacaatcccaatgtgtcagtggagagtgtgatcctgcctgacggcgaaaagtacaaagatatggacacgctgatgaaggtgtttgacaaggcagtcgagtcccggtttgaccgccggtgcacatttgtagcactgggtggtggtgtcatcggggacatgtctggttctgatgttgctcggatgactgctttaggtggattcatctgttggcggggaaaaactgggattaaccacccactagggaagaacttgattggagcattctaccagccacaatgtgttctaattgacacagatacactgaacacattgcctgacagggagctagcctcaggcattgccgaggtagtgaagtatgggctcataagggatgcaccattctttgagtggcaagagaaaaacatgcctgaattgttagcaag

SEQ ID NO: 15801 - DNA, 438 bp, Zea mays
  Peptide Sequence Number=SeqID_57580
atggagtaccggaactggaagaggaatgcggctgtgctttacgacctcgtcatctcccacccgctcgagtggccgtcgctcaccgtgaagtggctcactcgctcccatcgaagtcctcggctcgtcgtgggcactcacacctccgacgaggccaatggtcttggacgcgccgccgctgcctcgggcggcgccgtcctgttcccgtccatgtccgtctccagcgtggcgccacaccgtgcgaggtcaaccgcgcgcgctgcatgccgcaggccgcagcgtccctatacggtgccgaccaaaatgtgcgtcgacgaggtgcacgtgtaccatctcggcgatggctacgacaacggaaagagcgacgccgctgttgtgctcaggggacacgaggcggagggttatggcttgtcatggagcccgacgaaggaggggttatga

SEQ ID NO: 15802 - DNA, 840 bp, Zea mays
  Peptide Sequence Number=SeqID_57581
atggatgtgatgtgtggagaccatcaagaaacaagtagcaagcatgtatttgtggccgaagacactagaagtacctataatggatccctcaaagttgtgagagcccaaaatctgcggaagaaggatctgctgggtaaatctgacccatacgtgaaacttaagatgtcagatgataaacttccatccaagaagacaactgtaaagcgcagcaatctcaatccagagtggggtgaagacttcaagtttgttgtgacagatccagaaaaccaggctcttgaagttgggaaacatgaaaagatgggaatgaacatgatcccacttagagaactcctaccagaggggactaaagttactaccctcaacttgcttaagaccatggacccaaacgatgtacaaaatgagaagtctcgtggtgagcttactctagagctcacatacaagcctttcaaggaagaagatatagagaaagaagatacacagggtgctgatgtgatagagaaagctccagatggcactccagctggtggtggcttgctttatgttgttgttcatgaagcccaagatcttgaggggaagcaccatacaaacccatatgcaaaaataattttcaaaggcgaggagaagaaaactaaggtcatcaagaagaatagggatccaagatgggaggatgagtttgagttcgtgtgtgaggagcctcctgtgaatgataaactgcatgttgaagtcataaatccagatcgagttgcagtggagaacttcctagacaggaaggagccagaatgccttgatgttcctctattcagtttgcgtatatctgtgattgagattgaggtcatgtag

SEQ ID NO: 15803 - DNA, 1083 bp, Zea mays
  Peptide Sequence Number=SeqID_57582
atggtccacatatcagatattaaactgataagaacagatactacacttgatcttagccaaaaggccgagaaaggtccacctcccacgcgttcctgtgccacgcgcccacgcccacctcctcaattcgggccaccgcgccgcctccccgctgccgcgctgcggctctccaacctcatcggcctcgcgtccctcccggcgccgccgcgctcgcttgcgccgtcttcgcgcgcctcccggagcccaccgcccgcgacccattcccctggaacacgtaggtccgcctccacgctcccgcgtcgcgctgctctacttcgcgcggatgcgccattgcggcgtgtggccggacgcctacacgttcctcgctgtccccaaggcatgcggccgcgcccctggctgcagcgccggactcctggttcacgccgaggccgtgaggaggtctgggcgcggaccccttcagtcttcgctgtgaacgcgctcatcagcttctactgtaggatcctggactaccgcttggggagacaacgtgttctacgaggcaggcggggtctcatggaactgcatagtcgctgggtacgtcgggtgccgggagatggggctcgtgcaggagctgttcgacgaaatgccacagagagacgcgttctcttgggagtctcgatcgatgggtatggttggaagcaaggtggtgctggtgtggaccgtgcacgcgagttgtctgatcaaatgcccaagaggaatttcggcatgtcaagtgtggggaggccaatgaggctttggtttggagtattttcaaagtatgcggcggcggtggcggtcgctgcggtgggggttgtcactacttgtgctcagctgggtgctttggagcaaggaagatctggtgttgtggcgcagacagctttgatagacatgtacatgaaatgtgggcgcttggatcttgccatgttggcctttggaagcatggctgagaggagtgtggtcacttggaatgtgattattgttggacatgcaactcatggttatggtctggatgctgtcatgctgtttcatccaaaggaggcagaaagggttacagtggatgatcttagt

SEQ ID NO: 15804 - DNA, 222 bp, Zea mays
  Peptide Sequence Number=SeqID_57583
atggcgtgtctcatgccccagcaaacaacacctcctatgctctctaggcctggagcagaagctcgtcttctcagcacaaagccgacagtgatagatgttatcgatattgatctaggcacaataatttgtagtagatttcgtgcttttgtatatattgagaaaaaagatactaggggtgttcttggcccaggaaatccaagagtaataccaaaggttacatga

SEQ ID NO: 15805 - DNA, 373 bp, Zea mays
  Peptide Sequence Number=SeqID_57584
gtccacctcccacgcgttcctgtgccacgcgcccacgcccacctcctcaattcgggccaccgcgccgcctccccgctgccgcgctgcggctctccaacctcatcggcctcgcgtccctcccggcgccgccgcgctcgcttgcgccgtcttcgcgcgcctcccgggagcccaccgcccgcgacccatttcccctggaacacgtaggtccgcctccacgctccccgcgtcgcgcttgctctacttcgcgcggatgcgcccattgcggcgtgtggccgggacgcctacacgttccttcgctgtccccaaggctatgccggccgccgcccctggctgccagcgcccggactccctggtttcacgccgaggccgttga

SEQ ID NO: 15806 - DNA, 792 bp, Zea mays
  Peptide Sequence Number=SeqID_57585
atggtccacatatcagatattaaactgataagaacagatactacacttgatcttagccaaaaggccgagaaaggtccacctcccacgcgttcctgtgccacgcgcccacgcccacctcctcaattcgggccaccgcgccgcctccccgctgccgcgctgcggctctccaacctcatcggcctcgcgtccctcccggcgccgccgcgctcgcttgcgccgtcttcgcgcgcctcccggagcccaccgcccgcgacccattcccctggaacacgtaggtccgcctccacgctcccgcgtcgcgctgctctacttcgcgcggatgcgccattgcggcgtgtggccggacgcctacacgttcctcgctgtccccaaggcatgcggccgcgcccctggctgcagcgccggactcctggttcacgccgaggccgtgaggaggtctgggcgcggaccccttcagtcttcgctgtgaacgcgctcatcagcttctactgtaggatcctggactaccgcttggggagacaacgtgttctacgaggcaggcggggtctcatggaactgcatagtcgctgggtacgtcgggtgccgggagatggggctcgtgcaggagctgttcgacgaaatgccacagagagacgcgttctcttgggagtctcgatcgatgggtatggttggaagcaaggtggtgctggtgtggaccgtgcacgcgagttgtctgatcaaatgcccaagaggaatttcgtgtgctggaacttgatgatcgatggtgatgccggacaaggaaggatgcattaa

SEQ ID NO: 15807 - DNA, 609 bp, Zea mays
  Peptide Sequence Number=SeqID_57586
atggcgtgtctcatgccccagcaaacaacacctcctatgctctctaggcctggagcagaagctcgtcttctcagcacaaagccgacagtgatagatgttatcgatattgatctaggcacaataatctgtagtagatttcgtgcttttgtatatattgagaaaaaagatactaggggtgttcttggcccaggaaatccaagagtaataccaaagctctctatgtggcactgcagtgatgaactttggatccgtgttgatgaatcacattgctattcaagaaaagctgcaaaacactatatagttgagctccccaaaagttgtgttgatttggagctgctggaggagcacgtcgtcacagcgctttcagtggagagctactacaggatgccaagtctaagtactcgtgctgatggtcagctagtcaggactatacgcttacaacagacaggcaatttagaaagcagacacttttctgttttgaagccaaagaacccaaacaagacatattacagagtctcaaattatcaactgttattcccagtatcaggcatttttcattttgtaatcagaaaacaagaacacagctacaaaatgaaatgcagaaagtag

SEQ ID NO: 15808 - DNA, 1104 bp, Zea mays
  Peptide Sequence Number=SeqID_57587
atggttggaaataagaatgtaaagaataaagctgcacaaaaagatttgaagagctattttagccaaggttctagtggctcaagtccaagtgctcatggtagcgtagttgctattgtagaagaagtagaagatgtgcatttagaagaaaatgtaaggccaactgcagaagaaggcgtggggattgaaggagatgtcttgccatctgtagaagaggatgaagaagatgaacaagttcaagaaggtataactgacttcaacccggattacattatttctaatccaggacttcatattccaattaaaatattttctccaaatcttagagatgaagttaggagagcttttatagctaaaggtccaactcaactaggcggtcttagatttcctccatcaagtgataaaaggaactttcagaaaaagtggtttaatcaatatagtatgttggaatatagtgtggagaagaatgtgacattttgcttctattgctacctttttaagaatgatcgaatggatgaaaaatttggttatgatgtctttacaaaagttgggttctcaaatgaaaaaaatgcttatcttgcacttccaaagcatgttggtgggcctagtagcatacacaatgttgcatcaacatcatttcataatttttataaccaaagtcgcaagccactaggctttgcttcagccgcaacaagtggtgtcgtgccgtcacccctgcatcttgcgaggactagatacatccatgcgacggctaatgcacaatcggcaattatccagacccagtatggtttggtttatgactttgctctcattgtcgtgatgggcaatgatagcgccatgaatgtggatgacatttatgacattgacaacaatgagtccaacggagatgaaatgcatggtattgatggtgttgatggcaacatcactaactgcatggtgaaagaggaacatgttcctgctgaacctactcgtagtgaggtgaatgtcatcatccaacaagttggtcgtggaaagaagtctagacggagaccatcgtgtagtgaaacgtctactaacaaccaattcatccagtgtccctataagcaagtttatggcatctgcgtttaa

SEQ ID NO: 15809 - DNA, 1044 bp, Zea mays
  Peptide Sequence Number=SeqID_57588
atgaagaaggaagttgggttcagaaatgtaacagtggaagctgcttctgttgaacatctgcaggaggaagaagctcccacaagtaaagacggccaaaaggtccaagctgctagcactacagttggtgatcaagaaaatgcagccctgaagagcatagaggaagatcatgtgcaagaaaatgctggtgcaggaagcttgaatggatgtgacaaaagaaaaaatgaagatgggacagtgattgaaagtgaaactgcgaaagatgatgccagaacatatggagttaatttgtcagaatcagatgctgcagttggtattcagtctgcctacagagggtatgatgttcgaaaatggcaacctttggataagctctggaagatcaagcatgtgcatgaacagatgcaagttgtgaggaagcagattcaatgccttttagattcttgcagtaagccaacacaaaaagagcaagtggccataggtgaaactattatgaatttactcctgaagcttgacgcaatccagggcttgcatccaagtgtaagggaagctaggaagtctgttgctcgagaactgatttgcttgcaggagaagcttgatactttatgcaaagcatcatctggagacttgaatcacacagatagtaatgatgatgaatctgaggggaccaagaacattatccaaactgcagctcctactgtaataactgaagcttctgatagaaagagaactgttgaactgggtaaggtacaagaaccatgttcagtggactccatggagccatgcaacgcagttccatctggagtttcctgggaggtgaggccagatgtagacgctagcgaggagaagaatgaaaaacaagagtcatgtagcaccacagtggatgaagcacacgaagaagggtggcgaggcctcaccaagggtgttgcgacgtcgcgggttggggctgcacaggtcgaggtggagctcactgcggtatttcatcgagcacttggcgagcgtcgcggacacgggtttggcaccggtatgctgctgtaccgttcgggctag

SEQ ID NO: 15810 - DNA, 1389 bp, Zea mays
  Peptide Sequence Number=SeqID_57589
atgacgcagcagacacgacacgagcctcggcgcggccggcccgcgccgcgcgcgtgctcgctcttccggggaacgagcccgtgcgagtgcgatacgtatcgggctcgggctgcctcccgcctcctgcatggggctggttgttcggcggaaaccgcgaaggggctgggcacttgggcagccaccagtgaccagccgcagggcaatagcaaacaggcggagcgggcggcgaaagcgaaaccgtgggtctcgcggcgaaagcccgtggtccgggcgccctgctggacgcaggtcacgcagcacgtggggcaccgggagcccaggaggcagtgggcagggcgcccgttgcctcgagaacgaaagggcaaggtccctgtcagcggcacccggctcgggcgcacggctagtactagtagcgacgcccccacggcagcgccaagggccagccagagccagcccagacacatgcggcgggcagctcaacaccaccgcaccgcccccgccccgcctctcctcgccgccgacatggccgcgtacatccgcctcgacgacgccgtccgcgcgcgcctccgcgggggcgcccacgccgcggggtgcaccaccagcagcagcagcggcagcgaccacgacgcgtccgcctgcctctccgagctcgtccaggcgttcctggagacgggcgccggcggcacggccgaggaagggtcccgcgcggcgcccaaggagtacggctccgacgacgaggacggggcggcggcctccgccgcggcgaccgtgcggtccctgctcgacccgccggcggaggaggacgcgttccgcatcaggctggccgcggcggtggcggccgcggtggaggcggaggcggcgctgcggacgcacggggtggcgttcaggcgcgcgctgacgcggcggctgcgcggcgccgggtacgacgccggcgtgtgcaggtcgcggtgggaggcatcgggcggcgccgcggccgggacgtacgagtacgtcgacgtggtcgcggtcgcgccggcggcggccaggtacattgtggacgcggacttccgggcggcgctggaggtggcccgcgccacgcccgagtacgcggccgtcgtggccgcggtgccggcgcccgcggtggtcgcgcgcgaggaggccgtcggccgcgccgtgcgcgtcgcgtccgacgccgcgcgccgctcgctccgcgcccacggcctccacgtcccgccctggcgcaagacgcgctacatgctcgccaagtggctcgggccctacaagcgctccacctcgtccgctgctggtggggtaatgtcgatgcccggcggcgcagggctggacgtcaagtgccgcgccgtcgggttcttcgcgcctccggccgccgcgccggcggccaggatcaagtag

SEQ ID NO: 15811 - DNA, 1200 bp, Zea mays
  Peptide Sequence Number=SeqID_57590
atggtgtttgttggctcctttcatttcaaggtcctcataaaaatcaagggcatccccttcctgggcacatcatgcaagagggatgagaaagtcgtcgtcattccaaagcccattgtgtcgttcgtcgtcgacgtcgagggtccagctaccaccattcaactgaggacgaaggggagtccgaagcaccgtaaagacctatgtctatcgtcggtcttgtgtgctgtgcctcttttgattttccaagcagaggcatgggtcattgctctactgtcaaagcatagtcaagcctgtataattacgggtgcaactaggcaagcagctgagctgagcaagggccggggtgatacagagccggagccgtggtgccggtcactccggccgccgcacagcaggtggcgccgcgacaaaaccctcagtttgttggtcacaaacaacccctcgccacgccacgtcatcgcccatcaggagccgaccccacgcaggacgcagccccgtctacgcggcaccacgccctcgcaagcacgcccgacgtgtcctccgctccgatgccgtcgtccctatccctcccgcgcgccgccgcctcgggacgcgcagttcatgcacccactgcgcgccgcgccgcgtttggccgcaccacacagagccttccaaaactggcgacgcctttccgttccaagcaggcgagctgccgcctcccgctatgagcgggaggacacgcggcgcggactgcgatgggctcgtgcgctcggcgcttgcgtgctgctcgccgtcctgctcggtgccctggcgccggcgccggcgccggcggcggccgcgcgcgcccacgacgaccagggcagcggggccggcatacggcagccgagcggcgagtaccgcgggaggaaggtgggggccaggaccgaggtgcgggacgtggagggcgacggcgaggtgcaggagctcggccggttctccgtcgccgagtacaaccggcagctccgagaaggtggcggcggcggcggcaggctcgagttcggcagggtggtggcggcgcagcggcaggtggtgtcggggctcaagtactacctccgcgtcgtggccgtggaggagggcggcggcgcggggaacggcggcgagcgcgtgttcgacgccgtcgtcgtcgtcaagccctggctcgactcgcgtaccctgctcacgttcgcgcccgcggccgccaagtaa

SEQ ID NO: 15812 - DNA, 1902 bp, Zea mays
  Peptide Sequence Number=SeqID_57591
atgcgggaagcctcggtccaccctgggcgcacgcgcaacacagtgcctgcggccccgggtcgcctcggcaacgagcaccatcactgcaaccgtcgagcccacctcgacgagaaggtgcgccgaggctaccaccccaggcgtgggggacgctacgacagcggggaggatcggagtccctcgcccgaaccacccggtccgcaggctttcagccgggccatacgacgggcgctgttcccgacccggttccgaaccccgactactatcacaaagtactcgggggagacgaggccagaactgtggctcgcggactaccggctggcctgccacctgggtggaacggacgatgacaacctcatcatccgcaacctccccctgttcctctccgacaccgctcgagcctggctggagcacctgcctccggggcaaatctccaactgggacgacctggtccaagccttcgccggcaacttccagggcacgtacgtgcgccctgggaactcctgggatctccgaagctgccgccagcagccgggaaagtctctccgggactacatctggcgattctcgaagcagcgcaccgagctgcccaacgtcaccgactcggatgtcatcgacgcgttcctcgcgggcaccacctgccgtgacctggtgagcaagctgggtcgcaagacccccaccagggcgagcgagctgatggacatcgccaccaagttcgcctctggccaggaggcggttgaggccatcttccggaaggacaagcagccccagggccgcccaccggaagatgtccccgaggcgtcaactcagcacggcaccaagaagaaaggcaagaagaagtcgcaagcgaaacgtgacgctgtcgacgcggaccttgtcgtcgccgccgagtacaagaaccctcggaaacctcccggaggtgccaatctctttgacaagatgctcaaggagtcgtgcccctatcatcaggggcccgtcaagcacacccttgaggagtgcgccatgcttcggcgccactttcacaaggtcggaccacctacagaaggtggcagggcccacaacgacgataagaaggaagatcacaagtcaggagagttccccgaggtccacgactgcttcatgatctacggtgggcaagtggcaaacgcctcggctcggcaccgcaagcaagagcgtcgggaggtctgctcggtaaaggtggcggcgctagtctacctagactggtccgacaagcccatcaccttcgaccagggcgaccatcccgatcgcgtgccgagcccagggaaatacccgctcgttgtcgaccccgtcatcggcaacgtcaggctcaccaaggtcctcatggacggaggcagcagcctcaacatcatctacgccgaaaccctcgggcttctgcggatcgatctgtcctcggtccgggcaggcgctacgccttttcacgggatcatccccgggaaacgcgtccagcccctcggacaacttgatctacccgtctgctttgggacaccctccaacttccgaagggagaccctcacgttcgagatggtcaggtttcgaggaacctaccacgcagtgctagggaagccatgctacgccaagttcatggttgtccccaactacacctacctcaagctcaagatgccgggcctcaacggggtcatcaccgtcggccccacgtaccgacacgcgtacgagtgcgacgtggagtgcgtggagtacgccgaggccctcgccgaattcgaggccctcatcgccgacctggagagcctctccaaggaggcgccagacgtgaagcgccacgccggcaacttcgagccagcagagacagttaagtccgtccctctcgaccccaggagcgacgcctccaagcagatccggatcggctccgagctcgatcccaaatag

SEQ ID NO: 15813 - DNA, 1206 bp, Zea mays
  Peptide Sequence Number=SeqID_57592
atggacaagttgctaaacacaggcgaagtaaatcttctttccgaggccacaccgtctaccggcgcgccgccgcctgtccacgcgtcgatctcgcccgaggtggccgcggcgtgcgggtccgcgacgcccgcgtgcttcgcggccggccaccacgtcgtccccggcgtcggggaccaccgcaagtgccggcctcggggaatcctggcgatcacgggggaggggttgactagccaagacctcgacgaggagttgtctcgcgcgtccatccactggctgtcctcaccgtcgggggcggtggcctggacgtcctcgacgaaatgtggcaacgaggaggcgtcggtgaactggctggtgtcctcgcacgacgaaggcggggtggacctgctcgaagatgagatcttcgtgcccagatgctcctcggaggacgcgttctggcgcttctctccggactgcactaggctgttaggcttgccgctgctcagcggtctgctggattccggcactccgtcgtcggaaatgtctggggcaacgccgtcgtcagggtttctcccagtgcagaagactccaagcagtggcaacagcatcagtcccttctctcttattgtcaagcgagcatcagagtcttctgccagatttcggactttgtgtgcccagcagggactgggtagcatctactggtacgattcggtggcggatccgacaccaatctctggtgagtcatggcctgaaagtgttagcaattatacacggtcagggttgacaaggacaggcagtcgtcccctgaagatgatggatccagtgatggaatgtcttgagatgatgagtttgtctccaaggcctggggacgatgactatgatggaactggcacactgcctgcaccattgcctcagcatagcttccagtttccaggggatccaacgcctctggaatccatagacttgacctcttttaagaggtctcctcgtgacatagaattgaaggcaaaggacacaagtttccggaaatcagtcatggcagacactcgtatctcttggcaggaggggcttgtcagcagaatgtttgatatgggtgacttggattgctgcaaatggctatctgacgatgaagattcaccagtgtttttgcacactgacaaggctttggctgttggtaccaattttgagccatgtaatggttgttgcctacatgagggtggcgaccaatag

SEQ ID NO: 15814 - DNA, 348 bp, Zea mays
  Peptide Sequence Number=SeqID_57593
atggcacccgtggccaggctcccaatcgcacggcgcgacacacacaacgaacggcgaagcggacaatcatggacagtggtgctgatagcaaaaaatcatgtagtatatgcaactaagctggggttaggattagaaataagtaatagcgagattggagtgcggaagagagttcctcttgctatgagttgctcaattaatgcggataactttgggagtaaaatcaaaaagattttctatgaacacaataataacaagaagatgagctacccagcaatggctcaacttctgtcaaacacactctactacaagagaattcgattggggaacattgaaattggtagtagatga

SEQ ID NO: 15815 - DNA, 2898 bp, Zea mays
  Peptide Sequence Number=SeqID_57594
atgcccggcataccgagggatgtcgccgagcactcgctggatattcgggccggagcccgacccgtcaggcagcctctgcgccgattcgacgaggagaagcgcagagtgataggcgaggagatccacaagctaatggcggcagggttcatcaaagaggtattccatcccgaatggcttgccaaccctgtgcttgtgaggaagaaaggggggaaatggcggatgtgtgtagactatactggtctcaacaaagcatgtccgaaggttccctaccctctgcctcgcatcgatcaaatcgtggattccaccgctgggtgcgaaaccctgtccttcctcgatgcctactccgggtatcaccagatccggatgaaagagtccgaccagctcgcgacttctttcatcacaccgttcggcatgtactgttatgtcaccatgccgttcggtttgaggaatgcgggcgcgacgtaccaacggtgcatgaaccatgtgttctgcgaacacatcggtcgcacagtcgaggcctacgtcgatgacatcgtagtcaagacaaggaaggcttccgacctcctctccgaccttgaggtgacattccggtgtctcaaggcgaaaggagtcaagctcaatcctgagaagtgtgtcttcggggtgccccggggcatgctcctggggttcatcgtctccgagcgaggcatcgaagccaacccggagaagatcgcagccatcaccagcatgggacccatcaaggacttaaaaggcgtacagagggtcatgggatgcctcgcggccctgagccgcttcatctcacgcctcggcgaaagaagtctgcctctttaccgcctcttaaggaagaccgagtgtttcgcttggacccctgaggccgaggaagccctcgagaacctgaaggcgctccttacaaaggcgcctgtcctggtgcccccagctgatggagaagccctcttggtctacgtcgccgccaccactcaggtggtcagcgccgcgattgtggtcgagaggcaagagaaagggcatgtgctgcccgttcagcggccagtctacttcgtcagcgaagtactgtccgagatcaagatccgctacccacaagttcagaagctgttgtatgtagtgatcctgacgaggcggaagttacgacactacttcgagtctcatccggtaactgtggtgtcatccttccccctgggggagatcatccagtgccgagaggcctcgggcaggatcgcaaagtgggcagtggaaatcatgggcgaaacaatctcgttcgcccctcggaaggccatcaagtcccaggtgttggcggacttcgtggccgaatgggtcgacacccagccgccaacggctccgatccaaccggagctatggaccatgtttttcgacgggtcgctaatgaagacgggagccggcgcgggcctgctcttcatctcgcccctcggaaagcacctgcgctacgtgctacgactccattttccggtgtccaacaatgtggccgagtacgaagctctggtcaacgggttgcggatcgccatcgagctaggggtcagacgcctcgacgcccgcggtgattcgcagctcgtcatcgaccaagtcatgaagaactcccactgccgcgacccgaagatggaggcctactgcgatgaggttcgacgcctggaagacaagttcttcgggctcgagctcaaccacatcgctcggcgctacaacgagattgcagacgagctggctaaaatagcctcggggcgaacgacggtccccccggacgtcttctcccgggatctgcatcaaccctccgtcaagatcgacgacgcgcccgagcccgaggcaccctcggctcagcccgaggcgccctcggctcggcccgaggcaccctcggctcaacccgaggaaccctcggcccccaaggccgaggtactggacgtcgaggaggagcagaggggggccacgcctgatcgaaattggcaggccccgtacctgcgatatctccgccagggagagctacccctcgaccaagccgaggctcggcgggtagcgcgacgcgccaagtcattcgtcttgctgggcgacgaggaggagctctaccaccggagcccctcgggcatcctccagcgatgcatctccatcgccgaaggtcaggaactcctgcaagaaatacactcgggggcttgcggccatcatgcagcgcctcgagcccttgtcgggaatgccttccggcaaggtttctactggccaacggcggtggctgacgccactagaattgtccgcacctgcgaagggtgccaattctatgcgaagcagacccacctgcccgctcaggctctgcagacgatacccatcacctggcccttcgctgtatggggtctggacctcgtcggtcccttgcagaaggcgcccgggggctacacgcacctgctggtcgccatcgacaaattctccaagtggatcgaggtccgacccctgaacaacatcaggtccgagcaggcggtggcgttcttcaccaacatcatccatcgcttcagggtcccaaactccatcatcaccgacaacggtacccagttcaccggcaaaaaattcttggatttttgcgaggatcaccacatccgggtggactgggccgccgtggctcatcccatgtcgaatgggcaagtagagcgtgccaacggcatgattctacaagggctcaagcctcggatctacaacggccttaacaagttcgacaagcgatggatgaaggaactcccctcggtggtctggagcctgaggacgacgccgagtcgtgccacgggtttcacgccgttttttctggtctacggggccgaagctatcttgcccactgacctggaatacggctccccgaggacgagggcctaccgatcaaagcaaccaagctag

SEQ ID NO: 15816 - DNA, 312 bp, Zea mays
  Peptide Sequence Number=SeqID_57595
atgaacgtatgtgagctcactcttgctgtctcacaccccccacaggtcaagaacagcacacctggtgattatgttcgcgcccgggtcttggtgccccgaaacccgggtgtgacagtgagcaacctctccactgcatcacattgttaccctctgcgtattactgccttcggatgggggttcgaacacgggagccaggtttgggggagcgccagccatggctccgccgtgctagctctgtgccgccgtgctggtgcggccaatggggaagatgatgtgtgcatcgtccatctcttgttgaacggtggagattag

SEQ ID NO: 15817 - DNA, 330 bp, Zea mays
  Peptide Sequence Number=SeqID_57596
atggcatggcatctggagctgggtcgggccgggccggccgcgggtgaaggtgacgccgtttgggctgtggaaaggtgggggtcgcccctcgtggatcgtgtcagtgctggccgcacgtgcctgcgcgtccgaaaagctggcgcgggcatcgagcgtgagccggtgagagaagggatggaaaagcagtctgacctgctgggtgctcacaccaacagcattagtaagctgagacaggcagacacgggggacggggagcgggaaacaggcaaacagtgggcatgggaggaaggtggtggatgcaaaggtgaaacagaagcgaacaacagttga

SEQ ID NO: 15818 - DNA, 426 bp, Zea mays
  Peptide Sequence Number=SeqID_57597
atggacaacaatcgtcgccatccagatctcgttgctaggcccaagcttgcaatcgcccaccagcctgtcgatgttggaagtgggagcacatggctcagcccccatgccgtcgatgtgggagctgggagtgcatggcgcaggcccaaggttcatttacgcgattctgagattggaatcgcccctaatgacgacgatgtgcaggcgtgtgtagattctgatgcagagactgaggatgagagtgttgttgagggtaatgatgtatcccctgtggcgcggtcggtccgagcccaaggtcgggcgaggcggagacttctcctgaggctgaggccggggtcgggcgaggacgcgattcctcccgaggccgaggctgaggccgagccctggggtcgggcgaggcggagacctccttccaaggctgaggcctaa

SEQ ID NO: 15819 - DNA, 1101 bp, Zea mays
  Peptide Sequence Number=SeqID_57598
atggcgaccgggcagggctgcagcccccccccctctgaatccgcccttggacatagggcgaattcagatccaaaatcttactgcagatttgtcgaccaggatacagggcaaattggatatgctcttgttcccatgattgctaggggagttatgcttggtgcagaccagcctgttattctgcacatgcttgatattccgccagcagctgaagcccttaatggtgttaagatggagttggttgatgctgcatttcctcttctgaagggtaagctgaaaactataggagtcgttgcgacaactgatgttgtggaagcgtgcactggcgtgaatgtggccgtcatggttggtggattccccaggaaggagggaatggaaaggaaagatgttatgtctaaaaatgtttcaatctacaaaacccaagcatctgctcttgaagcccatgcggcccccaactgcaaggtcactcaattcagtcatgttctggtggttgccaacccagcgaacaccaatgctcttatcttgaaagaatttgctccatcaattcctgataggaacgttacttgcctgacccggctggaccacaacagggctcttggccagatttctgagagacttagtgtccaagtcagtgatgtgaagaatgttatcatctggggtaaccactcgtccactcagtaccctgatgttaaccatgccacagtgaagacttccactggggagaagcctgttcgtgagcttgttgctgatgatgagtggctcaatggcgaattcatcacaactgtccaacagcgtggtgctgcaatcatcaaagcgagaaagttctccagcgctctctcagctgctagctctgcttgtgaccatattcgtgattgggttcttggaacccctgaggggacatttgtttccatgggtgtgtattccgatggttcatatggtgttccttccggacttatttactcattcccagtaacatgcagtggtggtgaatggaaaatcgttcaagctaatataaaggtcctaaaaaaatctcgagctgatccggacaatcaagattatagtccacagtttgagacactcaggctccagctaatgaaaagctga

SEQ ID NO: 15820 - DNA, 228 bp, Zea mays
  Peptide Sequence Number=SeqID_57599
atggcccccaaatcactagacgcagacggagacaacgagagggtgagacaacaggcgggcgagttggtgactgatgtggcggggcccacgggggagggggcgatgggatttttagcatacagaggaggtgggcttaactgtgcctgggagctaatcaggtcgtgcccgtgtcggcccatcgtgctcgggacgcagcccaggcccggcaacgaccgtgtcgtgctctag

SEQ ID NO: 15821 - DNA, 477 bp, Zea mays
  Peptide Sequence Number=SeqID_57600
atgcccacgcccgagcaggcaggcggggatctcgccctcgccgtgcccgtgatgcacggctccttgcccccaccgtgtcacgcccgcagggttgcggatcttgccaacacgccagtggatctctcccttctccgccgtgccctgggcccctacagcctcatctacgtcgtcccctacaccgcgctccccatcgtcgtcgtcctctccgtcgactgctctatccccatcctcatgcgtcgcaaggaggccaaggcccacagcagctccaagtccatcgaggtctccttcctcatcatcgaggacctcgtcactagtgggtcctccatgctagagaccgccgccctactccatgtcgaggggctcgtggtcgccgacgccatcgttgtcgtcaaccctgagcagggcaacaggaagaacctcacagctaatgggatcacgctgcactcgctcatgaccctaatagagttcctaaagtga

SEQ ID NO: 15822 - DNA, 306 bp, Zea mays
  Peptide Sequence Number=SeqID_57601
atggctcaccggatagatcggcctacgcgcagtggcgggcggccaaagtccggcgatggtgatcttgctgttccggtgaggcaaggcttcaatccttgcttggagaagcttcacggctcctcggggaaattttccaagggctcgattgaggctgagggtctctggaaatggctggccgcggtggccggcgctcgggtggctcgggcaggtgtgggcgacaactctttggttgtcaaccgatttatttctggccatcctatctttactggccttggtttcagggcaattcctagtgggatgtgctga

SEQ ID NO: 15823 - DNA, 594 bp, Zea mays
  Peptide Sequence Number=SeqID_57602
atggctggcggaccagcgtctcgatgccaagacttcgtgcctcgaccggggggaaaagggcaggagttgtccgtggacgattacctggtgggtggtgtaaccatgttcggtgcccaaaccgggttgccgcctgctggggtggaggatggacaactggtggtggcgccgtcgaaggtgcctgccggtttgggggttccagcgaagggtgataccgagacttcgctggacccatggttgaaattttgtgtcgctgctgatggcggaagcgaagtcaacttagatgctgccgccgacggtgcagcgacatctatcgcgcagcagctacgatatgtcgaagacgacatgctaaagcgctctactggagcgctttatgacaggatgtggggtcctcacggtcgcggtgtcattcgggagagggcgaaccgagcacttgcacaagcgatgatggatgaagaagtggaggacctcgctggcctagaaagctcggtggcccaaaaggacgccaaggtggagatgggagcggaagagcagtcgtcgctcaaggatggcagcgctgagggtccttcggcagcggggacttctgcacagttttaa

SEQ ID NO: 15824 - DNA, 402 bp, Zea mays
  Peptide Sequence Number=SeqID_57603
atgcagtacaaggggtcaagcagtctcattagcttcgagaagcagacgattcgaatcgagtttttaactttgcaagttcccgcggtggaggaaagggcggaggggcttaccggcggcgaggttgctccggtgggggagctcgtcggcggcgagggctccggcctatctagggcgggcctcgattcttgtttggagaagcttcacggctcctcggggaagctatccagaggcgcgggtgaggctaggggtctctggaaatggctggccacggaggccagcgctcgggtagctcgggcgggcggcgcagagctcgccggagctaaggacggggtctgcacaactttgtcaatgggggcagatggatttgagctagggatcaaggtgaacgtgctcaagttctag

SEQ ID NO: 15825 - DNA, 1083 bp, Zea mays
  Peptide Sequence Number=SeqID_57604
atgattggagagggcgccgagaactgttcgcttggtgacccgtcgcttagggatagtggcaaacaatctcggtatgtggtcctagcccaacaagaaagatcaattttcttatcttctttgcttcctcttctgtccgaatatgatgatctccagccttcagttcttgatgctcagtcaattgttagtaatttaaaggaacgacttattgttactgaggacagattaagggagtctcgataccagattactccatggcatactgaattgtcgaataataccagcaatcctgtgtctactaatcctcctgctggaaaagcattggtgactacaagcaaaagcagccttgatattgtctcccagatggtgtatcctcacgtacaatccccaatgtcttcccctgttcaagctagaggtgattggggtgcatttggtaacaaaaaccatcaagatatttcaaatgaggttcctataagaaatgctggacatgatgacaagggagggacctctctttcaagcagaagccaatataggactgatgttcctcctcaagtatctcaaggtgattccagtgctgtccattttgactttgagactcagagtcaaaacccaccattcaagggtcttagcagaaatgatgtactggatggttcagatagtgctgaagcccaaaacacacaagaaccttctactcgatggggtctaggggactcatctaatttggcatctggccttgaggatgcaaacccttcatatccttatcttcctacagttcttgaggaacctggttcttctttctccgaagctgcagaggatgatccattgccaggcatagaagggcttcgaatcacaggtgaaccttttcctggacaagaacttcaagcaggtggatactccatcaatggtaccacaacttgtaattttgagtgggtgcgccatttagaagacggctcagtaaatttcatagaaggagcaaagcagcctagctatgttgttactgccgatgatgtggacactttactcgccattgaagtccagcccctagatgataggaaaaggaaggtacttatcttgtcatatgattga

SEQ ID NO: 15826 - DNA, 594 bp, Zea mays
  Peptide Sequence Number=SeqID_57605
atggagatgagagcgaagaagagcagcagaagcagcacgagcaacaccagcggcagcacgacgaccacggcggtggagaggaaggagatcgagaggaggaggaggcagcagatgaagagcctctgcgccaagctcgcctccctcatcccgaaagaacactactcctccaaggatgctatgacccagctgggtagcctagacgaggcagccacgtacataaagagactcaaggagagggtggaggagctgcggcacaagagcgcctctgcacggctcttggccgctggcagtggcacgagacgaggcggaggaggaggaggcgcctccacatcgtcggcagcgacgaccacggcgagcggtggcgcaggatcatctgaagaagccggccggcgggaggacgacatgccgccggcggtggtagaggttcggcagcacaatgacgggtcaagcctggacgtggtgctcatcagcagcgcggcgcgacccttcaagctgcacgaggtggtcaccgtgctggaggaagaaggcgccgagaccgtcaacgccaacctctccgtcgccggcaccaaaatcttctacaccatccactgcaag

SEQ ID NO: 15827 - DNA, 243 bp, Zea mays
  Peptide Sequence Number=SeqID_57606
atggaccgcctcgccgacggccttgccgcggcatccctttccgacccagcggaccagagcgccgccaccgctggtttgcctagcgccgattacctcctcagcgtcatgcgcgccgtagagggcgccgacgccaccatccgcacccagttggaagagaatagccgtctcaaggaagaattgatgaggaaaacacaacagctacagaggatgtttggcaatcaaggagctaaaaacctctcttga

SEQ ID NO: 15828 - DNA, 216 bp, Zea mays
  Peptide Sequence Number=SeqID_57607
atggccgccgccgcggtctgtgggcagaatgccgccgctacctgggattggccgaccgtgagagagtttgggctcacctccgccgtagatcgggtagtgtacgcggtggatttggctcagacaaatttaatccgagccatctatggccgatccaacggccgtgatccttgcataccccttcgcgtggcaacttctcaaaagagtccctcgggttaa

SEQ ID NO: 15829 - DNA, 375 bp, Zea mays
  Peptide Sequence Number=SeqID_57608
atgcgcagtggaagcacggggctatgggtggcggtggccgagttttataccccgatgccagggatcctgcaatcgcgcgactccgttcgatccgccccggacgcggcgttggttgacgcaaatcccgcggatatggtgctggcaccgttgagcaaccgagtccgagtccgttgcgagatccgcgcggtagaagaacccctggatgacgggacccaccatcagcggcttggtgcaacggctccaccaaagcaagcggagatcacgcgacgacagattgcgattttttgggctgcggggatctcagctggagaagagacatccgacgaactggaccaaccatcagctacccggcgcatcgggcccgcgtggcagtga

SEQ ID NO: 15830 - DNA, 501 bp, Zea mays
  Peptide Sequence Number=SeqID_57609
atgtcgctccggccgagcgagcgggagcagatgcggaagggcaactacaagcagacggtggacgcggaggagagccgccgccgccgcgagggccagatgatggacatgcgcaaggccaagcgcgaggaaagtctccagaagaagcgctgcgatgggtttcccgcctccgccgccggtgtgccgccgatgggccactccaccgcgctccagcagaaggtgcggtgccccctcccttgttcttcctggccccgatctgatccgctctctgtgttaggtcccccaatcgaagaggtgatcagcacaggagtggtgtcgcgattcattgagtttcttacacgtgaggaccatccccaactccagtttgaggctgcatgggcactcaccaacattgcatcaggcacatcagagaacactaaggtggtcgttgagagtggtgctgtgcgcctgtgcccatctttgtcaagctactcaactccctcaagcgaggatgttcgtgaatag

SEQ ID NO: 15831 - DNA, 321 bp, Zea mays
  Peptide Sequence Number=SeqID_57610
atgatcaagaggcaacttatgttcatgaggtccaatgtccttagcaccatatgcaccccaaataggttccccttacatctgagcaatgatagccctaggctcaagggttcgaggtccttggaacaacaagtacctcaaagggattcccccttggaccctaaaagcaatgtccaaggtcaagagggggctttcattgtagctatggtcctggatacaacaatagtcatagggataggtctaaaagcgttccttgggtttatgggtaagttccaccatgcggccattgatgggttcccccacccggcaacagtgataccctag

SEQ ID NO: 15832 - DNA, 327 bp, Zea mays
  Peptide Sequence Number=SeqID_57611
atggaagagagaggagaggaagagggttgcgcaggggaggacgaggtcgggccagccgggcacgggcgcggccgcacaggcgcgcggggcgcggccgtcgccgccggggaggagcgtgcgcgggcgcggagcgcgggagcacggtcgtcgctgccggccaccgccgccgcctctagggagggggaaaggggtgccgccgggagggcaaacggagggggaggggcgccgccgccggggatgacttcaggagtgatgatgatgtacacctatgtcaccctccagtgttcccacttgccggtgaggtcaaacgtgatatttggcatctag

SEQ ID NO: 15833 - DNA, 303 bp, Zea mays
  Peptide Sequence Number=SeqID_57612
atgcctatcactgatagtgatgaagggctcctattagagcaggagcatgctaggggaatcctgcatgccaatggccacatatgctctccaaagaaaggacatggaggaggccattggaagatgaaggagcagacactggctattagcgctactacaaccagggcacaaaaggaggccaagtccatgtgggagatggcacttcaccataggaaggaggcgacgatgctgctcattgtcacctcaaagaaggatgagacctccacatgggtagaggaagatctagcaacctatattaaggcctag

SEQ ID NO: 15834 - DNA, 420 bp, Zea mays
  Peptide Sequence Number=SeqID_57613
atggggatcacggtcgaggaggacgggggcgggggcgggggcgccagggcagtggcacgacctcgccatgtggacgtatcccctccacgcttaatagtagggattttgtctgtccttataccactggtcaagagccacaatttgtcgccaacggttcaaaaatattttggttttccatgcgaaagcaaagccacaaaggagtatgccctgatccgtggcgtccggggcgacatccaattcatcaccgacgagctagccagcatgcaggccttcctcagcagcctgagcaagtgcgaggagggccacaacaaccagacggaggactggatgaagcagatctgggacgtcgcctacgacatcgaagactgcatcgacgacttcgcccacagcctccgtccagaccccaggggcagcggctag

SEQ ID NO: 15835 - DNA, 891 bp, Zea mays
  Peptide Sequence Number=SeqID_57614
atgccgctgcagattgagtctaggagggagctcctgcagcgatcagggaggtcccctgacggcatctccagtgttattctcgtcgagaaagacaggtcttttatcaagtctaaagtagtgataaggataatggaatacctcaacctttttgagatccatggcattatccggaagacaaggacagttatggaatgtttgcaccggttctgtagagactgcatcgacaaatctatgcgactaggaaataacgaatgcccagcgtgtcgcacccattgtgcaagcagacgttctttgagggatgatcccaattatgatgcactgattgcagccctgtatccagatattgataagtatgaggaagaggaatttgctttcagtgagcaggagaggattcagaataaaaagatacaagaaaccattgaggaaacattcagaagacagtctgacgcaattggtaagaaacgttccatggcaaaagcaactgcaactgcctttgcaaggaagtacaggagaacacggggaagagttagaaccatcccccctgatattacccctactggctcttctgaggaggaaagaggagaaggaaattccaaagagaccatcagagagcaatcttctactgatgatcattctccagatttaagacagaaaagatgtcggaagaggtctggaccacaaggatcgcctgctggaaccattggcagtatcgactacagctttgaggagaatgatgaattagttggtggaaaagaaattttagccacctctccgttgcagggagagatgcttgcttgggggggaaaatggtgcacggagccaaaatcgacatggcagtgttggttcaaatggcaggactggaaggagtgggcgcattgcaaaattggttga

SEQ ID NO: 15836 - DNA, 546 bp, Zea mays
  Peptide Sequence Number=SeqID_57615
atggggtgctgcaatgcaagcgacgccaacgccgacccagacaaaagagcagggcggcccccggtctgttcccaaaagtcgaaaaccccgtcctctcgagaagcaacgcggtggagagaggctaccaaggaccccaaggaccccatggcgaagattattgcggttatggaaaacggcaaactgggcttcgctcttataaaaatcatggtacattgtgaggaagatcatctcccttctaccacaacaaagatatgggagctcatcaccatccttcacaatcttgaggacttgagccaaatgactctgacgaatgtgattggaaagattgtgacatttgaggtatcatggaaaatgggtcaagaagaggagctaaattattcaaagacatatgcttttgcatgtgatgggcacaaaaggatgaaaggcaagaagaaggctctaagctcaagttcctccaatgaagaagaggaagaagatgatgaaaataatgatgaagaaaatgatcaagactcaacatcatcctctgaggacgaagaaacagtttga

SEQ ID NO: 15837 - DNA, 1164 bp, Zea mays
  Peptide Sequence Number=SeqID_57616
atggggctgaggatagggaaggcatgcatgatagggacttcaaagacccagaaggaccccatggtgtgggattgggaacatctagtaccgtctgtctcaaatgcagttacaaggcacggatctgctaattcatctggtggtactcttacttctaactcagagctagggcatggttcatccaagagctctatttcagcgtccattgattcaccctctggagtagggaacagcttagagttcaacttcgccgctgttgagaggcatgttaagaacacgggcacgaacggcagagtcgatgactcggggaattctccatcgtcaatgatagctttcaaccaaggagagccattaatcagcctgaaacttgggaagagggcttacttcgaaaacgcctgcggaggacaggatgccaaggtttctgcagcttcagacgttacttctgcagccagcgtggtcaagaagactaaggtgtctcagcagaatgcaaagaactggtactgtcaggttgaagggtgcaaagttgacctgtcttctgctaaagattacaatcgcaagcacaagagcgtcggttttgtcaacagtgtagccgatacaaggcagcggacaaatcttttctttagtcaaccactttatggccaagtgaggagcaatgcagggtcttcatgggataacttgggaggcttaaaattcatggagacgaaacatccgccagtgcatccaacaaaaacagcatcccctgatgaactgcatttctcagccctccagataactagtgctgcggctcacaccggacatcatcatgatctcgatgggttcatggcgttcaagggaaccagcacaaaggtccttaaccaaggcgtggaggcttgggcggccgcttccagctcgaacaacggaggcccagaaggtgggcgtgctctctctcttctgtcagacggctcgtggggctcgagttcagccgtcatccagcagcccacatctcacgcggacgccggtgcattgctgccgcccctcgccaccgttgccgtctccaacgccgccgccgccgccgggcatcctctggacccgtccccgggaaggttctggccgcaagacgatcatcccccgctcgtcgacggacccgccacgcagattccggagctggcgcacctccggatatggtga

SEQ ID NO: 15838 - DNA, 159 bp, Zea mays
  Peptide Sequence Number=SeqID_57617
atggtgcaaccccctactcaagatgaggaccaagtgcctcaagatgatgccaataatcaaaggggagcacatgaagaagaagacaaggaggatgaagaagaagtacatgatggtcttggagaagctcagtctcattttgcttatgtgacacaattttga

SEQ ID NO: 15839 - DNA, 405 bp, Zea mays
  Peptide Sequence Number=SeqID_57618
atggccggaaagatcagtgaccgcgtggcggccggaataatcacccccccctaccacggcgatcttatcctgcttcaagaatatcgtcgtgaggagatgcctatcgatagctcagcccgaccccggcatagatcggtcatcggcggcgagcctccctccaccgagccacaagttgctttcaaagcaacaaatgacaaggaggcagtccctagcaaggtggcgcaagtcgaggttgccagcctcaacgatgaggagatcgcacttgccatcaagcaatttaaggtcacactgaaggggcacaaggactacaacaacaagaacaagtcaaaggggaaacgtgtctgcttcaagtgcggtaagtctggtcagtatatagcaaactgtcctgacaacgatgacaagtaa

SEQ ID NO: 15840 - DNA, 1407 bp, Zea mays
  Peptide Sequence Number=SeqID_57619
atggacggccaggctccgccgcttctcgacgccgtcgtgctcgagccccttgcagttggcgacgagctccatccgcggcgtcctgtcgaggtggaggacgctccggccgccgctccgccctccggtatggacggccaggttccacctctctacaacgtcacgcgggatcctctgaccgtatccgacgagctgcagcccacgggcgaggtggtggatgacgccctactcgtcgcgcccgatatcgtcaagggcgaggtgatggaggacgacatcctacccgtcgcaaccgacatcatcaacgacgccgcctcggagtgccccgaggctggcagtgatggcgtcgtgctcaccgacgagctccgcaatcgcatcgtcaagcaggtggagtactatttcagcgatgagaaccttcctacggacgagttcctgctgaattatgtgaagaagaacaataagggctttggatgtgaattttatgattattatagtggtgtcagggacaatgtatttggtgttcctgttcttagtttttttagccgagactcaaattttacacaagcttatgcttttattgtgtgtgtttctgcattagatattggtgcatttcctattgagatcatcgcatcatttaggagaatgaagaaactcgttcaagacctctcagtaattgaagctgcactcaggacatcatcaaagctggttgtaagttcaaatgggaaacgggtcaggaggttacatccattgccacacaaagaattgaaagattcaaagaaaagcactgttttggtcgaaaatctacctccagatttctcaatggagagtattcaggaaaaattcgcaacagtgggcaaagttgtgaacataacaattaatgatccagaatcagtgaaagaattttcaactgctaagaagcctgacttcaatttaagttttaaggttactgccctaagtgatgagagcaactggagaactgggatgaaagtcaggcttctgtctaaacaaagtgtaatgggaccaggaaagtataaaaaaccttctaaagaaaatcaagatgcagtttccaaaatgattgatcagaatcaacattcaaaagaagaccagcttaaaaccttggaaaagatctccggtgctgatgcagtggggattaccaaggacagagataatttgaaacctgtttttatcactgagactgagcaccaagatcagaagccaaatgctagaggacgaaaaggatggtacaaaggtcaaggtcagatgcagcaaaatgcaaacaaacaaggcagttgtggttccgagtcattaaacaagcctatttctggaccgaggatgccagatggaacaaggggcttcacactgggacgtggtagatctcttccactacagaagtctgagaaggctgaagagtag

SEQ ID NO: 15841 - DNA, 954 bp, Zea mays
  Peptide Sequence Number=SeqID_57620
atggtcagtgatctcctcctcctccttttcctctctctctctctctctttctctcactcccgcgcgtacctgttgggaaaaaaaagtacctactacagcttggctacagttttgataaactacacacacatggacagcagtcagcagcagcagaaacaagacgacgtcgacgtcgacgtaatggaggtcccggaggtccacggcgacctcctcatggagctcctggacgcgtccctcgccgccgagaacgctgcccaccaccaccaccaccaccaccaccaccaacagcttggtctagcgcccgacggcgacggcgacggcgactgttggatcgacgacaaccaagagaactacgacaatatgcacgcgcaccagggctgcgaggactgccgcggcctcctcgacggcatactgtccgacttcgacgactacgacgggggcccatcacggccgaggtccccgccggcgccgtaccgcgtcgtcttcggccacgacgacgacaccctgctggagctggagtgggcggaggaggccgccatggacccgttcgccaccagcgagtccgcggggggctggtacatggacggcctggtcatggccatggcgtgggacgagcagcaggacggcggcggcttcccgttcgagccctgctacggatacgaaggggaggcgggcgccgccgggcagctctatgatgccagcccgctgtgggagtttgctttactgcctgcaggatgcgttcggatggtttatgctctcgaatcaaaaacagaggtcgtggagaatgtactgcatatacggcggagaacagctaaaaaccgggcatacagagagcctgcaagaataacagtgaccctcttggccttggagcatgcggagaatagcttgaccccggtcactggaaactgcgccgtctgcccccaccgcgcgaatcattgtacgtcgtcgtcctga

SEQ ID NO: 15842 - DNA, 705 bp, Zea mays
  Peptide Sequence Number=SeqID_57621
atgaaggcgagcgacccggggtccgcgtggttcggcagcggcgcccgggcaccggcggcggcggcggggacgggccacaacgtgcggctcatcaccaccgcggtggccgcgttcgtgtccgtgctcggcctcgccctcttcctccacctctacgtctgccacgtccgccgccgcaaccggcgccgcgcggccgccatagccgccgcgctgccgaccacggccgcggcgccggcccccaagggcgggctggatcccgcggccatcgcggcgctgccgaccaccctctacaggaacgacgcggccgaggcgggcgccggctccgacgagtgcaccatctgcctcggcgccgtgcaggacggcgaggtcgtgcgcgcgcttccggcctgcggccacgtgttccacgtcccctgcgtcgacacttggctcgcgtcgagctcgtcgtgcccggtctgccgcgccgaggtggagccgccgccgccgacggcggtgggctcagctcggttcgtgcaggagaaagtgcaggacgctgtgaagcaggaagccggcagctccactccggaccgggggatcggtgcctgtgcgtcgctcatcaagatgttgagcagggagaggccggcgccgcgaaggccccagggcgcctacgccgacgccggggacttggacgacttggaacggcagcagtatgctgttgccgtgaataattaa

SEQ ID NO: 15843 - DNA, 132 bp, Zea mays
  Peptide Sequence Number=SeqID_57622
atggtgtcgcagaaaaagaaaaaacgggtacccgaattccgggtacccgtatccgacccgggattttcgggtactgaccgggtattagtgattccgtatcctacccgtatccgaggttcaatatccgggtaa

SEQ ID NO: 15844 - DNA, 1461 bp, Zea mays
  Peptide Sequence Number=SeqID_57623
atgcggcatctgaagcgcggccgtggcggctttgaccccggcgacgcggtggttctcgacgtcgtggggctaggggagttcgcgcggttgtccctccctgagcccccgcccgacgagcttgggctatccgccgcctacgacgacgcttcaggccgcattatggtttctatctgcggtgacgctgtctctgcctcccccgccgacctcgcggtcgccctcgggctgccgctgggcccggtcggcctcctcgcgggatgggatgcggctgtgttctccacggcggaggcgatcggagccgtgagaaggtttgtctgcgatcgcgtgctgctgggatggggagagagcggctttacggtgtcgatggaggtcgctgccgcgttaaggttggtagaggaaggcaaggcgtacgaggtcgactgggctggcttgatttgggcaacggtgaagagggaggtagtagctggcacgacacggcgatacgcaccgtacctcctccatctgatggtgcgccaaaggccggagcgtttcgttgagggtaatgggagcttggcgcttgagaaggggttgaaaggtcaggtattgcagcaatgccagttggaggacgaagaagaaacctctttggttttttggggcacccaaaactttggtgacttagaggaaatgccaatttttggcagccaaaacataagttttttccctcaaccgcaggaggtggggggcaattgcagttaccaaactatttcacgtttccaagccctcatgcaacggatccaaggttatgtgtctgacatggagagtaaatacctggataaggaaaagacttgcagggacactcaacatgaggtggagtgcattaagaatatggtgatggaaaaggatcaacaaattgaagctactgtcaatgctatacgacaggaacttttagaaaggagtgttgtaatgcgaacattggaagcagacaaggatcaattgagccgcagtgttcaacaatacgataagttactcaagaagtctttagctaaatttcaggagtatatgaatatggtaacacgtggggaaggtgttgactcgtatttggagaatcttggtttaactggtgggcagaatctcacttgggtgtgccaaatgcgttatcagtgccagatgactaggattcaggaaacatgcgattcaaattctttgaagcttctcgagaatattacagaaatggacaggagcattgcaagcctcaatcgtgaagtggaagggctaaagaattgtgtggaagacgatggtgagggcaaagcatccctagccatgacattgggtgcatcttggacaggtgaaggagatcatgttagcaacaccacacaaggaggaaaacagcttgttggtttggtaggaaagcctgataaaaggaacgacatcagggagagcatggatctcgatggagttcggtcaggggcgaagctccgcaaatga

SEQ ID NO: 15845 - DNA, 252 bp, Zea mays
  Peptide Sequence Number=SeqID_57624
atggagattcctcgtggcatggggaagctgtgcatggagtcagtatggagaaagttcatcctgggctgcgacgattgctcaccagagatggtgttccgccgaggagccgcacgttgccgcgagcctatgtctgtgcgcgaagaatctcgaatctttggaacccttcagggaggggcttggggcaccgacttcgtgatctccggcgaggccacctccgcatatggggtctgcgccgccatagaatggtcgtag

SEQ ID NO: 15846 - DNA, 3300 bp, Zea mays
  Peptide Sequence Number=SeqID_57625
atgggggacgctgcggcggcggggaccctgcacaagagctacttcgacgtgctggggatctgctgcccctccgaggtgcccctcgtcgagaagctgctgcggccgctgcccggcgtgcgcaccgtcaccgtcatcgtcccgtcccgcaccgtcatcgtgctccacgacgccgccgccacctcgcccgcgcaaatcgtgaaggcgttgaaccaggcgaggctagaggcgtccgtgcgggcgtacggcggtgggtcggacgggaggcaggcagccggcagcaagagatggccgagcccgtacgtcctcctctgcgggctcctcctcgtcgtctcgctcttcgagcgcctctggcctcccctcaagtggtgcgcgctggcggcggcggccgccggcctgccgccgatcgccctcaggagcttcgcggccgcgcggaggctcaccctcgacgtcaacatactcatgctcatcgcagtttccggggcgatagctctcaaggactactccgaggctgggttcatcgtgttcctgttcactacggccgaatggctggagaccagggcgagccacaaggcgactgctgggatgtcgtcgctgatgagcatggcgccacagaaggctgtcgtagcagagacgggggaggtggtggcggctcaggacgtcaaggtgggcacggtgctagccgtcaaagccggggaggtcgtgcccatcgacggcgtggtcgtggacgggcggagcgaggtcgacgagagcaccctcaccggggagtccttcccggtcgccaagcagccggagtcccaggtctgggccggcacgctcaacatcgatggctacatcgctgtcaggacaactgccatggcggacaactctgccgtcgctaagatggcgaggatggttgaggaagcacagaacagtaggtcccgaactcagaggctgattgatacgtgcgccaagtactatacgcccgctgttgtggtcatggctgcgggggtggcggtggttcctgtggtggtgagagcgcacaacctcaagcactggttccaactggccctggtcctgctggtgagcgcgtgcccgtgcgcactagtgctgtcgacgccggtggccaccttctgcgctctcctgacggccgcgaggacggggctcctcatcaaaggaggggacgtcctcgaaaccctggccaggatcaagattgccgcctttgataagacaggtacgatcactcgaggggagttcagcgtcgaggagttccaggcggttggcgagcgcgtcactacgccacagctcctttactgggtctcgagcattgagagcagatcgagccacccaatggcgtctgtgctggttgattatgcccagtcgaagtcagttggacccaaatctgataatgtcgccgagttccaaatcttccccggtgaggggatttacggtgagatcgatggggaaggtgtgtatattgggaacaagaggattttgtcaagggcctcatgtgaaacagttcctgacatgaaagatatgaaaggagttaccgtcggatacgttgcctgcaaagggcagttaatcggagtattcactctctcggattcctgccgaactggatcagatgaggccatcagggagctgaggtcgctgggcatcaagtcagtgatgcttactggggatagttctgcagcagcttcatatgcacagaaccagcttgggaacatacttgatgaggttcactctgagcttcttccagaggacaaggtgaggatcgtcgacgagctcaaggcaaagcatggcccgactctgatgatcggcgacggcatgaacgatgccccagcgctggccaaggccgacgtcggagtctcgatgggggtatctgggtcagcggttgcgatggagacgagccacataaccctgatgtcaaacgacatccgccggatcccgatggccgtccagctggcgcggaggacgcaccggacgatcgtcgtcaacatcgtcttctcggtgatcaccaagcttgcgatcgtcgggctcgcgctcgccgggcatccgctcatctgggcagccgtcctcgcggacgtcggcacatgcatgctggtgatcatgtacagcatgctgctgctgagatcggaatcgaacggcggccggaaggtgaagaagtgctgtgcctcgtcgcagcatgggtcacactcacacgccaggaagaagcattgtgtctcccaccactgttcagatggcccgtgcaacaagtcgacggcaggctgttccaaggaatcgccgtctgctggtaagcatgcttgcagtgatcatggccatgcccacacccactgcaaagagccgagcaaccaccggccggaaaggcatgcctgtcatgatcacggccacagccataaccactgcaaagagcccagcagccatgtggttacagaaaagcatgtctgccatgaccacggcaacacccatagccactgcgaagaggcaggcaaccagctgctgcttgtagagagccacggttgcaatgaccatggccatgggcatagccatgaccgctgcaaagagctcagcagcccgcgcttcaccagcaagcacgagtgccatgaccatgagcatagccactgcaaagagcccaagactccgtgtgctgacagtgaggctgcttgccatggccatggccatggacacgaacatcggcactgcgaaggggacagccactcacacgctacaggtgagcatggctgccatgaacatgatgcgcacagccactgcgaggagcacggccattcagacaccgctgttgagcatgcttgcgagcatgagtgccatggtgagcaccaaactgtgcacgctgtggaaacacaccactgccatgaccacgaccatgagcacggacagcatgagcttggggagatcgaggaacctgagaaggactgccacgaccacagccaccactgctgccatgagcctcacggcaaggacaaggtcgcggccgagccagttgaagaggtcacgatctcaatcgctgccctgcccaaagacgaaggccaccaccacagcgaggaacaacacaatggggagcactgcaggaaggcgaaagactgcggcggcggcggcggcgctgctcccaccgactgcgctgcgagcaagaactgctgcggcgtcaaaggtggagacgcctgctcgagcgtgcaggccgcgcgtgctagggagaccggcccgtgctgccggagctacgtgaagtgccccaggacggcggcggcgagcaggagcagctgctgcggccacagcatgctgaagctgcccgagatcgtggtagagtag

SEQ ID NO: 15847 - DNA, 753 bp, Zea mays
  Peptide Sequence Number=SeqID_57626
atgccgtatggcacctctgagctctatcttgcgttgtcaactctttataattacattggatatttgacggtttcagccgcatctccagcctccagcaggcagagcacccccgctctcgtctccggagccttccggatgggctgcatcttctcgtcgccgggctcggcgcgtgcgctgcggccgtgcgccggggtgcgggtgatccacaccaacgggttcgtggaggacttcgagggccccggcgtggtgaccgtggcgcacgtgacgcgctgcctcggcgggcccggcggccccgcctccgccgccaacgccgccgggaaggggtacgtgctgtgctcgtcggcgcacctgctgcagccggggcgcgggccgttccggcccgacgacgcgctgcagccgggaaccgtctacttcctgctcccgcagtcggtgttccaggccgagtcctccgccgtggacctcgcgtgcctcatgaaccgcctcacggcgctcgcccgcaagggcggcgccagcgccgcgcccaagcccagcccgctcgacgcgctcttcgacgccgccgccgccgctgccgccgcctccgggagccaccgccagcacaaccagcagcggatgccagtggctgcggcggcgagggagaagaagggtcagccctggcgggcggcgccgtggaagccctgcctcgagcgcatcgacgagtccgtcggccgcgcctccatgcgcagcgcgtccagcggctgcagcagcgaggcctga

SEQ ID NO: 15848 - DNA, 1008 bp, Zea mays
  Peptide Sequence Number=SeqID_57627
atggcaccacgcagtagggctccatctagaaggcctctctggttcattgtcttggttgcctttgtctgtgtagtagccattggagcctatctttatactccacagcattacacagcctgttatctggtaccatcagaagcctgcaattctcggcctcctccagaacctgctagggtatacactgatgatgagattgctgctcgtgttatcatgagagacatcattcgggctcggccagtgcagtcaaagaacacaaaaattgctttcatgttcttaacacccagtttattgccatttgagaagctatgggaaaaattcttcatgggtcatgaagacagatacaccatatacgtgcatgcatcaagagatataccgagtcattcaagtccaatattcgctggcagggatattcgaagcgaaaaggtgatatggggcacgatttctatgcttgatgctgaaaagaggctcttggcccatgccctacaagatcctgaaaaccagcattttgtcttgctttctgagagctttgatgatcctggtccacatggagcaggtagatattctgagcatatgctacctgaaattgtgaagaaagattggagaaagggtgcgcagtggtttacagtgaaacggcagcatgcgattcttattctcgcggacaccctttactatgggaagttcaagcgttactgtaagccaggaaacgaatggcataactgctattcagacgagcactacttgccaaccctctttaacatggttgatccgactggaatctcgaactggtcggtgacgcatgtcgactggtccgaagggaagtggcatcccaaagtctacagggctgcggacacaagcttcgatctgctcaaggacatcgcgcatgtcgcgcagaggaggccgtgcgtgtggaacggcatgaagcggccctgctacctgttcgcgcgcaagttctacccagaggcgctggacaacctgctgaacatattctcgaacttcaccatcatctga

SEQ ID NO: 15849 - DNA, 1566 bp, Zea mays
  Peptide Sequence Number=SeqID_57628
atgacccataagcgccacgccgccaccggcttgcgcacgggcggcaccatactgcacgcgctctccgccgcctcggccgcccacctgcacgcgcacgccctgaaggtcggcgtcctcttcacctgcctccacctctgctcgggcttgctcaaaacctacgcgtcctccggccgcatcgccgccgcgcggcagctgttcgacgaagcgcctcgccggaacgtcccgctatggaacacgctggtgtccgcctacgcgcgctgcggccacccgcgcagcgcgctggccgccgcgtccgccatggcgcgcggcggcggcggcggcgcgggggcccggccgaacgtcgtcacggtggcgatcctgatgtcggcgtgcgcgaagctgaggaggccggcgcccgggcgggaggtccacgggtacgcggcccggaacgtggccgcgctcgacctccacgcgctcaacgcgctggtgcacatgtacggcaggtgcgggcggctcagggacgcgaggacggcgttcgccggcatcggggccggcgcgaggaacgccgtgtcgtggacggccatgatcgacgcgtgccgcgagaacgggcgccccgcggaggcgctgggggtgttcgaggagatgcgtcggctcgctggcgccgaggtcgacgaggccgccctgctcgccgccgtgtcggcgtgcgcgagcctggactgcgcggcggggctaggggactgggtggaggcgtgcgcggcggagagcgggttcctgcggcgggggacgacgagcgcccgcgtcgccaacgcgctcatacacatgcacggcaaggcggggcaggtggagaggtcgtgcgcgatattcgactcgatgggcgccgcgaggaggacggtggtctcgtggacggccatggtccaggccctggccacgaacgggcacgcggtggccgcgctcgtccggttcgcgcagatgctcagggaagggttcgtgcccgacgaggtggccttcctgagcgcgatcggcgcctgcgcctgcgcggggctggtgagcgaggggcgccggctgttcgagtccatggtggaggagcaccgcatcgcgccgcagatggagcactacggcagcatggtggagctgctgtgcagggccgggtcgttggccgacgcgttcgagttcgtcctggccatgcccgtcgcgcccgaccctgtgatctggcgtgccctggccggcgcctgccgggaccatggggacgccggcttggccaggagggtgatggatcatgtgatcgcgatggagccccaccatgcagggaactacctgctggcgtccaacttgtgcgcggcggatgaggactggggacgtgtcgtggatgttaggctggagatgggagccaggaaagcgacgatctcgaggactgctagtggtgccgtgtcttcagttcaagtcaacgggtgtgtcgtggcccatataaaccacccactggatccgcctctgggtgttatgtgtctgcaaccggccggtggccaaatcggagggcattcaaacatctctaaggctgtccgcagtcgcatgctcgaaagggtactctaa

SEQ ID NO: 15850 - DNA, 393 bp, Zea mays
  Peptide Sequence Number=SeqID_57629
atggagaagaagaccctctgctctatcatggaccgtccggcctcaggcgcggaccgtccagaagcgtgcaaaggaggatctgctctagcgccaaggccacggatcgtccgaccctgtgtcgcggaccatctgcgcctccgcagagagcaccatcaggtggttcgttctagtgtttggcatccagatcagcgccaacacactttttggtggctccactggggacaagggtgcctagatctgttaaaaatcgacccacatatggccggttccaatgatcacaccaacgtcttcaccaccaacatcatcaagccagccatggaggcactcccggctgatgaccagtatccctttgaggatctcatagggtacgaggagaagaaggtgatgcgataa

SEQ ID NO: 15851 - DNA, 579 bp, Zea mays
  Peptide Sequence Number=SeqID_57630
atgacggatgaggagaaggacgtagccacaaaaagacgactagagtctccgcctcgatgcgattacggagatcgtgctttcatatgtgaggacagtgtgaagtactttgtgtgtccgaacattgattatccatatggttggcgtaagtgtcatttcttagagtggttgtatggtcctatgtcccattggcctgagccagaggcaaaggaaaagaaaaaaaatgagtgggcggaagagttgaagtccgatccagaactctacaagtgtggtattgaagttaagtatggattagttccttctgagtttggtgttagttatttttgtggacatatggtagattacaatgaggagacgaggagatgcagttgggagagatacggtgaggaagaagaggtgatgcatacaataaagtccaagagactaatgggacataagatgtgttgcagatctcatctcatcgattcgtacattaaagattggagtcaggacatgcgtaggttcgcgaaatcaatgtggtttgacagttcaatggaggaggagaacacatcaaggttgagtgagcttatcgcgctcgttgag

SEQ ID NO: 15852 - DNA, 792 bp, Zea mays
  Peptide Sequence Number=SeqID_57631
atgccattagactccttcacctgcgacaattgtatcctccagattgaagaaacatctatccacctcttcttcaggtgcaactttgctaagagatgttggcttcttttaggcctccttccaccatgtgctacggatcttctgcataccctattgagaattagaagacgtttgcaagtcccctggaggcttgaagctattatcatcatgacgtggtgcatttggaggtcaacaccatttcatgttgttcctacagttgtcaatgggaggaatcatggcattctactttcgtcttatggggtaaaggactttctcgcttggtggcccactagtgatagctttggaagtgaaccaattgagaaggcaagacaaacatttggagtgaaagaaatggtggtgccaattaccgctgggatcttatctgctctgaggagagtattagctcggcgtgtctctctcaagggctcagcgtccgacagcatagttaaatttcagctaccaaattgggcatacttgagtactgttttgttcggaatggtgcttatattctatgtcgacaatgttactgaagaaaagttgcatctggtcttctcttctccaaggcacttaatggtttcaacagggtgcatcatcgtgttggagatagtgtaccaaatggatttctccctttttggatttctggtatttttgaaacaacctccttggaacgctcaaagaaaagccctttggagacccatgaactatcgaatgggggtgttccacaatcaattgccaattacagaacttccaagctga

SEQ ID NO: 15853 - DNA, 1356 bp, Zea mays
  Peptide Sequence Number=SeqID_57632
atggaggagaaaagatactacaacaagaagaagggaggcgaggcacacatagggcgggaatgggactccgacgagagctccaccgactcctccgacgacgaggatgccgccaacatcgccgtcaacaaaggccttctcttccctaacgtcggccacaaatgcctcatggctaaggacaacaaaaagaagaagattgggctcggtggcggtgaaggctatatgagcggtctcatcacgaggatcggcaccgtcgcccgctcacccatggcggccgcggcagtcgctggcatcggcagcaacgacgtgccacggaagcgcctacgtcgccccagcagcgtcagaataatggagagaaggagcagaggaggaagcgacggtgactgcagctgctcgagcagcggtaaggagcttgagcccgcggagccgacgacgaggcttgttgtgatcgtcggcgccacgggcacgggcaagaccaagctgtccatcgacgcggccgtggcgctgggcggcgaggtcgtgaacgccgacaagatacagctgtacgcgggcctggacgtcaccaccaacaaggtgccgcacgccgaccgccgcggagtcccgcaccacctcctgggcgcggtgcgcgccgacgcgggcgagctccccgcgccgtcgtaccgcgcgctggcctccgcggccgcggcctccgtggcggcgcgcgggcgggtgcccgtggtggccgggggctccaactcgctcgtccacgcgctcctcgccgaccgcctcggcgacggcgacccgttcgaggccgacggcgggtaccggccgtcgctgcggttcccgtgctgcctcctctgggtggacgtggacggcgcggcgctggacgactacctggaccggcgcgtggacgacatggtgcgcgagggcatggtggaggagctgcgggagtacttcgcgtccacgtcccccgcggagcgcgcctcccacgcggccgggctgggcagggccatcggcgtgccggagctgggcgcccacttcgcgggccgcaagaccctcgccgcggcgatcgacgagatcaaggtcaacacgcgggtgctggccgcggcgcaggtgcgcaagatccggcgcatggccgacgcctggggctggcccgtgcggcgtctagacgcgacgcccacgatccgcgcgcggctggccggcgctggctgcgccgccgaggccgccgcgtgggagcgcgacgtgggcgggcctggcctcgccgccatgcgccagttcctcgactgccacgagcagcagcagcagcaaaggtggccgctgaccgctgaattttggaggtgcccggaggccaccgggcaccggtcgacggggcgtacctga

SEQ ID NO: 15854 - DNA, 108 bp, Zea mays
  Peptide Sequence Number=SeqID_57633
atggctggtcgcggccaagggccgattgagcggtggccgagtgctcgcccacccctgcccgctgtcgagccggtctccggcgaagctgccatgcagttagtaaagtag

SEQ ID NO: 15855 - DNA, 795 bp, Zea mays
  Peptide Sequence Number=SeqID_57634
atgcgtgcatcaactcgactcgactgcagtgcgcggacgtccgtcggtcgcgaggagtcatgcccggcgaccgcggatccgagggcggagccgccgccgcccgcggcgtcgcacacctcaagccgtgggcgcccccgtcgcctcgcacccaccgcgtgccttcttccctcccggccccagggccctgcagttaccgggggaggcgccgcgcgcgatcggcgccgctcgtcctcttcgtcgcaccgacgtgtcggcgccgtgcagcagcaggagatgccctgtgacggccgggtaaaagatctccgcgctaagctcatgggccacctccgcgacgccgccgaccgcctccatctgccgcccccgtcgtcgccgcgtaggccgcagccgcagccgcggtcgccggaacccgagccgccagcgccgccaacgcggccgacgccgtctcagaaggaggaggctacggccgccaggccgtggaacctgcgtgaccgcaagtgccgccgaccaacggcgcgcggggcggccgcggccgcggcactcgaactcgacgcgtctcccgcgtgggaggccggggtggagaaggctcggcggtccgtgccccgagagcgcgcgccgttcgccctggcgctgacggcgggggaggtggaggaggacgtgtacgcgctgaccggcgcccggccgcggcggcgtccccggaagcgtcctcgcgtcgtgcagcggcagctcgattcgctgttccccgggctatggctgaccgagatcaccaccgacgtctacaaggtccccgacgagtag

SEQ ID NO: 15856 - DNA, 360 bp, Zea mays
  Peptide Sequence Number=SeqID_57635
atgcggatccaagagctcgcctcatccaacctagttcaacccatgagagatgaagagccccagattctagaaggcctccccgtctctataaaaggagagaggaagccctgctgcaactttggtcgaccgaggcacgccaacagcccgcagtgctgctgccgccactgggaatctgggatgaggattgctgccagcagtgctgccgccgcctctaggatgaggattgctgccaacggtgctgctgccaccgccgggatgaggaactacgaacgggattggggtgggaactgcggactggtgggctgtgggcatgtgggccagtgggatttctgtggcgtgaccgacggattgggccactag

SEQ ID NO: 15857 - DNA, 699 bp, Zea mays
  Peptide Sequence Number=SeqID_57636
atggcgaaggtgaaggtcatgcaggtgggggatgatggactaagagcagtgaaggacgaacgttgggtcttgaccgaaggactagaaaagccagtttcacaagaactgcatgaactggcatgtggaagggccaaggatggctacttcaattggagagaccccaaccacttcatcgccaactacactaagatgaagggcaagcttgaggccagcaagcacgaacaccactccagttggtgcaagagacctcaccacgactccgatgacacttcttctttaagcgatgacgagcttgagaggtggctcgaggacaaggttaatggactctacttcttcactgacataatgagacacctctacactattgcacttggagaggatgtggagggtgataatgataaggacatcgatgatgactccacattagaggtatcactttttgctgatgatttcacaactaagatatatgagctaacaactacattagttggtaaggacaagttagttaggcttgcggctcatgagaggaaagagtacaagcacaagtacgaggctatgcttagggagcttgagcccgctagagcctctatggtggtgtcctatgaaactcattgtgatgaatgcactcttcacatgtcgaacatcactacattgcagaccatgtatgccaccttgctagatgagtgtgatgaattatga

SEQ ID NO: 15858 - DNA, 435 bp, Zea mays
  Peptide Sequence Number=SeqID_57637
atggcgccccgcacgctctatgacgacgacgacactcagcccccttacggaagcaagaggacgtcagcaaggactcgacagccccgacagctgtccttcgccaggctccagcgctcctccgacgaccacgacaccacacgaaccgggcgccaagacctcttcggctgccacgatggcatggaggggaatgagaatgatagatatagaatggtggcagactggcagaacatgggaatggactgtgcgcgggaggagggaatcggaaagctaggcatcggctgtatgggggaaatgggaatgggaatgtgctttgcggggaggggaatgagaatgatagatatagaatggtggcagactggcagaacatgggaatggactgtgcgcgggaggagggaatcggaaaggcagaacagggaatggcagaatacggaatag

SEQ ID NO: 15859 - DNA, 3213 bp, Zea mays
  Peptide Sequence Number=SeqID_57638
atgcgggtgtctccaaggcggaagcatctctccacgtcgcgggcgcgggtctcctcggaacctgtggtgactggggactgtgggtgtttggtactttgtgttggcgtcgggactttgggtgtttcgtactttgtgttggtgccggcacggaggcgtcggcaggtcggccctgcggtcgctgcggaacaggagggtctttgtgatgcctttctcgttcaggataggtacgccgagatcggagaccatggaaattttggtattattcatgggtttggtagatttggtgcactatgggtctatggccaggagttagggaatatcgagcagatactgaaggaagctcaacaccgatggttacgccctgctgaaatatgtgaaatactgaaaaactacaggaacttccgtattgctccagaaccaccaaacagaccaccaagtggctcactttttttatttgatcggaaagtgttgagatacttcaggaaggatggtcataattggaggaagaaaaatgatcagaagactgtcaaggaagcccatgaaaggttgaagtctggaagtattgatgtacttcactgttactatgcccatggggaagagaatataaacttccaaaggaggacttactggatgctggaagaggactatatgcacattgtacttgtgcattatcttgagactaagggtggcaagtcgtctcgtgctagaggaaacaacatgattcaagaagctgctgtggatagtcctttaagtcaattaccttcacagactatggagggagagagctcacttagtggacaggcctccgaatatgaagaggcggaatcaggtaattaccatgggctgcatgccacacaaaacacaagcttctatcctgttaaccagcttaattctcctgtcattcttaatggatcaagtgccatgcttggaacaaatggctgtgcaaatcaaactgatcttccatcgtggaattctgtgatagaactggatcatgagcctgttcaaatgcctgatctccagtttcctgttcctcctgatcaaggtacttccacagaaggcctgggagttgattacttaacatttgatgaagtatattctgatggcctcagtctccaagatattggtgccacaggaactcatggagagtcatatttgcagttctctagtggtactggtgatttggctgcaacagtgaacagcttcccacaagaaaatgatggttctctggaggcagccattggctatccatttttgaagacacagtcatccaatctatctgatatcttaaaagacagctttaagaaaactgacagttttacaagatggatgagcaaagagcttcctgaagtggaagattctcaaattcaatctagttctggggcgttctggagcagtgaagaagcaaataatatcatcgaagcatcaaaccatgaggcactggatcagttcactgtttccccgatgctctcgcaggaccagctctttagtatagttgacttttctccaaactggacatatgtaggttcaaagactaagattttagttgctggtaacatcctgaatgacagtcaaatcaccgagagatccaagtggtcatgtatgtttggagaagttgaagttccagcaaatattttagcagatggtactctcatctgttactcaccgcagcataaacctggtcgagtacctttttatatcacctgctccaacaggttggcctgcagtgaagtgcgagagtttgaatttcgaccaactgtctcccagtacatggatgctcctagtccacatggtgaaacaaacaaagtttatttccagatacgccttgacaagttgttatcccttggaccggatgagtaccaggcaactgtatctaatcctactctggagatggttgacttaagcaggaagataagttcactgatggcgagcaacgatgagtggtccaacttgctaaagttggctgttgataatgagccttctactgctgatcagcaggatcagtttgctgaaaacttgataaagggaaaattgcatatctggcttctaaataaagttggtatgggtggcaagggacccagtgtgttagatgatgaagggcagggcgtgcttcacttagcagctgcacttggatatgattgggctataaggccaacacttgctgctggcgtgaatattaatttcagagatattcatggctggactgcactccattgggctgccttttgtggccgagagagtactgtagttgcgcttattgcactgggagcagctcctggagctttgacagacccaactcccgatttccctggaagtacaccagcagatcttgcatcttctaatggtcaaaagggaatatctggtttcttggcagagtgttctctgaccagtcatcttcaggtccttaatctgaaggaagctaatatggctcaaatatctggtctacctggtattggagatgttaccgagagagattcactgcagcctccaagtggagattcattgggtcctgttcgaaatgctactcaagctgctgcgcggatatatcaagttttcagggtgcaatccttccagagaaagcaagcggctcaatatgaggataaaggtggcatgtctgatgagcgtgctctctcactcctttctgtcaagccacccaagtcagggcagcttgatcctctgcactctgctgcaactcgcatacaaaataagttcagaggatggaaggggagaaaggaatttcttcttattaggcagcgaattgtgaagatccaggctcatgtgcgaggtcaccaagtgaggaagcattatcggaaaatagtttggtctgttgggatcgtggagaaagttatattgcgttggaggcgtagaggggctgggttacgtgggtttcggtctcaagaaggatcagtggagagcagtagtggcggaacaagtagcagttcgatccaaaataagtcttctggagatgattacgattttctgcaagaaggacgaaaacagactgaagaacggctccagaaagctcttgcaagagtgaagtccatggctcagtacccggaagcaagagatcagtaccagaggattttcactgtcgtgtcaaaaatgcaggagtctcaggctatgcaagaaaagatgccggaggagtcagcagagatggacatgagtgaattcaaggaactgtgggatgacgatgcacctatcccgggttatttttag

SEQ ID NO: 15860 - DNA, 453 bp, Zea mays
  Peptide Sequence Number=SeqID_57639
atgtatgttgtgaatcctttcgagaagaagaatgtaactaatagtcaaagtatggagagtgaagatatgaaagctatttcaccacaagatccacactgcgagaaaatctatatgtctatcttgctaacaaaatatctcaagcacaaagcaagcaagaacacgagacacaagatttatcccgaggttcggccacaccacaaaggtgtcctactccccgttgaggagcccacaagggtcgtgtctttttcaaccataatcctccaaatcccgaccaccaaggtcaagggattccttatctcaaatgttgctcacaagagcaggattacaaacttcttggggtcgtccacaaatttggggactcctaagaaacctcaaatcgtattgaaactcagggtttcaagaacaccaagaatgcacaagaggtatttgcaacaagctcaagatcttaaatga

SEQ ID NO: 15861 - DNA, 505 bp, Zea mays
  Peptide Sequence Number=SeqID_57640
atggaggcgcgcggcggcgcggggacagggaggcacgcgacggcacggggacagggaggcgctcgacggcggtggggaagagggtggcgctcggcggtggtgggggagagggtggcactcggcggcggtgggggagagggtggcgcggggatagggaggtgcgcggcggcggggggcaggaatgcgcgcatacaggaggccgaggcgtgctcgaggtgttattgcagatatttgggtagaattatacagcagttgcaatcacacctaatgcgagggacatggaggcgtgcggcggcgcggggacagggaggcacgcgacggcgcggggacagggaggcgctcgacagcggtggggaagagggtggcgctcggcggcggtgggggagagggtggcactcggcggcggtgggggagagggtggcgcggggacagggaggcgcgcggcggcggggggcaggaatgcgcgcatacaggaggccgaggcgtgctcgaggtgttattgcag

SEQ ID NO: 15862 - DNA, 327 bp, Zea mays
  Peptide Sequence Number=SeqID_57641
atggaggcgcgcgacggcgcggggacagggaggcacgcgacgacgcggggacagggaggcgctcgacggcggtggggaagagggtggcgctcggcggtggtgggggagagggtggcactcggcggcggtgggggagagggtggcgcggggacagggaggcgcgcggcggcggggggcaggaatgcgcgcatacaggaggccgaggcgtgctcgaggtgttattgcaggattctgccaaatctcatatacttattcctgttcacccacggcacaacaatcatcaattcatgcaggagggcaatccttcttgatcaacatggggaataa

SEQ ID NO: 15863 - DNA, 225 bp, Zea mays
  Peptide Sequence Number=SeqID_57642
atgactattgagcagatgttcctgatgcagacccaggcagtccaagcaattggtcagactttagcagcaatgcagcaggtgcagtaccagcagccacccccacctcaatctaaagtgcaagtccagatgccacagctcgccacccatgccgaccctgaagccatcacctgggaggaattcagggacaacttccgttgctaccatgtgcccaagggactgatgata

SEQ ID NO: 15864 - DNA, 492 bp, Zea mays
  Peptide Sequence Number=SeqID_57643
atggacgtggactcacgcatggcgacggagtccgactccgacgcgcgcggcggcagtgggtccgggagcgataccaccatggcgtccttgtccccgtctgcgtccctgtccccatccacgcccgggacgcccacgatcgcggtcgcgtctccggcgtcggttgcaggacctaggccggcgccgggttttgctggtgccactgcagatgtccactgttatgacgtgttatcaaataagtggactaggcttactcctcttgccgaacctccttcacgaagagctgcacatgtagcaactgatgttggaaccatggtggtcattcaggtcagtgctgatgcaatagtgaatatcacctatcccttcgcattttgtttagggttccttcgccgccagcgcgtcgtggtcgccgtcctagcagcaggggaccgtacagcgtcgaggcccaccaagctcgtgctctctgacgcctccaaaagtaaaagtttcttctga

SEQ ID NO: 15865 - DNA, 486 bp, Zea mays
  Peptide Sequence Number=SeqID_57644
atggggaggccgacgaagagagaggtcgacgacactggtggccagcgatgctgcgcaggggtcgacgacggcgagtccaacatcgcagaggcgggtgggcgcagcaggggggcaccggcaacgaaggggaagccagcgtcacagtgcaggctgtgcggttcgacgcatgacatcggtggctggggaagaggaggccgcggcggggagtgctcgcagcagggagaggtggggggccaacgacgcccgtcggcagggaacaaccgcgatggggagcgcccacggcggcgcgtctgggagatggggcccgacggctgggaacgaggggaccagcggctgacggggacatggggaggaggccgacgacaactcgggaaacggatgtcacggcggggagcgcttgcggctgggagatggtgccgacggcgcccgatggctggggaccagcggctgacgagaacgaggggaggaggccgacgacggctgtga

SEQ ID NO: 15866 - DNA, 1995 bp, Zea mays
  Peptide Sequence Number=SeqID_57645
atgcagtccggctacggcggcgtgtctgagttccagcagttcatcatggacggcggcttcgccatgtccgcgcctccgcagcagcagcagccgcccgccaccgcccaggagatgggtgggcccttcaggtaccagccgctgcaccaccacgcgctgccgccaccgcaccaccaccaccacgcgcagcacatgccgccgcacttcgcccacttcggcgccgcgccgccgccgccgcccttcacgcagcagctgctgcaccaggcggccgccggggggcaccaccacctccagctcttccacgagcagcagcaccaccacaagccccagccgccggcgagatgggcaccgcacccgcatcaccaccaccaccaccaccatctcggattcgacgtcgaggccgccgtgccggagagctcgggggcggcgggcggcgggagcgccggggcctcggccggcgccgcgccttcgggcgtgcccccgttcctggcagccgccatgaacttcaagctggcggtcgacgccggcggcggcagcggcgccacggaaggcaccgacgacggcggtggcgccgcgggcagcggcatgatgcttcacgttggcagcggtgggggcggcggcgacgaggccgccactgagagccgcctccgtcgttggaccggcgacgaggagacctccatcaaagaacccacctggcggcctctggacatcgactacttgcagagctcaagcagcagcaagaggacggggaaggagaaggtggccacgccggctgcccccgccaattacttcaagaaaggcgacgctgcggccgcgggcggcggcaactacaagctgttcagcgagctggaggccatctacaagccggggagcggtggcgcccagacgggctccggctcctgcctcaccggggacgacaatgccatcctcgagccggccgtggccgacctcccggccgtgggcccgcagcagctcaacacgtcggagacgtcggccggggaggaggcggccgcggtggtgcagccgcagcaacagccccaggcgtcggcggacgcggcgcggcgcaagcggaagcggcggcggcaggagcagctgagcgcgtcggcgtccttcttcgagcggctggtgcagcggctgatggagcaccaggagagcctccaccgtgggttcctggaggccatggagcggcgcgagcgggagcgcgccgcgcgcgacgaggcgtggcggcggcaggaggccgacaagttcgcccgcgaggccggcgcgcgcgcgcaggaccgcgccagcgccgcggcgcgggaggccgcaatcatcgcctacctggagaagatctcgggcgagtccatcacgctgccggccccgcccgccgccgcggcgtccggcgacgacgccacggcggccggcaaggagctggtgccgtacgacggcggggacgcgacagcggccgagggtggcggcgggtcgctgcacctcagcagcacgtcgcggtggcccaagcacgaggtggaggcgctgatccgggtgcggacgggacttgaggggcggttccaggagctcgggctcaagggcccgctgtgggaggaggtgagcgcgcgcatggcggcggcgggctacggccgcaacgccaagcgatgcaaggaaaagtgggagaacatcaacaagtacttccgcaaggccaaggagagcggcaagaagcggccggcgcacgccaagacgtgcccctacttcgacgagctggaccggctctactcccggtcggccgacggcgggggaggcgaggccaggcagctggggagctcagagctgctggacgcggtgatcaagtaccccgacgtgcgctacgggccgccggtgttcggtggcggcaatgctaataatgaaggtggagaggacgacgacagcgacggggaggaggaggaggaggaggaggaggacggcattggcaaggggagggccggggatgatcaggacgacgaggtggacaacgatgatgagtag

SEQ ID NO: 15867 - DNA, 312 bp, Zea mays
  Peptide Sequence Number=SeqID_57646
atggaggcgcgcgacgggcgcggggacagggaggcacgcgacgacgcggggacagggaggcgctcgacggcggtggggaagagggtggcgctcggcggtggtgggggagagggtggcactcggcggcggtgggggagagggtggcgcggggacagggaggcgcgcggcggcggggggcaggaatgcgcgcatacaggaggccgaggcgtgctcgaggtgttattgcaggattctgccaaatctcatatacttattcctgttcacccacggcacaacaatcatcaattcatgcaggagggcaatccttcttga

SEQ ID NO: 15868 - DNA, 1704 bp, Zea mays
  Peptide Sequence Number=SeqID_57647
atggcgccgcggccgcgccgacggatgctggcgctgccggcggtgtacccggcgtccgcggacgccgaggagctcgcggggctggtgtcccggcaggcgtggcgcgcggcgtctcgtctgcggccggacccggaggacgaccgcgcggcgcgggccgtgcgctcggtgctcgcgcggttcgcgagcggcgtgtcgcccgacgcagaggacgccaggctcgtgctcgcctgcgtcggggtcgacacctggctggactgctccgaggaggccgcgttcctggaggccgagctgctggagcgcctggagaccggcagcgacagcgacaacgacaacgacctcgtgctcatcggcggcctcatggcgttcttgctctactgccgcgtcgtcttgttcgaccgcatcgatgattccggcaaggccgcgacggcgaacaggctcccgccgaggtgggcggcgggggtcaacctcaacctggaggcgctgcagtgcccgatcacgctggagctgatgacggacccggtaacggtggccaccggccagacgtacgaccgcgcatccatcaagaagtggatcaagagcgggtgccggacgtgccccgtcaccggcgagaggctgcgcagcgccgagctcgtgccgaacgtcgcggcgcgcgcggtcatcgagcagctcctcctcagccggggcgtcccgctccacgagcccagcagcaaacaccggtgcgcggtcgacaagaccgccacgccgttcggcgcggccgcggccggcggcgtgcgcctctccgcggcgttcctgatggcaaggctgtccagcggcgcgcccgaggaccagaagaaggcgacgtacgaggcccgcaagctctcgaagcggaacgtcttctaccgggcgtgcctcgtggaggcggacgccgtgccgtggctgctccacctgctctcttccacggacgcgtccgtgcaggacaactccgtggcgggcctcctgaacctgtccaagcacccggccgggcggcgggcgctggtggaggccggcgggctgggcctcgtggtggacgccgtgaacgtggccgccaaggtcgaggcgcggcagaacgcggcggccatcctgttctacctctcgtccaacctggagtactgcgaggagatcagccgcatgccggaggcggttccgacgctggtgcgcctggcgcgcgagggcgcgtaccgcggccggaagaacgcgctggtgagcctctacgggctgctccagtgcgcggacgcgcacggcagggcggtgtcggcgggcgccgtggacgcgctcgccggcctgctggggtcgtccgccggagacgacgacctcgccctcgacgccgtcgcgctgctcgcgaggctcgcggagcagccggccggcgcgcgcgccgtcatggagagctcggagctggtgacgaggctcgtggacttgttcggcgaggcggcgtcgcggtcggcgaaggagcactgcgtggcgctgctggcgttgctgggccggcactgcggggacaaggtgctgacgctgctgggcaagctacctggcctgatgccggcgctgtacgcggtgatcgccgacggcaccccgcaggcgggcaagaaagcgcggtggctggtgaatgagatccaccggcactacgaacagcggcagacgccggcgtccgcgccagcaccgacgaccggcgaccgtgtcatccatgtatag

SEQ ID NO: 15869 - DNA, 423 bp, Zea mays
  Peptide Sequence Number=SeqID_57648
atgaacctctgcgccatcgtggatcgtccgagccctagccgcagacgctctagacgtacgcagagaaggagacgctcctgcgtccaggtcgtggaccttacgcgcctccgcatagagcaccacgaggtggaactacaccattccatgaaaagggcagtttacaagcaggagcattggatcttcgaccttcatgctcaggtggccgctatttgtggaaaccattctccttctatagactcgaaagtagcgaatgtttgcttcatgctaagagggacgacaaagttcgccgacagcgcctggatctcgctcctggcagggatcctgtcggggagaagagatcctaggctttatcttgggatcgacaggccacccaagacgcttctagtcgacgtagagccgaagagaggtgaagatttaaggtag

SEQ ID NO: 15870 - DNA, 1554 bp, Zea mays
  Peptide Sequence Number=SeqID_57649
atgcccggcataccgagggatgtcgccgagcactcgctggatatccgagccggagcccgacccatgaagcagcctctgcgccgattcgacgaagaaaagcgcagagccataggcgaggagatccacaagctgatggccgcagggttcatcaaagaggtattccatcctgaatggcttgccaaccctgtgcttgtgagaaataaaggagggaaatggcggatgtgtgtagactacactggtctaaacaaagcatgtccaaaagttccctaccctctgcctcgcatcgatcaaatcgtggattccactgctgggtgtgaaaccctgtctttcctcgatgcctactcagggtatcatcaaatcaggacgaaagagtccgaccagctcgcgacttctttcatcacaccttttggcacgtactgctacgttactatgccatttggtctgaggaatgcgggtgcgacgtaccaaaggtgcatgaaccacgtgtttggcgaacacattggtcgaacggtcgaggcttacgttgatgacatcgtagtcaagacgaggaaagcctccaacctcctttccgaccttgaaacgacattccggtgtctcaaggcgaaaggcgtaaaactcaatcccgagaagtgcgtcttcggagtcccccgaggcatgctcttggggttcatcgtctccgagcggggcatcaaggccaacccggagaaaatcgcggccatcaccaacatggggcccatcaaggacttgaaaggcgtacagagggtcatgggatgccttgcagctctgagccgcttcatctcgcgcctcggcgaaagaggcctacctctgtaccacctcttaaggaaggtcgagtgcttcacttggacccccaaggccgaggaagccctcgagaacctgaaggcgctcctcacgaacgcgcccatcttggtgccccccgctgccggagaagccctcttgatctacgtcgtcgctaccactcaggtggtcagcatcacgatcgtggttgagagacgagaagaggggtatgcattgcccgtccagaggtcagtctacttcatcagtgaggtactgtccgagaccaagatccgatacccacaaattcagaagctgatgtacgcggtgatcctgacgcggcggaagttgcgacactacttcgagtctcatccgatgactgtggtgtcatccttccccctgggggagatcatccagtgccgagaggcctcgggtagaattgcaaagtgggcggtggaaatcatgggtgagacaatctcgttcgcccctcggaaggccatcaagtcccaaatcttggcagactttgtggctgaatgggtcgacacccagcttccagcagctctgatccaaccggaactctggaccatgtttttcgacgggtcgctgatgaagacaggggcaggcgcgggcctgctcttcatatcgcccctcgggaagcacctacgctacgtgctacacctccacttcccggcgtccaacaatgtggccaagtacgaggctctggtcaacgggttgcgcatcgccatcgagctaggggtctga

SEQ ID NO: 15871 - DNA, 402 bp, Zea mays
  Peptide Sequence Number=SeqID_57650
atgaggaaggaactcaaggatggcgtcacgacttcagcatggcgggggatgtcgacgaatggcgacgacgaacgacgatttcaaggaggtagaatcggcgagggaatggagacctggcgttggagaggaggcgatttgggtgccgcatgccttatggttcacctgtcctccactagtatgaaattgagcagacgggagagcactttacgggtaggagaaagagcaggcacgcgcacaggcaacaaagcagagaagaaatggatcggctggaggaagctgaagggagtaggagcggcgtcgagtaattgcgtgcgtgactttcccttggtgaagaggcttggcagcgtaggctccatctggcatataaatgagagggagagggaagggcccacaaggaagtga

SEQ ID NO: 15872 - DNA, 273 bp, Zea mays
  Peptide Sequence Number=SeqID_57651
atggctgggcgggcaccgttcatccacggtgggagctctctacttgggctgctcggtcggccctcccggttccccatggcgggctccctccggcggccgagcccctccgtcgcgcccaacgtcgtggcagaagccgagaaagcagggatggcacccccgtgcggtcggattgcttgccgggcttccatggtcgtggcgcatctatactttgtcggggctagggcgttctactgcacatcatatgtatggagtcctaagatcgattcatgttga

SEQ ID NO: 15873 - DNA, 1191 bp, Zea mays
  Peptide Sequence Number=SeqID_57652
atggcggcattccaccatttgttgccggccttgctccttctactcctgctcccttccacccctgaggcgacgtcctcggcgctgcttggcatcagctacggtcgcgttggcaacaacctccctgcagctacatcagtgccgcagattgtggcttccctgggcgtcggccgcgtccgactctacgatgctgacagcaccaccattcgcgccttcgccaacacgggcgtcgagctcgtcgtcggcgtccctgacgagtgcctcgccactgtctccaccccgacgggcgccgcctcctgggtccgctccaacatttcccctgcgctcccggccacaaagatcgccttcctcacagtcggcaacgaggtgctcaccggcgtcaacagctcctcgctgtccaggtacctccttccggcgatgcggtgcctccacgacgcgcttgcgcaggccggcctggacaagcaggtcgccgtgaccacggcgcacaacctcggcgtgctggccacgtcgtacccgccgtcgtcggcgtacttccgcaaggacctcctcccgatgctctgccccattctcgacttccacgcgcgcgcgggctcgccgttccttgttaatgcgtacccctacttcgcctacgccgaggaacccaccggcgtggagctcgagtacgcgctgctggaacccggccatgccggcgcggcggcgcgggccgtggaggtgcgcgtgtctgagaccgggtggccgtcggcgggggacgccaacgagaccggcgccacgccgcagaacgcggcgaggtacaacggcaacgtgatgcggctcgtggcccaggggaagggcacgccgctgcggccggcggcgccgctgcgcgtctacatgttcgcgctcttcaacgagaacatgaagcccgggccaacgtcggagcgcaactacgggctcttcaagcccgacggaacgccggcgtacgagctttcctaccgcctcccgctggacaacaccacctcctcctcttccgccggtggcagcattaccggcggtggtgggtacaatggccacggctacgggtcgtcggacaacggcggatactacagcatctcggccgccgccaaggtgacaccgagaatgaattttagctttccaagtcatccggttttggttctgcgttccagtgttgggctggcacaaaaccagaaatgtgagtag

SEQ ID NO: 15874 - DNA, 252 bp, Zea mays
  Peptide Sequence Number=SeqID_57653
atggggaaggaggaggacgccgtgggggaggtgctcgtcgtggaagaagccagggaatttgggggcggcggtcgacgtacaggagaggaggaagtttatatttttggtgtagtgatttcagtaaaactcgagcaagagggagaaacaatattgttatcatcagaaaatttggccatgatggcctactcgaagtacaccatcaaatttaaccatgatggcctacttgaagtacttgatctaggcttgatatag

SEQ ID NO: 15875 - DNA, 459 bp, Zea mays
  Peptide Sequence Number=SeqID_57654
atgggcaagaacaacaaacgcaagcgtgagccgactccccaatccgaggactttggtgactcggagtactcagaggaggagttctcctctgtgtctgaggggtctctagctcccatccccctgcgtgagtcgtctgatgattcagatgactctcaggggcttgcggcggaggtctgggcttacatccgggccgtcgagcgttccgagctcgagggctcggatgagttagagtactcctcgtacgaggaggacttgtctgaggaggacggtggcggcgatggcgaggacgacgacgacgacgacgaaggcggtggcggcggggacggtgacggcggcggcagcggcggtggcaagggtgacgacggtggcagcagcaggggcggcagcggtggcggcggcagcagcaggggcagcaacaggggtggcagcggcagaggcagcaacagggccagtggctag

SEQ ID NO: 15876 - DNA, 165 bp, Zea mays
  Peptide Sequence Number=SeqID_57655
atggagattgggcagcggcttgtggtggagaagtggcggctggtggtggagatgaggatcgacgggatcgtgataccaggttgtcaagggttgtgtaccctcagattacgggtatacaagagcatggtcaagaccaagcttgattgggatgaaaggcgatcatga

SEQ ID NO: 15877 - DNA, 165 bp, Zea mays
  Peptide Sequence Number=SeqID_57656
atgggcaaactaggagacgctgagctagtggccctgcacaaaccaagagagcgtgaagttggtggccctaagccctgtcggcgacaagctcagggcgacgccctacagcaatatattcagcatttacggaccaaacgaagaccaccaataatgcgagattggtga

SEQ ID NO: 15878 - DNA, 312 bp, Zea mays
  Peptide Sequence Number=SeqID_57657
atggtgatagactccgtggcgtcgccggtgaccgatcccgaggaaaatgattgtgtgtgctgtgtggctacggtgaaggatggaaagcgcagagaggttccatgggagcgcagagaggttccaatttggccgaagactgagaatgttgacggcagtggacatccggaggttggcaccgggcgccacggtgaacatgtccacgacaagctactgcgtgtccgggctttaacaagttgtgaacgtgatcggcagcgatcggcgacaaggcctgcaaatggggtgggtgtaaatgggtattttaggtgggtttaa

SEQ ID NO: 15879 - DNA, 228 bp, Zea mays
  Peptide Sequence Number=SeqID_57658
atggctcaaggtgatgacggcgggcccagcagtggtagcggcggtggttctggggagctaaactcgcgcgaggaggtagaggaaggggagaacggacctagggtcgcgcatggggactgcggggagccccagtccaggcggcggagtcaatatgtaccacagagaggggaggagaaggctgacttgagctccaacaacccggcaggtactaaatctggagatatttaa

SEQ ID NO: 15880 - DNA, 522 bp, Zea mays
  Peptide Sequence Number=SeqID_57659
atgggtaactcacatctctcaaactgggttgaaagaaaggggaggcttctagaggataagttcaaggataggatattggagattttagagaacagacataatgtagttatcaaggtaggatcaagagatgagaaaggtaggcataaaaaatatgatagtatgagagatttcaaggagatgagcataccaataccaagagacaagaaattatcgaaagatagcgacttaacaaaagaagaggaaagggtctcaaaagacacgaaggtcagcggtcctacagtcagcaaggctttgataccacttatgtcacacccagttttggaaggtaaaccgaatgcgaaccatagcgagcactacgccctgaccctcattgacggccctctggcaaagccaactacaccccaggttcatctaattaatcagctaagggcgtcacattccaccctcatggctgcacagttattccgggtggtcactccacgaataggtacttacagagaggtactcaagaaaaaggcctga

SEQ ID NO: 15881 - DNA, 927 bp, Zea mays
  Peptide Sequence Number=SeqID_57660
tgggacccgcccccgggcgagggcggccccgcgccgctcgctggcggcggtgctgccgggggtgccacgctggtcgtgctgctcggctggctcggcgcgcgccagaagcacctgcgccgctacgccgacctctaccgcgagcgcggggtcggcgcggtgcggttcgtcgtgcccgtgcgcgagctcgtcggcctcgacctcggccgccgcgtcgagcgcagggtcgccgacctctccgagcaggtcgccgcgtggtgcgacgccgatcggcgccgcacgctcctcttccacaccttcagcaacaccggatggctcgcctatggtgctgtactggagaatttacaatcaagagctgacctaactgagagaataagaggatgtattgtagactctgcaccagttctagagataagaccagaggtctgggcggccgggttctctgctgcaatgttaaagaaaagcagttccatgactggtcctacgactgaatctcttgatgggcctgttgtaaatggcaccttgaacagagttggctccaatgtgacgcaaccttcatggggtgaatgttttctcctgtcaactctgcggaaattcttcgagattgttctttacgtacctgatgtaaacaagcggctgtgcaaggttctctcggtgctttcagagcagcagcctccttgcccgcagttctacctgtacagctcggccgaccgagtcatcccggcggagtgcgtggagcgcttcgtggagtcgcagaggtccctcgggcgcagcgtgttcgcccacgacttcgtctcgtcgccgcacgtggaccactaccggagcttcccccacgtgtactccgccaagatcgacgagttcctcaagcgctgtgaggcagccattgtacagcgattccgcagccgtggcagcgctgctgcgctgggctga

SEQ ID NO: 15882 - DNA, 813 bp, Zea mays
  Peptide Sequence Number=SeqID_57661
atggccatggaggaggggtcaggagcggtggagaaagggccggccgtgggcacggtggctgacgcctccgccagcgtcatcggcgaaggcgccgtgaaggaggaggccgggggcagacggcagccaccggccggctacgcggccgtcgtgatcggcggcaccttcgaccgcctgcaccagggccaccatctcttcctgaaggcggcagcggagctggcgagggagaggatcgtggtcggcgtctgcgacggccccatgctcgccaagaaacagtacgccgacctgatacaaccgatcgagaagcggatgcagaatgccatggattatattaagttcataaagcccgaccttgatgttcgtgtggagcccatcgtcgaccctttcggcccatccatcgttgaccaaggccttgaggccatcattgtcagcaaggagacgttgccgggaggacacgctgtcaacaggaagagagcagagagagggctcactcagttgcagatcgaggtgatagagctggtgccagaggagtcgacgggggacaagataagttccacggcattcagaaagatggaagccgagagggcgctgcagcaacagaataaacaagatgatacagcagtaggcactccggcaataaactggaggtgcgctagaaacagttgggaaattctggatgatgatcttacaagcatagcaaaagacagcagttcagtactttttgtggcggccctcagacatccaaggaaggattctgcagcattagctctcaagcctggcagggcgaaagctcttaggcggcaactgcgaatgtag

SEQ ID NO: 15883 - DNA, 111 bp, Zea mays
  Peptide Sequence Number=SeqID_57662
atggagcagcagcgcttccaacatcctattcttgagaccctacacctcataacatatcgtcttgatctcctccgcctcacagcataccatctgaaaagttacaagatttag

SEQ ID NO: 15884 - DNA, 189 bp, Zea mays
  Peptide Sequence Number=SeqID_57663
atggcgatcgcagcatgcacggacgcggttggagcaaacacatcaagatcggagcacgacgtgaattttgggaagccacagttggagcgcctgcgggcgaggatggtggtcgcggttggagctcctgcgattataggtgggttcatggcgagcggaggggttgcgagatttctggggcgctcggtttaa

SEQ ID NO: 15885 - DNA, 273 bp, Zea mays
  Peptide Sequence Number=SeqID_57664
atgacctctttcaatataaatgtgcacaggtccttgaaagggaaatgtgctcttgggccatttctaagtattttggtgattgagtgccaacacaagtgcttttatgctaatctatgcaaagtggtggacaaagtgaaaatcttgtcaaaagccaaagtctgctcggtctgggaacaccggactgtccggtggtgcaccggacaatgcccggtgcaccaggctgacttgggcaaacaggctgctctcgggacttcgacggcggtgtacggctaa

SEQ ID NO: 15886 - DNA, 414 bp, Zea mays
  Peptide Sequence Number=SeqID_57665
atgagtgctatgcgtcccgaggggtctgtaggtcatgagtgggaagcggaccgacgctcaggctgtggctcggtgctaggtgtggttaatgcggctctgccacacctgaccctgggctcgatgccgcgtggttcgactaagggccccagcgaccaaggctcttccctcagcgtgctcactaactggtgggttccaaggatcggggatcgtttccctagcaatttgcataaattagtgatccttgaggcactaggtggtacaccaatcaagaggtgtcttgatagaggagcaattaaaaccatatattctcacctctctagcccatgtcctagatcatataggtgtgctgccgaacatgctagtcagataactgttgaagccttcttgcagccaatggttgagcaccgttcataa

SEQ ID NO: 15887 - DNA, 753 bp, Zea mays
  Peptide Sequence Number=SeqID_57666
atggctcgcaagaaggtgaccctgcagtggatcgctaacgactcgacccggcgcgccaccttcaagaagcggcgcaaggggctgatgaagaaggcgagcgagctggcgacgctgtgcgacgtggacgcgtgcgtggtggtgtacggcgaggaggagtcgcagccggaggtgtggccagacgtggccgaggcggcgcgggtgctggcccgcttcaaggccatgccggagctggaccagtgcaagaagatgatggacatggagggcttcctgaaccagcgcatcgacaagctgaaagagcagctgcacaaggcgcagcgcgagaaccgcgagcgcgagaccacgctcctcctgcacgacgccatcgtcgggcgccgcccgggcctcgcgggcctctccgccgaggagatcgccggccctcgggtggatgcggcgtccccccgacaagcctgcagctgcagctgccctacagcatcatcgggccccgccgggcacacggacgtccatcatcaggcgccgcccccgcacccgcacccgcacccgcacccgcagggcagctggctgatggaggtggccaaggccggaggggacctcggtgcgctcgtctacagcggttttggtggtgggcgcgggagcgtcggaggcgccggcggcaccagcactgaggtggcagacatgctgcctcatctgggcggttttggcgccggatttgggtggcctgatcctggcctttctcctcctttccctccgatgtaa

SEQ ID NO: 15888 - DNA, 318 bp, Zea mays
  Peptide Sequence Number=SeqID_57667
atggcggcgggcttgagctgcatccatctggagaaggaggagagggaccactcctcgcccctcttgtcgtcgggctcggtagcttgctgctgctggtcgtcggcctcgacctcggcaacaggggaggtgcctctgcaacgtgacgacagcgacgacgcgctcgaggataggcttggcgttggcgtggcgaccgaggccacattagatggctgcgacggcgtggaggctcatggcgagctcgacgccctctccatggtgctcatttggcaggcatcgcccaacgagggtcgacggtcgtctgcggcacgtgatggatga

SEQ ID NO: 15889 - DNA, 183 bp, Zea mays
  Peptide Sequence Number=SeqID_57668
atgcggcttcatacccttagaggagatccaaaaagaaggttgatgtttgccaaagctcaagcctctatattcaaaagctatttcgaaaacaaaaatcttttggacactcttgagttcaaccggagcgaggtttgggagacagagatccttcctattaaaaagcagttgagcttcttcagctaa

SEQ ID NO: 15890 - DNA, 291 bp, Zea mays
  Peptide Sequence Number=SeqID_57669
atggaggccaagtcacaccatcaaccaaatcaaggaggcgcattcaatgcgcgccagaagcgcgcagaagtcaggcacgcccatactggtgcaccggacattgaacagtacatgtccgatcacgccaagaaggagatggagaccggcgaaaagcctactacaagccacgggagcgcttcatcggaagagtcccgcaccaagagaaaggagaagaaagactccttaaaagggaaggagaagaagaaggactcctccaaagggaaggagaagaaatcttcttcacacaaatag

SEQ ID NO: 15891 - DNA, 243 bp, Zea mays
  Peptide Sequence Number=SeqID_57670
atggagttaaggcaagacctgcaagtggaaaagaggaggatacatcgaagtgccagatgggtaaattgccactctcaaattgaggtggaagagaggggatttttaaagagcaggcataaacataagtatcaagggccaaaggcggtaacggacaagggtataatagaaaggatgaaggcacagaagagccagtggtacaagtacaacaaagaatggagttacgtcaaggcttgcaagcggtaa

SEQ ID NO: 15892 - DNA, 375 bp, Zea mays
  Peptide Sequence Number=SeqID_57671
atggctacaaatgatgatgatggttctattaatgatgtttctaactatggattttggtatttcctctatgaggagggtctgttcctgagcaaggccttgaggaacacgacaaatgttgagggcgaagccacccaaaaagaaataatgaagcttagatacgaagtgtctgggcttcggtttgattgcgatgagaaggaaacatctttcaagattctagaaaaggattttattggcagtcgaaccaaagtccaggcaatgcgcgaagagaaaagtaagctcgaggcttctaacactgaaaaggacaaccgaattgcgtcgcttgaggtcgaactaaaacgagtaagagaaaacgaagctgatgcaagcatctactaa

SEQ ID NO: 15893 - DNA, 300 bp, Zea mays
  Peptide Sequence Number=SeqID_57672
atggcgagagtagcatgtaccctccatgggaagaggctggacggtggtgtatctgtgctctcggttggcgtgaacccggtctggtggtaccaaaggaggagccaaatcagtgatcgtgtgtgcgggaggatgtttgcctcccagtttgataacactaaacctttgtgcgggagggtgttttgcctccctgggttgtccgagatccttaggacaaggacagctgtaggtgggcctaataccttgggaggttccgtgatagctggtatcagagcgaagcccatctcttcagacattacgtag

SEQ ID NO: 15894 - DNA, 2130 bp, Zea mays
  Peptide Sequence Number=SeqID_57673
atggcgaggactatgcttggagagttcaagacccccgagcgtttttggtcggaagccgtgaacacggcttgccacgccatcaacagggtctaccttcaccgcctcctcaagaagacgtcgtatgagctactaaccggtaacaaacccaatgtatcttactttcgtgtatttgggagcaagtgctacattctagtgaagaaaggtagaaattctaagtttgctcccaaagctgtagaagggtttttgttaggttatgactcaaatacaaaggcgtatagagtcttcaacaaatcatcgggtttggttgaagtctctagcgacgttgtatttgatgagactaatggctctccaagagagcaagttattgattgtgatgatgtagatgaagaagatgttccaacggccgctatgtgcaccatggcgattggtgatgtgcgaccacaggaacacttggagcaagatcagccttcttcctcaaccatggtgcatcccccaacccaagatgacgaacaggtacctcaaatggaggcgtgtgatcaagggggagcacaagatgatcatgtgatggaggaagaagcgcaaccggcacctccaacccaagttcgagcgatgattcaaagggatcatcccgtcgaccaaattctgggtgacattagcaagggagtaactactcggtctcgattatttaatttttgtgagcattactcctttgtctcttctattgagcctttcagggtagaggaggccttgctagatccagactgggtgttggccatgcaggaggaactcaacaacttcaagcgcaatgaagtttggacactggtgcctcgtccgaagcaaaatgttgtgggaaccaagtgggtgttccgcaacaaacaggacgagcacggggtggtgacgaggaataaggctcgacttgtggcaaaaggttatgcccaagtcgcaggtttggatttcgaggagacttttgctcctgtggctaggctagagtcaattcgtatattgctagcatatgccgctcatcactctttcaggttgtaccaaatggatgtgaagagcgctttcctcaacgggccaatcaaggaggaggtgtacgtagagcaaccccctggcttcaaggatgaatggtaccccgaccatgtgtgtaagctctctaaggcgctctatggacttaagcaagccccaagagcatggtatgaatgccttagagactttttaatagctaatgctttcaaggttgggaaagccgatccaactctttttacaaagacatgtgatggtgatttgtttgtgtgccaaatttatgtcgatgacataatatttggttctactaaccaaaagtcttgtgaagagtttagcagggtgatgacgcagaaattcgaaatgtcgatgatgggcgagttgaactacttccttgggttccaagtgaagcaactcaaggacggcaccttcatctcccaaacgaagtacacgcaagatctactaaagcggtttgggatgaaggacgccaagcccgcaaagacgccgatgggaaccgacggacacaccgacctcaatgaggagtgtcacttagtggcggtgaagcggattcttagatatttggttgctacgccttgcttcgggctctggtatccaaaggggtctacctttgacttggttggatactcagactccgactatgctggatgtaaggtggataggaagagtacatcagggacgtgccaattcttaggaaggtccctggtgtcatggaattctaagaaacaaacttccgttgccctatccaccgctgaggccgagtatgttgccgcaggacagtgttgcgcgcaactactttggatgaggcaaaccctccgggactttggctacaatctgagcaaagtcccactcctatgtgataatgagagtgctatccgcatggcggaaaatcctgttgagcacagccgcacaaagcacatagacatccggcatcactttttgagagaccaccagcaaaagggagatatcgaagtgtttcatgttagcaccgagaaccagctagccgatatcttcactaagcctctagatgagaagaccttttgcaggttgcgtagtgaactaaatgtcttagattcgcggaacttggattga

SEQ ID NO: 15895 - DNA, 375 bp, Zea mays
  Peptide Sequence Number=SeqID_57674
atggccggaggcaaaaaggggaagaaagggcgtcaccctgctgacgggaagcgcaagcgccccccgattcctcccttggaggacttcggggcctcggagtactcggaggaacaatccatcgagcgtgcggggatcggtgggtcggacgactcgaaggaggcctcctcggaggaggaggactcctctgactccgaggaggggagcgacggcaacggcgacgagggagacagcagcagcggcagcggcggcgacagcagcagtggcgacaacgacagcggtgatgacggcagcgagggcagcgacgatgacggtgatggcaaaggcgacgacaacggcgacaacggcaaggccggtggcacaatgctgccggcttaa

SEQ ID NO: 15896 - DNA, 162 bp, Zea mays
  Peptide Sequence Number=SeqID_57675
atggtgggtacaagtgcggtcactgcacggctgcagccggggtcagtggagcattgtgcgattcaagatatggttgatggtgtgacttggcctaccaacctgccaccgggttggacggtcgagtgggatgctgctccggcaggagaggagcacgaggagtag

SEQ ID NO: 15897 - DNA, 369 bp, Zea mays
  Peptide Sequence Number=SeqID_57676
atgggcaagagcaagaaacgtgggagttcctcacatcattccggcgataagtggaaacgcgatccaactcctccctcggatgacttcagcgactcggagtactcggaggaggagttctcctccgagtcagagggctcgctggtatggacctacatccgggccgtcaagcatgccgggctcgagggctcggatgagttggaggtctcctcggactcgtccgaggagggcgatggcgagggcgacggagacagcggaggcggtggcaatggcgacagcgacggtggcgagggtggcggcgacggcggcagcggtgacggcagggacggcaacaaaggcagcagcaagggcagcaacaaggccagtggctag

SEQ ID NO: 15898 - DNA, 399 bp, Zea mays
  Peptide Sequence Number=SeqID_57677
atggcgcccaccacgttggaattgcaggcacgaggactaggtggacagagggcgtgggcgggagagaacatatgcgccgacgaccctggcccacccatcaatgcgtggttgatcatggcaagcggagctgcggagcccactggtcaccgcctggtgctagggacgcacggtacaggcgtcaaaccggaccatgcggagagggaatccagcatgctggccaagcgtccccctgcccccaccccccatactgcggctcccctgcttagggatggcaatgggtacgggtatgggtatggatataataaggtacccatagataatgttttcgcggatatggatatcccagtatccatactcattacccgatgggtatctgacatgtgggccatcctaatttaa

SEQ ID NO: 15899 - DNA, 249 bp, Zea mays
  Peptide Sequence Number=SeqID_57678
atgagggagacgttaagctccgatgagagcgccgccgtgcgtaggacgccgccggccggccgtaggattgaatccaacgctcatgatgacataccacttcgcggagaattagatctaatctgggctgttggctcccgatctgacggcttgggtaccgcgcgagtagaagagccactagcaaaggagtctggtgttcagcaggtagaagttaatgagcaggggctcattgaaggcaagttgtgccgttga

SEQ ID NO: 15900 - DNA, 567 bp, Zea mays
  Peptide Sequence Number=SeqID_57679
atggctagattttcatttagagtactggtcaatttgatgtcagaaaatatcattcatgtcaagatacttggaactggaagttatcggtctcatacatgttcttgtgcaattgtgccggtgtcacgtagccgtcgagagatcatagtcgccgacgaggagccagtcatctacggcattgacgatgaccttcaaccggccgttgtggatgaggagcaccggctcgaagaccataacgaagcaaaggatgctcgggccctgttcggcagcagtgctgccatcgacatcgacaacgataatgagctccttggtgctgttgccggtggtcagactgtgataggctccacgagcctgataccgaccggcacaagcaccgctaccacgagttgtagtaagtgtcctgccagatctaaagggtggaaggacttcgatgaactgacccacctcgtcaatggtaagagggtaaggtatgacgtcgtttgcaagtactgcaaggttacattaagtggtaaatctagttctagaactggccacttgcttcgtcataattgctctgctaagaaagaataa

SEQ ID NO: 15901 - DNA, 318 bp, Zea mays
  Peptide Sequence Number=SeqID_57680
atgaagaaggtggtctactacgagaccgactcttccacgccctcaacctccgacaccgagtcaacatcttcaaagcgccaagagcagccccgccagtgccccgcgcacacccctcacctcatttcgctcggcttcaccctctctcgtgctttgcccatgccgccagctgtcgccggagacccgagcccgcgtttcccgaccatccagctcgccagagaccgcttcaaggcctccccgagctccaccccgagggggctcaagctctttcctgagtgcctctccgtaaggacctgtttggggagtgacaacccaggataa

SEQ ID NO: 15902 - DNA, 444 bp, Zea mays
  Peptide Sequence Number=SeqID_57681
atgggatacatgacttgtgggtacagggtacaacctctacagagtgtaaaactgatggtcaataccaggaagggaggcggaattgatctacctgccaacccattcaaccggagggtgcttagacaacagcaagccgaaatgaatcctccgaatcctccattggcttggactgatctagtggttgcagctcaaatgcagatgctgcaacatatggcgaacacaatgcaagatatgcaggcgcagatgggacatgagtgtcaagagatgcgccaggagcgacaagagatgagggaggagatgcgccaagagcgaatggtgcgacagcaacaagcaccattgcctccaccaccaccagttccaccccgggacaagcatcgggagttcatgagccataagccaccaacgtttgctagctctccaaatcctctgcatgctgatgattga

SEQ ID NO: 15903 - DNA, 396 bp, Zea mays
  Peptide Sequence Number=SeqID_57682
atggcggtgctcttctcacactcagaggtgtcgctagggcggtctgggagaaggaggggcagaggagatgggtacgtctcaaggcttaataccggtagaggaaggaatggccggggcaagatggtagggaggactccgattcctctggcggcgaagtcggaccacgcctgcgtcgtggcgaggcggagcgcggtcctgcaacccgggcccgcccgtcagtggaaggcggatgcgatgcgctgtgacgtggggcctgactatcggtgcaaggttgccaacagcttcgcgcggcaacagtacatagtggcactggactgcgggttgatatctatcttctgcgggctctctttaagaaaattccctagccaaagggtatcgcgctaccgaggctgttag

SEQ ID NO: 15904 - DNA, 337 bp, Zea mays
  Peptide Sequence Number=SeqID_57683
atggggctcgaccaggggagtgagccgcgttggtctgggcgggctcgccggagcaggacgcgcacaaggaatgtgtcggtgaggaacagggcagctagcgccggtcacgacgagcagcatcaagacccaggagcagaagcgagctcggtcgtgcccagggctccaggtcgcgtgcgggcacgcgaggaagtcgctggggctcagtcgcaacgtcgcgagccgctggccgcgcgctgcagcatggccacgcagccgcgccctgcacggtcccaggtgctcccgggcgcttgcggcagacttccctgggaggtcagctcggcagaactgactgccctgg

SEQ ID NO: 15905 - DNA, 2304 bp, Zea mays
  Peptide Sequence Number=SeqID_57684
atggatctggagatcgttgggcggcatgccttactgttcgacgacgacgcgacggcggagctcgtcaactccggcgtctcccttgtcccctgggcggccgtcggcgcggcagacctcctcctcgaccgccacgacgtccgccacctccttgaccgcgtgccccctcgcccgcaccgcgcctactcgatggccctcctctccgcgccctcccctgacggcgtctctgagaccgagctcgatcgcgagcgctaccttgacctcccggctggcgacggcgaatacgagggttctggggatgcggctccttcaggaaatgggtcagatactggacagactgattataatgttgttcctttctcgtatggatatcccgctggttcagatgaaccaaattcttcgaacttgtgctatcgcccatcattttatgtgccagaaagcttgttgaataagctgcctccttctgagaaggtgcatcagataattgcaaggacagccttatttgtcagcgagcatgggggacaatcagagattgtattgagggtgaaacaaggagataatccaacatttggattcttgatgcctgatcatcatctccacagctacttccgctaccttgttgatcatcctcaactgctgaaggatggtgctgatgctgttggcacgaataaaggcaatactgagaatgagcatgcttcatctggcggggctttatcattgcttgggaccacatatgactcaggagacgagaatgaaggcacactcccgcgtagttcggaaggcatgaatcctgaaaatagcatgactcttgatgtgcagggccatgtaaaatctgcatcaattatgcctgacaaaaaagaaataggcaaaaatcagaatgctcctcctgcagttaaaagaaaaacaatattgatgaagaagaatcagattcttactggcaacagcatggttgctgttcagcatgaaaaggttaatgacgcaattatagcatcaagtacttccaaatcacataccaattcaggcttatcagaaataaaagaaatgatccttgaaccaccatctttcatgaaacgcacaatggagaaaataattgagttcattctgacaaatgggaaggagttcgagaaaaaactgattgagcaagacagaacaactgggaggtttccatttcttctgtcttctaatccataccactcatattatctaaagtttctccaggaaactgaagagtccaattcacatggtagaagtcctaataacaaggacagaagaggttcttctgaccggaggggcagaaactctcgtgagcgcgccgacagaagctcctgtgagcgcgctgacagaagctctcgtgaacgcgccgacagaaggtgctcaatggagcgcaaagacatcaattatagcatggaatccagtgcttctgatagaagctcatctgggccatcagagaagcagctgtatgacaaacaagggaagggtatattccatcctgtttgtggggtcaagactcggaaagttactgcagatgaagctgctgctatagtaatggcagctactcgaggactgggtgctgcaaatgactcacttaacaccatgaaaggaaccaaggacaatgttcgcacccatgttagtaatgatccttcttccagctttggaagtttctcatctttacaggaccgaaatgcactgtccaaacacatttcaaatagtgatgttgatgcttcacttacaagtagtggacagccccaaagggaaggttttggaatcattgatgatgattggattgcaaacactattgcaaaagctgctgctgcagcagcttccaaagaggcaggttctttggaagctaccatgacaaaggaacagaagctgaaagctgataggcttcgccgtgcgaagatgtttgctgcaatcattaagagtggagacaacaagatgaatgatttagctgcagcatcgaacccaactagtgaagctgccaaggccattcctgatatgaatgcctctggacttgatctgcaatctgtggctaaggaacgtgaaggtagtagctctgttctgtttgaccatgaggggccaaacttgacaaaacatagtaaagactctgatgatgaacagaacagagtgcggaagtatagaaagaaacaccaagaatccgacgaggaaaaagatgaatctgaggatagctataagcactcaaggaagaagcatcgcccagagcattcaagagaccagagcaaggatgttcacaaacataagaacaagagtcactccaaggacagggaatcctacatcatagacaccatt

SEQ ID NO: 15906 - DNA, 297 bp, Zea mays
  Peptide Sequence Number=SeqID_57685
atggtgaaaacgtcactacgtcagcccagtgcccacttgcccacagcccactcgcgttcagccagcctgccagccagccaggtacagccacctagcctagtcaacacagccgcgacggaggacggactaacgctcatcggcggttgcggcggcggtgctctgctgcagtcgaccacacgctcatcggcggtcgcggcggcggtgctcggctgcagtgctgctgctgcctcgctagtcagcgtcgccaccacgcgcatggtcctgctgtcagccagtgaccgcggagattcgaactga

SEQ ID NO: 15907 - DNA, 102 bp, Zea mays
  Peptide Sequence Number=SeqID_57686
atggcgccgccggccctggtgaacgccaccgttggtgtctgcgattgggtggatatcgagctgactcgattcggctcgactcaactcgagttggctcgttaa

SEQ ID NO: 15908 - DNA, 126 bp, Zea mays
  Peptide Sequence Number=SeqID_57687
atggcgccgccgaccctcgtgaacgccaccgccggtgtctgcgattatcattatgttaattggaacatggagcgaccacccgggaaaatagtgctaccagaagggtttatggacgcccttggctga

SEQ ID NO: 15909 - DNA, 348 bp, Zea mays
  Peptide Sequence Number=SeqID_57688
atggccttgcgaagtaatgggtctggggccttccgcgaggtcttcttgccttctagtggacccgggggatatctgtccccccacaaccgcgcccctgttcttggagctcgctgctgccacgcccctgttcccctaccgcacgtgcccccaaagctcgttgttgctcgttcgccgctcccaactctgatttcttcgcagcgtgtttgccgccattgtgccgagagacatcgcgccaccgccgagatgaccgttgctccgttggctcaccggacagtccggtggcacaccggacagtccgccctttttaaactttgtattggctttgagttgaacctttggcacctgtag

SEQ ID NO: 15910 - DNA, 1653 bp, Zea mays
  Peptide Sequence Number=SeqID_57689
atgggaggcgacgggcgacgcaagctcgacgccgccaaccccacgcccgccacacttggctccgtctggaacccaggtccgctcagtggcaggccaggatttgaaacatggtattcaaaattactaagaggtgacaccatcgttaggccacaagttggcgtcagacgatgggaggcgccgtggagccgctacacagactgcccccgcctccctacccgcccgcctgcccgcccgccagacgcgacagccgcgatctgcccgcccgccgtcatcgccgcggggctctcgcgcccgccctcgggccgccaccctttctcatccgcgcacgcgcagtcctcgcaccccgtcgacttccccaccatcgctgcctgtcgtgccgcgatatccgcctccaagggtgaccgccgccgccgacccggcgtcggccagcactcctcctccccttccccttctctcgcaaccgctgcagccaaggaggagcaggagcagccggtgctggtaaggatcaagcacgagcgggacccggagcggctgtaccagctgttcagggccaatgcgcacaaccgcctcctggtggagaaccgcttcgcgttcgaggacgcggtggcgcgcctggcgggtgctcgtcggaatgacctcgtcgaggagatcctcgagcagcacaaggcgctgcccaggggaggcgggaagggttcgtggaaggccgggatgccaggccacgcgctacggactttccaggagatggggatgtacgggtgcccgcgcaccgcaaagtcgctcaatgccaccatgaaggtcctgctgcgggcacgaatgtttgatgaggctctgtcgctgtttgaggagggcccagagaagtacgacgtcgaggtggatgacatctcgtgtaacacggtggtgaagatgttctgcgacatgggggacttgcgtgcggcgtaccgggtcatgcaggggatggagagggctggtttgcggtcggatgtcatcacgtacatgacgctcatggctgctttctataagtgtggccgacacgaggttggggatggtttgtggaatctcatgaggctgaggggttgggtgccgacacttgctacctacaatgtgaggatccagttcctggttaacaggggaagggggtggcaggcaaatgagatggcacggaaaatttatgtggcggggatcaaaccagatgagatcacatacaatctaattatcaagggtttcttcatgatgggtgagcatgagatggccaagacggtctttggcgcgatgcacgggaggggatgcaagccaaacagtaaggtttaccagacaatggtccattacctctgtgagagaagggactttgatttggcattcaggttgtgcaaggatagcatggagaaaaattggtttcccagtgtcgatactattaaccaactgttgaaaggcctcatggctatctcaaaggataggaatgggaaagagataatgaagttggttactgggagaaaaccttcgtattcatatggtgaaatgaagctcgacagtcgcggaggttctggaggattaaccatctgctgcaacgccaacgcctgggacatgggctgtaggagcaagtgccatccagacattcgctttcctttcctcagtaagtggacattcagaaagtag

SEQ ID NO: 15911 - DNA, 216 bp, Zea mays
  Peptide Sequence Number=SeqID_57690
atgcccgtgttcctggaggtcgccatcgtgcccctattcccctgccgcaccgcgttagccatcgttgtgccgagagacatcgcgccaccgccaagggaaggggtgacttattacattgcctacctcggcaccgtgatcagtggcatcgagcttagcgtcaagatttgtgccgccgagctaggccatgttgacgctaacatagcatggggaatctag

SEQ ID NO: 15912 - DNA, 453 bp, Zea mays
  Peptide Sequence Number=SeqID_57691
atgcaggcggcatgcaaccgcgccaagtggacgcgcttctccgactcccgacacaccagcatggaggcccaggcccacgcgtcacgcaaccggcgcgccggatgctgcatgcaagcaactgcaccgccacttgcgccaccaccgcgcctcctcgagacaggcggcgctttcggcgggagcagtgggcgacgcttcgcctttgccgtaataactgcgacaaaaaagcagggaccgggaaagggggataccccgaaaaggatccttccccgtgaaggaaccaggctccgagcctccttactgatcagaggttcgaaggctggccccccgaagggttcaacagccgcctcagatcgcgtgggccctacacccactactggtcagaggttcgaaggccggccccccgaagggttccacgaccgcctcaggctactcgggctccgcgcccattactga

SEQ ID NO: 15913 - DNA, 540 bp, Zea mays
  Peptide Sequence Number=SeqID_57692
atgctgccggactcgccgccgcggcgtggggcgggccaccgccgcgcacagtcggagatcctcctcggcggcgccgcgctccccgacgacctcaccttcgacgcggacctcggcgttgtcggggaggcctgcgtggccggcgacgaggatgaggaggatgacgacgacgacgaggaaggggtcggcggcgctggcggcagccggatgttcgagatgttcctcgagaacggtggcaagctcccaggaccgccggagccgtcggcgcatccgcattcgacgccgccgcggccacggcaccatcacagcatgtctatggatgggtccacgtctttgtttggttccgccgccgccgggacgcctgggaggtcgggcgctgatgccaagaaggctatttccgacgctaagctcgccgagctcgcgcttgttgaccccaaacgtgccaagaggcgtttgacaaggactgatcacccgaggatactggtgtttctattttttaaagagcgcatcttcatgaaaacgagtcaccggaacatagtgtga

SEQ ID NO: 15914 - DNA, 276 bp, Zea mays
  Peptide Sequence Number=SeqID_57693
atggactcagcccgcgagccgcggctgtcggctggcgcctggctgctgctgacgttccggacgtgcgcgccgcgtgacgcttcggccgcggctgtccagatgcccccgcggagtcccggacgacagcgaaattccgcggaccgcactggttcccttccccgcatccaacttcgcctgccttcgttgatacacaacacatcacttgggcgtgcgtccgactgccgcatcaggatgctgatacgcacacaccacagcatcctactggtgctgatctga

SEQ ID NO: 15915 - DNA, 1131 bp, Zea mays
  Peptide Sequence Number=SeqID_57694
atggcgggcggcacgaggtcacgctgccccgtgctgctgctcttgctcctcggtgtgactactgctcgactggcttcaggcgtcgtcaccgacggcctattaccaaatggcaattttgagctcgggccggccaagtccgatctgaacggcaccagggtgatgaaccaaaactccgtaccgaactgggagatctttgggttcgtggagtacatcgggtccgggcagaagcaggacgacatgatcctagcagtgccggaaggtgcatgcgccgtgcgtctgggtaacgacgcgaccatccggcagaagctagaagtgatccggaagacgacctactccatcaccttctgcgcggcgcgcacctgcgcccaggccgagaggctcaacgtgtccgtcgccgccgagtccggcgtcctcccgatccagaccgtgtacaccagcagcgggtgggactcctacgcctacgccttcagagccaggcacagcaccgcgtggttcagcatccacaaccccggccacgaggacaacccggcgtgcggccccctcatcgacttcattgccatcaaggccctgaaccctccgcctctcgctcagggtacgtgtagcgagcatgcaggtaacatgctgaggaacggagacttcgaggagggcccgttcatcttcccggacacggcgtggggcgtgctggtgccgccgatgagcgaggacgacgtgtccccgctgccggggtggatggtcatgtcggacacgaaggtcgtcaagtacgtggacgcggcgcaccacgcggtgccgcgcggcgcgcgcgccgtggagctggtggccggcagggaggccgcgctggtgcaagacgtgcgcaccgtgcccggccggcgctaccgcctgtcgctgtcggtcggggacgccgcgaacgggtgcgagggccccatggccgtcgaggcgtatgcggcgcgggcgacgctgaggacgacgtacgagtccctggggaagggcgggagcaggcgcgccgcggtcgagttcgaggcgaccgcgaacctcacgcgcgtggtgctccagagctacaaccaccacatgaagcccgacgggacgctctgcgggccggtggtggacgacgtctccctcgtcggcctgcgctag

SEQ ID NO: 15916 - DNA, 426 bp, Zea mays
  Peptide Sequence Number=SeqID_57695
atgtggaagtgtgctctggttggtggtgatgctccgtgttctgttcacctggagagcgcacatggcggcaatcaacgaattgccggttctaatcgtgacggccttcaacttggtatagaaaacgaggtcctctcgtgctctttttacccagacacagtaagtaatacaggagtatgctccccaacttgctgcggttaccgggggcggaccggcggacctggccgcagggcatcaaagagcagcggtggttctccgccgaggcttgagctgccgaacagacggaaaggggcggaaaaggccggcggtggggcaggggtgcgcgtccctgtctgggccagcacccgtcacccggtgtacactacacacacagtttactcggagttgaaggctgactttgatctaccactaataagggttatttggtga

SEQ ID NO: 15917 - DNA, 1272 bp, Zea mays
  Peptide Sequence Number=SeqID_57696
atgggcgaaaagatctcgttcgcccctcggaagaccatcaagtcccaggtcttggcggactttgtggctgaatgggtcgacacccagctcccaacagctccgatccaaccggaactctggaccatgtttttcgacgggtcgttgatgaagacaggagcgggcgcgggcctgctcttcatctcgcccctcgggaagcacctacgctacgtgttacgcctccacttcccggtgtccaacaatgtggctgagtacgaggctttggtcaacgggttgcgcatcgccatcgagctaggggtccgacgcctcgacgctcgcggtgacttgcagctcgtcatcgaccaagtcatgaagaactcccactgccgcgacccgaagatggaagcctactgcgatgaggttcggtgcctggaagacaagttctacgggctcgagctcaaccacatcgcccgacactacaatgagactgcggacgagctggctaaaatatcctcggggcgaacaacggttccctcggacgtcttctctcgagacctgcatcaaccctccgtcaagaccgacgacacacccgagcccaagaaggcctcggccgagcccgagaaggcctcggcccagcccgaggcaccctcgactcagtccgaggcaccctcggctcggtccgaggcacccttggctcggctcgaggcaccctcggcccccgaggcacctcgagcccttgttggaaatgccttccgacaaggcttctactggccgaccgcggtggccgacgccactagaattgtccgcacctgtcaagggtgtcaattctatgcaaggcagacccacctgcccgctcaggctctactgaccatacccatcacctggtcgtttgttgtgtggggtctggaccttgtcggtcccttgcagaaggcacccgggggctacacgcacctgctggtcgccattgacaaattctccaagtggatcgaggtcagacccctaaacagcatcaggtccgaacaggcgctgacgttcttcaccaacatcatccatcgttttggggtcccaaactccatcatcaccgacaacggcacccagttcaccggcagaaagttcctggacttctgcgaggatcaccacatccgggtgggctgggtcgccgtagctcaccccatgacgaatgggcaagtagagcgtaccaacggcatgattctgcaaggactcaagcctcggatctacaacgacctcaacaagttcggtggacgatggatgaaggagctaccctcggtggtctga

SEQ ID NO: 15918 - DNA, 321 bp, Zea mays
  Peptide Sequence Number=SeqID_57697
atggcgcgccgggtgctgccgctgcggtgcaagcgctgcaatgcattcacaactaggcacatgatgtgtttcaccagagtctctctccgatccccctcgaatgcgggcgtgggagatgcagcctctctctgctgcctcgccggggagtggctggcctacggtgtcgggctcgccgccgggactgctgccttctgcctgataactcggcaacggctagagcctcgtcggaagaggatccattcagccgcttcgggatctgctgttggccgttggggttccttggagctgcaactgttgagttacaaatacgctagttcttag

SEQ ID NO: 15919 - DNA, 288 bp, Zea mays
  Peptide Sequence Number=SeqID_57698
atggcgtgcgcgtcgtctcctctcgtcagctatccacaggggcacctagaggaagaatgcattcctcgattgtgtcgcgctcgagtcgccacaggcttcggcggcggggcggtcggcgctgaagacgtcgccgcggaggcagaggtggacgggaatgaggccaccaagaaggatgcggatgcgcggaggttctctggaggatatggttgcaggagtgacttggccgtctaccttgccaccggattggacagtcgagcgggaccctacctcagcaggagaggagcataa

SEQ ID NO: 15920 - DNA, 144 bp, Zea mays
  Peptide Sequence Number=SeqID_57699
atggcgaaggggtacggtggaatgctagccatgggatccaaatttgacggtcagaagtttggccgttgcgtaggtgagaagtttggccgggcagttataataactacggtggttagtttgatacgaacaacaagggatggctga

SEQ ID NO: 15921 - DNA, 327 bp, Zea mays
  Peptide Sequence Number=SeqID_57700
atggccatgccgcgggagtcctgggcacgactggaaggagctttcaagggctgtcatcaacggagggagaagggacgtgcgtccttgagaagacggcgcaggggcgcgcgagcctgggcagagctagagctcacggtgacacagaagggaggaagatggcatcccaggcgcggcctgcgtgctgctggagcttggtctgcgatacatagagttgatgctgctcttgtgcagaacggagaaagctggggcacaaatcgatttaaaggggctggcggctgcgtctggttggccaagaggggcggcgtcaacgattggagcagggcatga

SEQ ID NO: 15922 - DNA, 429 bp, Zea mays
  Peptide Sequence Number=SeqID_57701
atggccaccagccgtggaggggaggagagggagaacgaggtggacgcgtcgggggtgaggataggcgacatcctgtctgacgctggcatgcgtggttggcttgacgggacgaatgacgtgtcgctcaggtgtctccatgcgcaacaacaatacgaggactacatgcgtcaagcgaaggagaaattcttatcacaatatacggtggatcgccaccaaaaagttgccaaacatggagggaccgacgtcgcatcttttttatcttcgcttcaagtctccaatgatacctatgtccaatacatcggcaacaaatggggattcgcagccctagccattatatggtatgccgatgacctcatattcaggacaaatacaaccaccgtcgttccttcttggcagatcggtgcccctgaacatggtcagaccgtctaa

SEQ ID NO: 15923 - DNA, 297 bp, Zea mays
  Peptide Sequence Number=SeqID_57702
atggcccccgtcgcctccgcaaaagtccccaatcctgccggtggcctctgcacgcctagccgcagacctcttcgttatgtgcttgtgatggcgtcacagtccagaaaatttgccccactccctaggggtggcaataagggctcaggtgatggtgggcctactcaaaaggcatcagccttggaagctctttcatctgaatccatcgtctctaggaaaacagatagaaaaggcagctctttaatctcaaccattgaacatcaacagatcaacatgagggctatgactgattcttcttaa

SEQ ID NO: 15924 - DNA, 390 bp, Zea mays
  Peptide Sequence Number=SeqID_57703
atgtccggtgctccaaggaagagcggcctccggaactcgccagcctcgggaattcacttcagctgcttcgctaaaattcaccggattgtccggtgcaacagcgaggcaacggctatttcggcgccaatggctacctgcgacgcatttaatgcgcgtcagaagcgcgcagtcgtcaggcacgcgggagcaggcgcaccggacaatctacagttcatgtccggtgcgccaccggacatcaaggcaggcctagagacagagctccaacggtcgaatcccaacggctttggtgacgtggctgtcgcaccggacatgtttggtgtgcaccggactgtccgacacaccaaagagatcaaatcctctccaaattccacacaacaccctagtgattag

SEQ ID NO: 15925 - DNA, 264 bp, Zea mays
  Peptide Sequence Number=SeqID_57704
atgggcgcgccgaagcagaaatggacgtcggaagaggaggatgcgctccgcgccggcgtgcgcaagcacggcgccggcaaatggcggaccatccagaaggaccccgagttcagcccggtcctctcctcccgctccaacatcgacctcaaggtatcttcccctgcatcttccccgccgctctccatctacctggccgcgacggaactagccgtgcgccgtgcgcgtccctatgggcctgtttggttgtggagcaaagaagcctga

SEQ ID NO: 15926 - DNA, 1215 bp, Zea mays
  Peptide Sequence Number=SeqID_57705
atgtgggagtcggtggcgctgacgctggcgggcaccgccggcaataacatcggcaaggtcctgcagaagaagggcaccctcatcctccctccactctccctcaagctcaaggtgaatcccatgacccatccccttccttcgccaggctcctgtcgccccagatcgcagcgggacccttacggcgtttcctgtccgtgcgcgcaggtggtcaaggcgtacgcgtcgaaccagctctggatcagcggtttccttatggacatgtgcggtgccgcgctcatgctcaccgcgctctctcaggcgccggtgcgttgcctcctgcctcttattcctgtgcgtggtgattgggtcgtttatggtcctttgctgacggtggcgcaggtctccgtcgttcagcccattgctggttgcggtctcgcaatactctgcgttttctcccatttttacctcaaggaggttatgaacggcctcgattggattgccatcacgctagctggtctcggcaccataggtgtaggtgttggaggtgaggaacagaaagttgaccagatacctcttttaaatataccctggctagtgctctccattgtcatcttgtttgtactgctcaacacttggcttcatatgtataaaaagcaaaggcgtgagcaagagttgcgccatcccatgcagactggacctgaagtgattgaggagatcatatatggcttagaatcaggcattttgtttgggatttcttcagtgatctctaagatgggatttgtgatgtccgagatgggttttccaaagattgttgtgcctgctgccatatcttgtagtgtttgctgcagtgcagtgggatttgtgtatcagactcgaggcctcaagcatgggagggcaattgttgtatctacatgtacatcagtggcatctatagtgtccggtgttgttgctggcatgattgcacttgatgaacatctgcctaaagctcccacagctcgatttttcctcttactgggatggttcttcatcatcacaggagtaatactgcttgttagttcaacccgattgattgcgcgtctacctaggcctgttcagaagtttttgaagagcaacatagagcgcacccacagcatcaggaggcctggttcagcacgagggaaggatcccatcccaacaacaacgatccatacgtcgtcactgcacttgcttgcttctccaacaaaggagaaggcctag

SEQ ID NO: 15927 - DNA, 522 bp, Zea mays
  Peptide Sequence Number=SeqID_57706
atggacaaatggaggaatttaagttttcagtgcaagtggactgggatcaagtatggtgccatgatcatggaagctcttttggaattgaatgagccgaatggttcagatattgctgcaatcttcggcttcatagagaacaatgataagttgcttatgctatcattggtactatatgcagcaaagatcgataagtcctataggctcccagactcccttgcaacaaggactccagctccaatgaatgcttcagctccaaaacagaaggatccatcaaagccatcgaaggtgtcaaaggccataggattgttttctgcctccagccctgcactagaggctgcgatggcagctgctgtcaaggtggctgacgcggaggcaaaagcacatgatgcgcatgatcagacgatggaggcagaaaggatcttcaagatggccgaggataccgagtctctcctcataattgcagcagagatctatgatcgatgtacttcatcttcttcattgcccacctttatatcaccttaa

SEQ ID NO: 15928 - DNA, 576 bp, Zea mays
  Peptide Sequence Number=SeqID_57707
atgcaggcggcatgcaaccgcaccaagggggcgcaccctttcgactttgacgcgtccaacatggaggcccaggcccacacgtcatgtaaccggcgtgccggttgctacgtgcaagaaactgcaccgccactcgcgccactaccgtgcctcctcgactgcggaaccagtaccgcgactcgaggcaaccctgtgtatgacccaacagtgccagccaggcacatcggtcacgggtcagtcagccgcgggagaaggtgcgacggtcgatatgaccaaaaatgggccgacaggaccgggaaaggggataccccgaaagggatccttctccgcgaaggaaacgggccccgagcccccctactgatcagaggttcgaaggctggcccctcggaggagttcaacagccgcctcagagcgctcgggctccgcgcccattactggtcagaggttcgaaggatgtcccctcggaagggttcaacggccgcctcaggccactcggcctccgcgcccactactgatcaggggttcgtaggctggcccacgaagggttcacagccgcctcagacgcagagcgagggatga

SEQ ID NO: 15929 - DNA, 385 bp, Zea mays
  Peptide Sequence Number=SeqID_57708
atggagccctggtcttctcctctaactccggtggtcgactctccgttcttctcggttgtccctcctgggatttttcctgacatcgttctcatccgcgcgggtggggtgggaacaaaatttgccgccgttcagggaaaaatctcgccaccgccccctgttctttttatatgcgcacacacggtggtcttcctgctcgcctggctgcgcgtccaggagctcccatcgtggcgcagcttcttcccaagccgcgctccacctccgatggcgcttggccgcccagctctcccgctgtccgcccgcctggcgcccagaccatggccgcggctctcctccagctcgccctcaagccccagcccggatcttcccgttcctggccgcgcccctg

SEQ ID NO: 15930 - DNA, 587 bp, Zea mays
  Peptide Sequence Number=SeqID_57709
cttcttcccaagccgcgctccacctccgatggcgcttggccgcccagctctcccgctgtccgcccgcctggcgcccagaccatggccgcggctctcctccagctcgccctcaagccccagcccggatcttcccgttcctggccgcgcccctggtccctgccatggcggccgttccctggtcggagtggatcctcagctcggaggcttcctcgagctcgaccgcccacctccctgctcggtccctgctccagcgcctgttccagctccagtacgccgagttcctcgctgtctgcgccatggagctcgcaccgacgaccgtcagttggtcctcctctagccgcgcgtggtgcgcgctctccctggctcatgtgcccaacgccgtcggctctagtctctcgctcggggtggttccgtcgtcttcctcaggctcgacacgccggtccgacagccgccatcccctgcttggtcatgcgttcaacggccgtcacgacatccccagtctatcgcgtcatgctccggtcgtcgatcggctgaccgtcgtcgtcgtgttctctgcttccctcgtcggtcaacctcgccgcggctaa

SEQ ID NO: 15931 - DNA, 684 bp, Zea mays
  Peptide Sequence Number=SeqID_57710
ctcggcgccaagatctgtggcgccgagctacgaggccgcgtcgccgccacgtcagccctggacgcagagcgtctcttcctctccctcgtctattcagtcacacatcaccagtggcggcggatcctcctcctctctctcaactgtccttgccccgctgcctatagaggtgcatggcagcggagagttggtcgcatcgccgacgatggcacctccgcctctccctcggctgtctgtagaggttcatggcagtggagagtcggtcgcatcaccgacgatggcacctcctcctctccctcggctgttcttgctctgcttcttctaaaggcgcatggcagcggagagtcgtggcaatggttcgaggcgtttgccgacaggaaaggtaaaggcgatgctgcatgtgggctcggggtggctggtctgttctcgatgtcatctatggtggtgtggaagaatctgggtgagggaggcggagacggagaaagagatgagaagttgggcgagaaagtgcaattcagggccctgtttgaagagaaacagagaagccgaggagagattgagaaaaaggtccaccggatcgaccgagcagcgggccaacaggaggccttgggcggcctagtgccccaaaccaggtccatgtgcactggaccgcctgtacgaaggaactttgaggcttcggggttttaa

SEQ ID NO: 15932 - DNA, 651 bp, Zea mays
  Peptide Sequence Number=SeqID_57711
atgtcgcgcgcgttcgacgactactatatcaaatactatggcgtcatcttggcgacagaggtgacacagaggaggaccgacagcaatgaccacttagccatcgccgaggtagcttttgtgctgattgaagaagttacggtgctagagggcctgaaacaaacgaaagagacattgatgtgtttaaattcttttcttatgtctgtcatcgacaaaattggtcaagaaatagatgtggaaggtagggtctgctcagggaggttgagcaggaacggtagcctgtatggaccgcacaacagtggcagccgcgccgacgtcaccacgggccctggcagcgacacgtccccgctcgcaaagagctcctccaggagaggaggcggtgcaggcaccccgcaccctgcagccgcagcgccacacgaccggagccccgccgccgccgcagcctgcccggatcctcaccgcagccccgccgccgccgcctgcccggacccccgctgcagccacgcccggagcccgccgcagccgcaccccgcagcgccgctcacctggaggccggcccgccggagcaccgccgcagcgccgctcgcaccgcccggagcaccgccgcgagcctgcgactacgccgttgtccagccgccgctccgccgtttgtga

SEQ ID NO: 15933 - DNA, 234 bp, Zea mays
  Peptide Sequence Number=SeqID_57712
atggcgcgcgtcctgctgctgcgtgcatgcttgcttttgctgcaggccgattattatcgtgatgcatgcatgcatgcaaatcgcaaggcaaaccaccgcgcaaccaccgtgccgtctctgttgcggaccgacgtatacttgttccagttccagacctacgtgagtggatccgttgcgattctgcagcggcggtttggtttggtgtacccaaagtgcgtggtgcggttgagttga

SEQ ID NO: 15934 - DNA, 429 bp, Zea mays
  Peptide Sequence Number=SeqID_57713
atggcactgacgacagggtcacagggatgggatggattggacttggagggagcgagggacgccgggcgcggggcgcgggccaggggagccgacgccgacgccgagagacgggggagggacgccggagatcaggggctagttagaggtaggcacgcggcacgggatagggtgaaaaggcagcccaaagccagccaaacgctgggcgtggcaatggcatcaggcggcagactggcggaggagaggctgggcgccttccatatggaccgtgggcgccgcgcgccggccgcaggcgggagcgagaagagaaagcccactgcccacctcgtagcggcgctgcgcctggccacctgcacctgcactgcaccagatcaaactcgggactccccattcttcttcgttcggcttcttcccacgctcggctgcagctga

SEQ ID NO: 15935 - DNA, 165 bp, Zea mays
  Peptide Sequence Number=SeqID_57714
atgccctggaaatgggacaggcatacccttgagagtcttttccttagtcgggtctacaagtttgatgtggtactccagggcaaaaaccctatatttggaaagatacagggcttcaaagttgagtcctcaacactgaatttcagacttagaatagaacttaggtga

SEQ ID NO: 15936 - DNA, 2328 bp, Zea mays
  Peptide Sequence Number=SeqID_57715
atggcgtcccaggacgacgggtggggaggcggcgaggacggcagctcgctcttcgagggcatggtcctcttcgcgccagaacccgccgccgccgaggactcggtccctacccccgcccctgtccctgagctgacatccgccgctcgccccgacgccgacgcggcttcgtccgcgccgccgccgctcgacgaggacctcttttccgacctcaccctcctcgctccgcaggagccgctctcgctcgagcagccgcccccacccccgcaaggcgaggatcggagccacgcggcgcttgctcccgcgccgccagcagccgctgcggagctctcccggcagccgtcctcctcatcgctacgcaagaagaagcgggccgtgcgcatcgggtacggccgcttgccgcagcccgcgccgccttcccctcctgcctccgcagctgctgccgcgatctccgctagcagtatttccttcctggacgcttcgccgcatgcggccgtcactcgcatcctcgaccagctccctgatcggcaagtcgatgtctatgccaacggctacgaggcacacgcggaggcggtggccgtggataccagttcaccgcgtgtagaggcggtggcaactgaggacgatggtggtgggaaagaggatgaagacgctgcagttgtagccttgggggtcgaggagaggctggctctcctcagatcccaaatctccagcaagctcgactccatccagcagacggctgctgccgtggctgccaagaggaggcttttggctggacggcggaggaaggtggcggaggaggcggcctccgtggcatccgggcataaggatttggagagggagctggaggaggcctgcgaggccgaggactttgagagggcagagaggatcagcgactccctcgccacgctcgagaaggagaaggatcggctgtcgacggcgctgcgtggtgctgagcttgactatgattcagtggattcggagttgcaggaggtgcttgagtctcgcattgctgcagaggaggaagctgctgccctcatggagcaatttgcgaaggatgccactgaacacgctaattcagcgagcgagcacgcacaagaattatcctcgaaagaaatagaagagtggcaaacttcattggagttactagaaacaaagaagttagaaatggaagttgaaacacggttggttttagaagcacgttctgggttggaagggtcaatagagcatttggttgaagaagacaaactggagaaggatatgcttagtaaaaaaggagaaatcctcactaaggagttagctgagcttctagagttggtgaggttgaaagaagcagagatagctgaaaacaatgcccggatccatgaagttcaagaaagaatcagtgcagtggtctccagattccatggttctcagtcagatattgacttgaagctcagttccttgaaggaagaccaaagtaaagtggatctagagactgaagcacttttgttgaagaagaatgaaattgataagttcattactttaacagatcaaaaggattcagagttgagggacataattggtgcttgttcctctgaagcaaaagcttgtcgacaatcagttgaaataagaagaaagcttgcatcatcgatcttgaagtcaagagaggatagaattgggttgctaaaaatggaggaggaaattttgcaagtcattcaaatgcaaaggcaaaaaattaccgatgcaagaagtactcttcaggaggtatcttcaaggcgaacaagcatacagcaagaaacggaagcactgaagcagaagttgagtttcattgacaaaagaggccctgaactagaggctgaaaagaaagttgctgccgcctcaagaaactttaaggaagcaggaaggatagctgcagaggcaaaagctcttaactccgaaaaggacgagctgtatggtaagttggagaaagccgctactgatctagagacaatagaaaaggatattgtagcaaccacgaacaagatacaggaatgcgaagggcttattgaactcaaaggaagagagtcagcgttgacaagttacagaagactacggttagactgtgctgctgctagagcagaactgactgctgcagctgaaacagatgataacgaagaagctgagatactacgtaaggaggctgaagctgcagagtctaaagcaatggaactcaaaacatgctatgacctccaggtggtggatgatgagttcgtgtttcagcctgtagtccctatagcattcataacgaattcaacagggcagcacttggcagaaattgcgtcttcacttggcctatctcctcagaaatga

SEQ ID NO: 15937 - DNA, 1629 bp, Zea mays
  Peptide Sequence Number=SeqID_57716
atggccggcagcgtcagcaacggcagcgggaagagcctggcgcgctggctgcgggagaacgggttcgacgacgacgccgtggcgcgcatgtccaggcggtgcaggaacctgcacagcctcgacgccggcgaggccccgggcgtgtgggactacctcctgaccggcgtcaagatggagcggcggaagctgcggcacgtggtggccaagtgccccaagctgctcaccctgtccgtggacggcaagctcgcgcccacggtgcagtgcctcgccacgctgcaggccaggcccggggaggtggcgcaggccatcgccaagttcccccagatactgttccacagcgtcgaggagaagctctgcccgctcctcgccttcttccagacgctcggcgtctccgagaggcagctcgccaagctgctcatggtcaacccgcgcctcatcagctacagcatcgaggccaagttctcgcagaccgtcggcttcctcgccggcctcggcgtcgacagggaaggcatgatcggcaagatcctcaccaaggagccgtatatcatggggtacagcgtcgacaagcggttgcgccccactgccgagttcctcaagtcggaagtcgggttacaggggccagatctccagagggtggtcatgaccttccccgatatactgtcgcgagacgtggataagatcctgcggcccaatctggcgttcctacagagccgcggattcagcagggatcaggtcacggcactggtagctggttaccctcctgttctcatcaagagcatcaaacattgcctggagccaaggatcaagttcctggtcgaagagatggggcgggacatgggcgaggtggtaggttacccccagttctttcgccatggcctcaagaggagcctggagtaccgccacaaggtgcttaagcagatgaactcgagctgcagcctcagcgagatgctagactgtaaccacaagaacaaccaggttcccggatcgatgtggtcgaagaacggggacgtgccgccagctcctcccctgttggtcgccgccccttcccctccacctccgaccaactcaggcgccgccgcccctgcaggtcgcgtcctagccgccgcctctgtcttctctcttcttccctctcttctctgcttgcccgcggagccgtgcgcccctgaagccgcgctgccagccgaccccgcgcactcggccaggccccgcgcgaccccgccccgacatccgcacgctccagcgccctgcgctgccaccgcaccagcgcccttccgcgcgctgcccgagcccacgcgcgccaggaagccgacgtcgagccgccatctcgcccaggccggacccgagcgcctgggccctgctgcgccgcgacgcccgcgcgccccgaccgtcgtgcctaggtgccagcagagccgccccagcccacgccgaccgaccgaagccccgacgcgccaggagctcaccccgcgcgacaaccgcgccctgcccctgcgcgttcgacaccgacaccgcgccgaggaccgagctcgacacccgcaggacccgacgcgcccttcctgctcgcgtccgtcgtccccgcgccgtccaggagcacccgtccggaggacccgcgcccctgctgttccgcgctga

SEQ ID NO: 15938 - DNA, 360 bp, Zea mays
  Peptide Sequence Number=SeqID_57717
atggatgaagtgcaaatcgacaagaagaatcaggaaaagaaaaggattggaaaagagttggctgtgtacaaccaactgctgctcagtctgggtgcaccggacagtgtccggtgcgccaggctgggctctaacgaactggccactctcgggaattcatcggcggcgtacgactataattcaccggactgtctggtggtgcaccggactgtccggatagttgttaatgtcgttggtgatccaaccatgtttggtgaatggaaacaagagatggagctaattgctgggcgaatcaagaatagtgacaacatgacggataagtggcatgtttacatgaccaaggatgggcagatctatctctga

SEQ ID NO: 15939 - DNA, 402 bp, Zea mays
  Peptide Sequence Number=SeqID_57718
atggtacagagatttctctgctggtctttcttcctcgcggggattccattaaacacttgtgcctggcatatcaccggtcaccagcaaagctacagaatctggcacacgatcgagccgccacaacagcggaccatccaaacagttcaagccaatggccgccagagtatcagctacaacattacaaaatctgggtacataaaggttttaatctcctccatcagaactcatagcacagacctatcaacacttgagttagacagcgcttcggctagaacagctgcatcagtctccaaaataacatttctgattcccagaacagctgcatactacaagagaaaatgtagagctgacagcagagcatatgcagaacctgctcctgctgctacaactataccaatatga

SEQ ID NO: 15940 - DNA, 748 bp, Zea mays
  Peptide Sequence Number=SeqID_57719
ccgtccacgcgatgatcaacgggcgcgaccaaatcttcacccctcgaccaaccgagacggcggcaccgccgcttctctccccgccgagcgccggtgagatcgccaatcagcgttccccgggcgctaagcatcaaattaaatcgagatttaccatgcgggaggcgggacgaacacgagggatggatttcttaccgagggaatggagtgcagaagctcggccacggcgaaggcggatccgcggcagagcgcgggtcgacggcgaggaattgctgtggcaccgtggcctctcgcttcgattgcggccacggatggcacccccaagtgccaacgacccaccccggcccttcaccgaggtcagacagcccacggtgacgggattcgcaggcggaggaccggatttcactccgcgctcctatcccccgacgtatcacacacgacggcctgggttgttcaagagcgccgagcacctatttgtaccctgcaagacgcccgagtccgcgtccgaggaggtagggaggtcgttgagccgccccggccagctccgagatctcgcggcggccgttgcgcgggttgttgcgatccgcgcggtgaaggagatgacccagacaaccggggcccgagcgtcagagagctgtggcgcgcggagggactgcctacagggcccgcctgtcggcacgcgtagaacgcgcgaagtgggccgcgcgggagagaaggaggagatgggccagaatgggtacagtcggcccag

SEQ ID NO: 15941 - DNA, 291 bp, Zea mays
  Peptide Sequence Number=SeqID_57720
atgacccactcggatgattttcgcctcggctgtgttaacagaactctgcccaagaatcgtcgaccaccgcgcacatcacctgttcgacgaaacgctccctcggacagcatatgtgttcgaccggtctacaagggcgacgggtcagccgccagccgccgcgaggttcgtgctgatccgagagctgcacccgctgggcacggagatgacacgggctctgtcgactgccaactgccatgccgccatggagatgacacacggacggacgagtggtctgtgtgccgacggatcaac

SEQ ID NO: 15942 - DNA, 393 bp, Zea mays
  Peptide Sequence Number=SeqID_57721
atgggacatgttaactccgagtttgtctcggaatgccccaactatctcctctctaactctatcgactctaactatatcgatggcgatcgatgccccgggcgccataggaagctccgcctcgcccgaccccagggctcgggctcaacctcgatgctggacgacggactccgcctcgcccgacccagggctcggacacagcctcggcctcggaagacggtctctgcctcgctcgacccagggctcggactcaacctcgacctcggaagatggactccgcctcgcccgacccaagggctcggactcaacctcgacctcggaggagcctccgcctcgcccgacccaggggctcggaccgaccacgtcacaggggggccatcattaccctacccctag

SEQ ID NO: 15943 - DNA, 1335 bp, Zea mays
  Peptide Sequence Number=SeqID_57722
atgcagacaacacgcatatttgctccttggagaaatcaagttaaccctggagacatgatctattggcgtgaaattgcccgtccgcaaattcatggtcatgatctcaactgtgtgacattcattcagggtagtgggaaccatcgttttgttagtggtgctgatgaaaaggtctctagagtctttgaagctcccttatcatttttgaagaccctacaacaagcaactctgttgaaacctgacatctccgaggattttgacaatgttcaagtccttggagcaaatatgtctgctcttgggctttcacagaaacccatatatacacatggtcagtatctctcacatgacccatctgagtcaaggaatcctcaatcagtaattctaacgatggtccagattctatggagacaattcctgatgcagtgcctactgtattcactgagcctcctgtggaggaccaacttgcatggaatactctatgggcctgaatcgcacaaactatatggtcatggaaacgagctcttctctatatgctgtgattatgaagggaagcttgttgcttcatcttgcaaggctcaatcagcagcagttgcagagatctggctctgggaggttggaacatggaaagctgttgcccgcttgcaatctcacagtctaacagtgacacaaatggagttctctcgtaataatgcgtttcttttaagtgtttcgcgggatcgccatttgtctatcttttcaatcaggaaaactgaaggaggagcagagcatcgtctggttgcgaagctcgaagcacacaaaagaattatatgggcatgctcatggaaccccttcggctatgaatttgcaactggatcaagggacaagagtgtcaagatatgcgtaactgcattagcatggatgggccgtgaccgtgcttctaatgctggtatcgtcgctgctggcatggacaacggattgatcgagctctggagcgtttcaggtggaagagcttcttcaggaacccagctcagcgtggcatgcgtgcttcgatttgaccctctcttgtgtcacgtgtcaactgttcaccgattacggtggcggtgctcaaccgatgagaaatcgacacttgagctcgcgtcttgtggagctgatcacactgtaagggtgtttgaggtttttattgatatcggacaccgttgggttgtaaaactagtcctgctagccactaggacgcagcaacaactgagcagccaagagatcgacaaagctgaagaaccaacttcgaattcacatgaatcaacaataggtatgttccgctgttctcgggccatttccatcatcagtataaaaaatagctaa

SEQ ID NO: 15944 - DNA, 504 bp, Zea mays
  Peptide Sequence Number=SeqID_57723
atggtggtggagacccacgagaagaggcccatgacgcccttggagagtaggatcgtgacggccagcagctcgggtttcctcgatggcgccgaaatatcgtggtggtgtgggagtgtgacggctctccctcccctgagcatgcttcgccttggtgtcgggaatggaacgacagacgaaagggttcttatccacgcggggcgggcggatgaagcggatgtccgactggcggcggcgggtgaaccggagtccgttgtaggcggcgggctggggagctgcgtacctacggcgcgttcgtgggatgggaacgcgggtgtgggggtggcggcagcgggtcgagcggagtctgttgcaggcagcgaccggggtggtggctgtgggccttcggttgatggggggagcagcgtggctggggcagttgttgcgtgcggggtatgccgtgcaattgcgtggaggaaaggcggaggcacaaatggtctacactatttactacttaatagatactag

SEQ ID NO: 15945 - DNA, 255 bp, Zea mays
  Peptide Sequence Number=SeqID_57724
atgtcgcccatgtgcacgacgagggggtacgctgggatcgcggctgtcgcggcggggatggcggcgggcgggcgggcggttcgcggagatggagccacgacgggtgattcgcgggtggaggcgcggggggcgattcgcgggtggaggcgggggaggcgcgggattcgtggcgggggaggcgcgagcggcaggttggattcgcaggcgggggcagtctacactgcccccttaatagttagtagagataatagatag

SEQ ID NO: 15946 - DNA, 108 bp, Zea mays
  Peptide Sequence Number=SeqID_57725
atggcgttcggacaggggattcctgcattgctcttcctagaaactgtagcgggagaagaacaggtggtccaggaggagccttacaatgaagagtacgagctcatctag

SEQ ID NO: 15947 - DNA, 591 bp, Zea mays
  Peptide Sequence Number=SeqID_57726
atgggaggaggcgtctctgctgatccaggccggcgcgagcctagcgctcgcggtcagaggaaccaatcacgcggtatatttcaaggagtggtcaacgaagacgacagaagtggccatacctgcagcggtactgcgatggagccaatcccctgcgaggggcagagtcgaggtgacgccaagctccggttatcgattccgaccacgcccagccatgcaccaacttgcgtgacccgcaccggaggcgctacggctcccccaacccggtctttgaccacggcgcggtcccagcgaccctcttcctcactttcgctctttactggcttccgtgggagactccgggaggacgaatgggtgacgggggtgcccgaccaaggatataacctagggaggaagaaggggggaattcggcaacccatcgggtccagtagtcgtgaagattacgcgagagaggccccaaccatgcgaatccgtcacagacggcgtcaaactcggagtccgttgcgcgagcagcaagatgacaatagggggccaccagtcggcgtgcggtcacatgggtccagggagcaaccggccagtgagctcgtgaattag

SEQ ID NO: 15948 - DNA, 357 bp, Zea mays
  Peptide Sequence Number=SeqID_57727
atgacggcgaggctgtgcctggcggtggcagagcacggtcggggacggtggccgagctctgctgggggtggattcgagcgcaggaggcctggcgacgggggagctccggcgagcttgaagaacgggcgcgcgcagctcgggaagactgcaccatcacaaagtagtaagcaaatgtgttgccagcaagcctgcaccaggaaggttgctacttttaaaactgctacattttctgaagataactacaaactgtcgactttgagtgttcagttaggttcaaagcctcttgtacctccttttcacgcgcttcgtttagtttcggtgaatttcgggctcgcctggagccctggagacgtctga

SEQ ID NO: 15949 - DNA, 141 bp, Zea mays
  Peptide Sequence Number=SeqID_57728
atggcgtcaggtcgtccggcggggctcagcccctcaggcctcagcacagcgtcgccgaaaaagatacgccctggcgcagcaagagctcaccacttcgcctccaactgctcccgtttggtgacaaatgccatagaagtatag

SEQ ID NO: 15950 - DNA, 441 bp, Zea mays
  Peptide Sequence Number=SeqID_57729
atgcactgcatgcgagatcggactagaagcggtttcttcttcctctactcagggaaccgccatggggaaaaggagcgcgagcagggggtcgccgtctggggaggcctaggcgcctggcaggcttgccccacgctgctggtcgggctgctatgctgcccgcgctgccgcgttcgtgctgaggtgtcgggccgtcgcgccaggccaccgcgtcgtgccgtgcctggtgaagaccacagccgccggcgggcagggccaggggctggccgcgaggaatggtgtccaacgaggaagaggagggggaatggtaaccgtgtggaggggcgtctgctgtgtgtgatttggatgtgggaggagacacgcgtgcaaacgggcaacaatttgagaagagaagagactgacacgcgggcgtacgcccaggatgacagtgagaggaacgagtga

SEQ ID NO: 15951 - DNA, 216 bp, Zea mays
  Peptide Sequence Number=SeqID_57730
atggaggtcgcgacgactgtcgtcgaatctgaggtcgagtctagctgtggccagaggatccccgagattgtcgcgctcgcgatggcgagagagcgtagcatcgccgccgatgtcctcgactatttcaaggtctacagccacaccaagcccctcctcatgtggtccaacaccgacgctgatgagttcatcgtcttcaatccggtctatgggccctag

SEQ ID NO: 15952 - DNA, 450 bp, Zea mays
  Peptide Sequence Number=SeqID_57731
atgacggccacatgggcacaaaacaagaacctcgccacgccactgccagattcatcagcggctcaaggatctttctccctgttgcagtcaaaacaagacgcagggaaatgcgttgcctcatatttgttacaaaagaatggatccctcgcaagtacgataagcatcgtccgcaaaaagcgagactacgtaaaaaagccgcataatcagattcagcgcacacgcaggcacgccacacacacagacacatctctgccaccgccaagagatacggatcaaatcaaaactacggggcctttgtgcttgtgcaccggagagggggaaaagatcacgacgatcgtcctcgattctccgcgacgccggcagattatattcgtttcaaggccacgcaaggaaagcagctcctcctctggccaaaaaacaagtgccgacgagataaagcctccaccttga

SEQ ID NO: 15953 - DNA, 1038 bp, Zea mays
  Peptide Sequence Number=SeqID_57732
atggcgaaggagtgcccgcccgccgagctctggctcccggacgagttcctggacgacgacttcttctccgaggaggagaaggcggcggtcgcggccaagagcgagagcgacgaggaggaagggatggacggcctctcgcgccgcgcggccgggctcgtcgtcgggggtggaggggacggttcccctgcaaaggcgcaagtgttagccggctcgccgcagtcgattctgtgcggcctgcatgcttccggggaggacagccccaacggcgcggcgtcgcaggtcagctcgccgccgtcgtcgccgctggagaagaccccggccgaccactgggacctgctcaaagaggcggccggccaggtggcccgcatgcgcacaactagcggcatcctggtggcaacgaacgcgggcgcacatcaaagacaccccgtcccgccgctggcgcagaagctctctgcgccggccgaggctccgaaggccgcgggtgccaacctccctcaggctcagccgaagaactcgatggaacatcgccggattcagattgctcgttttaatgcgctgaagcagcagcagctcctgaagcacatgcgggagcgggagctcgccgtcgctacggcggcggcgtggggcacgagcgttgccgggtctcatcgtgccgccgggtaccgtgcgccggcgccccatgtcctgagctcgtccgcgtggcccaccctccagaagcagcagcagcagcagcagcaaagggcggcgtccccggcgggcatgcgcgccgtcttcgtcgcccctcctggcgccaagcgcgagtgcgccggcaccggcgtgttcatcccccgccaggccggcgcccccgcggagcccaagaaaaggccagcagcgtgcgcccctgtccttctcccggcgcgcgtcgtgcaggcgctcaacctcaacgtcgaggacctcggggcccgtcccatctacccgggcggcttcgtcctcgaccacggtaattaccccgagtacctggtcattaatgtggctttgtccggaccgacgaatggatga

SEQ ID NO: 15954 - DNA, 321 bp, Zea mays
  Peptide Sequence Number=SeqID_57733
atgccaaagcaaaccggagtgaaagcgaacggaaatctagcggacgacgagaccgcgattaggaggaattggaccgtccgcaacggcgacccgctcgtgcacctccatatccggcagccggcaccacggccacggccgcgaggaggcgaagaacgtcgtctggtcccgcaccggatcgctaagctgtcatgggcgtccgatcccgaggtgttctacatgctcaacgccgtggcccggcagaaagagctgtgcgtggcgatcaacgtgtgctggggtgaccagagggagaagatctgcaagctcatgaagtactgctactga

SEQ ID NO: 15955 - DNA, 234 bp, Zea mays
  Peptide Sequence Number=SeqID_57734
atgtcttgtccatggagagtttttcatgtagaagataatcccgagcggtcgaagatcaccacaatagcatcctcgtgcggacgcatgactgattgcgatgtcgagaagctcctttgtgatgcgggggactttgccgcccagcttgtgcgaaagggtctcactggtggtcccaaagatgaatgcactaacgacatcagcatcagcgatgttgggaagctcgttgcattatcatga

SEQ ID NO: 15956 - DNA, 180 bp, Zea mays
  Peptide Sequence Number=SeqID_57735
atggcgtcaaggatagccatggctaatgatgagcctcgtgggctctcgctcacggctacgaacatcaagaatgtttcgagcgagagcgagagagggcatgtgaaccccgctctggaaacacagaggatcgagttggaagtctatgagtgcctccgtgatggtgtcgaggttgctatctag

SEQ ID NO: 15957 - DNA, 1350 bp, Zea mays
  Peptide Sequence Number=SeqID_57736
atggaggggtcgacggcgaccgagggtcatgtggtcgggatcccggtgagcacaagggcttatggcatcgaggaacccgacttctcggtagaagagacgacgcccgaccgtggagagttcccgagctccttccagtactacagccatgatgctgccagttcgacgacgaccgccgccgatcggccgacgagcaatcaacaagccactaggaagggagacaagatcgtccggggcatcaaagaacatgtgaccctgggaccgaagctctccgacacggtgaaggggaagctctcgctgggcgcgaagatcctccgggccggcggcagcgtggagaagctgttccggcagtggttctcggcggacaaggacgagaagctgctgcgggcgtcgcagtgccacctgtggacgacggcggggcccatcgccggcgtgctgttcgtgtcgacggcgcgggtggccttccgcagcgaccggtcgctgtcgctggcggtgtccaccccgcgcggcgactgcagcttccgcgcgccgtacaaggtggccgtcccgctgcggaaggtcggggcggtgcggcccagcgagaacaggcaccggccggagcagaggtacgtgcggctcgccaccaccgacggcttcgagttctggttcatgggcttcgtcagctacaacaagtcgctgcagcacctggagcgggccgttgcgtgcgcgcggcaggcgcgctgcaacatgtcgttgtacatctgggcgatcggttgccctggtaagcaggttggtcatagactcacaggcgaccggtcaggcatgtggtcttttggggttgggcaagaaattcaccatgaatttgaaatagagagtgctggtgtagtgtctggtacaccaaagggcggcctcttccctgcactggcggacgatcgaagtggtagaggggaggctccagaacgtgcgcgcgaagctgcagcggaggaggacatggaaagcgtcctcaagatcgtcgccgcagattgcacacgaagcgttcagcacgataccatttccggtggtgcttgtcctcgtttggagacggtcgtggccggcaagccaggcgaagaaccggacgcgcgagggtgcccagtttcgccaagcgaacaggtgctccgaagccgcgacacccgcagcgcctgcacaaaaggatatggtacagcagagccaaggccgcaggaaggcgccgatgccggcggtcatgatggtgtgcacactggcgtcgacgtcggtgcaatgagacagcagggcggggaagcgagtggcgaagtcgccatcgccacgccactcgtcgaaccagaaggcagtggccctgccatccacgacgtcacatga

SEQ ID NO: 15958 - DNA, 654 bp, Zea mays
  Peptide Sequence Number=SeqID_57737
atggctgcgcagatcgacgacgtgtgttggggctgcgcagatccggggcggagctcgctgcggtatttcatcgagcacttggcgagcgtcgcgggtatgggtttggcactgggagtggtggccggcatggaggggagcaaggacgagatggaggtcgaagatggcagcttgacgatgacggcgcagcccgtcgagccctgggaccaccatggtgttggagggagtccgatggagatcaacagggcacagccctggcgcctgcatcgggtcacgacatggggaagggctagagctggactgagcgtggttgggaaggagatggggaaaaaaacaggggcgtcggcgctaggggctggacgccgagcagagggacaacggcgcgcggtgctgggcgagcccaccacggcgcagcggatcggaggcagaggatgcagccatgcgcagggaggagcagaggatgggcgagctcggaccttcctagtggccggcgagctgaagaagatgaagctagggcggtacatggagtccagggcgagcacgtctggggtgctcggcatggaggcaaaggaagggcggtcggcattggggaggcagaagatggcggctggtgggaatcacctgagggagggggcggcgtggaaggatctagggtga

SEQ ID NO: 15959 - DNA, 477 bp, Zea mays
  Peptide Sequence Number=SeqID_57738
atggcgcacccctcggcgtggcccccggcccccctcacggtgtggctcccccgccccccggtgcagcggcccctgctccccccccccctcgcgcgcggctccctcgcccaccccccccccacccccccggcgcggcgtccccggctcccggtggcgcggccccagccccctgcgcgtggtcccggccccctgcgcgcggccctcggctcccggcggcgcggccccagccccaacccccggcggcgcggctccctggcccctcggcgcggccttggccccctcgcgtgcggcccctcggtcccggtgcgcgcggccctgcacggcctcgcgctttcccgtttacccaatgcgttctcgcgtgcgcagccccacgcgcgcggtggtgacgaggatgatggttatgattatgcttatggtactggtgaagatgaattcgtggaggacttccaggagtttcaagagtacgacgagttctag

SEQ ID NO: 15960 - DNA, 432 bp, Zea mays
  Peptide Sequence Number=SeqID_57739
atggtgttcgcgggcagggaggacgtcgacttcatcctcaacgagaagatgaaggggaagaacaagatggactacgaggcacatacccattctctagttcagctctggacgctagtggctgacttgaagaatactattgaagaaacaatagcaatatgtgaggaacttcaaaaacgatgtgcatctctacaagaggctctaaagatagcggagggcgaaaaatggatgccaggacactaccggaatccggctctttgccgagtgctcgacgctttgatgagtgttttctatcgatcactcgacaaagttacactctctgtaacgactgcgtttaccgagagcaggacttggcaaatactactttgccgagtgccaaacactcggcaaaagtcggatatcgataaagggccatcagcagccgtctatagttga

SEQ ID NO: 15961 - DNA, 333 bp, Zea mays
  Peptide Sequence Number=SeqID_57740
atggccgtcgaggtctacgtccctatgtttgcgggtctccagcaccacctcttcggcgccgtcccaacaatgttcgtccaggggtacacacccgaggtgcttgccatcacgaggagttccccatcacctggctcccctcctcagtcgctcaccatacggaccagcaccgccgcttctagatgtggcggctttgacagctcttgccccatctcatcggtggagatgctggagcgcattccgcatgaaccccgcagagccatggcggaggcgcttgccatcgccaccgaccacaaattcccctgccctactgtcacacccggttttagaaggtaa

SEQ ID NO: 15962 - DNA, 609 bp, Zea mays
  Peptide Sequence Number=SeqID_57741
atggaagcagacctcgagagaggcctgattgtgtatgaagagccgggtccagagccgacggacctgctctccagcgcgtggtgcagctcggcagctatccgagtgcttcacgcgggacccaaggacgagtgctccatggcgctggtggagcacccggtcatggcgcttggcagcggcaggagcgacgtgttggcgaagagtggtcgtagtcgtagcttggtggctgacagcagcggtttcagcacggcccagtggaaatatgatgatctgaagtcgtggctatggctgcagaaggcaattcatcccgaactggactacgatctctgcctcaagaagaaatggctcccgcgcaagatggctgcgtggaacgggacctcgctcaagaaatgggtcaaggagcggaagcagaggcgcaaggaggaggcgcgcctgcagcgggccgaggtccacgcggccgtgtccgtggccggcgtcgcggccgcgctggccgccgtcgccgcggagaacgctgccgccgcgccgcgccgcgcgcccgggacgaggggagacggcggtgggttcctctgctgctctcgtcgcggatcatgcgccaaggctatcctacgatag

SEQ ID NO: 15963 - DNA, 231 bp, Zea mays
  Peptide Sequence Number=SeqID_57742
atgggaggaggcaagctccagccggacttggggaaggagcgcccaagcgcccaaggagccaggaagggagcgccgaggaagctggagccgacctccatgcctgttgccgtggggagaagaagacagggaagaaagaaggtggcggctgggaaaatggagggagattaccaagttagggatttgtacgagagtggatatgagaaggaggcaaccatgagatcaaatcgataa

SEQ ID NO: 15964 - DNA, 867 bp, Zea mays
  Peptide Sequence Number=SeqID_57743
atggctgcggggtcgacgacgtcgcgacggggctgctgctgcgcgaggacgacgaccagaggtggaggtcgagcaagatgcaggggcttgcctaccgccttgctacgcggaggagatgaagcgggggaaaacaatcgttggccttggagaagaaattcctctgcgcaaggaacagagaggagggggctggagataggagcaggggtcggacgccctatatgggaggagcagaggtgccatgggagtgggagccgtgcatccatggaggccggcgttggggaagaagaccgactgttcgagctcgggccaggggaggtcactgcagccgggcgcttggaggaaaggagcacgccacggcaagagcagggaaggggaggctggccatcggccttggacacggccagggaaggggacgccatggaggccctactcctgcgtgctggggagaagaagcgaggagggagatgcaaggaacccggcgtagggagctcggcgttcggaagcagccaacgtcgaggggaaaagctcggcctcatgggaagggaggctgtcggcggatggagcaggggccaacgacctcacgtggtcgagcaggacatcaaaggaagagggagaggagaaatcccgctgctggcgaggtgcgctaggagggcggccatgggaggaggcaagctccagccggacttggggaaggagcgccgagcgccaaggagccaggaagggagtgccgaggaagctggagccgacctccatgcctgttgccgtggggagaagaagacagggaagaaagaaggtggcggctgggaaaatggaggggtgggagtgcaaaaatgcatccacttgctaggagagggctcctatttatag

SEQ ID NO: 15965 - DNA, 453 bp, Zea mays
  Peptide Sequence Number=SeqID_57744
atggaggcccaggcccactcgtcatgcaaccggcgcgccgaatgcttcgtgcatgcaactgcaccgccacttgcgccaccaccgcgcctcctcgactgcggaaccaataccgcgactcgaggcgacctagcgcacgacccagcagcgccagcctggcgcggcgggaccgggaaagggggatacccgaaaaggatccttcccgtgaaggaaccaaggctccgagcctccctactgatcagaggttcgaaggctggccccccggaagggttcgatagccgcctcagatcgcgtgggccctacacccactactggtcagaggttcgaaggccggcccctcggaagggttccacggccgcctcaggctactcgggctccgtgcccattactgatcaggggttcgaaggctggcccccaaagggttcacagccgcctcagacgccgagcgagggatga

SEQ ID NO: 15966 - DNA, 303 bp, Zea mays
  Peptide Sequence Number=SeqID_57745
atggccggccatcaaaacgccattgatggccatcaatggagcttcataatggggaggaagaaggggaaacggagggagaaggggtggcggtttccggtgtggcgtggtcggacggatgcggcagggggtgcggacggctcagggtcggcgcgggtgcgggcggcgcgcaggcgcggtcgacccggggcgcgtggtgtgggagcggccaggcggcggcggccagaggatgaggagggagggagccgtgggtggggcctgcccatcagtgagaggaggggagggggcgtgcggccggttgcctag

SEQ ID NO: 15967 - DNA, 264 bp, Zea mays
  Peptide Sequence Number=SeqID_57746
atggagcagacggtcggcagcgcagggaggcgcgagccgaccggagggagcggtcgagcggtggggatgagctccaacagcgctggcgcagtcgacagtggctctagggatggcggcaggtaccttcggacttgggctaaaaccatacacgatgtgaaaagcatggttgagatgaaggctgatgttgctccgaagctacgcgcaggggagctttggctcaatggcagaaaaaggaaccgacttaaaggggaaaaggttatctag

SEQ ID NO: 15968 - DNA, 204 bp, Zea mays
  Peptide Sequence Number=SeqID_57747
atgaacagtacccccgtactgttcacgccgattgatactcgcttgtgcatcacgcttgttctcataccttctgtcaagccgaagagggtaaaagctgaacgtcagagactagctagattacttcacccgctgaagaagttgcacgagtgcttggacacgcagttgaatttcagctccgcctaccatcctcagactgatgggtag

SEQ ID NO: 15969 - DNA, 186 bp, Zea mays
  Peptide Sequence Number=SeqID_57748
atgtggggccctcacggccgcgacactgtccgagagagggctgaccgagcattggcgcagatgatgaatgatgaagaagtcgaggacttcggcgaccttgaaagctcgatgacccggacaggggcgtggagacgggggctgaagggcactcagcgcctcaagtcggccctggcgaagactctgtag

SEQ ID NO: 15970 - DNA, 621 bp, Zea mays
  Peptide Sequence Number=SeqID_57749
atgaagcagtcgcgcttcgacttcaccaaggtggacgccgcgcttctccccaccgtcatcctcgtcggccgccccaacgtcggcaagtcagccctcttcaacagatttatacggaggagggaggcgttggtgtacaatactcctggggaccatgtcactcgtgacatccgtgaaggagttgccaagcttggggatctccgtttccgtgtgcttgactcagctggacttgagactgcagcaacatctgggagcattctcgctcggacagcagacatgacagggaatgtattggctaggtctcaatttgccattttcttgattgatgtgagggatggtcttcagccgctggatcttgaggttgggcaatggctgcgcaagcatgcatctggtatacatacgcttgttgcaatgaacaagtccgagtcacttgatgagcatggatttctgactgctgctgctggagaagcacacaagttggggtttggtgaccctgttgcaatatccgcagagacaggcctggggatggcagaactctatgagatactcaggccattgtttgaagaatacatgtttcagcttcgaaatactccaaacaagtttgcgcatattatgctcaattag

SEQ ID NO: 15971 - DNA, 330 bp, Zea mays
  Peptide Sequence Number=SeqID_57750
atggatagggagtcacacgatgggttgcttgcaggggtggatggtgatgacaacaatgttgattatgacgaggactacgacgacgatgatggtgatgatgacattgatgacaatgatttcgacgatgacgacgacgacgatgacaacgatgatgattatatgatgatgatgatgatgatgaggggttgtcaatttgtggagattaactcaacttgtagcttcagcaaaggcaaagtagggcaaaacttggatgagttgagaagctttggattgagagatttcagaaaaggtgcatttggagctgagtttgagcctagaacaggaatttga

SEQ ID NO: 15972 - DNA, 165 bp, Zea mays
  Peptide Sequence Number=SeqID_57751
atgtccggtgcacaccagactgttcggtgcttaatgcaaagcttacaaggttcaacacaagtgaacaagtgtgatggtccaaagactagaatatctatagataatggacatcacaactcaagggaggcacatacaaggatgttgagccccgacatgtgggcctag

SEQ ID NO: 15973 - DNA, 945 bp, Zea mays
  Peptide Sequence Number=SeqID_57752
atgcctccgccctcgccctcccgccaatctcgtagcagcgcccgccccatccccgcagccgtcaccagcgcgtacgtagaagctgaacaccggcaacgtgttcgcggcgctcgagtccctcaagaagaagaagaagggcggcaaaggcaaggcggccgggaggaggacggcgagggggccgcgcagcggcaagagccaccgcagaagaagcagttctgggctcccgcgccacttaccaccaagtcctgggcggacgtcgaggacgacgaccactacttcgccaccaccgcgtcgccacgccccgtctggggcactgccggtgagcccgccaaggaagaggacgacgtcgatgatgtagtgcgcgccgcccttcaggaggtagcaaccttgggcaacaaagttgagaaagagatggaggacatggccttcttctttgctgaattggcgctgatgcaatacggatacggcttggtgacacgtctgccttctctggttgctgcttctgctgtctacgcggtcaggctcactgtcaagagagctccctctggaccgacgccctcaagcaccacactgttgtgtaccaggtgctcggaggagcgacccgcgaagggcagcggcagctggtcttcacctattggttcagtgccggctggagggcagccaagagcagacaatggatccactacaattgaaattgctctgaagattgcatttcgtaaattttctcttgatcatggaattatggccagtagtgaaaatagtacaagaaatgaaagaaacattaagttgaaggtatttgttctaaatggttcctatcatggtgatactctggatgctatggaagctcaagctccatcgtcttatacatctttttcttcagtagccatgtggttctctgtgccaactgcggtcttttttgtaccagccttctctttggtagcctaa

SEQ ID NO: 15974 - DNA, 123 bp, Zea mays
  Peptide Sequence Number=SeqID_57753
atggccaaaaagctagagattctaggcctgtggccgcgctggactgctggttcacgccgaggccgtgaggagagagggctgggcgtggacctcttcacggtgaacacgctcatcaacttctaa

SEQ ID NO: 15975 - DNA, 1575 bp, Zea mays
  Peptide Sequence Number=SeqID_57754
atggcgacgggcggcgagacgcggcgggcgcgcaagcagatcaccgtgctgcaggcgctcgacgtggccaggacgcaggtgtaccacttcaccaccatcgttatcgccgggatgggcttcttcaccgacgcctacgacctcttctccatctccctcatcaccgacctcctcggccgcatctactacgctgacggcaagctgccggaagacgccgctgttgcggtatgtagcattgcgctggtgggcaccgtgctggggcaggttttcttcggctggctcggcgacaggatggggcgcaagcgcatctacggcatcacgctgaagctcatggtgctctgctcactcgcctccggcctctccttcagccgcaagcccaaggacgcgatcgcgacgctgtgcttcttccgcttctggctgggcgtcggcatcggcggtgactacccgctctccgccaccatcatgtcggagtacgcgaacaagaggacgcgtggtgccttcattgccgcagtcttcgccatgcagggcctagggaatcttgctgctggaactgtggtgctggccacctgtgctaggttcaaaggcaccagggcctacgaaacggatccgtttgggcaggcagactacgtgtggcgcgtcgtcctcatgctgggcgccgttccagccctcctcacgtactactggcgcatgaggatgccggagacagcgcgctacaccgcgctggtcgcgaaaaacctgaagcaggcggcgtccgacatgacgtccgtcctcgaggtcgagatcccttcagagggagaggaggtggaggcccttgccatacaagacgagtttggactcttctccacgggattcgttcgccgctacggccgtgagctgctcagcaccaccgtatgctggttagttctcgacgtcgtcttctactccctgaatctgttcatgaaagacatcttcagcgacatcggctggttcgaagacgcgagcagcaaggggccaattgagcagacatacgatattgctcgtactcaggtgatcatcgtgctggctgggaccctccccgggtacttgttcaccgtcgtcttcgtcgacaagctcggccgcatcaggatacagatagtcgggttcactttgatgactatactcatgcttggcctggctgggccttacaagttctggtgcagcagtaagagcacgcggattggcttcgccttcatgtacgcgttgatcttcttcttcgccaacttcggcccgaactcgaccacgttcatcctccccgcggagatattcccgacgcggctgcggtcgacgtgccatggcatatctggcgctggagggaagatcggtgcgatcgttggcgtgctctggttcctccgctgtcgaaccagcattcagaactcgctcctcatgctcgctggttgtaacctcgttggagtcatattcaccctagcgttaccggagtctaaaggcatgtcgctcgaggacgtcaccggtgagattggtcaacggaacgaggaacttccattggaatcgcctcaaatggtcgatggagcagacttcatccacagtgttgattttttataa

SEQ ID NO: 15976 - DNA, 702 bp, Zea mays
  Peptide Sequence Number=SeqID_57755
atgtccggtgtacaccagactgtccggtgtaactgcggggtaacggctatttcggcgccaacggctacctgcagcgcattaaatacgcgccagcgcgcgcagaagtcaggcacgcccatactggcgcaccggacactctacagtacatgtccggtgcaccaccggacatccaggcgggcccagaagacagtgctccaacggtcgaatcccaacggctttggtgacgtggctggcgcaccggactgtccgagcaagatcttgtcatgggaagaagaagtcgcgaagtcccctccattaccttccctggccttcttctcctgggttggctcgctgcctgcctgcttgccgccgccgcccgggtcagatatctggagcaggcgcgagctgaatggaggaaaacagcagcaggcggcggtggagcagcaagatcccgctgactggggcgacgacaacgacaccgagtgggcagagcagcctgccgccgccttttggatggtagcgggcggtccgcggtcgaggccaaacagacggcaacagcacgggggaggagatttctgggctgtgttacttggcgtgctcgggctgagccgggctccttcgtgggtcgggctttctgggccggcccggcacggatgggcctgtgtagtgccgtgctcggacagaagagtcagcccgtcgggcggcacggcccggcccgattaa

SEQ ID NO: 15977 - DNA, 1519 bp, Zea mays
  Peptide Sequence Number=SeqID_57756
atggatcatcagaatttacttcccaacaactctaatgtggatgaacagattttactcccaaatgcattagagcatgaggactgcccacactatttgctcaacggtcatgatgtgggtgtgccaaatggaagcttgattggtcagcaaaatacaagcttgagcttgtgggaaccagctggatctagctcaatgagctgcttagttgatcatgacaactttttccaggcaaaaagggagcatcttgcctcttctctgtctattggaggccccttaaatatagacaggaggagacatgaaggcactagttcattgcctttacacaacctaaacatagacctcaacattaatcaggctgatcaatttggctctgatgatgttgatcttgtacatggtaatggacaatcaagtgcaaatactgtcacagcccacaggggctctttcataactgatcatattatgcatcatggagtttcttcagatgctacaggaagttcatcatggaatgcagaatgttttaatggtgcagcaagccagcacagtcgtcatccagcttttaagagaaagtatcttgatggatgtcaatgtcatgcagagtcttctgctaatggaagctcacacaattgtcaccagaatgatagtactctgctacctcttcggaccacctgtgaaagtttgactatgccaaccacgacaaattttagtgttccacatcctcctgtggaacagctaaaccagagcactaatatttctgcaaattctactttgattgaccactattcttcttatagtggtccacatgcaaacgaattcatgcgaaatacacggatgcgaataaaccctagtgattatgatcaatcactgcccagccttttacctgaagggagtttcaggtgcccagcttatcagcatacacagcagcagtcatcatttaggccagtgcaacctagacaagtgagctcttctggttctcatagtcgacctcacttgcctgttgttactcaattttcgcaaaatcttcaccgtccttcagcaaatattagttttggatcaaggattgggagttcttccagttctggttctacagtactgatacctgcttcacaagatcccagtacaagcttgataggaagtgattttcctgagccccttttgttaggttctttgtttacagctgattcaacaaatttcttatctgcatctggaaacagaagtaaccagcaaaattctggatccagctctagttccatgcttagacctgctgtaaatgttgcagctcaacaagtccctgggttcaacgtatctcagccaagtacaactctaagaggttcagctgatgtgtctaggaggtccttaactgctgctggtgtttctcattttagaagttcaagcatggcattgcagcaccgtgggacttcatccacaccgcatgagattcggagtcaccagccaggatcaagctctcgtgcccatcagcagtcattaagacctggtcattcctcgatagacaggcagagctctg

SEQ ID NO: 15978 - DNA, 291 bp, Zea mays
  Peptide Sequence Number=SeqID_57757
atggacggcgtcggtgagagtggcggcggtgggagcggtcccgatctgccgacggggagggagcgcctcccgctcgcactcgcgatccctgtctgtgttccggcccacttcgccatcgagagaaggggaagagaggagctaggtggtattctggctgcgattgacactttctctgaacatgtgataattgggatcttttactttgtggggtttgcactgttttgtctggagacactgctgagcattggggttcttcagaaagtgtacatgtacttcagagggaacaagtga

SEQ ID NO: 15979 - DNA, 1044 bp, Zea mays
  Peptide Sequence Number=SeqID_57758
atggagaactacaactacggccaaccttcacaagcccctggagactatgtgccatgcacatacacagaaggcatagatttaacagaaatcgatgacgaaggcaacatgaactttgcctttactaagagcatgaacatggaggacagccaacactcaactccaactaaccctaagctcaagaaagtaacaactcggaggcttagaaactacactcagaccgaggatgagatactggtatctgcctacatgaacgtgtccaaagatcctgcaattggaacaaatcagtcaggaaaggcttattggtgtcgcatcagcgactactacaatgaacacaagaagaaagctaatgctaggacacaacgctccttggagcacaggtggagcgacattcaaagggacactacgaagttttgtgctgcgtacgacaaagtgataacgttgaagcaaagtggcaaaagcgaagacgaccaggtaaaagatgcactacagatgtttgaaggcatgcacaagaaacagtttaggtttatgcactgttggtacatgcttcgccgagaggtcaaatggacgacctggctctcaagttgtgaaactccacataataatattgggaatgtcaacgtcaacgaaaccgggtcccaggcgaagcagggggaagacgaatttggttcaccgtctgatacctttgtgcgaccaatgggtagggaccgtgcaaagaaggctcgtagtaccagcacttcgagcaattcaactgcctgcatggcgctgctggagaagttccaagaggatacagcaaggttcgaagaaaaggctacaaagtatgaagatctggccgcagcatctacagaagaggatcgaagggatatgaagatgtacagggacaaaaagatccagctttctgagaacatgttcaaactccaccaactagagcgagatgatcgtataatgaatatggacttggacaaggttgctccttatgcaagagactactatgtgtatatgcaaaaggacattttggtaaggcttcctccaccatcagacacatga

SEQ ID NO: 15980 - DNA, 354 bp, Zea mays
  Peptide Sequence Number=SeqID_57759
atggcaaaaggcgatgggcaatccgtaaagtatcctgtcgtcagctctgtagcttctggtgatgtcggtcgtccttttgttgatgctaccaaggccgcaaccacgctcgggcgagatggaagtcctcccaaggccatggtcgagcctcctctagggcgtgcagtcgtgcagggaacaattgaaggagtggcctcctgcgggattcgcgggggcaattgctggggaagttggccgagggcgagctcgggtgaggtgaagttttctccgaggctgaggccgacttcgggcgaggcggagttccctctcgagggtgagaccgtactctatatgcacgtcccatccggagttgtttga

SEQ ID NO: 15981 - DNA, 3207 bp, Zea mays
  Peptide Sequence Number=SeqID_57760
atgtccggcataccgagggatgtcgccgagcactcgctggatattcgggccggagcccgacccgtcaggcagcctctgcgccgattcgacgaggagaagcgcagagtggtaggcgaggagatccacaagctaatggcagcagggttcatcaaagaggtatttcatcccgaatggcttgccaaccctgtgcttgtgagaaagaaaggggggaaatggcggatgtgtgtagactacactggtctcaacaaagcatgtccgaaggttccctaccctctgcctcgcatcgatcaaatcgtggattccactgctgggtgcgaaaccctgtccttcctcgatgcctactcagggtatcaccaaatccggatgaaagagtccgaccagctcgcgacttctttcatcacgcccttcggcatgtactgctatgtcaccatgccgttcggtttgaggaatgcgggcgcgacgtaccagcggtgcatgaaccatgtgtttggcaaacacatcggtcgcacagtcgaggcctacgtcgacgacatcgtagtcaagacaaggaaggcttccgacctcctctccgaccttgaagtgacattccgatgtctcaaggcaaaaggagtcaagctcaatcctgagaagtgtgtcttcggggtgccccggggcatgctcttggggttcatcgtctccgagcgaggcatcgaagccaacccggagaagatcgcagctatcaccagcatggggcccatcaaggaattaaaaggcgtacagagggtcatgggatgtctcgcggccctgagccgcttcatctcacgcctcggcgaaagaggtctacctctgtaccgcctcttaaggaagaccgagtgtttcgcttggacccctgaggccgaggaagctctcaggaacctgaaggcgctccttacaaaggcgcctatcttggtgcccccagctgatggagaagccctcttggtctacgtcgccgcgaccactcaggtggttagcgcagcgattgtggtcgagaggcaagaagaggggcatgcattgcccgttcagaggccagtctacttcatcagcgaggtactgtccgaaaccaagatccgctacccacaagttcagaagctgctgtatgcagtgatcctgacgaggcgaaagttgcgacattacttcgagtctcatccggtaactgtggtgtcatccttccccctgggggagatcatcccgtgccgagaggcctcgggcaggatcgcaaagtgggcggtggaaatcatgggcgaaacaatctcgttcgcccctcggaaggccatcaagtcccaggtgttggcggacttcgtagccgaatgggtcgacacccagctgccgacggctccgatccaaccggagctctggaccatgtttttcgacgggtcgctgatgaagacgggagccggcgtgggcctgctcttcatctcgcccctcgggaaacacctacgctacgtgctacgcctccatttcctggcgtccaacaacgtggctgagtacgaggctctggtcaacgggttgcggatcgccatcgagctaggggtcagacgcctcgacgcccgtggtgactcgcagctcgtcatcgaccaagtcatgaagaactcccactgccgcgacccgaagatggaggcctactgcgatgaggttcggcgcctggaagacaagttcttcgggctcgagcttaaccacatcgctcggcgctacaacgagactgcggacgagctggcgaaaatagcctcggggcaaacaacggttcccccagacgtcttctcccgggatctgcatcaaccctccgtcaagatcaacgacacgcccgagcccgaggcacccacggtccagcccgaggtaccctcggctcagcccgaggcgtcctcggttcagcccgaggtgccctcggcccccgagggcgaggcactgcacgtcgaggaggagcagagcggggccacgcctgatcgaaattggcagaccccgtacctgcaatatctccgccaaggagagctacccctcgaccaagccgaggctcgacgggtagcgcgacgcgccaagtcgttcgtcttgctgggcgatgaggaggagctctaccaccgcagcccctcgggcatcctccagcgatgcatctccatcgctgaaggtcaggaactcctgcaagaaatacactcaggggcttgcggccatcatgcagcgcctcgagcacttgtcgggaatgctttccggcaaggcttctactggccaacggtggtggctgacgccactagaattgtctgcacctgcgaagggtgccaattctatgcgaagcagacccacctgcccgctcaggctctgcagacgatacccatcacctggccttttgctgtatggggtctggacctcgtcggtcccttgcagaagacgcccaggggctacacgcacctgctggtcgccatcgacaaattctccaagtggatcgaggtccgacccctgaacagcattaggtccgagcaggcggtggcgttcttcaccaacatcatccatcgcttcggggtcccaaactccatcatcaccgacaacggtacccagttcaccggcaaaaaattcttggatttttgcgaggatcatcacatccgggtggactgggccgccgtggctcatcccatgtcgaatgggcaagtagagcgtgccaacggcatgattctacaagggctcaagcccaggatttacaacgacctcaacaagttcggcaagcgatggatgaaggaactcccctcggtgatctggagcctgaggacaacgccaagtcgagccacgggtttcacgccgttcttcctggtctacggggccgaggccatcttgcccactgacctagaatacggctccccgaggacgagggcctacaacgatcaaagcaaccaagctagccgagaggaatcgctggaccagctggaagaggctcgggacaaggccttactacactcggcgtggtaccagcagtccctgcgacgctaccacgcccgaggggtccggccccgagacctccaggtgggcgacctggtgcttcggctgcggcaagacgcccgagggaggcacaagctcacgcccccctgggaggggccattcgtcatcgccaaagttctgaagcccggaacatacaagctggccaacaatcaaggcgagatctacggcaacgcttggaacatcaaacagctacgtcgcttctacccttaa

SEQ ID NO: 15982 - DNA, 471 bp, Zea mays
  Peptide Sequence Number=SeqID_57761
atgggggatatcaagaggagggaagaggcgctgaagaatgctggcgtgccaatggaggagaagaactggccaccattcttccccatcatccaccatgatattgccaatgagataccagcaaatgtgcagaagttgcagtatcttgcatttgcaagctggcttggaattgtgctttgtttgtcctggaacttcgttgctgtcatagtctgctggatcaaggagggagattcaaagttgtttttccttgcaacaatctatgctttgcttggaattcctctgtcatatttgatatggtacaggccactctaccgtgcaatgaggactaacagtgctttcagttttggatggtttttcctgtgttacctgatccacattggtttttgcataattgctgccattgctccaccaattgtatttcatgggaaatcattaactcatgtgccagttgaagacctcatttttcctctgtaa

SEQ ID NO: 15983 - DNA, 285 bp, Zea mays
  Peptide Sequence Number=SeqID_57762
atgggcgaagaggaggaagcagcgccctcctcagaggagcacagggtgttcacgaggaagcagcatccagcagtgatcagcaacgacaggaaactaccggaaatggaggaggccgccgtgcatgggcatggccaccgctctcctagccatctccttgccacggaggcagcagacgacggtttcgatagcgagcaggaatcggcggtgcccaagcaaacaccaggaagccacatcggcggtgcccaagccatggagggcgacgacgaccattatcagcaaagctga

SEQ ID NO: 15984 - DNA, 159 bp, Zea mays
  Peptide Sequence Number=SeqID_57763
atggcgtccgccgcgggctggggcgccgccgcactctcccgtcggggttggggcagagtccttttcaccgtcggatctatttaccccgagccccctgagttctctggaaatagtgcgcccagtccagaacatagtaaaaccagagaaaatgattattaa

SEQ ID NO: 15985 - DNA, 432 bp, Zea mays
  Peptide Sequence Number=SeqID_57764
atgggcaagggtaacaagcgcaagcgcgagccgactcctccattggaggacttcggtgactcggaatactcggaggaggagttctcctctgagttcgaggggtctccggctcctgtgtctcccccggcgtcgtccgacgattcggacgactctcaggggattgccacggaagtctggacttacatccgggccgtcgagcgctccgggctcgagggctcggatgagtcggagtactcctcggacgaggaggactcgcccgaggaggacgacgatggtgacgacgacgacgatgacgacggaggcgacgacggcgatgacggtgacggcggtggcaggggcggcaacggcgacggcaagggtggcaacggcggcagcagcaggggcagcaacggcggcggcaacagcaagggcagcaacaaggccagtggctag

SEQ ID NO: 15986 - DNA, 663 bp, Zea mays
  Peptide Sequence Number=SeqID_57765
atggagtgtcaccttgtggccgttaagcgaattcttagatatttagtttctatgccttgcttcgggatctggtatccaaaggggtctacctttgacttaatcgaatactcagattccaactatgctgggtgcaaggttgataggaagagcacatcagggacgtgccaatttctaggaaggtccctggtgtcatggagctccaagaaacaaacatctgttgccctatccaccgctgaggctgagtacgttgccacaggacagtgttgcgtgcaactgctttggatgaggcaaaccctccgggactttggctacaatctgagcaaagtcccactcctatgtgacaatgagagtgcaatccgcttggcggataatcttgttgaacatagccacactaagcacatagacatcagacatcacttcctgagagaccaccagcaaaagggagatatcgacatttaccatattagcaccgagaatcagctagccgatatcttcaccaagcctttagatgagaaaagctttaatgtctttaattgtttatatgtggtgctcaagttgtacaagtcatccccggacctcacaagtccctatgcaattgatgcacatatttggggggaggatgagttacaacttgacttccttgagactaacctatttgtttga

SEQ ID NO: 15987 - DNA, 741 bp, Zea mays
  Peptide Sequence Number=SeqID_57766
atgagcggctgtgcggacggcgagagtgagcgagagcgaggtgtgactgagcaaggacggaataaagaaggtgccctggtagctcggcacttggcgtccgcctgggcggcgctctgccacgtcctgccccccgcgtcgggaccctcagctcggcacttgcacgagaggaatgcatgccatttgccacgcgtgcttgctcacgatccaacagcgcgcctgcgagaggtcctgagcgttgacgcatgggtcgcgcccccggcgacgcccggatccgcgttcctgatcaccaaggttgggttggagccagagtacattgctcacaggcctgctctgcttacatatagcttggaacgccgcctcatgccccgacactatgttgaccggagctactatactgctgtccagatgagtgagagtgccttcatggataagttcatatgcccctacaaggaagctgcaccaagcctcgccctagattatgctgctgcttgcagaggagagataacgatcagttggtggagtctgaaggagttgcaggtgaagaccctgagcagcagacggttggtgaagaggaactggggtgtagttcgcttcgccgtcgtgccgttaatggggctcggtgtatgcggctcgctctgccaaggtggtgacgaggatgacagttttgactatggtaatggtaaagaaggtgtcgaggcggatctccaggagttccaggacttcgacgagttcgaggattag

SEQ ID NO: 15988 - DNA, 576 bp, Zea mays
  Peptide Sequence Number=SeqID_57767
atgggcgagttgacatactttcttggattccaagtgaagcaactcaaggacggcactttcatctcccgaacgaagtacactcaggatcttctcaagaggtttgggatgaaggacgtcaagcccgcgaagacaccgatgggaaccaacgggcatgtcgacctcaacaaaggagttgctacaccgtgcttcgggaattggtatccaaaggggtctacatttgacttaattggatacgcagactccgattatgtcgggtgcaaggttgataggaagagtacatcagggacatgccaatttctaggaatgtccctagtgtcctggagttccaagaaacagacatccgttgcccaatccaccgctgaggccgagtatgttgccgcaggacaatgttgcgcgcaactactttggatgaggcaaaccctccgggactttggctacaatctgagcaaagtcccactcctatgtgacaatgagagtgtaatccgcttggcggataatcctgttgaacacagccgcactaagcacatagacatccggcatcacttcctgagggaccaccaacaaaagggagattga

SEQ ID NO: 15989 - DNA, 420 bp, Zea mays
  Peptide Sequence Number=SeqID_57768
atgcaggtgtccatccaggaggacgccacgacagggctgcgcgggatggagtgtctcatcttgcagctctcccaagacagcgtcagggagcgctcatcgtccccacacgcggtacaggcgcaacgtcgacgtctggagcaaatccagcatgaggttgattgccgggcgctgcggaggggtgacgtgtggactgggattcctatctcggaccaacagtccgtgcccactgcccaggagcccctccaccgagtccaccagcgccgggagctcacgtccaccgccgggagcatgagttcaccagcaacggcaccatctcgcgtcatgtcccgacttaggccaagaaagaagccgactgcagtggccgctccatcgctcgctcgtgagcgcctttttttgtcggacgtggctctggcggcgtag

SEQ ID NO: 15990 - DNA, 330 bp, Zea mays
  Peptide Sequence Number=SeqID_57769
atggcggagcccgtaggagctctgcacctcgccgtcgccgcccttaacctcctcgccgtcccactcccactacaccaccgtcgcggggtatcactgtccagcccactgaagacgagcgcgatgaccccagagaagcgggggcagtcatgggagtgggtttgcggatgggtgctgggtggggatggcgcggcggtcgcggcgctgaagccaagcgccgcgaggaacggggtcgtcgggcaggggcacgtggggtggacgacgcttggaatccgaggatggggtggcggaatccgaggatggctgggcacggcgtgtggtggccttccatag

SEQ ID NO: 15991 - DNA, 924 bp, Zea mays
  Peptide Sequence Number=SeqID_57770
atggagaattcatttgcacctctacatatttttcagtggcacacatttctcttaatgtcaacaaatcacaaagaaggggatcttgtttatgttagtggtaaggtgggtgtaccaatttacttagaaggaacaaaagctatggaagaggcaaaaatcaagaatattgaaagaagtagatgtgattttgtgtttcttcaagaatgctcatacaatgtaggaacttattcttacatgatcaaatgtttacagctgactgtaccagaaggttctttttgcaacctcaatttgagatttaaggtcggattaccaccagaggcagtatacaatatcataatcgaggcgggcaacaagggcttgtggatgctggacatcctcaagaagttgctgatggcccccaacatcgccaccaaggtcgtgcgcaccctcgtggcaagcgggcttctcaaagaggtcagcgacgtgcgccaccgcagcaggaagatcttcatggccaccgacttccagtccttcgccgagatcaccgggggcacctggtaccacgacggtcgcctagacaccgacgccgtaagcaccgcgcgccgctgctgccaggcgcaggtcgagaggctcggcgccgcgaccgcgcagatgatccaccacgacattctcaaggaagaccccagggccgggtacactatcgacaaggtcaaggatatcatcaagaccatggtgctcgaagaggtcaagagcaccggcacgcgggattttagcgccgttatggccggcacaatgtgctatcggctggtgactggggctccgcagggagggatgatggagggaatccattgtgggatttgccccaggactcatgagtgctcgccggaggggatcatctcacccagcacctgcgtttactacaagaagtggttgcagatggacttctag

SEQ ID NO: 15992 - DNA, 756 bp, Zea mays
  Peptide Sequence Number=SeqID_57771
atggcgacgaccgcgactaggcggtggtggaggcggcacgacggcggcgacgatgacccagacgacctcgtccccatggacacccaagagcaagaagagctggtccggtctctggaggctaagcaggcgcagcaaggccgccgttggaggcgcgtcttcgcggggttcctcctaggttacgtggccttccttgtctactccagtttccatcatgcttggtctccctgggagctgcggtaccatgcttacttcatggaagatttgcctgcaccaatggtcataattgcagattggatagctgctctagcatgcctatttgctgtgaaaggattactacagaattcaggcccatcaaagaagtggatgtggtattcttgctatgttggcattttggtagccatcttttggacatactacatcttgaggttgccaagaattcgatgggatgttgcatggctcccactcggtcctttgatgtatgatggctggtgcattgagcctgtatgtggaccatgtgctgctggagtcaatgcaagatatcagcacattgagaagttacatgattacagattccacccttctactgaaaggcttcaggcagaatttgatctgggcacaaggtacaatatgtcctaccttagagattttactacaaagtttatgtttattcctgttctttcgttgaaacatgttgaagaggacctcagatcgttagagacttcgctaacgagctcttggctcttgctatatatctga

SEQ ID NO: 15993 - DNA, 261 bp, Zea mays
  Peptide Sequence Number=SeqID_57772
atgaaggccatagcaaagagaacttcacttgtaaacaatcttcctccgaaaggaagcaatcaacacggttgccatgccatcaatgggttatatcttcaccgactccttaagaagactttgtatgaactccttgccattgatcttgatgagatagatgacgagaaggcttcaagcaccacattgaggaacatatccattggagaggtgcgaccacaagatcaagatcaatcattctccactcaaggtcaacccccaacctaa

SEQ ID NO: 15994 - DNA, 558 bp, Zea mays
  Peptide Sequence Number=SeqID_57773
atgggcccctcctcgctcctctccctctccgcgcgcgtacggacggacggcggtgcacgtgagagcagcagccggcagggcgcgtgcgggtcgggacagccaagtccggcctcgggcgccataggaagctccgcctcgcccgaccccagggctcggactcgggctcggccccagaagacgacgaactccgcctcgctcgaccctagggctcggactcggcctcagccccggaagacgacgaactccgcctcgcccgaccccaggggctcggactcggcctcgaccccggaagacaacgaactccgcctcacccgaccccagggctcggactcggcctcggccccggaagacgacgaactccgcctcgcccgaccccagggctcggactcagccctggcctcagccgacggtctccgcctcgcccgacccaggggctcggactcgacctcgacctcggaagacagattcgacctcgacctcggaggagcctccgcctcgcccaaccttgggctcgaaccgaccatgccacaggaggggccatcattaccctacccctag

SEQ ID NO: 15995 - DNA, 1242 bp, Zea mays
  Peptide Sequence Number=SeqID_57774
atggagtcggacgcgtccacctccccgcggcggcgcagcacgagctgttacagcgacagcggcgattcctcctgctccgagcccttcagcgagtgcggcagcgacgacctctccttcacgcccgccgccgccgcgggcatccaccgcctgctgctctcctgcgcggccgaggcgtcggaggacgcaatctcctcgctcgtggccgagctggaatgcccgtcgcagtcgctggactcgctccgccgcgcggcgatggagctccggctgctggccaagcacaacccggacaaccgggtccgcatcgccgcggcgggcggcgtccgcccgctcgtcaggctgctgtcgcacgcggacccgctgctgcaggagcacggcgtcacggcgctgctcaacctctccatctgcgacgagaacaaggcgaccatcgtcgaggcgggcgcgatacggccgctggtgcacgcgctcaagtccgcggcgtcgcccgcggcgcgggagaacgccgcgtgcgcgctgctccggctgtcccagctcgacggcgcctccgcggccgccatcggccgcgctggcgccatcccgctgctggtctccctgctcgagaccgggggcgcgcggggcaagaaggacgccgccacggcgctgtacgcgctctgcagcggcgcgcgcgagaaccggcagcgcgccgtggagaccggcgccgtgcggcccctgctggacctcatggccgacccggagtccggcatggtggacaaagccgcgtacgtcctccactccctggtgagctccggcgagggccgcgccgccgccgtcgaggaaggcggcatccccgtcctggtcgagatggtggaggtcggcacctcgcgccagaaggagatcgccaccctctccctcctgcagatctgcgaggacaacgccgtctaccgcaccatggtcgcccgcgagggcgccatcccgcccctcgtcgccctctcccagtcctcctccgcccgccccaagctcaaaaccaaggtacacacacaccacgtcgcagtccccgcattcgacaaaaaacgtccagtcaattcgcgcatctcaggcggagtcgctgatcgagatgctgcggcagccgcggagcccgagcctccgcacgcggccagcggcagtcgttgcggcggaatgaccccgcccccctggtggtgcgtgccaagaatccttctcttcttcgtcgagacgagcctgcgcgggtcgaccggccagccggcgtga

SEQ ID NO: 15996 - DNA, 789 bp, Zea mays
  Peptide Sequence Number=SeqID_57775
atggcgtgcgcgcagcagccccgcggcctctcggcacgcggcacgcgtcccctgtacggcggcgtgcgggcgcggcccctcggcacgcagccttgcgcggcccctgcatggcgcaacggccatggcgctgcctgtcgtgggcgcgaaacaacacggacatcccggcggcgcgcgaccacttcagcgcgggcgcggccttggccaggagcgggccttgccagttcgcgaggtgggatctggcaagcattcatggcctctgcagcccgcgaagccacgaccagggtgccaggcaatgtccttcatgcaatttgtgtagaaattgaaaggacgacagtgccaaaagaacacttcagaaaaggatctccgaagatatcagtgcccataccaaacggcgacaaaaagcgtcgacgcgagaagtgggggcgaaaggaacgggcgccatgcgtcatgcgctccacgactcgactcggaaagatatccgggagccgggagctaccacggcgccacaaccagctagatagcctagattcatctgccagagcccagagcagagagcgatcaccgtcgttttcagctgtctttccgagtccgagcgagcgaatcatcggcctgccaccgggccaggcaagaacgtgtcggctttaccgcctggacaggagcaccggccccatccttcggtcttccagaatccagaccacaagaaggggagagaagcgacagccgagtggtgcagaagcgggcagcgacaaagatggcactataatagctcgagctatcgcgatcggttga

SEQ ID NO: 15997 - DNA, 249 bp, Zea mays
  Peptide Sequence Number=SeqID_57776
atggcgatgcgccgagcccgagctgacagacagacaccgagccaccagtaccggccggtgcgtgatgggcggcggcagtgctggtgctggggacacgctgcggatcccatgtgtgttcgtgcctgcatggatgctgtcggtctttccgaggttcatggtttcgtgcctatatatgggaggtggagccatctctactacgagatcgactacaagtacgtattggtgatagctgctgaaaagagcagctag

SEQ ID NO: 15998 - DNA, 324 bp, Zea mays
  Peptide Sequence Number=SeqID_57777
atgggaacagcggcgagcacagcttggtggccgtgcatggccctgcaatttgaatggctcttgggaccgccactgattgttaggcgtacggccactgctgataaaattgcggtcacatctggtcatcatttgcccgtagaaaaaaatcctggggagctgccgtcttctgctgggctcggtccaccgtgcccaccgctcaggtcagatgatagcggcagtgggcaggccaagaagcggacgccgcgcgcgtctgcttccgggttccggctgatgacagcggacctctgctatctgcgcaacgtccgcgtaacatcactagcttag

SEQ ID NO: 15999 - DNA, 600 bp, Zea mays
  Peptide Sequence Number=SeqID_57778
atgcacacaagcagtaacacattccattacaatagtacgatcgacattaaactggacaagggcttcagccttgtcggcgtttcgaccccggggggtccctggaccgacgaccctaggttgggcgaggcggaggctcctccgaggtcgaggtcgagtctgtcttccgaggtcgaggtcgagtccgagcccctgggtcgggcgaggcggagaccgtcggttgaggccagggctgagtccgagccctggggtcaggcgaggcggagttcgtcgtcttccggggccgaggtcgagtccgagccctggggtcgggcgaggcggagttcgtcgtcttcctgggccgaggccgagtccgagccctggggtcgggcgaggcggagttcgtcgtcttccggggccgaggccgagccctggggtcgggcgaggcggagcttcctatggcgcccgaggccggacttggctgctgtcagcctcactctgtcgagtggcacagtagtcggagcggcgcaggcggcgctgtcctcttgtcaggccggtcagtggagcggcgaagtgactgcggtcacttcggctctatcgactgaagggcgcgcgtcaggataa

SEQ ID NO: 16000 - DNA, 514 bp, Zea mays
  Peptide Sequence Number=SeqID_57779
ctcggcccctcggagcggcggcagcggccctgaccggccctcacagaggcggcgcacgaccacccgatcgcacaccgcccggcctccctccccgcgcgctcggcccccgctcggccccccccgctcgaccccttccccggcctccccggcggcgctccccgcccgtcccggccccgcgacggcgcccgcccgtaccggccccgtggcggcgcccgctcgcccccgctcctcccctgctcgcgcgcagcgcggccccggcgcgccctcggcgtggcccggcgcggccccggtggcccctgctcgccggcgcgaccccggcgcggcccccggccggttcaaccgcccccctggccggttcaaccgccctggccccagctcggccacccgttcccccgtcccggcctcgcccgaccgtggttatgagattgatggttttggttatgactatggtgctggcgaagatgaagctgtggaaggagacttccaggagttccaagactacgacgagttctag

SEQ ID NO: 16001 - DNA, 234 bp, Zea mays
  Peptide Sequence Number=SeqID_57780
atggcgccaggaagggctcagggaggttcggggaaatgtggagaacacgggcatgggtatggcgacaacgcagaggccccaaaaggtagctgcccacagcgggatggctcgacgggtgcgcaaccttgctccggtgagcaattgcacacacctgagggaaagaaagggcaaattgggggcaggggaaggttgattacctcgatagatgactctgggacccttgaacggtggtag

SEQ ID NO: 16002 - DNA, 243 bp, Zea mays
  Peptide Sequence Number=SeqID_57781
atgtggggaaaaggaaagcttcagccttcaggcgaccagggcctgcgcgccaattctgccccaaggaaagagaaagctgaaatccctttcaagctcataagcagacacaaacccttcagaaccttaaccaaccccaaacaagacagattaggtttcctaagacttggtttaacatactgggatgagaaggaccctaccccatcagcgaccatgcccactgtcacacccggttttagaaggtaa

SEQ ID NO: 16003 - DNA, 1254 bp, Zea mays
  Peptide Sequence Number=SeqID_57782
atggagaggacggttcttggcctgacgctgtgggtctggattgccatcggcgtggtcgcgcttctcgtggcaatcctgctgatgatctgcatttgggtggcgtcccgcctgaggaccaagagaaccatggacagcctgaggcagacgcagatccccatctactccaaggagatccccatcgaccgggtcggcgggcgcagcctggcacagacaatgcatgagcgcgagcagccgagcttgccgccgccggacaagtacgcgaaccgggagccggccggggcggctgtggggcacctggcactcagcaagtcctcggatcatgacaacatgagccaggggagctcggtttgcaatgctgaccgtgctggcactggcagcatgcactccggtgaggatgggagctcaggacctcggaggaaacccaactctcctgcggcgttcgtgtcagcttcgcccttggttggccttccggagttctcgcatcttggttggggtcactggtttactcagcgtgaccttgaacttgctaccaaccgcttctctaaggagaatgtgctcggggagggtggttatggagttgtgtaccgtggacgtctggtgaatggaactgaagtcgcaataaaaaagatctttaacaacatggggcaggcagaaaaagaattcagagtggaagttgaggctattggccatgtccgacataagaatttggttcggctgttgggatattgtgttgagggcgtaaacaggatgctagtatatgagttcgtgaacaatggtaatttagagcagtggcttcatggagctatgcatcagcgtggtgtttttagctgggaaaatcgcatgaaggttgtaacaggcactgcaaaagcgcttgcttaccttcatgaagctattgagccaaaagttgtacatcgagatataaaatcaagcaacatattgattgatgatgaatttaatggcaaagtatctgactttggattggctaaacttttgggatcagacaaaagccacattactactagagtgatgggaacatttggatatgttgcacctgaatatgctaatactggaatgttaaatgaaaagagtgacgtttacagttttggcgttctcttgttagaaactgtgacaggaaggaatcctgttgactacagccgatcttccaatgagtggcatttttataaccaggaccagtgtgacagtgtcacaattgacaacacaacaacattaaactggatctctcttctaatttag

SEQ ID NO: 16004 - DNA, 204 bp, Zea mays
  Peptide Sequence Number=SeqID_57783
atggccaccaccacggtgctccccttcccggcgtcgaccaggcacaagtccggtgatggagccctcacggggaacatcacgacgacgctaatcacgaacttcgggcagatctactctatgctcgtcatcgagatgcaacacctccgcctcacacacgcagaagtcgatgcgctcgcggtcatggccagctcggagcctgtctag

SEQ ID NO: 16005 - DNA, 168 bp, Zea mays
  Peptide Sequence Number=SeqID_57784
atgcgggcctccagcgtggcctgcgactcccacgtctgcgtatgtcactatgggaagagctacatcttcatcgtaaattatgtgcaaaggcaacaggttcgattgtgctgctcggtttcgcagaacgcgaagaaaaggtacaagaagggcctggcctggctgaactga

SEQ ID NO: 16006 - DNA, 1362 bp, Zea mays
  Peptide Sequence Number=SeqID_57785
atggagaagctgcgatttatattgtccaagttcaatagtaatctatctcatcccaagctgatggataagtcacgatttgaagcatccgagttcaacactctatttgatccgaatacgatggagaagacggcggaggacctgtcgttcgatgttctgtggcttatctttgctaatctggagttacctgaccttgtgcgtgctggatcagtctgttccatatggcgtgacatatacacgagcctatgcaacagtggatcttacaatcctcagcacacaccatgccttctctacacctctgagtctgccggcgcaagggcagcttgcctgtatagccttgcagagaagaagacctacacgttaactctgccggaccctcctctccgtagcaggtacatctttggctcgtcatatggttggattgtcaccgctgatgagaggtctgagttgcatattgtaaaccccatcaccggcgaccagattgccttgccatctgtcaccaccattgatcaggtgaagccaatctttagtgatactggagtcgtttgcggttatgagcactcagggtactctggggtgtggatggcttcaaacataccgtccatatttgacctcggtgaactacgcgactacctcttccacaaggtcttcctctcttcggatccatctacaggagactactttatggtgctcatccataacccacactaccagctttcctttgcaagggcaggggatgataaatggacttggttgccacaaggtgattgctatgaggattgcttatttaatggtcaattgttgtatgcctgcactcaactaggagaaatccatgaatttgatcttggtaccccagcaatcacgcacaagatatttttgggtcgtgttaaagatgtctatgacgagaggatttacatcgttcaagcttcatgtggtcagctgctgcaaatatggaggtccgacaatactatagaagaaggggatgacgaagaggaatatgatccagattttggacctgacttgccttggcatagtacctccatgatcaaagttcataaagtggaaccaacttcaaaaaaacttgttgagataagtagcctgggtgcgaatgtgttgtttcttgggcacaacctatcactttgcctccgtgcggaagaacatccacagctgaaagcaaaccatatctacttcgctgatgacgaaccatatacatatttcaagaataaacgacgtgatattggtgtatttgacttggaacgtaattgcagcgagaaaatagtatctcctcagctttggtccaactggccagccccagtgtggttagttccaaatccaaggcgtataggcctatcattgtgcaagtag

SEQ ID NO: 16007 - DNA, 240 bp, Zea mays
  Peptide Sequence Number=SeqID_57786
atggatatggaaaataacatgtcaacaacaattagtgtggtccaattcagacattattcttcatatcctcaaatacctccactagcactgagtaagcagattccatcaggtcaagaagattcccgcatccctgtcctagatcaacaaataactgactcactaaataacttctatctcaattattctcatgaacgtctgaggctaaaagatgaaatgactgagtattcatataacgactga

SEQ ID NO: 16008 - DNA, 924 bp, Zea mays
  Peptide Sequence Number=SeqID_57787
atgaccgtcgtcgacgccgtcgtctcctccaccgatgccggcgcccctgctgccgccgccaccgcggtaccggcggggaacgggcagaccgtgtgcgtgaccggcgcggccggtctactatgtcgacctgcgcgagcgtggcagcagatggagcgattaacgtgtttgtacatgttcatggcagcagatgacccgaagaacgcgcacctcaaggcgctggacggcgccgccgagcggctgatcctctgcaaggccgatctgctggactacgacgccatctgccgcgccgtgcagggctgccagggcgtcttccacaccgcctcccccgtcaccgacgacccggagcaaatggtggagccggcggtgcgcggcaccgagtacgtgatcaacgcggcggcggaggccggcacggtgcggcgggtggtgttcacgtcgtccatcggcgccgtgaccatggaccccaagcgcgggcccgacgtcgtggtcgacgagtcgtgctggagcgacctcgagttctgcgagaaaaccaggaactggtactgctacggcaaggcggtggcggagcaggcggcgtgggagacggcccggcggcggggcgtggacctggtggtggtgaaccccgtgctggtggtgggccccctgctgcaggcgacggtgaacgccagcatcgcgcacatcctcaagtacctggacggctcggcccgcaccttcgccaacgccgtgcaggcgtacgtggacgtgcgcgacgtggccgacgcgcacctccgcgtcttcgagagcccccgcgcgtccggccgccacctctgcgccgagcgcgtcctccaccgcgaggacgtcgtccgcatcctcgccaagctcttccccgagtaccccgtcccagccaggtctgatttcatagtactcattgcttgcttgcttgcttag

SEQ ID NO: 16009 - DNA, 138 bp, Zea mays
  Peptide Sequence Number=SeqID_57788
atgtcgacggcgagcggcgtatccgctggctccgtgctccagctgccctcctttcgggtgccggccaagagatttctgcctcggagaacagccgctggtgctccggctggtattgtgttaagacaagaaagatgttaa

SEQ ID NO: 16010 - DNA, 759 bp, Zea mays
  Peptide Sequence Number=SeqID_57789
atgcaaccaagaaaggttggtccccttgcaaaaaagtgcgacgaaagcctccaagcgagtgctaacactcccttcgaggctcgggggctactgtcggggaccataattaggggtaccctcaagacgcctaattctcagctggcagtcaggccttgtcaaaggcgccataggaagctccgctccgcccgacccagggctcggactcgggctaagccccggaagacggcgaactccgctccgcccgaccccagggctcggactcgggctaagactcgtaagacgacgaacgccgcctcgcccgaccccagggctcggactcgggctaagacccggaagacgacgaactccgctccgcccgaccccagggctcggactcgggctaagacccggaagacggcgaactccggtccgcccgaccccagggctcggactcgggctaagacccggaagacgacgaactccgcctcgcccgaccctagggctcggactccgctctggcctctgccgaacgacctccacctcgcccgacccaggggctcgggctcggcctcggcaacagaagacagactcgacctcagcttcggaggagcccccacgtcgcccaggcctcggacgcgggcccgccacggggacgtcagcaaggactcgatcgctccaacagctgtccctccgccaggctccgttgctcctccgacagccacgacatcataccagcagggcgccaagaactctccggctgccacattggcatgtacttag

SEQ ID NO: 16011 - DNA, 1857 bp, Zea mays
  Peptide Sequence Number=SeqID_57790
atggcagaaaacgatactgttcagttacagagagcaatattcgcccagtacattatgatgaaaaggttatttatggagttagaagtggaaagagaagcttcagcaactgctgcaagtgcggccatgtcaatgatccgaaagcttcaaaaagagaaggatgcagaaagaatggaagcatggcaatacaagagaatagctgaggaaaagattaaccacactaacagagcactggatattctgaaggaggtcgtggagctgaaacaattggagatctcgtatctgaggtaccaattgcaggtgtgtaaacagaagctactggatgctggcattgacgattgtgacgttgcagatgagacaatagatagtgataaatctctgtttggaagaaataacatggagaatctttgtcataaaatcaaaagaaattcctctctgccaacgttgcagttgaataaacagtgtacagatatggacatcaagaagaatggtggagtaccatccgcaaggagcaggctgactgatgacggttgtgagcagatttcaatagatgttatggctctcgagcccaaggaaagcttcgcaacagatttgaactttagaggaaagcatggtgaagaagcacattctccaagaagtggaagtgaatctcagactttggatgaccctccgtgttgttcctcattctcagtggtgagtcatcaggcagatatatgcagtgatggagcagttcagaccagggaagacaaagaatgtacagtaaaccatgatcaactcaaggattcttgtgtacatgagtctgagacttcggatgagcctccgtgctcttcctcgttgtcagtggtgagtcaccaggcagatatatgcagtgatggagaagttccgaccagggaacataatgaatgtgcggtaaaccatgatcacctcaaggattcttgtgtacatgactctgagacgttggatgagcctccgtgctcttcctcgttctcagtggagagtcaccaggcagatatatgcagtgatgcagcagttcagaccagggaagataatgattgtacagtaaaccatgatcaactgaaggattcttgtgtacatgatgactctgagacgttggatgagcctccgtgctcttcctcgttctcagtggtgagccatcaggcagatatatgcagtgatggagaagttccgaccagggaagataatgaatgtgcggtaaaccatgatcacctcaaggattcttgtgtacgtgactctcagactttggatgagcctccgtgttcttcctcgttctcagcgggggcagatatatgcagtgatggagcagttcaggccaggggagatatggaatgcacagtagtaaatcatgtcaggctgaaggattcttgtgctggtactgaaattggcgaactggtagctcatccattaagcgaagtcgacccactccaaactccaaagagaagcaacaaagcaactgattcctcgtgtactgggagtgaaataacaacagtagaggaacctcaactgtctcccaggggtgtcaccaaagcgcgaggcccccgcaacctgtctaggttcgctgaaacaagaaaggttgggtcgatgaataatgtggataggcatgtgcgccggagctccgggacttactcgccacgagcagccggtgttgagcggaccatgtcgaagctgaagcgcgtgcaaagcgagaagatggtcgagctaggcgaccctaggactggcagagaacagatcatcatgctgaaggaggtctacgagcagctccgtatgatagagtcacatatgagaccttctggttcccaggaaagcccccgaagtgccacgtcgttagattccgttatggag

SEQ ID NO: 16012 - DNA, 399 bp, Zea mays
  Peptide Sequence Number=SeqID_57791
atggtggcaagggccgcaactagagcggaagaggtcgtgggctacggtgtggtcaagggatcggccacactcgatggagcggagaggacccacatggtgtcgggacctacccattttgtgaagaagcatttggatcatgatccattaccacccctactcgcgggaaagccgggcaggccaagcccgctagagccaggcgtggtgaagagggggacggccggcgagggcagtagtggaggcgtcggggaggagcagggccttcgtggttgtcgttgcgggatccatggggagcagtgcatagaagaagagcggagcatcagggtggggatgcggttgggggaggagccggtggtggggatggcaattctgtgtgacgacagcggtggctccggggcatag

SEQ ID NO: 16013 - DNA, 684 bp, Zea mays
  Peptide Sequence Number=SeqID_57792
atggtcgccgctcagtgcctcctccttggccgtagagctaccacctatggccctgaggctccccacaccatcgagctcgacgccaacaccatcgccgctcttcatgctcagggcgacgatgttcataacataacgtccctgatgtctatcatgttagatctagcatcccccactacccctgctggcgtgatcagggcatggcaaaactctctccatgacctcggtgagcccgtcctcgaccgcaccctcgtgttgaaccttctgcgtggtcccagccctcactaccacttgaaggctatcatcaagcaaattgtgtcattccccttcttccacgacatccacaatgagtttctcctcgaggagctcaccctggagactaagtcccctacctctgcaatgacactctatggcgtgccctccagtggccaggcccctcaccctccgtcgacgggggctcctgcgcgtcctcccaccgccccaccgctcgagctccttgttaggctcctggcactaatggggtcgccggccccacaaggcggtcgcgtgagcggagtctccacccgcgatggccccaccagtcacgacagtggcccggctttaccgtcgttccataacccctggaccgggaccatctccatgtggccaggccccgccacgggtgcctctacgccacatccaccttag

SEQ ID NO: 16014 - DNA, 378 bp, Zea mays
  Peptide Sequence Number=SeqID_57793
atgaagaggaccaagatcagacatgagaaactgctcactaagacgtgccttgtcgaaggcaatatactcaagattaatagaaggggtaacaacggatccggttgggatggccatgacagcgacggatcctgccgggaagacgatgatctagccaaagggacgacagatctagccgggaaggttgcagcaacagtgaatccgaccgggaaggccacaacagcgatagtcgacggatccaacgaaggcgatgaacgggaggagggcgacagggtggttccagccaggcaggggtcagctccatggcagggtcgacagtggcctagacggcttgagaaggggctcggcgtagagtcggtgcttggaacagggcggtggtag

SEQ ID NO: 16015 - DNA, 1248 bp, Zea mays
  Peptide Sequence Number=SeqID_57794
atgactgttcacaagttggtcatggacgaatttactcggcttcagggggactacaaagcaatcatccacgacctgaacccactgattcctcttatatttggtgctgggcaatttgggtggtgctctgagtggaatgcagccatgaccaagtttactgggtggcacagagatgaagtggtcgataagatgttccttggcgaggtttttaacagcagcaatgcttcctaccttttgaggggcaaagattcttttgtatgtctttgcatcattagcaacaactcattagctgacaagtcaagctgcttggatttggatatggctgaatttgtgttaccagttgtggtggggtctgctgtaagtaaagtactgataggtggccaggctaaaggtactgctgtaaattccaatctagaaaagttgtcttttaatgaggtcattttgtgggagtatccaatgaagtgtgctgattggcaaccatcggcaccacccatgtcactagagattttgctggcgagtggtacgagtcgtcctattccctggccaaattttgttttgagttgtataagttgtgcaaacttatatttcagttgggcactaaaaccaccatggctgcttcaaccacgacaggatatcagtgctgtactgcgaccagtgccatggccctccttcagagcattccatgacgctattgcaaggtggtgggatttcagtttgctcatgctaccaccatggtttccttcagcttggtgctattctgggtacagaagtggggtgctgggaataatgtcaaggatcacctcttttatttttgcagtatggctcagtttaaatcattatgatgtgcattattctcatataaatttaatggcctgcatgatgttgatccaactcagttgcttttgtaacatgaggatccctgagaggcaatctgtaagctatatggtgctcgcgctctacatattcagattccataccaatctccaggaattgcccagcgtcgcgagcctagaggaaggaagcaccatgctattgtccgactcgtgggtctggagtgggcgtgacttgtcactgtctggcgtgtgtgcgtctgtatcgtggggcagtgtccctgtctcgtggactgcttgtgcaggagaccagccttcgcacgcttctgatgcaactgcgcgcgacagagatctgcaggatgatgaactgacaaagatgaagaggataaccatggttttgacgtcggcacgccagcattaa

SEQ ID NO: 16016 - DNA, 939 bp, Zea mays
  Peptide Sequence Number=SeqID_57795
atgggctgggagattcactgggccatgcctagggctacatgtattggaccacaaattttcaacgtggagttgcctcttcgcatggctgatttcggagtgcttcatagaaatgagcttagtggtgcacttactggtttgacacgggatgatgctcatatcttctgcagagaggaccaaatcaaggacgaggttaaggctgttttggaattcatcaattatgtttacgagatatttggcttcaaatatgagttggagttgtctacgagaccagagaagtatctaggtgaaattgaaacttggaacaaagcagaacaacaattgacagaagctttgaatgagtttgggaagccgtggaagaagacttatatagatgccttcatgcagattaatgaaggggatggtgctttctacggtccaaaaattgatattggtgtgtttgatgcccttaagaggaaatttcaatgtgcaaccttacagctggattttcagctgcccattcggttcaagctgacttattctgctgaggatgaagcaaaaattgaaaggcctgtgatgatacacagggcaatcctaggttctgttgaaaggatgtttgccattcttttggagcattacaatggcaaatggcccttatggctaagccctcgccaggccattgtttgttcagtatcttctggttcagtggaatatgcgaaacaggttcttgccatgctacatgaagctgatttccatgttgatattgatgtgagtgacaggacaatacaaaagaaggtacgggaagcccaggtagctcaattcaactacattcttgtcgtaggcgcacaggaggccgagactggaaatgtctgcgttagggtaagagataatgccgacctggccacaatgagcgttgatggcctcatcacacgtttgagggaggaaatcgtagccttcaaatga

SEQ ID NO: 16017 - DNA, 534 bp, Zea mays
  Peptide Sequence Number=SeqID_57796
atgcaatatgaaggtggaatattccgcatattggactgggctgatattgttaatgcgcatatagttcctggacctggaatcgtagatggcttgaagttgaagctaatgaatcatggtactcacaccaactgtcgtgttctggccttgaagggttcgcctaaaggaagagggctacttctgctcgctgagatgagctctgccggcaatcttgctcatggagattacactgctgctgctgtaaagatcgctgagcaacattctgactttgtgatgggatttatatcagttaatcccgcatcttggtcagtaacaccatcaagcccggcgtttatccatgccacacctggagttcagatggccgctggaggagatgatcttgggcaacaatacaacaatcctgagtctgtgataaattacaggggcagtgacataatcatagttgggcgcgggattataaaggcgagcgatcctttgaagacggcatgtgagtaccgggtgcaagggtggcaggcatacaagaacagcttgctatga

SEQ ID NO: 16018 - DNA, 899 bp, Zea mays
  Peptide Sequence Number=SeqID_57797
gaagctccagtgcagggttcttgcctgaccgccatcgcagcaaaatcaacccaaggacccccctacactgaccactcccctactgcccttgcccctttcagggtctcttttgcagttttacaggccgaagggtgtacgggcgatctcgagccgttggattgtcattgcgcggtgcagattaaatcatatcctcatcaaagcggtaccgaatcgcagccgtcagatcaaaatcccacggctgatgattccctaaacccgttctataatacccgctgtcagatccagattgggcggctacgatctaacttatccaaccgttatttcccatctaatcccagccgttcgaaaaggatccaacgacccgcatcactcgccctcccgacgcggctagacgcggcggcgccgcccactccctacggtggaggcgacgccggagtagtccgtacaggcgctctggtacgaggattcacgcgaaacgaagtgcaatacgcagaggggaccaaggcgaaaacgatgggggtaccctcacctcgagctatgcagcgcaggggcctgacgccgttgaggggcggcccaacggtgaagatgctactccggcaagaaattgcggcaccgttggccctcaatcgcgcccggaatgtccccgtgctccatcagtgtgtctccccgaagcgcccaggcccatatccgagaccttgccgccgacgagcatggggggcggcgagagtccgggcacgcgcggatcaaaccgaggtccccggcggcagctgcgggagagtggttgacccagcgtcgcaagcggaatctattgcaagggagaagaccgagctgacctccgtggcccacagcacagcgagatacgcagcgcgcgcgccggtgatgaccagcgggcccaccca

SEQ ID NO: 16019 - DNA, 576 bp, Zea mays
  Peptide Sequence Number=SeqID_57798
atgctcatgcgccgcaaggaggccaaggcccacggcaccgccaagtccatcgagggctccttccgccccggggacaccgtcctcatcatcgaggacctcgtcaccagcggcgcctccgtgctcgaaactgccgccccgctccgcgcagagggcctccttgtcgccgacgccgtcgtagtcgtcgaccgcgagcagggcgggagggagaacctcgccgctaacgggatcactctgcactcgctcatgaccctcaccgaggtgcttgccgtgctgctcaagcatgggaaggtgaccgaggagaaggcacatgaggtgaggcagttcctcgacgccaacaggaaggtggccgtgccgggggcggcgcctgttaaacccagggtgctcaggaagccattttcggagagggcgaaacttgccaacaaccctatggggaagaagctcttcgagctgatggaggccaagcagaccaacctgtgtgtcgctgctgatgtcgggaccgcaaaggaactccttgagctggctgacaaggttggagaggattatgtgaatctcatgtggatatattatctgatttaa

SEQ ID NO: 16020 - DNA, 339 bp, Zea mays
  Peptide Sequence Number=SeqID_57799
atggatggcggcaaccacccccgcggcggtgagccccccatctcgcagcacctgcaaggcctccagaaggggctggagattcttctgtctctcgcgcggggccccatagcgccaggaccgggaaaggggatactccgaaagggatccttctccatgaaggaaacgggccccgagccccctactgatcagaggttcgaaggctggcccctcggaagggttcgacagccgcctcagagcactcgggctccgcgcccactactggtcaaaggttcgaaggctggcccctcggaggggttcgacagccgcctcagaccactcgggctccgcgcccactactga

SEQ ID NO: 16021 - DNA, 351 bp, Zea mays
  Peptide Sequence Number=SeqID_57800
atgccgctcgcgtacgagctcgtcctccgtctcggcgtgcccatcaccgtcgcctggcgcgtcacctacctcctcccctgcacgctcctcatcaccacgggcctcgccgtcctcgccttccccaacgaccacccgcgcggcgtcggcgccggagccaagaccggcaatagcttgtggaaggtggtgcccggaggggtcggcaactaccgcgcgtgggtgctcgcgctcacctacggctactgctatggcgtcgagctcatcatggagaacgtggccgccaacttcttccggaaacgtttccacctcccatggaggttgcgggcgccgcggcggcgtgcttcggcgcgatga

SEQ ID NO: 16022 - DNA, 537 bp, Zea mays
  Peptide Sequence Number=SeqID_57801
atgttcggattacaggtggcaatgagattgatggttcttggtactgactctggtaatgctagtccactacagccaaacaggatacttgctgagtatgttgatgtgtactcacccttgctctacataacaaatcccccccatccccaggttgtcagtattgtaaccagtgctcaggagaagatggctcgtcttagacacactgcacggaagtctgtcatccccttcttaccctcccgactcgcggagcgtccactctgccgtccagtgaccggtcagtccagccacttggagaggctgcaccaccgcctgcatgaggagcaggaacatcaacgacaggagcaggagcagcagggctcttctttctcgctccagcaggagatagagtctgtgaggagctgctcccctaagctcccccaggaggcgccccctgcaccaccactgagcgccctagcccccggagtagctgttggaggagacccagacgacgggggtggtgacagcagctcgagccacgacaccgacttttctgctgactag

SEQ ID NO: 16023 - DNA, 411 bp, Zea mays
  Peptide Sequence Number=SeqID_57802
atggtcaaccaggtcgttgtgctcaacaccgagctagatgaggcacttgacgagttgggaaaggcttgtgcagagattgcgaaactgcatgctgagcgcatgtctgacaataggctccaaggcaggaggtgtgcccaacaagagcagcaagccccacatgatgaggcaccccagcagcagttgcctccaccaccacctccaatgacaatagtgcagatgtttctcatgcagactcaagtagttcaagcaatcgggcagacccttgcagccatacaacaagctcaacatcaacctcagcctcaaccgcaggtgcagatgctgcagatgccaagagacaagcatgtagagttcatgagaggtcatcccattgtgtttgcccactctgcagaccccatggacgccgaagactag

SEQ ID NO: 16024 - DNA, 465 bp, Zea mays
  Peptide Sequence Number=SeqID_57803
atgggcaagaacaacaagcgcaagcgtgagccgactcctccatcggaggagtttggtgactcgaagtactcagaggaggagttctcctctgagtctgaggggtctccggctcccatccccctgcgtgagtcgtctgacgactcagacgactcccaggggcttgcggcggaggtctggacgtacatccgggccgtcgagcgttccgggctcgagggctcggatgagtcggagtactcctcggatgaggaggactcggacggcagcggcgaggacgaggacgatgacgacgacggcgacgacgacgacgacgacggtggcgacggtgacggcgacggcagcggcaggggcggtggcggcagcagggacgatgatggcggcggtagcaggggcagcaaccggggcggcagcagcaggggcagcaccagaggtggcagcggcggcggcagcaacagggccagtggctag

SEQ ID NO: 16025 - DNA, 216 bp, Zea mays
  Peptide Sequence Number=SeqID_57804
atgagcaaggagaatccgggaatccggtatggctgcggaatgagcagcagggcgctcggcgcctcgatatccaccgatcctcagattccatcgttcctcagccgaaaaacatccatggcgtctccttcaccactcaatactcagctcattcaagtgttggagcttcagacacgcaccctcctgtcggagttggacaagcgtctcgactccaagtag

SEQ ID NO: 16026 - DNA, 1110 bp, Zea mays
  Peptide Sequence Number=SeqID_57805
atggcaagttcactcaacatccccgatgccacaagatgcggcaaggagcagtccatggcaaagccctatgcagttccaggatccaatgtcaggataccaaggagacacccgaatcccagccggggtggcagcccaatgaactatggaccaagaggtggcccatattcatcttatggacgtggcagggggcccaactactttggcagcccaggatcaagggggagaggtgggagggttggctgccatggccggagttacttcaacaagtcaatgcttgatgacccttggctggacctgcaacctggtgtcggcaacatactgatacctaggggtgagtatgactccaacaagtcctggctcccagaatcgctgcgaaaaaagaaggaaacgccgcctgctcaagggcaaattaaaccgacgccaggattgagcctagcagaataccttgacatgtctttcaatgaggtttctgataaagagaaaaagtttggtggagattctgttgaaggaaaaaaaaagaagggtgcaaatcttgtgccaaaggccgtgttggggcgtgggcagcggcagcgcctgcaactccgcctagagcctttgggcgggcgtgagggtgcgggtgggatgatccagacgttgtcggggaccataattaggggtactctcaagtctcctaattctcagctgtcacttcgccgctccactgaccgcctgacagaaggacagcgccgcctgcgccgctccgactgctgtgccgctcgacagagtgaggctgacagacagtcaggcccgacctcaggcaccataggaagctccgctccgcccgacccagggctcggactcgggatcagccccggaagacggcgaactccgctctgcccgacccagggctcggactcgggctcagccccggaagacggcgaactccgctctgcccgacccagggctcggacttgggctcagccccagaagacgacgaactccgctccgcccgacccagggctcggatttgggctcagccccagaagacgacgaactccgctccgcccgacccagggctcggacttgggctcagccccagaagacgacgaactccgcttcgcccgaccctag

SEQ ID NO: 16027 - DNA, 489 bp, Zea mays
  Peptide Sequence Number=SeqID_57806
atgtacgcgctgcgctggcacaaaccagacgtcgtggcaccgacgtggcccgagctcgacgccacagatcttggcgccgagttcgattgtgttatcaagagttatgttggaaagatggaagtgtttgtcggggacgttgtcttgttaaaagacccagagaaatctggcaattttgttattcgacgactggctgccctggaaggctatgagatggtctctaatgatgagaaggatgagccgtttgtgctcgagaaagaccaatgctgggtcctggcagacaacctagtccttaagccaaaggaagctagagatagccgcttgtttggacctgtcccaatgactgacatccttggcagagtgatatactctttaagaaccgctgttgatcacggtctagtcgagaacagcggcatggccacgaaactggatggtccagtactggcagtggagcttgatgtggaagagttggcgaagaacaataaggcgtag

SEQ ID NO: 16028 - DNA, 384 bp, Zea mays
  Peptide Sequence Number=SeqID_57807
atgctgtcaatagagctcggtgtatgcgctcgctctaccgagggtggtttgccccttggggaggagtgcggtgataatgaggatgatggttttgattatgactatgctaatggctttcggggatcaacgttcaatcgtcaacggtcggtggggcgacgcaaaagggacaacagtagcctcgatggccttctggcttctttccgcgttcggtcgtcgaggagccctgccaaggaggccggcgacagcgcacgcatctgcacaggtcagggtggccgcgcccacagcagaatagaaggggtatcggcgaatccagtcgggaaggccacgacagcgatagatccaaccttgaagatggagatccagccaaaggggcagcagatctag

SEQ ID NO: 16029 - DNA, 606 bp, Zea mays
  Peptide Sequence Number=SeqID_57808
atgacgccctttctcgacgtggacatcaccgctgaccccgactggagctccctgcatgcacgtggaggcccttcggaccgggctcggactcgggctaagtctcggaagacggtgaactccgctccgcccgacccagggctcggactcgggcttatcccggaagacggggaactccgctccgcccgacccagggctcagactcgggctcagccccagaagacgacgaactccactccgcccgacccagggctcggacttgggctcagccccagaagacgacgaactccgctccgcccgacccagggctcggacttgggctcagccctagaagacgacgaactccgcctcgcccaacccaggggctcggactcgacctcggccacggaagacagactcgacctcggcttcggaggagcttccacatcgcccaacctagggcgcagaccagccacgtcaacaggaggcgccatcatcaccctaccccaagctgactcgggccacagggaacaagaccggctccatcgctcctccgacggccacgacatcacaccagctgggtgccaaaatctctccggctgccacaacggcatgtacttagggcgctag

SEQ ID NO: 16030 - DNA, 228 bp, Zea mays
  Peptide Sequence Number=SeqID_57809
atggcgctcttccgcaagttcttctaccgcaagccgcccgatgggctccttgagatcaccgaacgcgtctatggggaatgctctctgcgtggtggtctgatttgcgtttccattgtcgaatgccgtggtaaatgtgtcggggcaatgcggcgttactggaaatgtttcggtgtttgttttttccccttattggtttgtcgtgcaaacgtctttacttccttctggtga

SEQ ID NO: 16031 - DNA, 297 bp, Zea mays
  Peptide Sequence Number=SeqID_57810
atggagtctagctctggatgtcttgtccctacactttccctcagaatggctctctcccctaggtgccccggatgcctcatgtgcccagactcctcggctgctcctttgccacctgctctgcctctagggaatggcatcaccctcgaaaccgatggcctcttccactttgtcgctcatgtctcttgggctctctgcgccctcgctaatcctcactggcatggtgctatggaggacgagtatcaggcctcctttgccaatgatacctgggatctggtgctagagatggcaatgggtcgg

SEQ ID NO: 16032 - DNA, 399 bp, Zea mays
  Peptide Sequence Number=SeqID_57811
atggcggccagggtgaaggctagctcaccggctccggcgaggagggggagccgcacggggaagagcagcaggagcaccagcgccgatgaagtgggatccacgcagggaagagcagctgttgcggttgtgccacgcagaagggagtcgcacctgggcggggaagacaatcggttgcagtgggcacaggggtgggcacacatggagatgcgctggccaggaggggttccacgtaggcagggggcatggcggtgggtgcagccacagccacccaggtacaggagacggtggagagggaaagggagaagggatggaggaagagggagctctgtccatggtctgaggatggccggcgtcgagctcctgttggtggcggctaggggaggggaggaggctgattag

SEQ ID NO: 16033 - DNA, 531 bp, Zea mays
  Peptide Sequence Number=SeqID_57812
atgtgtcggcagctgcatgaggggtttaagcggcggaagggtttggtgaggatggcctgtaagctgatagcaggatgttacgtcgaggtctcgacggtagcggtggaagttccggtggtggccctgacttctcagggccgaaatgcagatgcgttagcgctttattttggagaagatccagcacgatgtccatttgagcaagtagttacaacactccaaaattttgtgagattgttcacgcgttcccatgaagagaactgtaagcaactggatcttgaaaagaagaaagctctgaaggaagcagaagacaatagtaaacaactggaccttgaaaagaagaaaacccagaaggaagcagaaacagagaaaataaagaagaaatctgacagtgagaaagcttgtaagaaagaactggaaaatgataaatcttctaagaaggattcagcaaatgagaaaggcaagcttaacaatcccatcaaagagctagatatatcacttcaatcacctgcacaaactgccagtgccaaatga

SEQ ID NO: 16034 - DNA, 292 bp, Zea mays
  Peptide Sequence Number=SeqID_57813
atggagaacattgttaagatgcaagggtttaatagggttatcaataacatcatgaccaatattgtaaatgttcatacctgcctcgctggcggtgaagatctgatcaatcccattgtgctttctgagaaacttccagaacttctagatttcccgaaagacttgtctagcttagagctggcagcaaaggctgtcaacaaaggactcgagaaagttgagcaagagcttactacatctgaaaatgatggtcctgtgtcagagatcttccgcaaggttgctgttactaaccttgaag

SEQ ID NO: 16035 - DNA, 495 bp, Zea mays
  Peptide Sequence Number=SeqID_57814
atgggcaaaaacaacaagcgcaagcgtgagccaactcctccatcagaggattttggtgactcggagtactcagaggaggagttctcctctgagtctgaggggtctccggctcccatccccctgcgtgagtcgtctgacgactcagacgactcccaggggctcgcggcggaggtctggacgtacatctgggccgtcgagcgctccgggctcgagggctcggatgagtcggagtactcctcggatgaggaggactcgtccgaggaggacggcggcggcaacggcgaggatgacgacgacgacgatgacgacgacgaaggcggtggcggcggtgacggtgacggcaggggcggcagcagcggcagcaagggcgacagcggcggcagcaggggcggcagcggtggcagcggcaacaggggcggcagcggtggcggcggcagcagcaggggcagcaacaagggcggcagcggcggcggcagcaacaaggccagtggctag

SEQ ID NO: 16036 - DNA, 231 bp, Zea mays
  Peptide Sequence Number=SeqID_57815
atggggcgacggaactgggtggagacccaggcgaagaaacagactgagtacaggggaggtccacaggtcacaatgaaccaggtcaaaagcctgcgtagctctagaagaagatgtagtaaaagggagacaggtcctgggtgcccgagacgacgatgccaggtggtggaggtggtggtggagaccaggacgggtggtggagacaccccggtggacgacgaccggagtgtgtag

SEQ ID NO: 16037 - DNA, 273 bp, Zea mays
  Peptide Sequence Number=SeqID_57816
atggccccagccaagccgcgacgcttgatctcatccctgccgttaccccgcagatcaacggcaccaggtgccgtcttcctcctccagccgaacgcccaggaatctgcccaacggctggtggcgaggggtcgtagtctcgttggttttatatttggaaaaggaaagagtccaggcctcaacagaaccccagagattcccggcgcaatcaacgatctgcacggacgagttctcggagcagatatgcctggcaaggcggttacaacaacctactga

SEQ ID NO: 16038 - DNA, 897 bp, Zea mays
  Peptide Sequence Number=SeqID_57817
atgcagggactcgaccttccagcggtgctggcgatgggaaaaaactcaggacagctccttcgggagctcactaaggtcagtacgctccagttgaccagccgccttccaagaactgtgcacggagatattttgaagaatttgctcgcaccaactgctggtgctgtttcagttgagcaagctgaagctattgctgacctcccaaaaggtgaaatgtggtcggtgcacaagtttggtggcacatgcatggggacctctgagagaattcacaatgttgctgatatagtccttcgtgatccttctgagaggaaactggtagttgtatctgcaatgtctaaggttaccgacatgatgtataatcttgtaaacaaggctcaatcaagggatgattcttacattgctgtactggatgaagtttttgataagcatatgacaacagcaaaggatttgcttgctggagaagaccttgcaagattcctgtctcagttacatgcagacatcactgggcatgcaacagagtctttctctgattttgttgttggtcatggagagttatggtctgctcaaatgttatcatatgcaatacagaagcctgctaatgaaaacggtgatttggaggcttgtgtcaaagcttttgcaactatagataaattggctttggttaatgtcgaagggactggaatggctggtgtcccaggtacagcaaatgccatatttggtgctgtgaaggatgttggagcaaatgttatcatgatatcacaggagatggagcagcagcactgccaggcgtggtggcaggactgcttggaccatctggggcggtcgagtgctgcactggagtgccggggacaccaggagagtcattgggagaccctggtgaggtcggcgcgactggggtag

SEQ ID NO: 16039 - DNA, 498 bp, Zea mays
  Peptide Sequence Number=SeqID_57818
atggggcacaacgcagaggcgggacacgtggggcaggtccagagtgtcagcgtggacggtgaagttatggcgccaagcggcctggcgcacccgaccgattcggtagtgtaccagaccgtctacgtgaacagtgagttctctggaattatttgtataatttcaccagaccttcactatgcatggtataatggtgcaccgaaccgcctccaacggctagtcttcaacagacgtgtgctggtcaacgactacctgacgtggcgcccggaccggtggcacaccggaccgatctggtgcccaccagaacaggaaaccgccaatcaggatcccagactcacgcacgtggacccgccgaccttttcaagggctgacacggccccacgggcgccgacgaaggcacaaaaatctcctgtcactgagaatctcttcaaaagcttcgacttcgccattaatctagcggataatcccgttaggatcaccgcggataaagttctgctatga

SEQ ID NO: 16040 - DNA, 288 bp, Zea mays
  Peptide Sequence Number=SeqID_57819
atgggaatgggggcctatcacatgggcccggtgggcaatgccgcaatgggaatatgggggctgtcacgtgggccccgcgtccggagtgtgctatcacgtgggccccgcgtccgaagtgtgatggttgtgcagaatgagaatggaaatggaaatgacagaacagatgggaatgtgggggttgcggtgccgggtgaccagggtgtgcaacaaggaatggtggtgggaatggaaatgacagaacagtgtggtactggtgtgagcacaaaataccagtacaataatgactag

SEQ ID NO: 16041 - DNA, 300 bp, Zea mays
  Peptide Sequence Number=SeqID_57820
atggggacttggcctaggatgttgtgtgcatgggcgttggtggtttatgctcctgtgctgctgtggtggtttcatgcttggtgtcctgggtgcggtgaggcgctcacgttcctcggcgtcgaccttttatttagtggcggctgcagcagcagtggtggagaatgggacaacattgtctttggccgatgcccgatggctgctgtcctcaaggaaaatatgaacattgatttgcgtgtcatgggaatagctggttctaggacaatgcttttaagtgatattgttaattttactaagtggtga

SEQ ID NO: 16042 - DNA, 3069 bp, Zea mays
  Peptide Sequence Number=SeqID_57821
atgggcgccgctcgtacggcggcgccggtctttatgctgctgctgctgctccacctgtcgccgcgcgcggttgctgccgggacaggcgacgaggcagcggcgctgctcgcgttcaagcgcgcctccgtagccgccgaccaggccggcaggctcgcgagctgggcggagcccaactcgacctccggctccgcctcgccgtgcgagtgggccggcgtctcgtgcgtgggcggccacgtccgtgcgctcgacctcagcggcatgtccctcgtcggccgcctccacctagacgagctgctcgcgctcccggcgctccggagcgtcctcctcggtggcaacgccttccacggcgacctcacccaccgggccccgccgcggtgcgcgctcgtggacgtggacctgtcgtcgaacgctctcaacgggacgctgccccgggcgttcctggcgtcctgcagcagcctgcggctgctgaacctgtccggcaacaccttcaccggcggaggcggcttcccgttcgcgtcgtcgctgcggacgctcgacgtgtccaggaacgagctgtcagacgccggcttgctgaactactccctgagtgcctgccacggcattcggcacctgaacctctcggccaaccagctcaccggagagctcccaccacggttcgcgcagtgcagccaggtttctgttcttgatctctcagggaacctcatgtccggcgccctccccggcaggctcttggccacggcgccggccagtttgacacgcctgagcatcgctgggaacaacttctccggggacatctccagaaagctgctcctacccaacaactacatcaatggaaccgtgccgccctcactcggcaactgcagtaatctggagtcactggacctcagcttcaacctcatggttggtccgatcacgcctgaagtactgttgcttcctaagcttgttgatttggtcatgtgggcaaacagtctctccggtgagataccagacacgctatgctccaacagcacagcactgaagacactggtcataagctacaacaacataaccggagtgatccctgtctccatcaccaggtgcgtgaatctcatatggctgtcacttgccggcaacagcatgaccgggagtgtccccgccggcttcgggaacctccagaagctcgccattctacagctgcacaggaactcactctctggtcctgtgccagcagagcttggtcgctgcagcaacctcatctggcttgatctcaacagcaacaacttctccggtgcgataccgccgcagctagcagcacaggcagggctcatcactggaggcatggtttctgggaagcagttcgcgttcctgaggaatgaggctggcaacatctgcccaggtgctggagtgctgttcgagttctttgacatccgtccggagcggctggcccagttccctgctgtgcactcgtgtgcctccacgaggatatacactgggatgacagtgtacaccttcaaccaaagtgggagcatgatattccttgatctctcgtacaacagcctcacaggcacaattccggcgagcctggggaacatgacgtatcttgatgtccttaacctggggcataatgaccttaccggtgcaattccagatgcgttcacagggttgaaggcgattggtgtccttgacctctcgcacaatcacctcaccggtgtcatccctgctggactggggtgtttaaatttcctagctgacttcgacgtctccaacaacaacctcactggtgagatacccacgtcagggcagctcagtacatttccagcatcccgttttgagaacaactccggcatctgtggcatccccttggatccttgcacgcacaatgccagcactggaggtgttcctcaaaacccctctaacgtgcggaggaagtttctcgaagagttcgtgctccttgcagtgtcgctcaccgtgctcatggtggccaccttggttgtcactgcatacaagctcaggaggccccgtgggagcaaaactgaagagattcaaactgctgggtatagcgacagccccgcatcgtccaccagtacaagctggaagctttctggttccaaagagccactgagcatcaatctggcgatatttgagaatccgttgaggaaactaacatatgcccacctgcatgaggctaccaatggcttcagctcggaagctcttgttggcacaggaggattcggtgaggtttacaaggctaggctcatggatggcagcgttgtggctgtcaagaagctgatgcatttcacaggccagggcgaccgggagttcactgcagagatggagaccattggcaagatcaaacatcgcaatcttgtgccgttgctaggctactgcaaagttggcgacgaacgtctgcttgtgtacgagtacatgaataatggaagcctggatgtcttgctccatgaaagggacaagactgatgtgggtcttgattgggcaacaaggaagaagattgcagttggctcggcaagaggactggccttcctccaccatagttgcatcccacacatcatacaccgggacatgaagtcaagcaacgtgcttcttgacgataatctcgatgcctacgtatcggatttcggaatggcgcggctcgtgaatgctgttgactcacatctaaccgtgagcaagctcttaggaacacctggttatgtggctcccgagtacttccagtcggttatttgcacaactaagggcgacgtctacagctatggcgttgttcttctggagcttctctcagggaaaaaaccaatcaatccgactgaattcggcgacaataatctcatcgactgggcaaagcagatggttaaggaggaccggtgcagcgagatatttgatcctatattgaccgacacaaaatcctgcgagtcggagctgtaccagtatctggcgattgcttgccagtgcttggacgatcaacctagtcgcagacctacgatgatccaggtcatggcaatgttcagtgagtttcagattgactctggcagcttcttcttggacggcttctcgctcgattcagatagaggaatcatctga

SEQ ID NO: 16043 - DNA, 816 bp, Zea mays
  Peptide Sequence Number=SeqID_57822
atggcgggtggatccgtcgagatcctcgattcccttgcgatggaagcagatggcgggcggcacgataggcgagaggtagagtgggcagggaagcacgaagggtgggatggcgggtggggaaacgcggagctcgacgcgagaggggcgggttcacagagcttggccgaccgagatcctcgcatgtcgacgaggagagcgggctggaggttggcaaggctcacggcgaggagatcgagctggtggttgcctgcttggtgcggagctcgattgactgagattgtcgcgacgaggagggtggaggttgccgagcgcatcggggacgctgtggatcctggagcgcacgaaccagcggtagaacccctcgaggtcctcctcctccgacacggagacgccgtcgagggtgaagtcgcgacacccgctggcgtctccgcgcacgcgcacggtagtcccgccccacgcgaactccagcgcggacgagacacccgaggcgaggttccaaatgcggccgatcacctcgaccgggtgctctgttgcgccatcgccctcgtcggccctcctccaccgccatctcctgtcccgtccaccgtgtgctcagcaagcgacggagtcgccaccaggtgtcgcggcgtggctggaggcggagcagaccgccccgtcttcgccctatccagggctgcgatgggaagagagagaggctgccccgtctgcaggaaccagatgtgccattgggaggggaggggacaggaggcagggcggtggttgagggtggaagctggcaagcggtggccgggacactggaggccgcgggttgggtga

SEQ ID NO: 16044 - DNA, 189 bp, Zea mays
  Peptide Sequence Number=SeqID_57823
tcactcaatctgaactcgtacggtccaaaccccagggttatgaaggcttgggagcaccgggaggataagcggggatgttttgtctggtttgaacatggcggtggcctgactccttccggtataacagttaaggggattttattctatattgaaaaacttcctagtcctttgggagaggatgagctttga

SEQ ID NO: 16045 - DNA, 243 bp, Zea mays
  Peptide Sequence Number=SeqID_57824
atggctagttccaaagatcgcaccaaagtttccctaagcaacatcatgaaaccaactctggagagtctgtcggctgaagatcaacaacaatttgaagattacataagacaacaacaagcccaagagcgcaaggaggcgaaagtgaaatatctggcacatttcaaggtggatcgtcatcagaggatcgtccaacaaggagagttcgagatgacatctcttctacctactacacatgcccctaat

SEQ ID NO: 16046 - DNA, 564 bp, Zea mays
  Peptide Sequence Number=SeqID_57825
atgcaggcggcatgccaccgcaccaaggggacgcaccctttcgacttcgacgcgtccatcttggaggtccaggcccacacgtcatgcgggcggaagcagcagtcaagtcgtcagcaagctcacgccccctcctgggacagcaagagaaccctctcccacggcgtgaagacgacgcgctcggatcgggaaaggggatactccgaaagggatccttctccacgaaggaagcgggccccgagccccctactgatcagaggttcgaaggctggcccctcggaagggttcaacagccgcctcagagcactcgggctccacgcccactactggtcagaggttcgaaggctggcccctcggaagggttcaacggccgcctcaggccactcgggctccgcgcccactactgatcaagggttcgtaggctggcccccgaagggttcgacagccgcctcagagcacgcagagcgagggatgaccctggactcgggggctgctctcgcaaacccgactccggccataccgttgacagcgtcaacataccagcccgagaacttgggacctgactaa

SEQ ID NO: 16047 - DNA, 876 bp, Zea mays
  Peptide Sequence Number=SeqID_57826
atgaggtgcaagaggcacccgaaccaggccggcggcggcgtgtgcgccacgtgcctccgcgaccgcctgctcgcgctcgaggccgcgcagagcggcgacgcgtccccgccggggcccgcgcaggcgcaggcgcccgagcccccgccggcgttcccgaggtcggtatcgccgtacgtgtcccgcaggaagtcggacacgtcgggcggcgcgctcaggcaccacccgagcctgctcttcttccggacgccgcaggtaggccccgcctacggaggcggcggcggcggcggcgcgctggaggaaccccacataggctacggctacgggtacgggcacgagaagcggcgcgcgggcaagttctccgtgctcgccacgctcttcggccgccaccaccaccaccgtagaccagaagcgaggcaccaggagcggaagaagcattcttggctcgccggcatcatgccgcgccgccgccgcagcaaggggcaggtgccggcctcggccacctcgccacagtcggccccgccgaggcgctcctgccgcgcggtcagcaaccgggggctctcgccggagcgggacggcgacggcgacgacgacgagagcagctcgcccgccgcgtggcggccgtccccgtcccccatgcggcggaccacctgccggcgccgccagacgagcggcagcatgccgtcgggcttcgccgtctgcctcagcccgctcgtgcggcccatcccggggcgccggcccgtgcagccgccggacccgggagcattctccagcgagctccggccgccgccgccgccgccgctccacagcagcctctcgtccgcctccgtcacgcgctgtcgctccaggaagctcgccgacggtggccgcttccggtga

SEQ ID NO: 16048 - DNA, 1857 bp, Zea mays
  Peptide Sequence Number=SeqID_57827
gaattcagtgaggaggctgcgggcagacaagaggaggatgaattggttaatgaggagaatggaaaacccgatgagcacattaacgaagaacaaaaatataactcttctgatgtagagaaggagaagcacattactctgtctaccaatcgattaaataaggaaaaggctcttacattggctgttggtgatgaagatactgacatgcttgctgatgtgaaacagatggcagctgcagcagctgcagcaggacaagcgagttcatcatttgagaaccagctccggccaattgatagatatgcaatgcgctttatggaactctgggatccagtaattgacaaagctgctttaaatcatcaagtaaatgttgaggaggaagaatgggagcttgatcgtattgaaaaattcaaagaggatttagaagcagaaattgatgaggaccaagaaccactttcttatgaatcatgggatgttgattttgctacgacagcctatcggcaacatgttgaggctttaactcaaaagcagttgttagaagaacaggaaaggcaagctcaggaagcaacaaaagagttggaggagaagaatgataatatgagcagtcaccacagaaagtcaaaaaagaacaaaaagaagacaggcaaactcaagcccctgaaaagagtgcgtctgtcgcctgaatcagaagtcatactggaggaaacctctgtagataatgcaccctcacctgagcttacaagtgatgaatcgccacaccattattgtaacaagcgtaagaagattacggttgccactgaggaaaatagtaacagcagaagtttaaagaagctcaagaaaactactaaatcaagttttatttctgaagccttgtcacctaggctgaaggaggaccttaatgattcagattcaaaatcagtgggtagaactaaaagtgatggcagatttttcatcccttgcatgccagtgaaacgtgttattgtaataaagcctgagagattgaaaaggaagggaatatggtctcgagattgtgcttcagactcatggtcatctgaggaagatgcagttctttgtggaactgttcatgagtatggtccactttgggaattggcaagtgattttcttcattttttgccaggcggttccttgtataggggaagatatcatcatcctgtgcattgctgtgagagatacagagaactgttctgcaaacatggaatgtcagcaacagataattctaacagtgaaaaggttccttctgggactggaaaggctatacttagagtgtctgagtttgtgaggaaatatggcacaggatatactagtaagggtagtggtccaagccgcagcccacaatggtgcccacctactgtcgcagttccccttccacgcagccaaggcgtgggcggtgccatcgaggcccagatatggttcatccaacacgcgctgaaggaaatcggtggcatgccgtacccgcagctgacgcgcaactatgaggattgtagcctcctcatgaatatgaagttggaggcctccggaatgcgattgagtatgatgacgcgatcacatagaggaacatgtctcttgatgccatcctcttcgctttgctatcggagatattatccgcacgctggcggtgaagaagacgaccaagtctccatccatgttggttcgaagcgcacatgcaagtctacactacaatggttttggagggaccgagagttgctctcattccatgatggtgagcacatgtatgacttcgtgctccaccaaattgggatggtgagctccctcaacctctacgacgaggacatcactgagcaacgcacagtcgagaagatcctacatgttgtccctaggtag

SEQ ID NO: 16049 - DNA, 645 bp, Zea mays
  Peptide Sequence Number=SeqID_57828
atgaaggcacaatttctgatgaccggccttgggctcctttcgtacttggggattgagtgggttgtcagccccttcatggagtgtcccacggtggaggacatgggagtggtgaaacgctttctgcactacatcgctagcaccaaattggttggctacttggatagcgacctcgccggaagcacctctggtgctttgttcttccttggtgctagcctgatcagctggatagcatcagaagcttgttatgatggtgaaagttctcattgggcatcatcagcttttcacataaatgatgctgcccgccacaaatctggttcaaagtctataggaaagcacaaagccgcattggaatctggtagacttctcaaatccaaagttcagaagattactgaatcgcatcaggaaggggcaattgctatgagtagttttctccgtatgcctgctcaactattgccaagtacagctgacttccacattagtgactccctatctgactttggtatcagagattctgaattctatttttccgaggatctcttgcaagaggttgacgcccttgagttcttcccagatcagggtgactctggtctccttcctggtattgaagagttagaatctctttcggatttcacagatatcggatga

SEQ ID NO: 16050 - DNA, 399 bp, Zea mays
  Peptide Sequence Number=SeqID_57829
atgatgaagacggacaaggcgtcgctgctggccgaggtgatcgagcatgtcaaggagctgaagcggcagacgtcggtggtgctcgatgtcgagggggaggagcccgaatttcaggtagaatgggtacttcgggctcttgaggaccttacaatgtacctgagacgacagagggaaggaggtgacgaggctggcgcaatagtcgcctcctctagagacgacaacgacatcgagatgatgcaggagagctcagagccctaccagcacgcttcctccagagacgacgacgacatcaaggcaatgttggagagctcggatccataccaagggccttcagacgcattccaagagatgggacatcagcccatttttatcccttgctcatcctacgtgtgggattaa

SEQ ID NO: 16051 - DNA, 924 bp, Zea mays
  Peptide Sequence Number=SeqID_57830
atggatccgaaattgagcttcgattcactggtaaattatccatggctgtggaaccagctagagaatacagaaggtagcagaaatggggaaggagacaacaggaagaagaaggtggaggcagcaggaatacgagagttcctttcggtagcgttcacaatgtttaggtttgatgccttacacgacagccacccagagaacttaactccgcccacacacagagagcagcagcaggttacacccattttgggccttggactcgagggttggcgcggcgctggcgacgtggacgctcgtctgccacttgggccacttgctgctgtgcgtcgggctggatttcgacctcctgttgctgggcttccgactgcagaccatccgccgagccctttccccacccgttcctccatctcactgtgtcggcgctctccactccacacctcgttcctgtgctggccatcttcttcctctgcgtggtggcctacccctgtcggtgcccagtccgagtgccgcgtcgcgccccccgtctcctctgctcgctcagcgcccatctcctacggtgcctggcagccgcttcctctctgctcgccgccgcacgccctggagctccaatcgtcgcgccctcggctccctcttgccgtgcgcgtcgtggcagctatccggccgcggagcagtccacgccatggagctccctacctgaccgcgacctcgccggaaagctctcgcggcgctcctcctctgctggcgctcgccctgccctctgccatggacgccgtcggccttgactccctctggccgcggcatccgtcttactccctgctcgaccctgtttctctcccaagcacctccgatggccttgctcgtctcgcccccaccagaaaaggccatcgggacatcgtgctggtcgcgagtctcctctgtgctccataa

SEQ ID NO: 16052 - DNA, 159 bp, Zea mays
  Peptide Sequence Number=SeqID_57831
atggccaagcacgtcgtctccgcgataagcgtggaagcttcaaccaccgcgcgggatcgtggtggcatggagcttgacgagcaagctactgtggatcctgaggttcagcagatagaagttgctgagcaggagctcattgaagtcaagttgtgcctttga

SEQ ID NO: 16053 - DNA, 429 bp, Zea mays
  Peptide Sequence Number=SeqID_57832
atggcacctaagaaagtgaccactagggctagctcctccctggacgagaccacaaaggtgacactcgtcgacaagaaaggcaaagcaacccttgcagaagacaccctacccacaataactaaaaataatgagacaggggtagtcaacaacaagcaccctcatactgaagacccgcctaccccagaaggcagcgtccacacatgcagctccaaaggcctctctcatgatgacacaccaccgagatttgttcccgtagcacacctcccaacccaaggggtcgaagataacctgcaagatggtgaagacctaggaatctcagcagatgaccagctcaaactgcgagccctatgcataaaaacaaccaccttcaaaagcaaagggagatcctcgcagtcaagaggcaacaaaccaacatgtaggccagagtga

SEQ ID NO: 16054 - DNA, 216 bp, Zea mays
  Peptide Sequence Number=SeqID_57833
atggagcgcatccaagataatgatagtaatgatcaggaaaaagaaaagaaagagaagaaagtggagaagaagttctacaagaagaagaaaggagaagcccacatagacaaggagatggactcagactatagctcctccgactccaacgatgaaggccttgctacaatcgccttcaaccaatcttccctctacccaagatcaaccacacttgattaa

SEQ ID NO: 16055 - DNA, 135 bp, Zea mays
  Peptide Sequence Number=SeqID_57834
atggctgtgccgccttctgctaacgccgcaccgaatagaccagagcaggctattcagaaattgacagactatgttgaatacggatggaactctgctcaagaacctctccatgttgatagagtctggcccttgtag

SEQ ID NO: 16056 - DNA, 279 bp, Zea mays
  Peptide Sequence Number=SeqID_57835
atggagctcgccggggacctcctccatgggggcacaccagatctggcgaaggacatgccggatctggcctccggcgacccacatcaacgattcgaccgccataaatgggaccaactgatgggaaagccaaccgtgcaaagagaagaggagggccaagccgccgccgtccttgcattagtatgttcagcttttttacttaaaagacatgaacaacctaaattacgccggcagatattgaggcggatgccggaatccagccgagtgggtgcagtgtcttag

SEQ ID NO: 16057 - DNA, 243 bp, Zea mays
  Peptide Sequence Number=SeqID_57836
atgggcggcgaggccttttggggctgcggatgccagatctggctcctcagtggtgggatggccagcgagaggcacggtggtgcggcacgttttgaagatgaggctgttggcggaggcagggtggaggatcaaggttttggaagtcttgttggtgaagaatcggagctgtctcaagtggggtgtctcgtggcatggcaacgacggcgcgccgcagtcttccttctcctgtgtcgatgtttgtag

SEQ ID NO: 16058 - DNA, 354 bp, Zea mays
  Peptide Sequence Number=SeqID_57837
atggcgcttcctgttgacgtggctggtctgcgccctaggttgggcgatgtggaagctcctccgaagccgaggtcgagtctgtcttccgtggccgaggtcgagtccgagcccctggatcgggcgaggcggaggccgtcggctgaggccagggcggagtccgagccctggggtcgggcggagtggagcggcgctatccttctgtcaggccggtcagtggagcggcgaagtgatggcggtcacttctgctctgccggctggggggcgcgcgtcaggataaagctttatgctgatgggggttaccagctgagaattaggagccttgagggtacccctaattatggtccccgacagtag

SEQ ID NO: 16059 - DNA, 804 bp, Zea mays
  Peptide Sequence Number=SeqID_57838
atgcggttgcaggggcgctacgctgcgttcctccgccgggcatcagccctgccgtccctgccgctggtggcttccctccacgccgccgtgctccgccgcggagtccccgccctcctcgcgtcgtccctcatccaaggctactccgcctgcggggacctcgactccgcgcgcgccctgttcgacgaaacgcccccaacgctctcgtcccgcaccgcgctcgccggcgcgctctcggcgcacggccggtgcgcggaggctctggatctgctaaatgtcccggaggcaggggtggacgacagggcggtgacggtgctcctggcggcgtgcgcgcgcgcagggatggtggccgaggggaggcgcgtgttcgcgagggtaccccgccccgcgctgcagcactacacgtgcatggtggagatgctggggcgcgtcggggaggtggaggaggccgagagactcgtggccgggatggaggcgcgcccggacagggtcatcttggcggcgctcctcaccgcgtgccgcgtgcacggccgggttgacgttgccgagcgggtggccgggctcatgcgccgcaatgatagatcgacagttccgtggctggcagtgcggctctctcctgtgccagtcatttttacgccgatgctgatctctgaaagggagaggcatccagaggctacaagtataggctcgaggactgtatcagattcggatccccggtgccgcagtggcgttcgcatcttggctgtctgccaagaacagcgcacggcaataatggctgttgctttcggtcttttacttggagtctag

SEQ ID NO: 16060 - DNA, 456 bp, Zea mays
  Peptide Sequence Number=SeqID_57839
atggaagcgcagaacggctcctgcggaggggcgcccgtggtgctcaacgtgtacgacctgacgcccatgaacaactacctctactggttcggcctcggtattttccactctggaatcgaagttcatggtatggagtacggatttggagcacaccagtttccggcaagtggagtattcgaggtggaaccgaaaagctgtcctggtttcatctacagaagatctgtgtggatgggcacaactgacttgtctagagcagagttccgctcgttcattgaaaatcttgcaggaaagtacaacggcaacacgtatcatttgatttcgaagaactgcaaccattttacagatgatgtctctcaatatcttgtgaccttctataagccactccagattctaactgagacttcaaacaagggcggatctacacccgggccacccggtccagggcccggggcttga

SEQ ID NO: 16061 - DNA, 261 bp, Zea mays
  Peptide Sequence Number=SeqID_57840
atggcggggagcctgcgtgtcgcgtggtggccctccgcaccgcgattcaaggtattaagcccccatgttgttcttgctcttcctccccgcaacgactcccgtgatccgttcgtggagcaattttcgctcgaccgtgaatccgggggaatcggttgcgagtcgtgggcttcggtcgcacacgagcaagctacagaggattctgaggttcagcaagtagagatagctgagcaggagctcattgaaggcaagttgtgcccttga

SEQ ID NO: 16062 - DNA, 1251 bp, Zea mays
  Peptide Sequence Number=SeqID_57841
atgacgagcactgacctttacctgttcgtcaacaacagtagcaaggctcgcgggttgtgcctactggagaacacgttggcattcgaaggcagcgagcgggggattgacggtgggaggcgcagcaagccggtggtggagtctgatggcactgatggagaccagcacgctggagggcaggccagtgggggatcgacgacgggaggcaggcggggtattaacgtcggatgctttcgccaatcgttcctggctctccctccagactgcagggtgagcgcgtcctactcccactccatcagccggatgctgagcggggtgcggtcggcggcgcgcaagaggctcttcaggagcgacccggccgagctgctgggcgtcgccaactggtcggagacgggcggcggcggcgccgggggccaccagcactggtggacggcgctggagaacaacttcgtgctggaggccaccgacgacgagtacggcggggtcgtcgtcgacgccgatcggctgccggccgacagggccgccttcgcgcgctccctcgcggcgtcgctctcctactggaagtccgtggggaagaaaggggtgtggttgaaattaccggtggatctagccgagttcgtccctttagcagtgaaggaaggcttcaagtaccaccacgcggaggaagcgtatttgatgatgacgtactggatccccgatgaaccgaatatgctcccagcaaatgcttctcatcaggttggggttgggggttttgtgatcaacgaccaaatggaggttctagtggtgcaagagaagtaccgcggatcgtcgctggatggcgtatggaaactccccacaggcttcattcttgcgtctgaggaaatctacacgggggccagcagagaggtgaaggaggaaaccggggtcgacaccgagttcgttgacgtcgttgctttcaggcatgcccacaacgtggcgtttcacaagtccgacctcttcttcatctgcatgctgaggcctgtgtcgagtgagatcaagattgacgagacagagattcaggcagcgaagtggatggcgctggaggagttcgtgaagcagcccttcatccaggaagaccacatgttccagaagatcatggacatctgcatccagcgcctccgcaagtgctactgtgggctgacgccgcaccacgtcgtctccaagttcgacgacagaacgtccacgctctactacaatgtcgccgagcccgaggacgtgaactgcagcgccgcctga

SEQ ID NO: 16063 - DNA, 312 bp, Zea mays
  Peptide Sequence Number=SeqID_57842
atggccggccagcggccacattatcggtttggtttattgagcgcgagtaggtcgtcgtggtacggctgcttctgctttcccctgccgggaagggcgcacgtgacggatggagacgtgttggtgcctcggatagggcatgccgcacacatgggggcaagtccgtgcgcgtgtgagtcgggcgctgttccgtggaaacaggtggtgtgccctcctgccgcgaggcccgccgcccgcgggccacacgagaggcacggaggcggacacggctctcgaaggcgacggcgcgcgccaacgcggcaacacgtgggatga

SEQ ID NO: 16064 - DNA, 255 bp, Zea mays
  Peptide Sequence Number=SeqID_57843
atgactatacggtctacgcgcgcgccgctctttttgatccatcagcctgcgcgcgcggcgtcagagattccaacgccgattatacaaatccatgtcacgttctgttacaagcaggataagcttagcttcgtgactttcggaacgtttgaagacacatctagaccagagtatgggcagtatgacccaatcatcctatctgatctaaccaatagatttttgacccgcaacaatctacagaatcagtataagacatga

SEQ ID NO: 16065 - DNA, 1005 bp, Zea mays
  Peptide Sequence Number=SeqID_57844
atggcattcaccggagacgccgatggtttcgccctcgacttcatccgtgagcacctcctcggcgctggttgcggcggcgaccccgaccccgtgcattgcactgtagatctcgacggcgacgacatcaccttccccgttctgcctccacctcaaccagaattcgagcccatgccgttcttgccgccgccgccgccgccgccgcagcaccagcatcaagggtacatcggcgtcgacccgaccaacgagtacatgggcgagccagcggcggtgttcccggagcaggagccagcgccaccggtgataataacgttcggaagcgagccctcgtcccccgtcaagcagcctctgaccatcgccgtgcccccgaggccgtactacgcttcggcggcagcagcaacggcgcccaccgccgcacagctggtagcagcggcggccgaggccgtggaggacttccgcaagtaccgcggcgtccggcagcgcccctggggcaagtacgcggcggagatccgcgacccggaagcggcggggctcgcgcgtgtggctcggcacgccatcctcaacttccccaacgaggtcggcacccgcggcgccgacttctgggccccgcccgctccggcgaagaaggcggacacggccgccgcgaacaagaggaagcggcagcagctggtggaggacgccgacggcgacgacgtcgaggtggtcgcggtcgtggtgagcaaggcagcgaaggttgttgatgagatccctgcttcgtcgccgtcccaggaccagacatcgtgcacctctcggtcgtcgtccgtgtcgacgcgcgagaccacagcgacagcctcgtcgacggtgacgtccgctgcggaggagacgggatcaggggctgtggggctcccgatgacgccctcgagcgggaactgggagcaatactgggaggcattgctcggcagcctgccgctgctctcgccgcagtcgcccctcccggcgttgggctttccccagctcaccgtcacttga

SEQ ID NO: 16066 - DNA, 567 bp, Zea mays
  Peptide Sequence Number=SeqID_57845
atgccgcagctgccctccttccatcctcgcgcaccttccatcctcgtgaaacccccgtcctcgcagatcccgcgctccctccgcgcccgcctgtggatccccaacgacgttgaccccgtgcctcccgccatcctcgccgcaatcgttgcgccagcgccttcgatggaatccaacaccacgcgcctgatggcgtaccctgccccctcacgtccaaggaaggcgcgcccgcaatctccagcgccatcggcctctcgtccaaccccaaccgctgctccagtgctccttcgaccaggtgctcctgtagaaggtacgagcccaccatcctttcgacctatccgtgcgagatctccgtgcttgaggtatctctgtgtcgagggaaagcgagtacatggtcctggtgccgacattgacaccctgtgtgttagtccaagacatgcaactcaaaacgagagaaatgataggctattttacaaactcttgattgataatgtcgaagaactgcttcctgttgtgtataaaccaacagtgggggaagcttgccagaagtatgggtcgatcttcagatga

SEQ ID NO: 16067 - DNA, 399 bp, Zea mays
  Peptide Sequence Number=SeqID_57846
atggtgggctcgtaccttctacaggagcacctggtcgaaggagcactggagcagcggttggggttggacgagaggccgatggcgctggagattgcgggcgcgccttccttggacgtgagggggcagggcgggcgcggagggagcgcgggatctgcgaggacgggggtttcacgaggatggaaggtgcgcgaggatggaaggagggcagctgcggcatgcggggctgccagcggaacgcggggagggttcggccgcgagcgggcgggggcagatggttgcgatggggcgcgcggggctttacaacttggtggtcggcgttacttcctccgcgacggcgaggtcaccagagacgaggcagaagcgatcaccggggagtctggggtcaccggggagggctag

SEQ ID NO: 16068 - DNA, 222 bp, Zea mays
  Peptide Sequence Number=SeqID_57847
atggagatcccttacgacaaaagtgatcgagatttattccacacttccacgattgttactgctggtttgcaatcagctagccagctggttcaacctaaaccatttaccaactattcatcaagatgcagatttgcgaccggggcagcttgggctgcagcccggtcactcagcccaataatgcctatagtgtgtaatccagcattgcagcacgttattcaataa

SEQ ID NO: 16069 - DNA, 558 bp, Zea mays
  Peptide Sequence Number=SeqID_57848
atgacgaacatcttgctcgagaggagcatcaacaacaacacgtttgtaacaattgtcaaggtatgggaggtaataataataacaatcgacacaataataacaatgataaccatgatcattttgctaagttcttctaatcttgaggatgaagatattgttgtagctaaaattacaagggttgatgatgaacatgagacaagtgatgaggagcgctcagatggtcaagtggtcaagctacaacaccacaatttgttccacaccttcttcattgtcaacaattattgtgttcttaccatcattgatggtggtagctgcaataatttggtcaacgttgatgtagtgaagaaccttggagtattttcttcagagagacctcctggatttccacctttgggtgggattaatgatgagatactattgaggatgacttcaattcaaaagggggatgatgaagacatcactattagcaaggaagcactcaaaggacatgacaatgcactggataagggatgggacaagcacctaataagcctgagtcctactcacatacgactttga

SEQ ID NO: 16070 - DNA, 393 bp, Zea mays
  Peptide Sequence Number=SeqID_57849
atgacaaacattcaaatgcagcatcaaacattcttctatctaccagatccaagaggggaaagtggttcttaccccaccgattgtagaatggtgctcgttgaagggatgaaggcgggggaaagcagaactgacaccggtgtggactaccagactcaggaagatgacaacgacgacgaggatttttatggttcttgctcgcagtcgaccgatgggaccgcttcaacaccatgcccgcctcctgctttgtgctattgttcaccggagacgttgactagattcgagtccacctttttccaccacgcacggcagcgcctcggcttcggtcgcccggagtctgcgctcaagtcgaataccaccaaaagggatcggaagctttctcctctagcatgttag

SEQ ID NO: 16071 - DNA, 477 bp, Zea mays
  Peptide Sequence Number=SeqID_57850
atgagccaggctgtgggctcggccacgtcgacgccgggggccggtgatgtgatgacagcggcggcggcgaaggccaaatcacaccggggtgtcccacctgtcactgtttctaatggcatcggggagagggatgaatcttctaaaagttgtgctgatgtagatttggccacgctgtgcacacagaagactcccttgctttcgttcgatcatgtggtatttgaaagtgatgcctctgtaaatgaaatcattcgtattgtatccatcctcagattgcttcttttgttctactacaaatacactcaacatggtagggagaggtctcgaggtcaagccgggacccactgtcaagcaaaggtgatgggaatgagggccacagaagtgaagagaaggcagttgctgcagcttcaaaatcaagtcttgggcttgaaaaaaagcaaggatgagtatgagtctaatgattctgatgaggggtgttag

SEQ ID NO: 16072 - DNA, 258 bp, Zea mays
  Peptide Sequence Number=SeqID_57851
atggaaggacctcaacaaccatccataagaggaactccaagaaagaagatacaactgtctgcagaaacaataaacaatttttcttctcggactgctcaatctgtgcataatgtgcctgacgctacacaacaacgaggggaactacctgggaagcgacgccagaccaacctcgccaagtgcgctgcctgcgaggccaaggatgtgcccgcacaaccgttgcccaacaaggtcaagatcgcccccaagtctggtgcatga

SEQ ID NO: 16073 - DNA, 1278 bp, Zea mays
  Peptide Sequence Number=SeqID_57852
atggctttaagtacattaaggagatcaaggttgcctgttgaaaggcatgagaaaaatcatgaaattttattgagatgcatcaaagaaaatttagcatataaggatggcaaacgtattgcagcatgtatcatttacaaatgtcttttgcactggcgtgcttttgaatcagagcggactgctattttttatcaggtgattgaggccataaatgatgtcctaaaggtgtgtcatcaatataaaatcaatttgagattttcaattttggtgccactacaggggaacgaagttgatgcgagtggtgtgatggcaactcttcttgtattcctgtccgttggtttagttggtgctactgatggtataggcttccatttaactgggaaggtagtaaactggagtggcatgccctttgccattggtatttatgggtttttctactctgggcattcagtatttccaaacatctaccagtcaatgtctgatcactctaagttttctatggcactattcatatgttttgcaatttgcacagcaatatatggctctttttctgtcattggttttatgaatattgcatttcttttaccgttctttgattcaactgttaaaagtggggagcctatgaaagctaaaggggagatcaaggttgggattttggataaattagttgttgataaggaaaagaaaaaaagcgatgcccccaacgaaaaaattgaaggttatggagaaagtggacatgacaagcatgaagttaaatctctagctgaatcagtgggaccccctaacattgccattttttattctgagttcatggattcaggtcctctaattcataataaagaatcatgttctacttgttctgcaactgaccgatgttcaagaactagaacggctaaatgtccattaagttcaaaagagtcagtttccacaaacagtcatttggtgtttgatagtggcaagaaccatttggagttaaacaatcattctgtcacagattcagaaaggatttacgatggactggccaagtctctagatcgttatattcggggaaatggggaaacattagccaatcatccaaaaaaaagagagaaaactgacatccaaaagacactggcagtctggcaccatagttcaattgtggtggtgaggcaacaagcggagcaaaggtgggtcgcgccgccgcggggcgccgccgacgcgcgatggtgtgtcacaccggtggatgccatagcggagaatgcagtgagccatggagtggagtcagaaggagatgaagtctga

SEQ ID NO: 16074 - DNA, 444 bp, Zea mays
  Peptide Sequence Number=SeqID_57853
atggaggacttcgcacgcgcggtggaggacatggctcaaggtgttgtagcggctcgtgctcctaggaggggtgccgctgccgcgcccgccgcatttgagccaagtctgataatgggcaactttatgatgctctctatggttgacatcgagcatttctcacagaccacttctgacagcaggacacttgccttcctctcacgccatgatgacaccgcactaggagttggaccttctacaactgtgaagagctcgtcacgttcgatgcaggagatgtttgctgacgagaaggtcgaggaggacaagggggatgaggacgaagttgaggatgctcctttgacacaaccatcacaacctactccatggagacgacaaccacatgacccttacactccagacaccaacgctcttagggccaagggcaaggataagactaggaggaagtga

SEQ ID NO: 16075 - DNA, 177 bp, Zea mays
  Peptide Sequence Number=SeqID_57854
atgaaggctgctaacgagaagagagcacaagaggctaaggaaatggagatggctagagctgaaaagccgatgttgggcaatcttgttggtcatctatgtgcaaagattggatgcatcgggaactatatcgcagatgaggctcgtgcaagatatgtggaggaaaaatggcaaaggtga

SEQ ID NO: 16076 - DNA, 645 bp, Zea mays
  Peptide Sequence Number=SeqID_57855
atggcggcggagggagccccggtgctggtgaggcatgctggcggcgtggaggagctgcggcagctcccgccggggttccggttccgccccacggacgaggagctcgtggtgcagtacctccggcgcaaggccttgggcgcgccgctccccgccgccgtcatccccgtcgtccgcgacctctacagcctcgacccctgggacgccgtcgacgtgccggccgcccctgatgcgagcagccaaggcgagagatacttcttcgcggtgcggccggcgggcggcgtcggaagtgctaggagggcgaccgcgagcgggcggtggaggccggcggggaaggagaagccggtggccctgccccgcccgtgcggcggcgggagcctcctggtgggcgtgaagagggcgatggcgttcgttccccggcggaagaagaagaaggcggcggcggcggcggccctggcgatcggctgggtcatgcacgagtaccgcctcgccgcgccgctgcacaagcacttcgttttgggtcacccagggctgcagcctggcccaggctcagggagagtgggtcgtctgccgcgtcttccagaagggcagcggcaggccgaggaggaggaggcaacgaccggtgtcaccgtcaccgtcgtccgctag

SEQ ID NO: 16077 - DNA, 381 bp, Zea mays
  Peptide Sequence Number=SeqID_57856
atggctcccaagaaagcgacttcgaaggctaccacttccatcgacaacacagagaaggcagcccttctcactgagaagaagggcaagatagccctcgctgacgacatccccatgaggcccttgaggatgaggcagtcaacagcaagcgacatagccaggagaatccacccaccccagacagcaccgttcacacatgcagctctgagggactacctcgggcaccaccgccagaagcagaaagaaatacttggagccaagcgccagcgcataaccatgcaagccaaggttaggcagatgatactagatgaggagcagaaggacaaagaactggaacaacaaattgcagacatgcaaggcgaaggccaccaccagttgcaatag

SEQ ID NO: 16078 - DNA, 234 bp, Zea mays
  Peptide Sequence Number=SeqID_57857
atggaggtgaagctaaagcgctggtacaggcgccaagagtcgaaggagggggcagtagggtcactgcgcgcgggccctgtcgcacgcgggggccacgcggcagtgcccaccccccacgtcagaggatctcgttccagcggcgggatgggaatggaacgcgacacgcagacccagagttggattggagaaaacatttttgagtccgacgccctgcgcacgcgtccgcacgcgtga

SEQ ID NO: 16079 - DNA, 492 bp, Zea mays
  Peptide Sequence Number=SeqID_57858
atggagaggacagaggagaggcagatccacagatccagtacaccggagttcatagaagaggagggggaagcgctagggaatggggatactgttaccgacgacgtgccgaggacggagcatccaggaagcacggcggccgacggccaacacctcgacgtcgacggaagctgggtgcctctttgcctcgtcgaggccgtgaggggggtggacgggcgacggtcgacggggcgacgcagcgaggctgcgagcgcgagggatccgaggggagagccgaggggcgaccgggcgagggcgagcggaggggacgagacgagggggcgactggcggtcgggtcgtgtgagacttgtaaaactagtttggtattcgagaaggagttccggatcgatgggatcgaggaacgggaacgtgatgataaaagcaaagaaagtaaatgtgatgtggagaagcctgctgctactgagtcctctaaaccgaagattgttttactgtga

SEQ ID NO: 16080 - DNA, 536 bp, Zea mays
  Peptide Sequence Number=SeqID_57859
ccggcagccgctacgacgtcgcccagactccagactccggccagagtccagagccgccaggtacgctgccgggcgtcggccccctcctccctccctcctcccttttcccgtcggaggaaatggagcagctggtgggagttcaccatcagcaccactcgctctcccctcgggctccgagcaccccgacctgcccgcagccgcagccgcacccgctcctccaccatctcccgtccaacaggttccgggatcagcttttgtggcggggcgtccggatggattgtgaacagatgcatcgagccattggcatcaaaagctacttgtcggggaccataattaggggtaccctcaagactcctaattctcagctgggctcggacaccgccctgtcctctgccgacgacctccgcctcgcccgacccaggggctcggactcggcctcggaatggctccaccgctcctccgacggccacgacgtcacactagttgggttccaagatctctccggctgccacattggcatgtactcagggcactag

SEQ ID NO: 16081 - DNA, 681 bp, Zea mays
  Peptide Sequence Number=SeqID_57860
atgtcgggagatcacgccaagaaggaaatggtgaccggcgagaagcccgctaaaagccacggaaaagctccatcgggagagtcctacaacaaaggaaaggggaaggaaaaggaatccccttcacacaagtcgcgtcggagcggtgacaagaagaagatgaggaaggtggtctactacgagaccgactcctcgtcgccatccacctccggctccgacacgtcgtccgtaacttctaagcgccatgagcgcaagaagtttagtaagatccccctacgctatcctcgcatttctaaacatacgccattactttccgtcccattgggcaaaccaccaacatttgatggtgaagattatgctaggtggagtgatttgatgcgatttcacctaacctcactccacaaaagtatatgggatgttgttgagtttggtgtacaggtaccatccgtaggggatgaagattatgatgaggatgaagtggcccaaatccaacacttcaactcccaagccacaactatactcctcgcctctctaagtcgagaggagtataataaggtgcaagggttgaaaaatgctaaggagatttgggacaaactaaagaccgcgcacgaaggagaagaggtgaccaaaatcaccaagcgggaaacaatcgagggggagcttggtcgcttccgtcttcgctaa

SEQ ID NO: 16082 - DNA, 492 bp, Zea mays
  Peptide Sequence Number=SeqID_57861
atggccgaggagaagaagcagggcctgcagctgctggacttctggtacctcgacgaggcgttcccggaggcggcgccggcgctgctccccgccgacccctacgcgcgcgcgcaggcccgcttctgggcggactacgtcgacaagaagctgtacgactgcggcacccggctgtggaagctcaagggggacggccaggcgcaggcgcgcgccgagatggtcgagatcctccgcacgctggagggcgcgctcggcgacgggcccttcttcggtggcgacgccctcggcttcgtcgacgtcgcgctcgtgcccttcacgtcctggttcctcgcctacgaccgcttcggcggcgtcagcgtggagaaggagtgcccgaggctggccgcctgggccaagcgctgcgccgagcgccccagcgtcgccaagaacctctacccgcccgagaaggtctacgacttcgtctgcgggatgaagaagaggctgggcatcgagtag

SEQ ID NO: 16083 - DNA, 468 bp, Zea mays
  Peptide Sequence Number=SeqID_57862
atgtgccacagctgccgcttgcctgcttcttccacttttcctggcaacaccgcgaccagcctaacatggatccgacgccgcaatctccattgtccagcgatgagtccgacccgagttgggttctggcgtaatccagcaaggcaagcagctcgtgctgcacagcgctcggcgcacgcggccgctgcggcacgcgcggcagcggaggcgcgcgaggagctggaggagcgtgcggtggtggcggtgcgcgaggatggtgcggccgcacgctcagcagcggtggcgcgtccgactcctgctcgtgcgtcagcgtcccggcgcgtgcggcaccatccctacagccgggcgtctcgtcaaaggggtgtgaagttgcgtgttccttccgacgacgaaggtgaagtggttggtccagccaaggttgaagaaggggacaacaaggtgatgaagaacgaagatgcaatgaagccataa

SEQ ID NO: 16084 - DNA, 2925 bp, Zea mays
  Peptide Sequence Number=SeqID_57863
atggccgtcgcccggtcctcgtcgccgccgcacaccccggtagccagattctcagctgtaggcgctgttgcttggttagggaatcggggtctcagtgctcggattggtggcgagggtgttggttctgcttccgtcggtgcctcgtcacctgctatgcaaactaatgttgcaagcatagattggttgggtggcaaacaagcttccagagttgactcgtcgtcgcaagttgctgcacatgcttatcacccttcccatagttttgatgcagctggcactgctatggattctgcaccatcatgcagaccatgggaacgtggagacttacttcgtcgactggcaacatttaagccttcaacttgggcttctaaaccgaaggctgctagttctttggcctgtgctcagagaggttgggtgaatgttgacatggacaaaattgaatgcgagtcatgtggcacacatctaatcttcaatgcattgacatcctggtcccctgttgaagctgtcttacaagttacatttctttgctctgctactaactttgcaaatgctggagaatcctttgccgagcagcttgatgcagcacaccagaatagttgtccctggagaggcaataactgtgctgacagcttggtccagcttcaccttacacaatcagctcttattggaggttttaaagaccgctgtgatgggcttttacagtttacctctcttcctgtgattgcaccatctgcaattgagaacatgaagcttacaaggagtgtacaaattgatcatctgttgtcccaatcaattacctttttatctggtattctgggctgcagagcagagagtacagcaggaattgatatccaccaagatttctcttgtagctactctcaagcacaaaagctcataagcctgtgtggatgggagcctaggtggcttccaaatgttcaagactgtgaagaaaattcaacgcattcagctaaaaatttaccctcagttggacctgacgaacggttatatccccattttgttgaacataacaaaaattcattttctgcatcagccaagaaagataaggggaaaggcaaattgcccgttggagattctggatgcagcatgaggtcaccgttgttagattgtaacctgtgtggagctacagtcaggatgcgggactttagacctgtattatgtccttctcgtttcagtccaaataacattgttgtgcctggaacaggcagaaagctaacactgacacatggagttagtgctgccagtggtatcaatgagtgggttactgatggggtggaaagaggtcaagatgaagggcgtgatgaagcagcaacaaatgagggaaaaccactatcacttgttggagtagacctaaacctaacaatggctggaggattaccgtcacctcaatctgccatgcctgctatgtcagagcggtttaataatggaggaatgggaagggatctgatgattggacagcctacaggcagtgaagtaggtgattgtgaaacctcatatgaatctcggggtccgagttcaaggaagcgtaaccttgaggaaggtgggagcacagctgacaatccacaagataggctgcagcatgctgatagcatacaaggaaatttcattgatcgtgatggtgaggaagttgatgatgctgcacaggattcagatgtcccgaataagaagtcccgtgggttcgatctgtttgatgcctatcgtccttcctctggagctggtcccagtagaaatttgtcctttggccctcatgaggatgctggtatgttcagtcactcaagagcaattgacctggcagctgttgagcgtccgactgctagggattcactgagagcatcttctgttattgcaatgcatactattcatacttccgaggaagattctatggagagtgttgagtattacccaggtgatggtaatgatatcgatatgccttcttctagtacacaaaggaacattgaaatgaatgatgccttggatcttaactatagcaaccaagcacagcaaagtgctaatgcacatgctggtgctggaagcgatgcaagagaaattggaggaagcagtacaaatgaaggggaggaggtcattaatgctgaaacagttcccccttttggaagggatcaacttagtttaggaattagtggtggtagtgttggcatgggggctagtcatgaggctgaaattcatggaaatgctggttctctgcacagaactgagagtgttgtaggtgatgctgaacctattgccgagcttactgagacaatgggtcagactggtgaatcagctccaggacctggattaatggatgaatttgtacctgaggtagaccgagatgaacctcatggagacagccaagatacggtgtcccggtcagttggccaagccgacagtggatcgaaaatatatggctataccaaagctgattctgttgaaagtggagaaaagataggtcatgccaccggtaatggaagcagcatgcgtccttctctttcttgcaacgcagggatgtgtgctggttttgatctgtctaaagatgatgtgacacatactggcaaaatactaactactgatgatgcattaatggggttagattatgatcctggaaatggattaggagctactaatggagaaaatgactatgaatcgggtctgctggaatttgatcctgttaagcatcacaatacttactgcccatgggtgaacgggaatgttgcagcggcttgctgcaacaacattggctccagctcaagtagttcagcgccctctggttggcagctaacaatagatgcagtcgacacgtaccaatcacttggtcaagcccaaaatcaaataatgcaatctgattctgcagcttcattatatatggtaaagcttgctcatcttgtaatgcaactatgtctagaaaatctgtag

SEQ ID NO: 16085 - DNA, 501 bp, Zea mays
  Peptide Sequence Number=SeqID_57864
atggtggtgatgattagcttcaattctttctcggtgcacggattttggcttgtgattagtaaccaaaactatgaggttgatgatttggtggaggcgtccaagtcaatttcaacattgccttctatggttgagcgagacattcagaccgacactgtcaggaaaccagggagccatacaaggaatctgcttagagtgaagcgcgggattgatatggttaaagtcctgtttgagcaaattcttgtcacagaaggcaactcactaagggatgcagcatcggtggcttatgctcaggtctttgctcctcaccatggatgggcaataaggaaagcagtttctgctggaatgtacgcccttccctcaaagtcccagctgttgaagaaattgaatgaagatgaggaatcagcaaaggttcaaatgcagaactttgtcaggtcatcagctccagtaatctgctatgttgatgaccttttcacctcaaggaatttgggcatagattggtga

SEQ ID NO: 16086 - DNA, 117 bp, Zea mays
  Peptide Sequence Number=SeqID_57865
atggagatagatggagaagtagaggagatgacgcatggggcccacctgtataacgggagcgctgggcttccaatagttaaaggaagcacaggatcgctacaacagtcatgcaactag

SEQ ID NO: 16087 - DNA, 126 bp, Zea mays
  Peptide Sequence Number=SeqID_57866
atggcggtgatggagcaaacgatgacaggatggctcgggcaggcgaggggtgaggggacggctcggacatttgtggagctgggacacgtaaaacacattgtggatatcagacatggattctggtaa

SEQ ID NO: 16088 - DNA, 369 bp, Zea mays
  Peptide Sequence Number=SeqID_57867
atgacctccgccgcgtgtgctcgtggccagggtagctccgatcacctcaaacgtcgacccgcacaccgacgtgaccaccgtgacctccctgacgtcactgaccaccccatcggagctctactgccgccggtaagcctcgccgccgtgatctttgccacggttactgtttcagccagccagggatcgtgggttagatttaggttaagtctagggggttttgtgcaagattgcaacctcgctgacggagagtacatcctcgtgccggagcaaggagttgctcaggaggtagccccggatccagcaccagagcctgccatcgaggatctgcctgccccagctttggaaggcaagccccagttttatgcataa

SEQ ID NO: 16089 - DNA, 225 bp, Zea mays
  Peptide Sequence Number=SeqID_57868
atgaagcaagagcatctccacctggcaatggtccactcgtattcatcactaagtcagctcgattccaccaattggtgttcatgctgttggatggcaaatgacaacccctctttgcatcctgtagtgtttcgcctttctaatatttctgtttgctcccagcggcttgaacccctacaagtgcacctggcattggttaccaatcagcagattcataacatctcatga

SEQ ID NO: 16090 - DNA, 336 bp, Zea mays
  Peptide Sequence Number=SeqID_57869
atggtgctggaggagcttgcatgtgtggaggactgcctccatgtccttagcattgagcaccctattctgttcgcggccatcgacctcgtatgtgaccaccttggggttttccagtcaagggaagtgtccactcgtactccctggatggcgtttgtctccggccgcattcacaaactggaggccactacatttcggctcggggtcctctacgcctcggtcgccgcttgtcctctcggtttcaccgttttagaaaatctcaaaaaatccggatggtacacccgatgggtgcacccaatgggtgcctgtctagtgaaagatgtccatcgtgttgtctag

SEQ ID NO: 16091 - DNA, 372 bp, Zea mays
  Peptide Sequence Number=SeqID_57870
atgaccggcgcgattgcccttcatcctctgtattgcaagacgaaggccagactccgacgaagtctgctagtcccgcgtcctcatctcacccggaggcccacgtgggattcggcccactgtaacgggccccgcgcggacaagcatgttacgggcctcatctgtaatagcttttctgtaatggcggtctgtgacctccctttatggaaatattctgaggatagtccgggtacccgagggtatcttcggacttgtatcagaaagggagaagctcaaaagatacgaaggttgacacagtgccgaagctgtgaagcaggaaagcttcggcatgttcgcagaaaagggaaccgacttaaagatgaaaaggccatttag

SEQ ID NO: 16092 - DNA, 309 bp, Zea mays
  Peptide Sequence Number=SeqID_57871
atgggggccggcctcgtcggtggactcctccccatcatcagcgccctccccgatgctctcctcatgggccacagggcaaaagcaatcgtagtggtatataagtttgaccttggtgctttaaatgagaatgttgaaggcaacattgggaagaactatgttgccattatttcaagtttagattctgggaagaggagggtaattgatgcatccaggcgcttttacaatttctcgcttgcagtcatgttcgaatacttggatgacaatgatattctgaataaaatttctgaattccaggagcacattgtctga

SEQ ID NO: 16093 - DNA, 1413 bp, Zea mays
  Peptide Sequence Number=SeqID_57872
atggggcctcccttcttccttctcttcctcgtcctcacggccgctgcggtcgtgtcctcggccccccggcgggaggcgttccgccgggacccagggcacccgcactggcaccatggcgctttccacgatgtcgaggacagtgtccgcgccgacgtccgccgcatgctccacacccgagcagaggttccatttcaagtgcctcttgaggttaatgttgttcttattggtttcaatggtgatggagggtatagatactctttggatgggcacaagctcgaagaattcctaaaaatgggtttcccacttcacaggccctcttgctttgagacaggggagccaattgatatcgagcatcatattatgtacaatgttatatcggctggacaaccggagctgatatctctcgagaagtcactgaaggaggccatgcaacctgcaggaattgcaagagatagtgaatatggcagggaattgcctctatttgaagtagaagcgactgcagtggaatcgatatttcagaggctatactcattcatttttgacatggagcctggttatcctgcaaatgacatggataggcctgttcctgttgcgatatttattgttaattttgataaggttagaatggatcctcgaaacaaagaagttaatctcgatagtttaatgtatggtacaattggtggactaacagaacaagaactaaaaaaacaagaagcagaatacatttaccgttaccgttacaatggtggtggggcaactcaagtttggctaagttctggaaggagtgattcaaagagtaatctcgggaaaacaaacaagcattgccattttgaagttcaggcagcagcacgtgtcctaggaggcagcagacgcagcaaacaggcagcatgccgccagtgccagggacatgctgtggaataccgtgatgtgtgccatctggggcaatttttccatgctgagtggctggttttaggagaaataaagggaaaagagggacgggggtgtgagaagctccaccatgtgccccagcgtcgtccgcactgggcctcccatttacccatccaggaacacttcctcctggccacgtccagaagagcgagcggcaggggtaaaggaggtgctgaccaggatcggctgggagatgcactctgtggagctggggtgatggcacagatgggcatgggggctttagctatcgcagcagtgggtgactgcatcacagcatggacggagaagagtgagccgatggggcacttgtgccagccagagcgtctggttggagcagcgcctgatggcagcgcagtggcgttgaaggggagggcggcacagactcatgggctcccccgacttgagtgctccatcggcctgaatgttctgactggcgtccatgcctccaagggaaacagaatctaa

SEQ ID NO: 16094 - DNA, 972 bp, Zea mays
  Peptide Sequence Number=SeqID_57873
atggctgtcgtccgggagcgggtcagacgcgacggcggcggcgtacgagtcaccggagaagcatgggttcttggtgatgccattgcccattttgtttccttgggctttggattttggggatcggcgagtggaggggatggaagagttgaccttttgggaaagggaggaaggctttatgaggggtaccacgctcaccccatgggagatgcgaagaacaacactagtagttcaagttgtgaagagcgccaagtggtccggcaagatcagagcaaggatgtgcatgaaggtggtgagaacatcaatgacaaggaagttgttggtgagtgctactactcaagtgaaaaatcaagtgatgatgataatatctctacccaatattcacttgatgatgattgttcatgctcgagttatgagagtgaagcttctacaagcccatcatcaccacattgcttcatgtcacaaggtgacagaaaggacaagatacaagtggtatcctacaaggcttcaagtggtcaactgaccatcaaaagaaagcatctctcaactataataagtttatacaagtggtgtcaagaaatttgtcatataggtggtgtccataaaaatgatcaagtaccttcaagtggtataatatttgcaagtgatgtcaaccttcccaaagctttggtgcaaccattttatgcaagtgatgctaaggatgatttgaaaagtggcatacactctacaaagagttgtggccaattaccaaaaagtgggatatttgtgatgaaggagctcgttgcatatgagacacaacaagacaccatgtggctagctagacaagatcaagagacatggcttggctatgttgaattgggttgccagtgtggattgcaagtcgaagggttagatgtgatagatcgtgtcagggtgaagctagagcaaggactgtcaatggacatatttgacgatgaagagcaagcgaagatttga

SEQ ID NO: 16095 - DNA, 1155 bp, Zea mays
  Peptide Sequence Number=SeqID_57874
atggccggcgaggaccgcttccacgtcgcggtgtccgaggagcacggctgggtgttcgtcggaatttacgacgggttcaacggccccgacgcgaccgattacctcttcgccaacctctacgtcgccgtgcacaacgagctcaaaggcttgctctgggacggcatccaagcaggcgacagcgccaggtgcggtgagcaagaagcgggcgcaggcaatgccgaacgcctctgtattgctcaggccgacggggacggcgcggaggctaagcgcagacggacggaagtgcccatgccaggcaacagcgccacgccagtgcaccgcgacgtcctgagggcgctggcgcgggcactgaagaagacggaggaggcgttcttcgcggcggcggaggaacgcgcggccgagagcccggagctggggctgatggggtcctgcgtgctggtgatggtgatgaagggcacggacgtttacgtgatgaacgtcggggacagccgcgccgtgctggcgcggaggccggagcccgacctgaagaacgtcctcggcaaggcgtcgcaggacctgcagcagttcaaggtggagatcatgcgcgagctggaggcgcacgacatggacggcctgcaggccgtgcagctcaccccagagcacagcaccgcggtccaggaggaggtgacgaggatcaaaggccagcatctgaatgatcggaacgcgatagtcaatggtcgggtcaaggggaagatcaacgtcaccagagcgttcggggtcgcctacctgaagcagcccaagtggaacagcaggcttctggaagccttcaagatcaactacgtcggcactgacccgtacgtgacctgcgcgccgtcgctgtgccaccaccgcatcggctcgcaggacaagttcctggtgctgtcctccgacgggctctaccagttcttcaccaacaaggaggtggtggaccaggtggaggcgttcaccgccgcggagcccgacggcgaccccgcgcagcacctcgtcggggagctcgtcaaccgcgccgcgaggaaggccggcatggagacgcgccagctgctggacatcccgcgcggcgcgaggaggcactaccacgacgacgtctccatcatcgtcatctcgttcgaggggcggatctggaggtcgtctgtctag

SEQ ID NO: 16096 - DNA, 1686 bp, Zea mays
  Peptide Sequence Number=SeqID_57875
atgcaggatagaatgagacggcaggggcaatatggtgaagcggatattaactctatggttgctgcccagttgcatcactaccaggcacagcaaaggttctgtagtttcatgctgactgttagtgatacagcccaaggtgctggaggtgcgcaatccttttatgatgggcagagatctgatacaaaggttggtctagaaaagcagcccagcaaggagtctagggagcaacctcgtactgaacgaactgaaacaagatacgagaattataatcttcctcggacattcgaaggtcttgaacaaagtttccatgaagacattattttgctatccaaggaactacaggaggcagaggatgctgaaaattctagacacatggaggaggctgaggtcgctgctgcagagcggctcgtgaccgtgcggacgccgcgcgcacccaaccccgcctcaaagcccgctccacactccctctacgaagcgctgcttctccatgaagttgtagtcctcaccaacctccacttgcaggccatcaatgtccagaacatccgcactctcgtgccgattgtcttcgagctcaactcacaccagttcgctctcaaggaccatgccctttgggacgatctgagcccagccttctcggactgggtgcgcatgtactgcatggtcaagtcttggctctacagcgccatctccctcgagctgtttgacattatgcaacgggacctctctttcaccaactactgtcggtgcctcaagggcatggctaacgccctcgaggacctcggcaaacatgttcccgaccgcaccttcatcctcaccatgattcgcagcctcaatgacaacgtgctcttccggtgcctgctacctgtcaggtgcagcagccttcataatccttgggaccagccagttcagccggttttaggggcgttccttctaaccattggcagggcaaacaggccacagtatatgttggacattcttgatcgggctggtatggctgattgtaagccatgcagtactcctgttgacaccaagccgaaggtccctgcagactctgattctgtccaggatcctacacagtctacatgtctaccaaccccgttcagcatcagccccaagcacattgagtttgatctacacttcgttcgtgagtgtgtggctctaggtgacaccaaggttctgcacacctctacaacgtcgcagttcgtggacattttcactaaagggttcccaggttctgttttggacgagtttaggtcaaatctcaacgtcaacagtgcagccgcttcggttgtggggagattgaaggatataaatacacagtaccaggagaaactattagcacttagagctcggcaagcgaactatagagatgagttcctgcgcaaggaatctctagcacgccagcagcaataccagcacgccagcatgagccattacgctagcaattccacggctggggagcagcatggttataacccaacggcagcaggcacgcctcctgttgctgctggaggtgcttatggtgaggctcatcggggttatgcttctggccagtatgaatcatttagcgatcgtccagattatccagagttccatgatgggggcagaggtcgtggtcgtagttctgagcagcgtgctcaataccctggtggtcgtgcttataattccggtggccggcgattctag

SEQ ID NO: 16097 - DNA, 1218 bp, Zea mays
  Peptide Sequence Number=SeqID_57876
atggggaactgcgccggcgtggaggggaacgccgagatcaacccttccttcagtgcccccaattcctcagggaccgccggttctaagagcgtcagcaagaacgcggccgacaccagcaccttcggcaccaagacgtccggctcgtcgtcgtcggtgccgccaacccctcgtacggaggcggagatcctggagtcgtcgaatgtccgcaagttcagcttcggcgagctcaaaggctccacgaggaacttcaggccggacagcctgctcggggaggggggcttcgggtccgtgttcaaggggtggatggatgagcgcacgctcgcgcccgtcaggccgggcgccgggatcatcgtcgccgtcaagaagctcaagctcgacagcttccaagggcaccgggaatggctggcggaggtcaattacctggggcagttatcccaccctaatctcgtgaaactcatcggctactgcttggaggacgagcagcggcttcttgtgtacgagtatatgccgagagggagcctggagcatcatctcttcaggagtaggctctctctcgagtgtttcgttcgcgatatccctccattcttggcttctcgctttatgaaaaaaaggactgaatgctatggtgttgcagggggctcgaacttccagccgctcccatggaacttacgcatgaaggttgctctcgaggctgccagaggtcttgctttcctgcacggcgaccaggccaaagttatctaccgcgatttcaagacctccaatatccttctcgactcggagtacaacgcaaaactgtctgatttcggtttggcaaaggacggtccaagcggtgataagagccatgtttctactagggtcatggggacacaaggatacgctgcccctgaatatcttgcgacaggccatttgacagcgaagagcgatgtgtacagctacggtgtggttcttctggagctgctgtccgggcagcgcgctctggacaagaaccgcccgcccggtcagcacaatctggtggagtgggctagaccttacatcaccaacaagaggagggtcattcatgtcctggactcacggctgggttcccagtattcccttcccgcggctcagaaggtggcaacactggcgctgcaatgcttatcgatggacgcacgatgcaggcctggcatggatcaggttgtgactgcattagaacaacttcaaaggccaagggctcactga

SEQ ID NO: 16098 - DNA, 360 bp, Zea mays
  Peptide Sequence Number=SeqID_57877
atggcagttgcagactaccccgccttcgccgccgcccgcccgacctccggaaaccccacctccgcaaacctccgcgagagccatatccgccacaaacctcgtcgccgcaaacctcgtcacaaacctcccgcctgcccacctcactgtgatacccgcccgcccatccgcaaacctccgaccttcgcgatcctcaagcccgcaaatccctccgtgaatcgcgccgcggccatcgcaatgccgcgaaccgcccgccgcatgccgcacgccctgcacgacccgtggaaccccgcagccgcccccgagcaaaccccaccgcaatccgttcaccgcgtccccgagcaatcccgagcaagctgttga

SEQ ID NO: 16099 - DNA, 294 bp, Zea mays
  Peptide Sequence Number=SeqID_57878
atgggtggagcaagagcgggagcaaggcaagctagtgtggtggaggtggtggatgtagcatgtgtggtggaaggctcaagagtggggcaaggtgggtcctggtcctctcctccccctgatagtgtgacattcgtcgttcgcaccatcctgcacagactattgacatgctacatgataatgagtaaagggtcagatctgatgtgtgtatgctttctacagatgtctgacaataggcgtcgaggtggaaggcgtgcccagcaagagcagcaggcaccccaggatgaggcgccttag

SEQ ID NO: 16100 - DNA, 312 bp, Zea mays
  Peptide Sequence Number=SeqID_57879
atgatgcccatcaggactaacacattctcaaaatcgcaaattgctgagtttgagaacaaaggagagcagggaaaaagaggcgcaaaaatattcaatgatacacatccaaaatacccaccaccacagaagaggtggaaaccaaaggccgccaaagcaactcaagcggctgcaaaaatagaaaacaaagagatgcttgctcaattccctacagccgattacactattatcaaagatgatgaacctgtagttgctcagtttgattttggtcctaaagaggtagtcttcaccaaacatataatacccactttgtaa

SEQ ID NO: 16101 - DNA, 204 bp, Zea mays
  Peptide Sequence Number=SeqID_57880
atggacacaaccgatccaagctcaattcccttaacgctgctgttgatgactgatagctctggtgctacttaccagcctcttattttgtttctgaattcaggatcttatgctggtcctacaagcattgctggttgtcttgaagaagatgatggtgggctcttcccaccactagcagctatagaggaaggggaaatctgtggctga

SEQ ID NO: 16102 - DNA, 270 bp, Zea mays
  Peptide Sequence Number=SeqID_57881
atggcgtacgacttactcaccagagacggacaacgggtgaagccaatcacggcgcacagcggatcagggatggtcgtgcgtgattgccacgacgtcgggggcacgctcgcccttcaattgcccctactggcccgcacacactggagaccacgatgggcgacctcacaggggcggccgaggaagatccgcgcccatgttttatggacccgcgagtccgcgccgaggtggcggagatccgttgcggtcaacgcgacattcacggggaggtag

SEQ ID NO: 16103 - DNA, 498 bp, Zea mays
  Peptide Sequence Number=SeqID_57882
atggcatgtagtggatctatggagctggaaaaggttgaacaatacctcctcctatcctggattccagggtgtgaagtcctttttgtctttagaatagaaaagatgatcacccgatcagaagatgcagagaggcgcaatcaccagctccatgtggaactcaccacagctcaagcccgtgtagctgccttggaaagtcatgaggtcattgtcattgaatctttagaacaagctaaggatgagcacatggagaagttgattgagcctacttggtcacccacaaccaatgctatgtataatcaagagcaccccgagccctcccaagatccatcaccagagttgtttgagccccttaccatgaagaagattccaacactgatcgtcgaggtcaagggagaagccttaagcactccacctgcaccaacgccctctgaggtcaatttggagctgcaagagccagtcccgcttggagaagagtacaacctcatcatgtcatcttag

SEQ ID NO: 16104 - DNA, 225 bp, Zea mays
  Peptide Sequence Number=SeqID_57883
atggcggcatcgatggcgcaaccggccactagctcgaccatgattttgagcttgatcatgtcgtcggctaatgccagatttaagaagttgctaaataactttgacagaaaaaaatgcgtttgcttttgtttcctgaagaccaaaagttctgactatcgcagcatctatggcagctatcgcagcatctatggcagcatcaaaggttatgacccacaatttcgttaa

SEQ ID NO: 16105 - DNA, 519 bp, Zea mays
  Peptide Sequence Number=SeqID_57884
atggcaccggcggtggggtcgacgggacgcgatcgagtagctcgtcgggggctgaaacggcccgacagctctggtgtcgatggacaggacggtgacggcggccttgtgcaggcagcagacaggcacggggcgtatgcagagcagcaggggaagcaaggagctcggcgggcagtatttatagaatcaggaaccgaaatcgccatcaatggcgagcgttatctgcacgaagagaaattgccacgtgggagtggaagaagggaaagacacgacagtttccggatgcgagagggcggggatgtgcataagttcatctacatctactctaaatcgactgtctggaataccgtagattatttcggacaggagaagctttttgaaaattcacctatgcgcagactgtccaggcccttccggcggaccgtctgcgacaccaaggggcagaccgtccgggccaagggcgcgggccgtccgcggttggcagaacaagggcaacaactaggaagtgtttggtggctataa

SEQ ID NO: 16106 - DNA, 306 bp, Zea mays
  Peptide Sequence Number=SeqID_57885
atgcccgagggcgcctataagtgcctctggtgcgcagcagtccacccctcactccgcctcactcttcgagcaaaaactccaactccgacgagctctacaccgcccgccatcactgcccgagcatggctgccgtggctagcccttcccatcgacccccagcctcgccctagcccctggacggcctccccgagaggcggtgaaagcttttccaagcttgagctgagacattgcctcaccggagaagcgagcgcgacatcgccggacttcggccgaccgtcgccgcgcgtggaccgggtcacacggtga

SEQ ID NO: 16107 - DNA, 279 bp, Zea mays
  Peptide Sequence Number=SeqID_57886
atgggctcgccgcgtgcgcaggcggtcaggctcgccggcggtgcgtgctccggcctgctcatggcggtagagtcaaatcaaagtgcttggggagcatgggaggttagtgatgtcgtgggtgaaaggaattggagaatagctcacagggtgacctggtccacgcgcggcggtggtcggccgaagtccggcgatgtcgcgctcgcttctccagtgaggcaatgtctcagctcaagcttggaaaagcttcacagcctctcgaggaagccgtccaggggctag

SEQ ID NO: 16108 - DNA, 129 bp, Zea mays
  Peptide Sequence Number=SeqID_57887
atggaggacctggaggccattgttggcggcgagatgctcatgtatttatggacaatggaggcaaggaagctagacattaacgtatggcacgccacagacatcgctggccgtcctatttttgttccttga

SEQ ID NO: 16109 - DNA, 387 bp, Zea mays
  Peptide Sequence Number=SeqID_57888
atgaggcaccctatcagttgcctccatcgccaccccaatgacagtggagcagatgttcttcatgcacacccaagcagtgcaagcaattgggcagactctagcagctatgcagcaagcacaacagcaacctcaacctcaaccatagatgcagatgccttagatgccaagggacaagcgtgcgaagctcatgagagagggccttatgatagtgaagaaggaggagctcctggcactgaagctgggacccatgttcgtcaagcaatcgtgactgtttcgaaagcgcaaggagatggaagaccgaaagcgcaagatgagtggaccgaaagtgtttgcgagtacccaaagagcagttgccaatggaaggactggaagtccaagaagacctga

SEQ ID NO: 16110 - DNA, 747 bp, Zea mays
  Peptide Sequence Number=SeqID_57889
atgccgggggatgcaggcgccgaccatggagggggatgggtatggagcaccgcgacgctgcggcgctgcgccgaggacgatagtggagaccaaggcattgcccccaccccctacccgatgcgcatagacgccatcgccctcatccgagagccacctcgatgccccgctctcctgtcttcttcgcttcggcgccgcctcctcccgcaggcccacccatgcgcgcgcttctcccaccagatgcacgtgcggcccttgccctccgatgccctcgcgctggcggtgtcccccgccgacgaggcgttcgcgctgcacgaggtgctggtgcgacaccgtcgcggcctagaaggagatccaatcatccaagtctcattttctccaccatgctccaccgccacatgcctattggaatgccgctgcctcctcgaccatcgcatcaccaacatcacaacccgcatcgccgacctcacaacccacgtccttctcctcgtggcctacacgaccctccactcgcactacacttcggtcccccgcgctatgaaggtgtcgtgcaactgcgcacaggtggatgtgggcctcagtgacagcagctatgcgagggggatgtgcccagtggcacatccactggcaatccccgaggagcaagcggacaagagaagaaatcaagaaaacccgcctaccccgcaccaaaatgccaaaccacaacaagtcccatccgtccctcccccaccgtcgagggccgccgactag

SEQ ID NO: 16111 - DNA, 117 bp, Zea mays
  Peptide Sequence Number=SeqID_57890
atggcgtctatgcgcatcggttgtgcccagattcagagatggtttgactacctaatcatatatgcatgtgcaaaccgtctaaagctgactgttggatggggttggcgaagattttag

SEQ ID NO: 16112 - DNA, 285 bp, Zea mays
  Peptide Sequence Number=SeqID_57891
atggcgtgtggcgggctacacattcgggtgctccttccaggcatccaacttactccctccagctccggtcccccacgctatgaaggtgtcgtgcaactgcgcacaggtggatgtgggcctcagcgacagcagctatgcgagggggatgtgcccagtggcacatccactgaatcactccagcctccactcgtcagtttagttcccaaatggcaagggtgcaatctccttcctaatctgctctactacaagggttttgagctgggtggcggcgcgacggcggcctga

SEQ ID NO: 16113 - DNA, 195 bp, Zea mays
  Peptide Sequence Number=SeqID_57892
atgccgggggatgcaggcgccgaccatggagagggatgggtatggagcaccgcggcgctgcgccgagggcggcccttgccctctgatgccctcgcgctggcggtgtctcccaccgacgaggcgttcgcgctgcacgaggtgctggtgcgacactgtcacggtgtcacggacctgcaggcggatcctaccctatag

SEQ ID NO: 16114 - DNA, 153 bp, Zea mays
  Peptide Sequence Number=SeqID_57893
atggggtacttctcgtgcagtggtagcgaggcagcggcacaacccatgcccaccgacgggtgcgtacgcgagcaggtgcgcgcggtgctcgctgctcgtggacgcgagcagcgcaagggcggcgccagtgttggcgtgtggtgtgaaacttag

SEQ ID NO: 16115 - DNA, 522 bp, Zea mays
  Peptide Sequence Number=SeqID_57894
atgttcctacccgtggcccagcgccgcctaccacaagtccgtcgcctaccgtgtcggttccactcgctggtgctccagctcgacgacgacgtcgccgacctgcggacgctggtgggccgcctggcgtcgcgggcctccatggaggccgtggccgaggccgcgacgcggctggaccgcgtgctcgtgtcgctctccggcctgctggaccacccgcaggcgcaggatccgctgcgccgcctcagcccgtccccgttcgcggagcggatgacttcctctgcctcgccgacgcgcacggcggcttccgcgacgccctggtcgcgctcgccgcactccaggccgaggcccgcgccgcgctgcgcagggaggagccggcccgcctcgcgtcggctgcgcgcgcgctgcgccggtgttgttgcttgcctgctcttctactttgatatgcctgcccgttttcccttttttttctacgcgtgtcagctccagaagaacatcgcattcggcgttaccattagattacaataa

SEQ ID NO: 16116 - DNA, 1026 bp, Zea mays
  Peptide Sequence Number=SeqID_57895
atggcgcaccggacagtccggtgcgccaccggacactgtccgggtttctactggccaaccgcggtggccgacgccactaggattgtacgcacctgccaagggtgtcaactctacgcaaggcagacgcacctacccgctcaggccttgcaaacaatacccatcacctggtcgtttgttgtgtggggtctggacctcgtcggtctcttgcagaaggcacccgggggctacacgcacctgctggtcgccatcgacaagttctccaagtggatcgaggtcagacccctaaacagcatcaggtccgaacaggcggtggcgttcttcaccaacatcatccatcgctttggagtcccaaactccatcatcaccaacaacggcacccagttcaccgacaggaagttcctggacttctgcgaggaccaccacatccaggtggactgggctgccgtagctcaccccatgacgaatgggcaggtagagcgtgccaacgacatgattctgcaaggactcaagccacggatctacaacgacctcaacaagttcggcaggcgatggatgaaggaactcccctcggtggtctggagtctgagaacgacgccaagccgagccacgggcttcacgccgttctttctagcctatagggccgaggctatcttgcccacagacttagaatacggatccccgaggacgaggacgtacgacgaccgaagcaatcggaccaaccgagaagactcactggaccagctggaagaggctcgggacatggccttactacactcggcatggtatcagcagtccctgcgacgctaccatgcccgaggggttcggtcccgagacctccaggtgggcaacttggtgattcggctacaacaagacgcccgagggcgccacaagctcacgcctccttgggaagggccgttgatcattgccaagattttgaagcccggaacatacaagctggccaacagtcaaggcgaggtctacagcaacgcctggaacatccgacaactacgtcgcttctacccttaa

SEQ ID NO: 16117 - DNA, 582 bp, Zea mays
  Peptide Sequence Number=SeqID_57896
atgacggccaccgccagctgcttctccagccccgtcgcgtgggcgcggcctcgcgccggccccgcaggcgcgagtgcggccttgcgcgtgggccggtgtcccgcggccgcggtagcggcgcacgacgtggcgttccacccggacgtgtcccgcgcggcggattcgctgcaggcggagttccgcgccgtggaccgcgccatcgctctcaactcctcccgcgtggccgccgccttccgtcgcgcgcgcgtcgccccgcaccatttcggtgggtccacggggtacggccacgacgacggtggcggccgggaagcgttggactccgtcttcgccgacattgttggtgcggaggctgccattgtgcgcccgcagctcctggcagtcgctgggcccccgtacgacaccttggaggaggtgattgggatcagggggtcggccaatgtagggtcactcaaggatttcggagtgacgtaccgagaagttccgatgcaaaatccaaactgcatggtgatggttgataattgctatggtgaatttgttgagatatcggaacctgcaatggtggtgaaatctagccttagataa

SEQ ID NO: 16118 - DNA, 1707 bp, Zea mays
  Peptide Sequence Number=SeqID_57897
atggcggcgccagcgaccagggtgatcggatccaagccagcggactgcttccagttccaagaccctaacacctggacctgcgtatcggagctcgcaagcgatgtggtcgtcgaagtaggagatacgtccttccacctacacaagattccgttgaccagccgtagcggcacgctgcagaagcttgtgaacgagtccaccggcgatggcagcaaaccgtgcaccgtgcgtctggacgacgtccccggcggggcggaggccttcctgctggccgccaggttctgctacgacgtccagacggagctgaacgcgggcaacgccgtgccgctgcggtgcgcggcggagcgcctcgccatgacggaggactacggcgaagggaacctcgtggagcaggcggagtcgttcctgtccgaggtgctggccggctggagcgacacggtgcgcgcgttgggcacgtgcgacgacgccgtgctccctgccgccgaggacctgctcatcgtgcagcggtgcatcgactcgctggcggacaaggcgtgcgccgacccgacgctctccgggtggccgatgctggagtacttcacggccaagagcctcgaggagacggcgatctggaccggcatcggcgccgccgggaggccgcggtcgcccggcgcgggctggtggtacgaccaggcgtcctcgttaccgctgccgctctacaagcggctcattgcggcggtgcggtccaggggcatgagccccgagaacgtcgccggctcgctgatgcactacgccaggcgccacctctccgggctcaggcgcctcggagacaacagcgacggcagcagccgcgggggggctgcggccgtgctctcgggcggcgaccagaggacactactggaggagattgtcgcgatgctcccagtcgagaagggcgtcgcaccgacgcggttcctgctcggtctgctccgcgtcgcgacgttcatgatgacaaccccgcctgcgttcgccgtgttaccggagaccacggacgagggacagctggtcgacgctccgccgggcgagctcatgccagtcagctcggtaggcaagctagtcgacgggtacctcgcggaggtcgggacggacgccaacctcaagccgtccaagttccagaccatcgcggcgctcgtcccagactacgcccgggcgatcgacgacggcctctaccgcgccattgatatctacctcaaggcgcacccgtggctgacggactcggagcgggagcagctgtgccggctgatgaactgccagaagttgtcgctcgaggcgtgcacgcacgcggcgcagaacgagcggctgccgctgcgggtggtggtacaggtgctcttcttcgagcagctgcggctgcgcaccacggtgtccgggtggttcttcgtgtcggacaacgccgaccagggctccagctccgataactgcgtactgccgcggaggcccgacgacgatctggacctggcagcccggtccgaggtgacgacggacgaggacggctccgcggcggcccagcacgagccgtcgccggcgatgagcgtcgcggagatccaccgcccggggaagcccaagagcaccctgagccggctgttagggaagctcgggctcggcgggaggtcgtcgtcgcggcagcgccagcagcaaccgccgctgccgggcgccagtgacaagaggcgcaggtccttcgatttcgggtgttaa

SEQ ID NO: 16119 - DNA, 492 bp, Zea mays
  Peptide Sequence Number=SeqID_57898
atggatgcagggttcatcaaagaggtattccatcccgaatggctagccaaccctgtgcttgtgagaaagaaaggcgggaaatggcggatgtgtgtagactacactggtctaaacaaagcatgtccgaaggttccctaccctctgcttcgcatcgatcaaatcgtggattccactactgggtgcgaaaccctgtctttcctcgatgcctactcagggtatcaccaaatcaagatgaaagagtctgaccagctcgcgacttctttcatcacaccttttggcatgtactgctacattactatgccattcggtttgaggaatgcgggtgcgacataccaaaggtgcatgaaccacgtgttcggagagcacattggtcgaacggttgaggcttacgtgttcggagagcacaatttcttaggaggggcattaagtttgacattgcctccctgttggaagccaatgccatccttaatgccagggcgtctcccactatag

SEQ ID NO: 16120 - DNA, 261 bp, Zea mays
  Peptide Sequence Number=SeqID_57899
atggtgatggctatggggattcggcgttcagcgatggtggtggcggaggctgacgaggacagagggtcgtttgtctgcatgcgtcttgtcgtatggtcatctctgttcatgctcattatgatggctggcatgggcggtgaagggccccaatggcatcatttctacctctgtgccacgtcaacccctggtctccgtagcccgggtctcagcgtggctcgtcgtgatatgggtcgtgtggatggttcacgctctcagacctag

SEQ ID NO: 16121 - DNA, 1011 bp, Zea mays
  Peptide Sequence Number=SeqID_57900
atggctaccatgctgcgccggtgcatgcgggatctgcgcccgctgcggtctctcgcgagggtccccagaccgatcttcggcgagattttggttcttcttaatgcaatgcccgggactgtattacgcctgcagttagaaatgctgctaaggctggtaattgcatatggtgtaacggtagggattctagagtttccacattttgaggttgaacaaggattttttagaatgcaatgctgtgacgctgtgacaggaaaacctattttctgtgagagtttgaagctgttcccggctatgcctgattgttgtaatgttattggttcctgtgtaagtccaacatttcttaaatgtagaagcaactcaacaaaggcatctccaaagagttctacacagaatgctgccccaggtcctcaaggacaaccttctcagtcgggaagtaatgtttcaaagcttgctcttggaactcttgtggtcggtgcagcagctataggtgcacatcaacttggttatatagatcttcaatttaaggacaagacattgccttttagcttaaagaaggaagatgtcggaaaggtggtatatgaagatctgaagattccttctgaacagaaggttgaccagacacaaaacatgtcaggaccaaacactgagattgttcaagagaacaataatgagactcatacttcaaaggactttcgaaatggtggggtgggggcaccagagcttccaatcaatggggatcagcttgttcctgcagaagaaaagaaatcagaaaccctagcccatgagacaaatccagttccagatgaacctggatctgatactgaaatgccatctgaagattctccagctgttgatataaggacagttgccatcgatgctactgaatctagtgaagttcctcatgaacagcaaactgataagatagacggcacagttactcctgtacagtcaaccccaacaacagttagtacttacgatcaccccacagatccagactcaccaaagagatag

SEQ ID NO: 16122 - DNA, 504 bp, Zea mays
  Peptide Sequence Number=SeqID_57901
atggtcgacgctccgtgtctactactccctagccggttgcgcgcccccgttcagtcgtctccgagaccgcaaattttcaccccgcgccgccgcgtccttcatgcttccggctccagcgctctggtgtccgacacagctccatcgcgtcctgcagaaggaggtagcggggtggcaagtcaacccgccccgggcttcaagcacagggccaccggcaacctccagaggtgccccacccctattgccgcccttatccccttcctcaccaagcagtccctgcggtgcgaggtctctaaattggtgaggctgacacatatgtcacacggatgtcgccgcagcgctcacccatgctgctccctcttcaaggacgcgactttcctccattgtggcactgttgataaggccgatcttgctagtgtgcactctctcaggttactttcgtccaccccctccaccccaacttgtgctgtccggaagacgaacgggcgacgaggaaaaatattctga

SEQ ID NO: 16123 - DNA, 606 bp, Zea mays
  Peptide Sequence Number=SeqID_57902
atggaggcccaggcccacacgtcatgcaaccggcgcgccggttgctacgtgcgagcaactgcaccgccactcgcgccactaccgcgcctcctcgactgcggaaccagtaccgcgactcgagacgaccctgcgtatgacccaacagtgccagccaggcgcgatggtcaatacggccaaaaatgggccggcagtaatggcggtggcaggcgggcggaagcagcgggaccgggaaagggggataccccgaaagggatccttctccgcgaaggaaacaggtcccaagcctccctactgatcagaggttcaaaggctggcccctcggaggggttcaacagccgcctcagagcgcttgggctccacgcccactactggtcagaggttcgaaggctggcccctcggaagggttcaacggccgcctcaggccactcgggctccgcgcccactactgatcaggggttcgtaggctggcccctcgaaagggttcacagtcgcctcagacacagagcgagggatgaccctgggtacgttcgatacataaccaaggctcgggctacgctcccgaggtaccctaggacatttccgagaccagcgggaacgatcttgtaa

SEQ ID NO: 16124 - DNA, 108 bp, Zea mays
  Peptide Sequence Number=SeqID_57903
atggcgagcccaggtgcgtgcgtgcgagtgacaagcgggccccggatgtcagcgccgtggtgggagctgggccgcgcgaggttaaattcccaaataatgttccagtag

SEQ ID NO: 16125 - DNA, 498 bp, Zea mays
  Peptide Sequence Number=SeqID_57904
atgaagagcgataactttttgtttggcaaagtgttctgggcccagaatcggatggctctgtcgaatgaacaaatcgaagccatgaggcacagggaaaacagaggcacgatcattaattatatatacgagaaatatggaatgcatataacagtaacagaattaaaaatgacacccttatgcatatttgtccagcttgttgagcgatgtcgccttctgctccagtcggacgacctcggcatgttccccgaggagaggcaagcctgggtacatgctctgggtggaggaatggatggtcgtgcagaagcggtgctggatctaccacctcgcctcgctgccaccgttactgctcgtcttggcggaccacatccgggtggtggaccactggtggaaccagcatgggctcggcggcgacaacgtcgagggccgctgtcgggtctccaagtcacggtcattagcagtgatgaaggggacgaaggcagtctatatattttcagataa

SEQ ID NO: 16126 - DNA, 417 bp, Zea mays
  Peptide Sequence Number=SeqID_57905
atgaggcacagggaaaacagaggcacgatcattaattatatatacgagaaatatgtaatgcatataacagtaacagaattaaaaatgacaccgttatgcatatttgtccagcttgttgagcgatgccgccttctgctccagccggacgacctcggcatgttccccgaggagaggcaagcctgggtacatgctctgggtggaggaatggatggtcgtgcagaggcggtgctggatctaccacctcgcctcgctgccaccgttcctgctcgtcttggcgggccacatccgggcggtggaccactggtggaaccagcatgggctcggcggcgacaacgtcgagggtcgctgtcgggtctccaagtcacggtcatcagcagtgatgaaggggacgaaggcagtctatatattttcagataa

SEQ ID NO: 16127 - DNA, 1641 bp, Zea mays
  Peptide Sequence Number=SeqID_57906
atgtcgtggggacggttcagcttcactcctcagcaggggcccacgctgacgcggcgaacgcgggtgttccctgcgcacaagcccgcacctcgcaacgtggtggtcatcgatgaggacgatgatggtgatgttatcattatggagcgcgcagctgcgcgaggttcaccttctgcggcggcggcaccaggatctgaagcgaggaaagggggcggcttctctggtgatgtgatcaacatagatgatgatgaagatgagaaagatggtaccagaggggataaagcaggtcctagcatgtcctgtgcctctgggtctccagtagcgatgaccccaggccggggttctcccaggaaccgatatgggtttgattgctcgtatgacagctctgagagcaatttgaccaaaggatgggactctgacactgatgacggctctgattgtgagattttggatgacacggctggtacagcccgtgagatgtgggagacggctgcttccagaaaaaagccacctcatggtgtcgacgagtgtgaggatggtggtgctactgcattcgcgtcatgtgctgggttggagacacaaccaggtaaatactctgagcatctctttggtgctgaacgccatccagacgagagtatgtcttggttttacagtgctgcaagcaagtatggctctcaaaatagtagtgacagtacaaaagaaagccctgggcatgctcaaagcagttctggcactgaaaagggtgtccatggcccttctgtgccaaatactgaagaatgctctaatggagatttttccagtataaatggtagagaaagcgcacaaaatcgaaatggcagtggaaaggatatccctactgaatgccatctcaatgataacatatctcaaagttttagcgatgcccgtaaggaaggtcttcaaaataataccggcaggtcaaaggatcaccatgaccagttttcagcaccaaatgtcaaagaatgttcaatggttggttctgaaaaagcttcaagaggggttcaattacctcgccctgatgaaagctctgcctataacttcgctcctgcaaataggtttttttctggaatctggtcagtggataggaacgatggaagtcctccaatttttgtcagtactcctgaaaaggttgatgagacaatacctgatgatgtatattcacaaaagtatccatcaccacctgaagcttcctacaacacaattttttattctgctcaagataatggtctggccaagggtaaggatttgcttcaggatcctgaggaattagggcggtttgcttcagtgatcggtgaacgtgaaaaacacaaagaatctgttgagtacaagcgagcagcagaggaggaatgggcttcaagacatcggcaattacaaatacaggccgaggaagcaaagaaattgcgaaagagaaagaaagctgaagctcaacgattgcttgacatggagaagagacaaaagcaaagattgcaagaagtccgtgaatcgcagagaaagaatgaagaagctatacaactgaaggagcggtatcgggcaacggtcggaaaggagctggaagatatagaaaggagacattgtgatatgacttcaatactgcatgcgctaggcatctcagttgaaggtggtgag

SEQ ID NO: 16128 - DNA, 273 bp, Zea mays
  Peptide Sequence Number=SeqID_57907
atgatgaaacatggagtgtggtgtgaggcggcatgcggggctgtaggaggaggaagagagcggacaagtggagaaggagacacacttgtgcttggagaaaggggcaatgcacatggagggagcgagcacatgagagagggagcagtttgccggcgctgtgatgggtgggggtggtggcggcggcgccaaggatggggtgccagcgccaatcgcggacgacggcgaggtggcggcaccgttctcgaatgggggtggggggtcctcaacttctaa

SEQ ID NO: 16129 - DNA, 387 bp, Zea mays
  Peptide Sequence Number=SeqID_57908
atggccttcggagctttcgttggagactgcggcagcacagagcacctcgaccatgctatcccccatcaccgtgcaggccagcgtcgtcgcaagtcatctggcgcccacacacatcgcgacagccatctagcaagtcagctcgcgccatggaggaggaaagacgaccgatgcctgggagaaggagcacgtggctgcgtgtcgtggaggaggaaagacgaccgactgtcattcgtcggccgtctcctctgcgaccgtgcacttcgccgagttgccgaacacgagctcaaggcggtatggaacgcgctcgtcatgctgctcttccctgctcgcaggcgcagcgccgccggggatggccaaggccatgcaggcaccaccgctcgccattga

SEQ ID NO: 16130 - DNA, 1971 bp, Zea mays
  Peptide Sequence Number=SeqID_57909
atggccttatcaactccagcgtctattttggttgacgagaaccaacagataaatagaggtaagagggccgatggaccaagggccaaagggctgaagccatccgagaatcctggcaatcaagggaggagagctcttaaggatttgtccaacttctctaaaggcactggtttgaaggacacttccaccctgaaagagaagtcccagcagaagcctcgtagtaatgtggccaacactattaaaggcaatgctttgaaggacaagcccatcctgaaagagaagtccacccaggaacagaggtcaaaagctcttaagaacccaatgaaaattttagttgatgaagagatcaaaatgtgccatgagtgggctaaggatggggtggagggatttcactcaacacaaaataattctcaaaagttggataaggatctgctagacaaacgtgtcaagaagaaagtggcggcagtaaactcagccttgtgtggttggccagatacagtatttgattctctaatgtatccatctatggaggttgctgagcttttttatgaacaaaacgtgctggaggtggaacctgagattctcccggacatcagttggcgtctctctagttcagtagatggtaaagcaaagattgatgaagaccgtcttaccgatgctgagcttgaccagtaccattctttggagaacaatccaattatttttgagctgagagacgagccagcgatcccgcagctgggacagagagtgcgtgattcgcccgccgcccgccagtcgaatggcgagaaatttgccattacagagatccttaggtgcggcttcgacgatttggaggcgttgcggtcgaggagcagcgaggtcaggcgtggcagggcggcgagggagggtggcccggtggagcatggcgagggtggcggggacgcggccctggaggcggttgtcggcgaggtacagcagcttgagcagctcctgaacccgtgcacggccgccgtcgaggccggcaacctgacgcgcgtgcagcacctgttctacgtgctcggcgagctcgcctccttctccggcgacgccaaccaccgcctggccgcgcacgggctgcgcgcgctcgcccgcagcaggctccccgccgccgtcgggccggcggccgcggcggccgtgcgggtgccgccctgcgactgccccacgccggcgttcgtgggcacggagccgcggctgttccgcgcgtcgctcatcaggttccacgaggtgagcccttggttcgcgctggccaacgccgccatggagtgcctaggcgaatccctcgtctacgcctctaaatcgtcgaagccgcacctgagcacctccataatggcaaatttctcgtcgaataggtcagtgtgcacgcgcgcgaggagaatggggacggaggccgacgccgcagccgtggattcgcttcggtcgcagatcccgttccagaccgacggggagctcatcctcccgccgcgcgatgtggggctcgtcctcgtcgacctctgcaacggcttctgcaccgtcggcgccgggaacctcgctcctgttgcgccaaataagcagataagtaaaatggtggaagaggccgctaggctctctaagctgttctgtgatagaaacctgccgatctttgcattcctggatacccattatccagataagccggagccaccgtatcctcctcactgtatcattggtactggggaggagaacttcgttccagacctggagtggttggaaaaggagccaaatgtgactataaagaggaaaagttgtattgacggttacatcagctgcatagaggaggacgggtctaaggggtgtgctacatatgaccttcctgttgagatcgctatgaatatcaaaggagctcttgcccatcctcaggacctgatgcatcatattggactctatatggccaaaggaaggggtgcaaaggttgttgacagggtggttattgaaccttga

SEQ ID NO: 16131 - DNA, 201 bp, Zea mays
  Peptide Sequence Number=SeqID_57910
atgacgaagatagttgttcgagtccttcttgtcgaaggtggtcgtttgagtttactggagtgcctagaacaacccaaattcgccggtgttggcgatgaccatgaggtccccctgcttgacggtagacagcgcgatgcagcagctctaaaccgcgtccaagcgatagctacgccggagcttgtcgtacacaatggtgcatga

SEQ ID NO: 16132 - DNA, 177 bp, Zea mays
  Peptide Sequence Number=SeqID_57911
atgggcgctcgccggctatgggcacgccggcaggggccgctgtcagggggcagcgctcccagtgctgcaggggggcagcgggaaggggaggagagccggcggaggcgcggagaagagtgggagaaattagccagagaagctgggttctgtgcagcgaagctttatgagcttggttga

SEQ ID NO: 16133 - DNA, 408 bp, Zea mays
  Peptide Sequence Number=SeqID_57912
atggccggcggcaacctgttcgggcgggcgctgagctacgtagtcaacgagctcctcgtcgagggcctcgccaacaaccgtgcattccagaggttcgctgtgaagaccaacaggactcttgagagcctatcgtctaaagctaaggaagtgagggaggagttatcggaacaattgaaggaagctcgtggccagaaagatagatctctgtttgcagcacttcaagcagtgaagctggttcccacatcgattcagcaagatgatactgacaatcttgttacgagtttagtccttgtctgggtactatttatgaatgacattctggatgtcattcaatggaaattagtcttaagtttctctgcacttagattagtagacgcagagcagttggtctcatgtcctttgtcataa

SEQ ID NO: 16134 - DNA, 366 bp, Zea mays
  Peptide Sequence Number=SeqID_57913
atgacgtgcccaacgacggccactgattcgtcgcccccagcgagcaggcgacaacagtcacggttaccgattggagcatggataaatcctgcgcagactatggcgaactacagaggcatgtccttaccggcgtttggggaagaacacggctggtccgagaagatgtccgcgcgacagtgcttcttcgagtatcgatggcgaggttctggtgcccagcgtggtgctgcaggggacaacgcccaccaaattgggtattacaaaaggggtctgactgcggaagctgtggtcgctgacttggttttcaagaacattcagcatgggcagcaacaaggccagtggctagatgccactggttttaattattag

SEQ ID NO: 16135 - DNA, 468 bp, Zea mays
  Peptide Sequence Number=SeqID_57914
atgggcaagagcaagaaaggtggtagttcttcacatcactctggcgacaagcgcaagcgcgagccgactcctccctcggaggacttcggcgactcggagtactcggaggaggagttctcctccgagtccgagggctcttcggctcctgcctctcccccggcgtcgtctgatgatttagacgactcccaggggatcgtcgcggaggtatggacctacatccgggccgtcgagcgcgccgggctcgagggctcggatgagtcggagtactcctcggacaaggggaactcctcggactcgtctgaggagggcggcagcgacggcgatggcggcgacggcgacggaggcgacggtgacggcagcggtgacggcggcgaaggcgacggtgacggcggcggcaagggtggcagcggcgacggcggtgacgacagcaagggcagcagcaggggcagcaacaaggccagtggctag

SEQ ID NO: 16136 - DNA, 168 bp, Zea mays
  Peptide Sequence Number=SeqID_57915
atgacgtcgttaacctggagaagtaagcatttagtgtcaggcctgcagcaggacacccaagagctctccattccgaaatccaaacccaactgggaaccccgtcgcaccggcgtctttggagtcgacagcctcgtgtctggagatgaagatgaggatgtgtgctcatga

SEQ ID NO: 16137 - DNA, 336 bp, Zea mays
  Peptide Sequence Number=SeqID_57916
atggcgcatgaagaggagaggagagaagcgccgcgccgcgacgagtgtgtcgggtttggcaggcggtcgggtgtgggagacgatcggaagcttctggggataagaacggccgagaccaacaaaaagaaagtctttacatgcccatatgcaaagaatttatttctcgtcgtcgtgtgtggagcgaggaagaaggaacggacggggcgaccgggagtaggcaggggcggcatggccttgggcctccttatccacaccgctcgcttcctcgcccacggaaatgacgggactgcccccgccttcgccaacgtgggatggatcagtgtcgcggtcgcctaa

SEQ ID NO: 16138 - DNA, 297 bp, Zea mays
  Peptide Sequence Number=SeqID_57917
atggcccttgcatgcaaccatgcaagagggcccccgagggggagccattggagcggttcgggtgccccgtgcccatctagcttcggcgacctccatctgaccatcccctccatagctcttaaagaccatggctccaccacacgacgtccgttgtatgtgccctcccaggcggactcatcctccagcaagcaagcgggtctggtgtctcgtgatgttcctggcggagctcatggtaaccctaagcccgatgttgaccaccgacatggacgcgacgagtcggcgaagcgcccctattag

SEQ ID NO: 16139 - DNA, 408 bp, Zea mays
  Peptide Sequence Number=SeqID_57918
atgccgagatccatatctgcgcactggagtagtacgaagcgcattaactgcctgtttggaacagcctgtgacctgaaggactccaccgtttccgttggtattagtgctctaatggaagaacagctcaccggcgttcaaatccttcgcttgaggagaaagccaccctgccagaattccaattacaagcaggagcaaacaaaggagcacgccatggcgcactggtggccggtgcgcgcagcacgcagcgctcacatgcccgtcaccgcgaggcgcgagccagcgaaccagcagggcaggcggcgatccaaccaaaccgcctttctccatgcgcgcagagcaggcaacacggactcccatcgcgatcctctttcagaagctgtttcagactgttggtttctgaatctctga

SEQ ID NO: 16140 - DNA, 174 bp, Zea mays
  Peptide Sequence Number=SeqID_57919
atgggcgagggcctcctggcagcagcatccgccctgaggtcatcgctgctgctgtttggccccccggagcagaagtcgtcgacgtcgccgcttctggggcgggcgacgacgagccgttcggcggtcttctgttgctccgcagagtgggggccctccgaccgcgtcgccgtctga

SEQ ID NO: 16141 - DNA, 2085 bp, Zea mays
  Peptide Sequence Number=SeqID_57920
atggctattgctccgccgactcgcttcgctgtcctcctcgcccccagcctcctcctgatcccagattcgcctcgccggcccccggcgcccgccacgagcgccgtcaagcgaagccgttcttccctggcgcgcgccgctggcgtagctgccaggctccttccgccgaagcacatcgcggccagctggcgctcgtcgtccaccgtcgtcgcggcggacttcgtcctcctcccggaagcacagatccgcacaggctcggctgcatttctccacttgctggtaaggaagctcgctccgatggattactccgaggctgatgccccgggcccgtcgccagcgaggccagccatgccgcttcaccagaagcaggcggggctcgctgctagcaagctgggcgtggggacctcgaagaaacacagggcttttgtcgcaagcgatgagcagtggtacaacaagatttttgatccgtcaagcgacttcatcttgacatggaaccgcattttcctcttctcctgcttcgtcgcgctatttatagaccccctctatttctatgtgcccaagatcagctacggcagccccaaattctgtatcggaacagacacccgtttcgccgtcggtgttacattcttcagatcgattgcggatttattgtatgtcctgcacatcataataaagttcagaacagcatatatcaatccaagctcgactctgagggtgtttggaagaggggatcttgtcacaaatcccaaggaaattgcgtggaaatatatcagatctgacttagctgttgatgtggcagctgctttgcctttgccacagattattgtctggtttgtgataccagctataaagtattcctctgctgagcacaacaataacattctggtgctcatagttcttgctcagtatcttccaagattgtatctcatattccccttaacttatgaaattgtcaaagctactggagttgttgcaaagactgcttgggaaggagctgcatacaacatggtgctctatctgatagctagtcatgtgctaggtgcactgtggtatttgctatctgttgatcgccagacattctgctggaagacgaactgcctgaatgaaactggttgtgatcttaagtacctagattgtgacacgacaccaaatgctacatgggcgaatacgactgctgtcttcagtaattgtaatgctagcgataccaatataagttttgattttggcatgttcgagcctgcattgtctaatcaagcccctgctcaaagttttgcgatgaagtatttctattccctctggtggggattgcagaatttaagctgctacggtcagactcttactgtgagcacctatcttggcgagacgctgtattgtatattcttggcggtacttggtcttgtcttgtttgcgcatttgattggaaatgtgcagatggatgatcagcttcttgatgccatctgtgagcgtcttgtatcatcactgtgcacaaaaggcacatacattgtccgtgagggtgatccggtgacagagatgctcttcatcatccgtggaaaactggaaagctccacaacaaatggtggccgcactggcttcttcaattcaatcaccctgaaacccggtgatttctgtggcgaggagcttcttggatgggctcttgtccccaggcctactacaaatttgccgtcatccactcggacagtgaaggcactgatagaagtagaggcctttgcgctccaggcggaggatctcaagtttgttgccagccagttcaggcggctgcacagcaagaaactgcagcacactttccggtactactcgcaccactggaggacgtgggcctcatgcttcatccaagctgcctggagacggtacaagcgaaggaagatggcaaaggacctgagtatgagggagtcattcaactccgttagattagacgaagtggataacgaagatgacgattctccgcccaagaatagccttgctctaaaattcatagctaggactagaaaagtgcctcagaacatgaaagagttgccgaagataacgaagccagacgagccagatttctcagctgaacccgaagactaa

SEQ ID NO: 16142 - DNA, 1722 bp, Zea mays
  Peptide Sequence Number=SeqID_57921
atggcggcggcggaggaggaggaggagtgggaggatgggcgttcggtgatgccggaggaggaggacggagacatcgaggacgtcccaccgccgccgctgctaggcaggaacttcggcagcgaggacgaggacgaggacgaggcgggctcgttgaactcccagtcccagtggtggccgcggagcttccggtacgtccgcgcgtggtgcattctctacgatctcattcctgcctcgaaagccacgggcgatcttgttccgaaacgattaacaaacgatcgtgttgacatgttacatgtcgtttatgttttttcaaacacccctagggaagcgactgacacctataccattgccgcgcccccgggcctccgtcacctcgtcgtcggtgactgcaatggcctgggctctgacctgaagctgcctcttctgtcggacaagctagatgggaggcaagattcatccaacaacttgctgccagtagcagaccccttcggttcagtgctaagcgacgggagattctcagatagagtgcaacaagccccaaccactccaggatgcaatctgacgcaaaccgtgttcaatggggtcaacgtgcttgctggcattggcattttctctgctccatacacgattcgtgaggccggatgggccagccttgtggttctggcttttttcgctgtggtgtgctgctacactggagttcttctaaagtactgctttgagagcaaagatggtgtcaaaactttcccagacattggggagcttgcctttggaaggatcggccggtttctcatttctatagttctgtacaccgagctctattccttttgtgtggagttcgttattctggaaggtgataacctggcatcaattttcacgagcaccactttcgattggaatgggattcatgccgatggcagacatttctttgggattctatttgctcttgttgtcttacccagcgtgtggttgcgagatcttcgagtaatatcttacctttcagtgggtggtgtgtttgcaactcttctggttttcctatctgttggtgtagttggtgctactggcaacgtagggttccacttggcagggaaagcagtgaagtgggatggtataccatttgcaattggcatttatggtttttgctacgctggacactcagtgtttccaaatatctatcagtcaatgtccgatcgcaccaaattcaacaaggcactctacatatgttttgcaatatgcacgacaatttatggcgctatagctgttattggctacctcatgtttggagataagactctctcacaaataactttgaatcttccgaaagattcatttgtggcaaaagttgcactggggaccacggtgatcattcctttcacaaaatattctttggtgataaacccattggctcggagtatagaagagttgcgtccagaagggtttctaaccgatagactcttcgctgttatgctgcgtactgccattgttgcatcaactctatgtgttgcctttctcctgccattctttggtcttgtgatggctctcattgggtctcttctcagtatacttgtggcgctcataatgcctgccctgtgcttcctgaagatcgctcggaacaaagcgacgcgcttgcaggtcatcgcaagcgtcgcgaccgtggtgctgggctccgtctgcgcagttcttgggacgtacaactctatcgccaagatagccgaaagctactag

SEQ ID NO: 16143 - DNA, 363 bp, Zea mays
  Peptide Sequence Number=SeqID_57922
atgcgcggggcggaaggctcggcgggcgagcgaccgttccggcggcgcgggttcggccaaggcacccctggcggcgattcttccaagccctcggccagggcgcgccggccccgaccccggcggcatgggcgtagccacagcggccctggcggcgccggccccatgggcggctcgggcgcagcccggagggcacaagcctcggcgcttggccgcgcggtcagaagcgcgagcacgcgggagtgcatcccggcggcgcgtggctacggcagcacgggcgcggctcatgcccaggcgcacagacccggcaacggcaacgacaatggatttgccaggagtaaattgaaagaatcaagcgcaatttga

SEQ ID NO: 16144 - DNA, 261 bp, Zea mays
  Peptide Sequence Number=SeqID_57923
atggtcgtcgtcggagatcctagggtcctcccttcccctccaactaatcgtcctctacgcggactcgccctcccctataaaaagtatggtcgcggcagcgtgtgggggctatcgaagtggggtatcgcgtacctgggcgaccgaggccttcttctccggcgtgcctgtgaggtgcataggggcggcgccgccggtcagagtttggtgacggggaacgggatcgtggtggccgttgatcaagggatgaacggcacggattag

SEQ ID NO: 16145 - DNA, 1599 bp, Zea mays
  Peptide Sequence Number=SeqID_57924
atggcagcgttagaagcccaagcagcggagcgggtgattgaggcctgcgtcaggacagagtccgtcaggaaatgcgtcttcacctcttccttgctggcgtgcgtgtggaggcaggactaccctcatgaccggcggtgccctaccaccatcgacgagagctgctggagcgacgagagcttctgccgcgacaacaagctgtggttcgcacttggcaaaacggcggcagagaaggctgcgtggagggcggcgcggggacgagacctgaagctggtcaccatctgccccgcgcttgtcactggtccggggttccgccgccgcaactccaccgcgtccatcgcgtatctcaaaggggctcgagccatgctcgccgacggcctgctcgccacggcaaacgtggagacggtggccgaggcgcacgtccacgcgtacgaggcgatgggcgacaacaccgccggcggcaggtacatctgctacgaccacgtggtcaagcggcccgaggagttcgccgagctggagcggcagctggggctgccgggaggggccgcgcccgcgcccgcgcacggctctgacgaccggccggccaggttcgagctttgcaagcggaagctgtccaggctcatgtcctccaggaggaggtgcgcgtacgacacctactactccgtcgcgtttgagggtgatgttatcagcacgctctaccgcatagtatctactctcgtgccttcatttcggtgcagcctacatgttcgggcggctcaaacttgcagccacgctacccgagcgcctcctgtcctgtcacgcggcgtcctcggctcgccgctcaccccaccctctcctccggtccggccacttctcaccgcctcttgccggacgcccaaaaaaatcgaagccgaaggagccgctcccatggccgctgccctctgcccgcgcctgcgcggcttcatggcctcctctcgcccgctcctggccttgcgccccgtagcgctgcgcctacccatgcgccgcgccgtcccggccatgcccctcgccgcccgcgcacgccgcggcttaggttcctccaccgccaacgcccagctcgacgaagacttcgccacggcttctgacctccggttcgaatcgccactcgaggtagtcaaataccccgatcccgtcctgcgcgcgcgcaacaaacgcatcaacacgttcgatgacaacctccgcgccctggccgatgagatgttcgacgttatgtacaagaccgatggcattggtctctcagcaccacaagttggagtcaatgtgcagcttatggtattcaatcctgctggggtgaagggggaaggagaggagattgttcttgtcaacccagtgatatacaagtccgccaaacgattgcttgtgtttgaagaagggtgcttatcgtttcctggaatatatggcaatgtggtgagaccagaaagtgtgaaaattgaagctcaagatgttacaggggcaaagatcaaagtaaaattatctggtatacatgcaagagttttccagcatgagtttgatcatttgctggggattcttttctttgatagaatgacaattgatgttcttgaaaccgtacgtgaggaactgaag

SEQ ID NO: 16146 - DNA, 1443 bp, Zea mays
  Peptide Sequence Number=SeqID_57925
atggggaactgcatggacaaagcggtgccggtggacaacacctcctatcaatcgaaagcagggagcaaatcaatttcatcgtccaacccttcgacggtcaagactggttcgactcggtcgacatggactgtagcctcatacaaagatagtcgagagcttcctactcctaggacagaaggggaaatcttgtcatcaccaaatttgaaggcattctcgtttggtgatctcagaactgcgtcgaggaacttcagatcagacagtcttcttggggaaggaggatttggctatgtgttcaaaggctggattgatgagcaaactcttgccccttcaaagccaggaagcggtatggttgttgccatcaagaagctaaaaccagaaggttttcagggccacaaggagtggctgacagaggttgactaccttggccaacttcaccaccagaatcttgtcaaactcattggttattgcacagatggtgatcaccgacttctggtgtatgagtacatgcctaaaggaagtttggaaaatcatctattcagacgaggtgcggatcctttatcctggggaacaagactcaaagttgcaattggggctgctaagggtttatcatttctgcatgatgctgagaaccaagtcatatatcgtgatttcaaggcatcaaacattctccttgactcggagttcaatgcaaagctttcagactttggcttggcaaaagcaggtccaactggggacaggacccatgtttctacacaggtcatgggcacaagaggttatgcagctccagaatatgttgcaacaggtagtgtttggttccggagccagttgggatggagcggctctgagccaaggagcgtctccatccggaagattttagggagccagatgtgtagtccagtccagtccagtggcaagacattaatattctactttggtcggctctcagtgaaggcagatgtctacagcttcggcgtggtgctactggagctgctgacgggacggcgggcgctagacaagtcgaaaccattaaccgagcagaacctggtggagtgggcgagaccctacttgagcgacaagcgccgtctgtaccgcatcatggactccaagttgggcgggcagtaccctaagaagggcgcccacgccgtcgccggaatcgccctgcagtgcatccgcaacgaagggaagatgcggcctgccatgtccgaggtcgtggagaagctagagcagctgcaggatcccaggtacaacgtggcggcgccgccacaggtgaacacggcgtcgtcgtcgtcgtcctctggctcagtagtccccaggtcgcccaggaaggcacagccttctcccagacgcctgtcgggttcggcctccccgttgccagcaccagcaacaggctccccgctgccggggtcatcgaggagtagtagtaggactgcgcaggtgcactag

SEQ ID NO: 16147 - DNA, 177 bp, Zea mays
  Peptide Sequence Number=SeqID_57926
atgacaaagaagatggacaggtgtgatggctggcagatgttgaagaagggcacgacagttgggtgggtacgtgcctatgagggagatgatggtgctgatgatgctaacattgttgttgctggtggtacgaagtcgtcggtgattagtggagggatgagagcacctagagggaggtga

SEQ ID NO: 16148 - DNA, 366 bp, Zea mays
  Peptide Sequence Number=SeqID_57927
atggctaacaccctctctgaccttggctccctagtcatggatgagatgctcgttctcaaactcctacgcgggatcaatcctcactacgtgtacctgcgagctatcctcatgtggatcaccctattaccgtccttcgtttgggattgcaatgatattctgcccgaggaactcacgaatgtggccaccaccaccaccaacgtcgcgatggccctctatagtgccaacccagggggcagacctagaaggcctgtcctaccaccttcgggattgttggttctaatgactaatgaggcatacggttctgtccttacgcctaagcataggatcttgctacaagggcccttctcgcacactatgacagcttaa

SEQ ID NO: 16149 - DNA, 570 bp, Zea mays
  Peptide Sequence Number=SeqID_57928
atggaggcaagaagagctttgaggtatcgagtgcacgggagaaggtcatggaggccaaggaacctaaagccaaggtgcagaagacttgcaaagtcaaggttgatcgagttgagaagagatatgggaacctctagaagagttgaagaagtttggctaagtttggccaaacttgggtcagtttgggtctcatcgggcagtcacacgagacgccctcgggcgagtcatgactgcactcgagcgaattgtgattgcgcttgggctaatcatgactgcgcttgggcaaggcgtgactacgcttgggcgagtcgtgactacgctcggagttggcctcgggcgaatcgtgactgcatctcttgtatgaggttggccttgggcgagttggaactgcgtctaccgtccgaggttggcctcgaaagagtcagaattgtgtctcccacccgaggttggtctcgggcgagtcatgactgcgctcagagttggtctcgagcgaatcgtgactgcgtctcccgcccgaggttgtcctcgggcgagtcgaaactacgtctcccgtccgaggttggcctcggatga

SEQ ID NO: 16150 - DNA, 678 bp, Zea mays
  Peptide Sequence Number=SeqID_57929
atgaagatccagtgcgacgcgtgcgagggcgcggctgccaccgtggtgtgctgcgccgacgaggccgcgctgtgcgcgcgctgcgacgtcgagatccacgccgccaacaagctcgccagcaagcaccagcgcctcccgctcgaggctctctccgccagcctcccgcgctgcgacgtctgccaggagaaagcggcgttcatcttctgcgtggaggaccgggcgctcttctgccgggactgcgacgagcccatccacgtcccgggcacgctctccgggaaccaccagcgctacctcgccaccgacatccgcgtcggcttcgcctccgcttcgtcagcgtgcagtgacgcctgcgacgcccacgacgactccgaccaccacgccccgcccaaggccgccgtctcctccgcggcgcagcagctgcacaaggagtccccgctcgggttcaaggagctggagtggttcaccgacatcgacctcttccacgagcagacgccgaaagccggcaggagattggctgaggtaccggagctttccggaacccaggccgcgaacgacgcggcgtactacaggccagccaaagccactgccactgccggcgccggggtgcgccagagcaagaaggcccggaccgaggtcaccgacgacgaggaccacctcatcgtccctgatctcggctaa

SEQ ID NO: 16151 - DNA, 1410 bp, Zea mays
  Peptide Sequence Number=SeqID_57930
atggagaagctggatgagagcaagttcgagcagcggttagagctcttggcgctccgcatcccccgtgagctcgcctccgcagttacccgcctccttcgctccggttatctgctcgacaagccaagggttaaacctgtagttgaggaccccgagggcgacaagaaccggctcgtcatactgtctgaaaggattcagaagcccgatttatctgacatgtcacagcaggcgcttgattcattgaagcaactatgcaatgttgaagttgtaccttacacattgaccctaggttattcatattggagtgcaggtcatgttgctcatctgaacatatctgatgacttgctagcatataaagatgtcatagcaaaggttatctatgacaaaaattatccaaggattcagaccgtggtgaataaagtggggacaataacaaatgaatttagagtcccgaagtttgagatcttagcagggaaaaatgatatggttactgaaattaaacaatatggtgcaacattcagacttgattatggtttggtctactggaattcaagactcgagcatgagcatatcagattagtttccctgttcaagaaaggagatgttatatgtgacatgtttgctggtataggtccattttcaatcccgtctgctcagaaaggttgtgttgtatatgcaaatgacttgaatccagatagtgttcattatctaagaactaatgcaaagattaacaaggtggaggactatatattcgcctacaacatggatgctagagtgttcatgcaaaaattgatgactgtgcctggcctggaaactagatcagactctcaagttgccactgatgaatcctattctaaagaaggggttccacctaatgaaatttcttcttcaaatggaaaccataatgatgttcgagaggacattaaaaatggtgctaatgaatcctctgcggcaagcactactactaaaaagcgacaacaaacttcagaagaaggtgatgaacctgattgccaagatgcagatgctaataaaacaaaaagacaaaacaaaaagagagtgagaggattagggccactgccatccaagccatgggaacactttgatcatgtactgatgaatctacctgcttccgctttgcagttcctcgattgttttgatggtctcatccaaaagaaatactggacgggatcactaccttggatacactgttattgtttcatccgttcttgtgaatctgaagaatcaattctctctgaagctcagaataaattaagtgctacaatagcagaaccaatattccatagggttcgtgatgttgcaccaaacaaggctatgttttgtttaagcttcaagctacccatggagtgtcttaagggggacagtgaaaatcacatcgaatcagttgccaagtag

SEQ ID NO: 16152 - DNA, 447 bp, Zea mays
  Peptide Sequence Number=SeqID_57931
atgggggtttgttttttagagaccaaaaacacaaatccaaatgaggatctggagtggttggaaaaggagccaaatgtgactataaagaggaaaagttgtattgatgggtatatcagctgcatagagaaggacgggtctagtgtttttgctgattggattggaaaatatcagataaaaactgtcttggtgctcgggatatgcacggacatctgtgttttggattttgcaagctcaactctggctgctcgaaatattgaccgagtgcctccattacaggatgtcgtgatttattcaggggggtgtgctacatatgaccttcctgttgagattgctactaatatcaaaggagctcttgcccatccacaggatctgatgcatcatattggactctatatggccaaaggaaggggtgcaaagatagttgacagggtggttattgaaccttga

SEQ ID NO: 16153 - DNA, 1422 bp, Zea mays
  Peptide Sequence Number=SeqID_57932
atgagtgcaatggttgagacgcatcctccaactccaaccgccgctgccgacgtggtctccatcctccgcggagctgaccccgcccgcctcctcgccacttccggcatcgccccgacgcccgagctgctccagcacctccgccccgcgctcccgaccctcccggactccgcgattccggccctcgcccgctgggccggcgccgccaccgccgtctccctcctcgcctcccgccgcctcttcgccgccgcctggcgcttcctcctgttccagcccgccgccgcctccccgccgcccccgctcgccgcgttcgcaccgctccttcgccgctacgctcgcatcggccgcaccgactccgcggtccgcacgttccggtttctccaacgccacccgggccgctacgccgtcgaaagcgatgtcacgccgtctgccgaggcgctctccccgttgatcctgaccatcgacgcgctttgcaaggagggccaccctcgcgccgccgcgctgctcgtcgcgcagatccggcgcgaggacgacgggtgggcgcccgacgtgcggatctacaacatcctgctcaacgggtggtcccgcgcgcgccgactcgacaaggcggagaagctctgggcggcgatgcgcgatgaaggcgtgcggccgacggtggtcacctacgggaccttcatcgacgcgcactgcgtcatgcgcaggcctgaccacgcgatggcgctccttgaccagatgcgggaggagggcacggagaccttgctggggctagtcgagtgctcaaggccatgctgggggcggggcatttcaccaactgcaaggacatacaactattttttcacggtctttgccaggaatcttagcatcgatctgggaatgaacctctacgtgaagatggtcagcaatggctacgcgccagaccggctcacttaccaccttctgatcaagatgttgtgtgaggcgaaccggcttgaattaacgctgcagatgcttcaggagatgagaaacagtggttttgagccagatcttgcaaccagcaccatgctgatacatttgctttgccgacgccatcagtttgaggaggcttttgcggagttcgagcagatgtttgagagagggatggtgccccagtatatcacgtaccggatgcttatgagagagctaaagcggcttggtctagtcaaactggtacagaagttggcagatctaatgcgctcagttccacattccacaaagttacctggcggttacagggataaggaaggagatgatgctatagagaagaagaaatcaatattactgaaagcccaggccgtttcagacgttctgaaggattgcaaggatcccaagaaactgcgcgagctcagagatcctgaagaaactgacgtccaaattgcagacaggattgtagccaacattaggagaaga

SEQ ID NO: 16154 - DNA, 267 bp, Zea mays
  Peptide Sequence Number=SeqID_57933
atggcggcggcgatggcggcggtcgcggctgccacgacggcggaggacgaggcgcgcctgctgtgtctggaggagcacgacggcgacggcgcctcggactacctctgcctcgcccgccggctccgcacccgccgccccgcccacgtgcaccgcgtcggcctcactctcctcaacaacgtggttaccaatgatttggagggggcaaaggcgtcccatcaaagttttacaggacacgaaaacaaggtgaagttgctaataaccccctaa

SEQ ID NO: 16155 - DNA, 633 bp, Zea mays
  Peptide Sequence Number=SeqID_57934
atgggccggcgtgccgctgccgtggcccaggcacggcccgtgagcctgttagtcgtgccgggccggcccggtggcactatggcctatctgacactacgggtcgagatagtggcccaggcacggcactatagtcattccgtgccaggcactggcactatactaaccagaccgggtcgtgcctggaccgtgctttttcgtgtcgtgcctgggctggcccatcgtgttagtgccaaatggccatctatacccgaccccagggctcgaactcaaccccgactccggaagacggtctccgcctcgcccgaccccagggctcggactccacctcgacctcggaagacggtctccgcctcgcccgaccccagggctcggactcaaccccgactccggaagacggtcttcgcctcgcccgaccccagggctcggactccatctcaacctcggaagacggtctccgcctcgctcgaccccagggctcggactcaacctcgactccggaagacggtctccgcctcgtccgaccccagggctcggactcagcctcgacctcagaggagtcaccgcctcgcccgacctcgggctcgaaccgaccacgtcacaggggggggccatcattaccctacccctagctag

SEQ ID NO: 16156 - DNA, 165 bp, Zea mays
  Peptide Sequence Number=SeqID_57935
atggacgacatcgcccacgccatcacatcaaggttggccaacgccggccagggcgccaacgtactgcgtgcggctccgccgtggtcagtaccggggggaaacgatgtgttcgggccgttggatcaagatctggcggtcatgagatcgtaccggttcaacgtctaa

SEQ ID NO: 16157 - DNA, 204 bp, Zea mays
  Peptide Sequence Number=SeqID_57936
atggcctctaacaatagcaacaaaaccgtcacgctcgacgacctcgtcacccagatccaaaacctcaccatcaccctcaatgatgtgctcagcaaggtgaccaacaattcgttgcggttgacgtgttgggcgataacgtcaacactatgtctgtcgaggtctcttccttcaaggctgatcaaggccgcctccatgtcaccgtaa

SEQ ID NO: 16158 - DNA, 2148 bp, Zea mays
  Peptide Sequence Number=SeqID_57937
atgggttggctctggcaccgccgactagcccatgttgggatgaagaatcttcacaagcttctaaagggagaacacattttaggattaacaaatgttcattttgagaaagacaggatttgtagcgcatgccaggcaggaaagcaagttggagcccattatccacacaagaacatcatgacgaccggcagaccgcttgagctactccacatggatctattcggcccgattgcttacataagcatcggcgggagtaagtattgtcttgtaatagtggatgattattctcgcttcacctgggtattctttttgcaggaaaaatctcaaacccaagagaccttaaaaggattctttagacgggctcaaaacgagtttgaattaaggatcaagaaaattagaagcgacaacgggacggagttcaagaactctcaaatcgaaggcttccttgaggaggagggcatcaagcatgagttctcttctccctacaccccacaacaaaatggtgtagtggagaggaagaatagaacacttttggacatggcaagaaccatgcttgatgagtacaagacttcggatcggttttgggcagaggcggtcaacaccgcctgctacgccatcaaccggttgtatctacaccaaatcctcaagaagacatcatacgaactcctaaccggtaaaaagcccaatatttcatattttagagtctttggtagcaaatgttttattcttgttaaaagaggtagaaaatctaaatttgctcctaagactgtagaaggctttttactaggatatgattcaaacacaagggcatatagagtctttaacaagtccactggacaagttgaagtttcttgtgaagttgtgtttgatgagactaacggctctcaagaagagcaagttgatcttgatgagataggtattgaagaggctccgtgcatcgcgctaaggaacatgtccattggggatgtgtgtcctaaggaatccaaagagtctccaaatgcacaagatcaaccatcctcctccacgcaagcatctccaccgactcaaaatgaggatgaagctcaagatgatgaagtagaagatcaagcaaatgagccacctcaagatgacgacattgatcaagggggagatgcaaatgatcaagacaaggaggatgaagagcaaaggccgccacacccaagagtccaccaagcaatccaacgagatcaccccatcaacaccatcctcggcgacattcataagggggtaactactagatctcgtgttgcacatttttgtgagcattactcttttgtttcctctattgagccacacaaggtagaggaagcactccaagattcggattgggtggtggcgatgcaagaggagctcaacaacttcactaggaatgagcaagatgagcatggtgtggtgacaaggaacaaagctcgacttgtggccaagggatattcccaagtcgaaggtttggatttcggtgaaacctatgcacccgtagctaggcttgagtcaattcgcatattattggcctatgctacttaccatggctttaagcattatcaaatggacgtggaaagtgccttcctcaacggactgatcaaggaagaggtctatgttgagcaacctcccggctttgaagatagtgagtaccctaatcatgtctataaactctctaaggcgctttatgggctcaagcaagccccaagagcatggtatgaatgccttagagattttctcatcgctaatggcttcaaagttggaaaggccgatcctactctattcactaaaactcttgaaaatgacttgtttgtatgccaaatttatgttgatgatattatatttgggtctactaacgagtctacatgtgaagaatttagtaggatcatgacacagaagttcgagatgtctatgatgggggagttgaagtatttcttaggatttcaagtgaagcaactccaagaaggcaccttcctaagccaaacaaagtacactcaagacattctaaacaagtttgggatgaagaatgtcaagcccatcaagacacccatgggaactaatgggcatctcgacctcgacacgggaggggaagaaaggacttcgagggctctaataattccgttttggcgattcatgccaaagggggagaaagtgtga

SEQ ID NO: 16159 - DNA, 354 bp, Zea mays
  Peptide Sequence Number=SeqID_57938
atgcccgcgcccgtggctaggtacccagagaacagcgtgccagcggccgcgcaagccacggccaccgtagaccgtccaaaccagccactcctcgtcctgtctgaccctcggccctaccgccgtgagcaggatggagcacacgccgccgacgagcccgaccgcctgcgcacgcggtcagacctattccgggccatcaccgtcgacgacccgcacctcgacgtgatcgccagggacctcccagagctcacccagcccttcaccggacctccctcgccgctggagccagcaccagagcctgccatcgaggatctgcatgccccagctttggaaggcaagccctggttttatgcataa

SEQ ID NO: 16160 - DNA, 591 bp, Zea mays
  Peptide Sequence Number=SeqID_57939
atggtggtcggagtagggttggccgcgtgcgcgggcggtcgggctcgttggcggcgcgtgcttcgacctgctcacggcggtagagctcaatcaaagcgctcagggagcttcacggaaggtcaatggtgctgtaggcgcaaggaatcgaagggtggcttacagtgtagctctgtctacgtgcgacggccgttgggtgaagtccgccgacgtaaatccgacacctccggtgaagtggtgttcggtcttagggctcggggagcttcacggagctccggggaggctagccgagggttggattggatagaggtgggccggagtggccggtccatggtggccggggctcagacggcccctggcacgccatgcgcagagggaactctggcgatcttgcgcttgggcagggctgagagcgagcgggggagtacggtcaaggcctcggtccgttttataggcgcgggcacgggcatgggcgcggagtcaagcgtcgcgcgacgcgggcgcgcagggccgagcgccggggcgtgctctggcatgctagggcaggtcgaacacgtgttcggttccttctgtcctagttcaagcgcttgctga

SEQ ID NO: 16161 - DNA, 450 bp, Zea mays
  Peptide Sequence Number=SeqID_57940
atgggtcctctccttacgactataaaaggaaggaccagggccttctcagaggaggttggccgcgcgggaccgaggacgggacaggcgctctcttggggccgctcgcttccctcacccgcgtggacgcttgtaacccccctactgcaagcgcacccgacctgggcgcgggacgaacacgaaggccgcgggacttccacctctctcacgctcggctccggccgcctcgcctctcccccctccgcgctcgcccacgcgctcgacccatctgggctggggcacgcagcacactcactcgtcggcttaggggcccccctgtctcgaaacgccgacatatactatcttcaaacatttgatgtgttgtttgcttgtcagtcattcaatcattatgagctggctatagcagctatcctgtccacttttagaggtgacacgggagacgacaacatataa

SEQ ID NO: 16162 - DNA, 3345 bp, Zea mays
  Peptide Sequence Number=SeqID_57941
gtggtgaagatatataatgaaagcattaataccatagatgattctgaagattgcgtattttctaaagagagcctcaacttacaggtttcctatttcaaagaagctttatttttgattgaagattttttgccacagggttatggggagctgatgaaatcagaatctggttctgcggaactaactaagaagggatatatttcttctaaagtggagtcactgatcaacattttcaaatcgtttggctcgtcagaggaagtgctttgcatgatttttgtagaaagaattacgacagccaaagctgttgaaaggtttatgagaggaaatgtgaacttctctcgtttttcaatttcatacttgactggagggagtacatcaaaagatgctttgagcccagcagtacaaagatttactttggatttgttccgagctgggaaggtgaatttgctttttacaacagatgtcactgaagagggtattgatgtacctaactgttcctgtgtgatacgttttgacttacccagaactgtttgtagctatgtccagtctcgtgggcgtgccagaaaaagcagttcaagttatgttcttatgattgaaaggggtaacttggcgcagcaggaacacatatttcgtataatacgaactgaatactatgttaaaacctttgcactgcataaacaaccaaatactccatcacttgatttgcctctccaagagaagtacatataccatgttgaatcaacaggagcaactatcaccgcagaatgctgtgtcaacctaatttataaatattgtgagaagcttcctaaagataggtattacttgccaaagccttgctttgaggtgggtcttaaggatgggtcatatcaatgtaccttgacaatgcctcacaatgctgcatttcgaagtatagttggtcctccaagtagttcatgtaatttagccaagcagcttgtatgcctggaggcatgcaagaaactgcacgagctgggagaactcgatgatcatctagtacccttgactgaagagcctatggatattgatacagacacaacagataaaaaatgtgtttctggaccaggaacaactaaacgaaaggagcttcatggaacgataaatgttcatggtctatctggaaactggatccatgaaagtgaaactgtgattctgaatgcttacacatttgattttcgttgtgatcaagaaggtgaactttatgctgggttcgttctcttaatggaatcagtacttgatgatgatgtggcacgttcagagatagatctcttccttatacctaataaaatggtgtacaccaccatgactccttgtggaaaaattcaactgaacaaagagcagatacaacatgatccaaacatatactgggaagccgttgagtcttgctctggtacagtagagcagttgagaaatttgtatctagaagatggaaatctcaaccatgaaaacttatgttcacataaaagaagcaacaagggagaagacatcattcatctggccaataaatctcttcatttttccacagtcaaagattcagttgtactatctcttcatactgggaggatctattctgttcttgacttgattttagataaaactgcagatgactcatttgatgagatgtataatgggaaagcttcaccatttgcttcatttgtggactactaccatcaaaaggcaacctttgttgctgttaaagcaaagtcacaatgcacacaacttacttttttcaaaaatgaagtaccaagatacccaatgaaacatgaaggccatctctctgatatgagatccaaggcggtatgcaatgcgacactgcataaacatggaatatggcaatccctgcagggttatatacgtgatgctgcatttgaccctcgtcgttgggttgctcctggacagatatcattgcgcccttttccttgtaattgtggaatcgaaactgcatttgttccttttaatggaggttatatcagtgacgatccatcttttgttgtgggaaaaccatgtgacagaggccacagatggatgtgctcaaaaacagtatctgattgtgttgaagcactagttggagcatattatgttggtggtggcatcgctgctgcaatttgggttatgaggtggtttggtattgatgtcaggtgtgatatggaactagtgcagaaagcaaaatataattctaatgcatctcgaatgtgctatttatcaaaaataaaagatattgaggaactggaagcaaaactgaagtacaacttctcggtcaaaggccttctgcttgaagccatatcacatccatctgtacaggaattaggagttgactattgttaccagcgtctggaatttcttggtgattctgtgctggatctattaatcacacagcatctctatgctacccacactgatgttgatcctggagaattgacagacctgcgttccgcttcgcatggatctggaatacttttggaacaagtaacagaatatgtcaggtccaacttggagtaccatggtaaagagaatcaattccttcaacaagctacatgcaaagcacctaaggttcttggagacatcatggaaagtattactggtgcaatatttatagatgtaaattttgatgttgatctggtttggaagattgttgaaccgttactttctccaatgattacccctgataagcttgcgttgccaccttatcgggagttgctggagttatgtagtcaccttggttgcttcatagagtcaaaatgtactagtgaaggagaagagttaattattgagatgaaggtgcagttgcgagatgaacaactgatagcacaaggacatgacagaaatggtaaaaccgcaaaggcaaatgcagcagcccgaattttggtcgacatgaagatcaccagcagaaacccgttctctgacgaagtgaagatcaatctcgatgtgcttggtgcgttgatgctggacggggttggaggtcatgttggcagcactgatgttgtcacagtacaccaatgtagcttgacgaagagggacgtggagttccaagaggagctggcacaaccatgtagcctctacaactccgtttgccagaacgtgatactcagcttcagcactagacctcgagacaatgttctgacgcttggaggactaggagacgaggcaatccacccaatcaacatcagtatagaccacaagatcagtcgttgtagatggtcacagcaggaggccaaggtcaagggtgccacgaatgtatcgaagaatcctcttaagtgcagcaagatgtggtcccaggagcatgcatgtcaagacaaacttgctgaacaacataagcaatatcaggccgagtga

SEQ ID NO: 16163 - DNA, 423 bp, Zea mays
  Peptide Sequence Number=SeqID_57942
atggcggacgccgccacctccgaggatgccgacctgccgcccccacctccgccggcgcagctcccgcctcctcgccgcccgcacaagcggcttcagccgcgggggtaccaggtggaggtgttcgctgcggcgctgcgcgggaacaccatcgcggtgctagacactggctctgggaaaaccatggtcgctatcatgctcgcgcgggagcacgtcctccgcgcgcgcgctggggaggcgctgcgccggatcgtggtattcctcgcgcccaccgtgcacctcgtccaccagcaattcgaggtgattcgggagtatacagacctcgacgcggtggagtgccatggggcatcgggggttggccactggaacgccaagcgctggaaggaagcaattgggactaaggaggtacgcgccagggttcactga

SEQ ID NO: 16164 - DNA, 1010 bp, Zea mays
  Peptide Sequence Number=SeqID_57943
atctcccgcctccgcgcttccggatgagccgcccccatttgcccaaggacccggccttcccgcgcaccaacgggtccttggacggcggggcccgcgacctcggcgagattgaggaggttggcgctgcggccaccgtagacgtcgaacagtcccccctgcagtcctcgtctccgtcggcatcgtcgccgccggcggcggcgatttcatcgtgcgggcaatacatgctacaccgggtgcgcaagctggacaccctagcgggcgttgccatcaagtacggtgtcgaggtagccgacattaagaggctgaacggcctctcagctgatctccagatgtttgcacacaagacactgcagattccactcccggggaggcatcctccgtcatcttaccagcagaatggctcatatgagagtgacgacagggatactatggccttgcaccacctccaaagagagatcaaacaagcgaaggcactgagatggcagtttacagtaaaggcaaatctgcttttctggatgttgagccgtggctggagccgccaaattccgaccccattccctctccagaataggaaaaccaaaagcttgacgataggttctcttgatggtgatactgatgagaatggtgacagtgaaaggttcgtaaggcggcgccagaaagctgatggtgagctgttaccgagggaggaaaatggcggtgactttctggcaagcgccggaaaaggcttggcactgaggccaaagtctagcagtcgaccagacatgaacaagagccagcagaatctttttgcaatggcggagcctttgtttggcagcggcatgcaaactgtaaggaaatcatccagcactccagagttccaggagccagagaccagcaccagttcatccatatggtcagcaagcaagtggagcataaatacagatgcttttgctcttcctctccccatccctcgttttgacaacattccgaagcccattgctgcttggagaaacaaggcggctcgcgattaa

SEQ ID NO: 16165 - DNA, 996 bp, Zea mays
  Peptide Sequence Number=SeqID_57944
atgccagtgagaattgccaaatgctacatgtcatctctgttgcaactccaggctgctgtttatagagaagactacaggactgctcataaactgaggctggctattgctgctacatcaaaaaatgacgctgtgggcagagctatctcggacttaaatgaacacactctaacatccccctgcagtcgcaacgggagcaccacaaacgatgagactggagcagaagccgaaggggcctgcgccgggcctagcagggggtttgacgtcaatgacggggagaaacgcgaagatggaggcgctgctgggggcgtcagtgctggtagggaggaagtgagtagacggtcagtggcgctgggaggcgcagctacagcggatcaggcggccggcggcgctgggaggcacgacggcggtggatatgggggccgctcggggaagggggaagggaggggaaggaccggccaggtttgctccgtggtgcgactgggaggcgctgagcacatgctggagaaggggcgaagcagggacgcaccatggatggaggagagcgcgccagagttgaggaggctcgcgcgcggagggaagagcagcgcacgtaggggaggtgagcgcgtgactgaaggtgagtcggtcctgggcagacggcgggcggtgctggagatggagcccgccatgggcgtcgatcggcgcgtcgatggagtaggggcacaagcaccattgacggagggagcagaggcgctgaggaaggccgcgcaccctggaggagctcaggcgccgagtgccatggagaccgagcagaggggcaggcgactccatggatggagagggggcgctgaggacgacggtgcaggggaggggcggccacggggaggggagatggccatagatgaggagcgctacaaggatgcagcatatatcagagatcatgctggcgcaggactggttagtaccgtggagttcctcctctatattgtttgtcccttgctatctaagtttctttga

SEQ ID NO: 16166 - DNA, 1725 bp, Zea mays
  Peptide Sequence Number=SeqID_57945
atggcgctgcagtacgtggaggcgcagcggcaggcgcgcccggacctcgccgactggtatgcttccctcgccgacctctaccagcagaagctatggcaccagctcaccctcaagctcgaccaattcctacagctccaggccgcacagaagcaaaagagcacgaagagcgccccaaagaggagcacctgtagggacgacagtgcggtgctgctcaccttcgagatggtgaaggcgatcatgagcaggatccacgcacacatgtcgttgacgatgccagtggacatgctgctctatctgcctgagaccggagacactatcattcagctctacaacaatttcatcactgattttgagaccaagattaatctgctcaagcttgcccattttgcggtgatagcttctcgccagtaccctgataaggatgctgcaattaccttcttagagggggtgatcacaaagctgcgtgatacaagagagtcacggattaatgaaccgattctctatgtgaagatgcaaattgcagctattaatcttgagaaaggaaaccaaaaagagtgcaagaattcgttggaggatgggaaaaccaccctggatagtatgactgatgtcgatcccacagttcatgctagcttttactggatatcatctcaataccacaagtcatgccaagaatttgcagagttctataagaacgctcttctctatctggcctacacaactgtggagtctctatctgagtcattcaagctagacttggcttttgatctttctctagcagccttgctgggtgataacatttataattttggagagttattagctcacccgattatcaatagtcttattggaaccaaggtggagtgggtttatcatatgttacaagcattcaacacgggcaaccttgctttctaccaagaactttgcagggttcacaatgctgctcttactgcacaaccagctttggtgcaggatgagaggaagctgcttgagaaaatcaatattctttgtctgatggagataatctttagtcggccatctgaagatagaactattccattaagtgttattgctgagcagactaagctttcaatcagtgatgtggagtatctccttatgaagagcctctcggttcatcttattgagggaataattgatgaagtggacagtacagttcatgtttcgtgggtccagcccagagtgcttggaatcccacaggttaaggctttgcgcgaccgcctggatgcctgggttggaaaggagaatcttgctggaaatttagttgtgcttgatgtttgcatgttgcattgcgataagacgtggatcatcattaatgtattcttattctcagacattgcgttctgggctcggatggaattgtgcttagtttgggacgtttttatggctatgcttggttcagcgtctgggatgcaaaaatctggagaagtcatagctaagtgggacacgagagctgctaagatatacaatgaaatatgtgtagaagagaatgcacccctggaaaatgaggaggatcttcatatcacatttgggcctattatgtgcatgaatgaaaccaccctcattccaggagctgaaccaaagaatgtagcttcatcatcagatgggaatgaagatggcccattcaatgagggagaaaacctgactctagaggccaacactgaatcaaaaggcatgattcctctaagcctaagaagaaaaaagttttga

SEQ ID NO: 16167 - DNA, 303 bp, Zea mays
  Peptide Sequence Number=SeqID_57946
atggcgcggtgctccgacgagggcatgggcgacgttggggcgagctcgcgatggaagccgaacgcagatgagctgtgcaacgccgacgaacgacggtccctaggcgttgtgctcaagcaagggcgagagtcgggagagataagggagtggagaggaggttggcgaagaatgaagcactgcctgacctctcatggcttgaggacgacgtgggtgggtgggtggttttgggagggaggagatgacagcgggcccatgcgtagcgacgacgttgggcaatgcccacgcacgcgcgtgacgcggtag

SEQ ID NO: 16168 - DNA, 309 bp, Zea mays
  Peptide Sequence Number=SeqID_57947
atgaaggacttcagtcaaatgacctcgaccattgtgatcagaaagattgttgtatttgaaatgtcgcgtaaaatgggtcgactagaggagccaacttcttcaagagcatatgcttttgcatgtgatgaaaggaaaggcaagaagaaggctcccactccaagctcctcatgtgaagaagaggaagaagaagaaagtgatgataatcaaccatcaacatcatccttcagggacgaagaaacaatccgacgcgtcagaaaggtagaggatcttctcttcaatattgacaggaaaaagcaaagaaagagatga

SEQ ID NO: 16169 - DNA, 246 bp, Zea mays
  Peptide Sequence Number=SeqID_57948
atgactggacgaagaagaattgctcgccgaacttgcaggaagtcacctagccggcatccacggtgggcatctctccaaccatcgtcactatccttgcatagcgtagaacttctcggtgttgtgagcggggcacctgcatgccgaatcgaggaacttcggccatggtgccactgtcaggcctgggcgccgccgcctgatgtcgtccggtggtgggaaaaggcactgtggccgtggatctgtgaatag

SEQ ID NO: 16170 - DNA, 426 bp, Zea mays
  Peptide Sequence Number=SeqID_57949
atggctccgccgcggaaccatgcgggcgccgccgtgcccagtctgccggaggagagaaagagttgggggagagcgaccgtggcctttgatcggctaacagacgtgaagcgtcgggaagacttccaccgcggggacagcgtgcgcgcggaggaattccttgccgtagaggctgcagccacggtgaagccaccgaccgacgtccgcctgaggattagagcaacgacgttaggtaagagctcaccattcttctcgccaaacctttgtctttggggaaaccctgttcgtatcgcgaatcgggcgctgggggtcaggttggcatgcacgccggcagagcgccgccgcgtacactctgtgcgccgccgtgtcttgtgcggatgggggccgacgcttgtgaaccctccgatctccgtgggcggctacgattag

SEQ ID NO: 16171 - DNA, 165 bp, Zea mays
  Peptide Sequence Number=SeqID_57950
atggcgcccggcatggagcgcgtggtgcccccggcacggcttgccgtacccgcggcgtggcgcggcctagcccccggcgtgggaacagtctggttgcggagtccaaagagatcgcaggagaagaccctgagcagcagctggttggtgaaggcaagtgtcccttga

SEQ ID NO: 16172 - DNA, 282 bp, Zea mays
  Peptide Sequence Number=SeqID_57951
atggaccaggtgctgtgctgcgtcgaggaggtcggcgccgaccagccgtcgatgagcgaggtggtcggagggatcgagcagctgacaaaacaggcccacctgtcggtgtctgctgctgagacgcgcgcgcgaggagactgggtaactggccagtggaacccggttgtcagcaggtgggacagcgggaatgcaatttacaaggtgggtgttacaccaagcccatcaagacacccatgggaactaatgggcatctcgacctcgacatgggaggtaaatccgtag

SEQ ID NO: 16173 - DNA, 133 bp, Zea mays
  Peptide Sequence Number=SeqID_57952
atggaggtggatgaagacaacgaggcgaaggaccccgaggagatcgagctggcatctagcctggacaccgctcactctggaggaccccttcacttgaatttagtgcagcctttgttgctcattgatcggttgg

SEQ ID NO: 16174 - DNA, 432 bp, Zea mays
  Peptide Sequence Number=SeqID_57953
atggagatgatggatcacgtattcacgcccgccctagggaggggagaagcagaagccgcggcggtagcaaacacgaaaacagcgctagagactggaagtgaagtcacgccacgtcttgtacagttgtactgtgcagatgtctttggtatagagaaagccgatcagaaggctttaggttgtacatgtgaaagtcgcctagaggggattgctaagacaacccttgacgacagaaaagtcttcgtggtagacttatctacggaattggtggagaaacatctccagatagagcagatgggcacccgcactcgcgagctcgaggagcaagtggaggtctgggatgacaccatcgaagtcctagagaaccagctccacgacttgcaagtcgagctagatgagaccaatgatgtgatatcctggcctagtggatggtga

SEQ ID NO: 16175 - DNA, 432 bp, Zea mays
  Peptide Sequence Number=SeqID_57954
atggtgagggcgtggatcacccctgacggcgcaaggtcttcttcgctggtcagagacggtggaggtggtccccaggcagtccgtggtgacacctccgctggacgagcgggacgagcgcgaggaacagcgagggagtgtggtccgagcttcacgggggagatggacctgacgcctgggccccgcaatgcagaggtggtaaacacgcgcgagaggaatggatggctgacacaagggactgccaaatcggcccacatcacggtgagacatcgcgagcagcgcacgcgaatggctcaggctgaggagaggggcccgcgattcagtgaggagtcaggcacgatgcaccggctgaccatgtgggccccgcgcgttagtgagtctggacgtggtggagttgggctggtgggagatgaagtggggagtgggccaaactga

SEQ ID NO: 16176 - DNA, 435 bp, Zea mays
  Peptide Sequence Number=SeqID_57955
atggagatcggagggttcacaagcgtcggcccccatccgcacaagacacggcggccaacagagtgtacgcggcagtgctctgccggcgtgcatgccaacctgacccccagcgcccgatttgtgatacgaacagggtttccccaaagacaaaggtttggcgagaagaatggcggacgtcggtcggtggctccgccgtggctgcagcctctacggcaaggaattcctccgcgcgcacactgtccccgcggtggaagtcttcccgacgcttcactgcccgaacgccacaccttgattccccgaccgaacgccggcgtacaccgaattctcaccggccgtgcggcacgaaccgaggaccgtcccaacgtccgtgctccccccaaattggcggcggtattagggtttctggggaagaaaagggaggaactcggcccctga

SEQ ID NO: 16177 - DNA, 189 bp, Zea mays
  Peptide Sequence Number=SeqID_57956
atggacaacgagggcgagggtggacctggagaggacggacgcgaggagggtgaatttggatggggaagtgcttgtggtgagaaagggggaagagtcaccggagttgctaacgtggccctcactggtttacggtctacggcggtcactgccgagtcttcatggcttgcgacgagtggtgagatgacttaa

SEQ ID NO: 16178 - DNA, 267 bp, Zea mays
  Peptide Sequence Number=SeqID_57957
atgtgcgtggagagggccagaggaggagctccgatagagccattgagggggggaggcaagtacaactctaggaaaaataagcggtccgagcacgtggcagcccacatgtgggtgaagctcgacgcagtcacgaaggacaaggctcatggcgcgatcgaaggtcacgaaggtgccccgtacaaggtgaccatcatggaggaggacatgcacaacaggagcagtgcaactgggaggagcccgggcgccaagggaggtgttgctgtatag

SEQ ID NO: 16179 - DNA, 333 bp, Zea mays
  Peptide Sequence Number=SeqID_57958
atgaggaaactcgacctcgagccatggagaagggaagggagcttgcaggggcgaactgctgggagatgggagcggctgctccctgcgccatgctccattggaggagatagcaggggcgcgaggcagggaggaatgagggcgtcgcagggcttcctgctgtgcgagggagaaggagcagagagcgcggcggccaccatggctgctggccgagcagaggcgtcgggcctgggcgagctcggccatggagctcctgctggaatttctgggcgcctgctggctggaggaagaaggagggggaggaggggtgcgcgcccagggaaggctagggaataa

SEQ ID NO: 16180 - DNA, 423 bp, Zea mays
  Peptide Sequence Number=SeqID_57959
atggagcaggagctcagccttgagctcaccctcctccacccctcggcctcgccgccggagccaccgggctacttcgtctgcatgtactgcgaccgcaagttcttcagctcgcaggctctcggtggccaccagaacgcgcacaagtacgagcgcagcctggccaagcgccgcagggagatagccgccgccctgcgcgcgcacggggcggccgccaccgccacgggcgccccggaggacgacgccgccgccgcgatgggctctcgcgatgtccccgccaggcccacaaggcacgggatgatggacaagcagaaggctcctgctgctgatgacgacgctcccgcgaccgcgtcgtcgagcaacatgaagaggtcgtcggagtacggctacggcgtcgaggagctggatctctccctcaggctttga

SEQ ID NO: 16181 - DNA, 321 bp, Zea mays
  Peptide Sequence Number=SeqID_57960
atggtgggcttatcaaatgattctgatgacagcgaagagtttgacttcgaagagaatgcatacgatgtcgaagatcagccctcgaagccaagccatgttttcttcaccgagtcaaccataaagaagggacatgtcgaggtgcataagttcatctacatcaattctaagtcgactgtctggaatactatagattattctggacaggagaagcttttttggaacttcacctgcgcacggaccgtccgtgacaccaataagagagcaccgtctgagaccaagctcgaaccgttcggcctcaggcgcagaccgtccgctcgttga

SEQ ID NO: 16182 - DNA, 396 bp, Zea mays
  Peptide Sequence Number=SeqID_57961
atgtggagctatttttacaggatcacctattcaccccctctaggaggcttcaatgccttccaggaggtcatcgccgacttccatccagattgtggggaagaaggtgtcaagaacgcgcaaggcccctacctatcatacaaactgttggagtttcgaaccagctccgacaagtgcctcagtcgtctgggcttcctggttgcgctctttatggatgacgacatgggtggcgaagagcttcgacatcatcgttatcgtctctatgccacaccaacccttggcctccatagcctaggtcttggcgatgctcgtcatgttgtgggccctatagacggaccttcggtgacgaagcatggtcccaacagtagccccttcgcggtgctagatcgtttttcgtaa

SEQ ID NO: 16183 - DNA, 333 bp, Zea mays
  Peptide Sequence Number=SeqID_57962
atgttctcctccatccgaggaaaagatacatgggatgggatggaaaaaggaaaagggttaagactagagcccatacaatccttgtggttgtactgttttctgggtggtcactcggcaaaccggtccttagggtcaggtaatagggtcatggaatacttgccttcgagattcttgaggtcctcaaagagggtctcttatggaaaagtcattgatgaggacatcactactatacatacaataaatggaccgataacacaatcgcgtgcacgacagctaactctccaggcaggaattagccctcgtggcgaggtcaatcgtgcagcgcacggttga

SEQ ID NO: 16184 - DNA, 261 bp, Zea mays
  Peptide Sequence Number=SeqID_57963
atgcggttccgcggtggggttgaagtgcggcgaggaattggggctgccctgaggatcaattccgccagatacttccagggatgtcttcctggtgacgcggtgaagctccaagactcttccccaagaccccaacggcaacgtagccgagggtcggccagggttctagggactccatatagacgcgaggtggccgaggtgggcaacgacctccctggattcgacggcgaacgtccgccattgccgagcagaattcccttttaa

SEQ ID NO: 16185 - DNA, 651 bp, Zea mays
  Peptide Sequence Number=SeqID_57964
atgcccatagccgtggcctggctggccccatgcagccgcgtcctgcacttctcagtgcaccgcccgtgctgtctcggcaccggggcatgcgcatcgtcgcctggccaaagccgcactgcatcggagcctcgccatgccacagacgttgacgccggtgagcccttctccggcaagcccgtcgtctccgcacctcatcgtgcgctgcgccgtgcaaccgtctcgcggccgcgcaacctctacgtcgtgcctcgcagcagccgtcgtcacgcgccggagtcccgctgtgtctcgtcgtggttgttgtgcctcgcagcgccgcactcgtcgagctgcgagctcgcctcgtcatcgtgcgcctacgtcgtacccaggcccgccctggcctcacgcgtccctagtgccctgtcatgggaggacctggccgcgccccccggcaactgcccatgcagagcgccggttttcttcccctgggcaccatgcactagccttccctactcgctcagcgcgctggcgcacacgcctgtaagcagcgtgcctagccaccgcagcccgcttgccccttctcgaccccctcgacacggcgtgaccagccagcgcggccagggcgcgtctctgcccctcccctgtgccatggtgttcctacggttatag

SEQ ID NO: 16186 - DNA, 319 bp, Zea mays
  Peptide Sequence Number=SeqID_57965
atgtcggcggaggtgcccgtcgacctcggggtcctggaatccttcgagacggtgggtagtagagaagtatcgagcattcgcggggaaaaggcggtgtgggagatcaaggcgggctcggggcgaattgctcactggagcagggtggccgcggcagatcgcgtttccccgtgggttggtgccggcatcacgtgcgtctgggccggggagtactgctcgccggcgttggcactgctgttgacagtcgcgcgccgccacgcggtatcgaccgggtgggttgtgaccgttgatccgatcgcgtatggtcacgaccacagtggag

SEQ ID NO: 16187 - DNA, 318 bp, Zea mays
  Peptide Sequence Number=SeqID_57966
atgccgtgccgaggggccgagaaggggcaagcggctgcggtggctaggcacgctgcttacgggcgcgcgcgcctgcgcgctgagcgagcaggtaaggctggtgcacggtgcccaggggaagaaaatcggcgctctgcatgggcagttgccggtggcacgaccaggtgctcccatgacacgacgctagggacacacgaggccagggcggggctgggcgcgacgcaggcacaggacgacgaggcgagctcgcagctcagcgagtgcgacgctgcgaggcacaacaaccgtgacgagacacagcaggactctggcgcgtga

SEQ ID NO: 16188 - DNA, 255 bp, Zea mays
  Peptide Sequence Number=SeqID_57967
atgcagaacagcacccctctcaacttcaagctttgtcataggaccaacaaggtccttgacctcttcctcattctccgcaataaaaagatcctgagaatggtcgcccaaatcgacagcgaacataggactcaaaatctgcctgtcaaacccatcgaagtctctgcgagcaaccggtccaacagactacccacggccaagcggccagaccccgcacacaaggaactcttcaaccaagtccctgccactgcagattga

SEQ ID NO: 16189 - DNA, 216 bp, Zea mays
  Peptide Sequence Number=SeqID_57968
atgcccgaccctatgcattcggccttcgccctggccgcgcctcgcttgcctcgcccgtcgtcgccacccgccctcgtcggagccgtttcgccggagcccgccactgccgtatcggctggagtagtgtgtcctcgccgcgtcgtcatcgcggctaagcccgacctgcgagcctacatagatgcctgtgtggcgagcaacaacttgcctatgccgtag

SEQ ID NO: 16190 - DNA, 798 bp, Zea mays
  Peptide Sequence Number=SeqID_57969
atggcgtactggccgcgcgcacggggatccggcggcaggaggaaagcggcgacgctggacgagctgggcacgcagcagcagggccgggatgtgagcgcactgggtcaaggcatcgtgggtaggtggaccagcggcatgcgcgaatggatcgggagcatgcggttgatgataggacgaagtcttcagcagctactaggcagcatgcgcaggtgggaacgtgggagcggggctggcgcgtgggcctggtggggcaccacctggtggctggctcgcagctgcaagctgctcacgcgtgggcgcgcagcgctgggtggcctacggagcatggtgtgtcgtggctgggctacacaacgctgggtgggggcgcgcgctgttgggctgcgcaaaggatcctcctggaagctgcacggcgaggatcacagggctaaccccgtgctaaggagagtgacatctgacacccttgcaaatccgccgaacgacacccttgcgcacatcattgagctggtgctgaagagcagcgaggacagaggccggcgcgagatgaagtctctggtcctgaagctgttcaaggagagcagcaacggcagcgctaatagttcttcagcagactcgtcctgtatcacgaccttgtacgaatgtttccagaactgccaggattccctgctagtgctacctcgcgaagctaccggtgcagacgagcttgcggtcgaagaagaattgtcgtcaggcagcaaagtgcaggcgttcagaaagatcggaaagatcgatctagaggcggacaacctttctctggcctag

SEQ ID NO: 16191 - DNA, 330 bp, Zea mays
  Peptide Sequence Number=SeqID_57970
atggagccgtggaagaagacttccaggagttccaagattacaacaagttctaggcgtggccacttggagaggctacaccaccacctgcacgaggagcaagaacgtcgacgacaggagctggagcagcagggctcttctttatcgcttcagcaggagataaagtctgtgaggagctgctcccctgtgctcccactggaggcgccccctgcaccaccactaagcgccccagctgctggagtatctgctggaggagaccctgatgatggaggtggcgacggcagctcgagcttcagcaccgacctttcagccgaccaggagccggaaggatga

SEQ ID NO: 16192 - DNA, 363 bp, Zea mays
  Peptide Sequence Number=SeqID_57971
atggcgctcgaagccggacttggctgctgtcagcctcactctgtcgagtggcacagcagtcggagcggcgcaggcggcgctatcctcttgttaggccggtcagtggagcggcgaagtgactgcggtcactttggctctgtcgactggagggcgcgtgtcaggataaggtgtcaggccatccttgcattaaacgcttctacgatacggtcggtcggtgtggcgatctggccaaggttgcttcttggcgaagactgggcctcgggcgagccgaagctttgtgctgatgggggttaccagctgagattaggagtcttgggggtacccctaattatggtcctcgacacaataggaacgatcttgtaa

SEQ ID NO: 16193 - DNA, 282 bp, Zea mays
  Peptide Sequence Number=SeqID_57972
atggatgcggcatgtggctaccaagatgtcaaggctgagtgcatgaaggcccaagaagaagcggtcgctaccaaggctgagtgcgcgacgatcaaggtaaatttgagagagaagaaaatgaaggccgagcagctcaagcaggtcttccatctgttggaactagagggtgaaggcctctttgaccacttggtggcatgcgtagggatggagagtgtggggttgcctggcgtgatccaagggttgatgaccttttctgccctcgggacccagggccgttcctaa

SEQ ID NO: 16194 - DNA, 441 bp, Zea mays
  Peptide Sequence Number=SeqID_57973
atggtgaatgtgtgcttctctgtaggaaccaaaaaggttgcgacccttctgcacctaataggcgaggtggaaaggtccatgaagatggctgtacttgacacgttccttttcacatccgagtctgtcaatgaaggctaccctgtgaccagaaatctgatgcagtgcctgatgcatgcctccctgaagatcctgacagcaaggttgcttatcactaccaaagacaacgttgaccatgagaagattgtcacggatacctgccgtgggattggctttgtgtccaatgatgtagggctggatgcagacaactgcaaggtgcttgtcaacattgaacagcagtcacctgacattgcacaaggtgctcatggtcacttcgccaagcgtcctggggagtttttttataaggaaggctttattaattttaagaacattacatcgaggtga

SEQ ID NO: 16195 - DNA, 444 bp, Zea mays
  Peptide Sequence Number=SeqID_57974
atggggaagaaagttactgaccagggggtgcagacactactgggttcacaaccaagtgttgttgatacacagattgacagtggaaaggacacaagctgggcgctggttccaggatctcctaatgtctctacgctgagtgctgatctgaacatggctgatgttgggattctatctcctgaagttctggctcttgctgctgtgtcggaagctaacaactcagctaaattacttaggagcaaaagaagggtagctacaagtatgaaggactctgttgctcgggccaccaaactgaaagctgcacgcaacttagactcggcgttcgctgaagattttctctctacaactgttaacccatcaagcaaagctgataaacgaaatttagtggagaaagcgatagattttgaggaaagtgaaatgtatgggaacaagagttggagaagataa

SEQ ID NO: 16196 - DNA, 879 bp, Zea mays
  Peptide Sequence Number=SeqID_57975
atgcgcaagcccgcctccaccgccgccgccacgctctcctcgcacccgctggccctacgtcgtctggcccgcctactcgcgctccttgctcgtcctcctcagccttgcggatatctgctcccaatcttgcgccgcggcctccacatttcacgcagccgatctctgctccctgcggctgatgctgaccaacagccttggatgccacagctgttgtccgttgcttgcctaaccattacagccaagatggaggagacagtggttcttcgccgtctggacatccatcagaatcaggttcccagcgagaagtacaatttcgatttagatgctattcagaggatggagatttacgttctagactctctgaattggaggatggaagttgtgacgccattctcttacatcaactatttcgtggacaagttcactggcgggaagccgctaagttgcggattcatttctcggtgcaccggcagtcttgaagcaacgaagctcctacagttcaggccttttgagatggcagcagtggttctgtcagcagctgctgagtctcaagaaaatgtaaggagatgccatgaagcattgcaagaagtgggattagtgaagaagaaaatagactacactgcgagtccatctcgcgtgctggatgcctcatgctttagcttcaagactgacgataaccagacaaccggctcagcactcaccgtcctatttgcttccgatatacgtacagtgtttgtgatgagattgagttttaacagagatgcccagtttggtctgtttgatggagatggtaaaccggctaaggctctggatgcaagacctcttactaatgttgtcaacgacctcgaagccaagatgaaaggtggacagtcaagttaa

SEQ ID NO: 16197 - DNA, 474 bp, Zea mays
  Peptide Sequence Number=SeqID_57976
atggggattaaggccaagcgagccgagaggacgcgctggccagcagtaaaccgcgcgagcataagacagggaaaacgacgatactgtcgcacaaaatgcgaagacgaacgatgcatcgacgaggacttagaatgtgcgacacacgacacacagttagcctatcacgcaggaagcaggaaacggccgcgcggccaacagaggagccaggggcacagcacagtaagaaccgagcaggggaaacggggagagagagagcaaggagatccggcgtcctggaaaaataccgcgcgcacggaacttcggctaggggcacgcagcaatccagggagccgggcagagggatggaagccgcggcgcagaaaggagagcgcgacacagggagatctgaccggagctggagcaaggggaaggagacgcgcgagcaccatgggagcagagagctcgaccaggagagaggaaacggaggctaggtga

SEQ ID NO: 16198 - DNA, 2211 bp, Zea mays
  Peptide Sequence Number=SeqID_57977
atgctcccgtggctcgtcgtcccgctcattgccatctgggctgctacccagctactcctcccggccgcctaccgcttggaggtcacctccccgcgcctcgcctgtgtctccgtcctcctcctcaccctcttctggtatgagatcctcctcccgcggctctccctctggcgcgctcgtcgctccgcgcgcctccgggaggagcgccgcgcccacgccctcgagctccacaagctccgcaagattgccacccgacgctgccgcaactgcagcaacccctacagggagcagaaccccggcggcggcaagttcatgtgctcctactgcggccacgtctccaagcgccccgtgctcgaccttaattcgaccgggaaggcctcctccaggtggccctgcgctcaagattgtggagactggctcgacctgcgctgctctgccagccccagtacctccttctgggggttctcatggcacctactgttgtcgttttttacaacaacagtgaggtggctcttgaggaagacattcagatttacatcgtcaggtgacggtgagggcttgggcccagatggtaagaggttggcaaaggcaggggataatggaggaaaagctgaggagagcagggtcgagaaggcgaggaggaaggcagaggagaagaggctggcaaggctggagagggaaatgctggaggaggaagaaaggaagcagcgggaagagatgacaaagctggtggaggaacgcaggagactgagggatgagaaagctgcggcagaggagcggtccaaaagcgctacccctgttggggagaaggatgctaggaaggaggcagagaggcggcgccaggagaggaggaagaaagaggacaaggggccaagcaagagtaattcagattgtgaggacattgatagacggttgggccgagaaggcgacatgaagcgggccttcgatagaaagattgagtctgacagacgtgagggttacaagcctcattactttgaagctaacaatcgtagtaataagacagtggagagcagggcaaagtactttggccgtatgacgggtggtttcttatcttcgtcaagagggtttggtggtggttccttctttggcagaagtatccaggcccctgcccctcaagttaacaaggttagtagacccatagttcctgcaactgaccagggcaatgcagccaaaagggatgtccaacatgcatccacacaagctgcagccaaatctacttcagctggggaaaccagaaattcatggactaattttaatcgaccggtcagcccaaatgtgcagccagcccctaccagctttaaaaagtcatggcatcagctgtttagtcgttcagcatcagtctccccttgtcctgatgctacaacttcagctcgtgatacgaatcagaagccagagccaaatggagcgcaactaagcaatgcttatacattcctctttcagtaccctcctcttgacagcaagccaagttcgagccagtccatgcaatttccaggttttccaccgcttaatggagcacctcccaataagccactacctcattttcctgctggacatatgccattctatgatgatgcagaatctgtggtatttgaagatccagaacagtttgaggacccatgctatgatcccgatgcaatcgcattgcttgggccagtttcagagtctttagataatttccctccagacttggattgtggattcatctcgagtgatgttgtcaaggaatcacatgggaggccttcaccaattgagtctcctctctctaggtctcgtatggttgaagaaaatcctatcaagcccctgcacttgttagttgcaaaaaggcctggtggtcctattcagcctgaggctagcagtgagcaacgcacatggcaaatgtggagcacaccattggttcatgaaagtttaggtctccaaggtcatcaaagtcagtggcttcaacagacaaatcaattaaactatagtgccaatgttttcaatggcagaacaaacgcccccctgggtactggtttgaatgacagtgatccttggctgcagaaagcacctttcaagcaattgccacctgatactccaagcctgttccttccacatgaaataccagggaaattacacaacgacttggtttttgggtctccaaacaaatcagcacgtgaacacccctttggatcacctggtccttcttggcccaagtaa

SEQ ID NO: 16199 - DNA, 180 bp, Zea mays
  Peptide Sequence Number=SeqID_57978
atgggttctgttgcatatgctcctgagagagatgcaatggtctggaaagtaaaatcattccctggtggcaaaggtattcaggtccgttatctgaagataattgaaaagagtggttaccaggcactcccctgggttagatatatcacgatggctggcgaatatgagctgagacttatatga

SEQ ID NO: 16200 - DNA, 489 bp, Zea mays
  Peptide Sequence Number=SeqID_57979
atgagcaaggagaggagcaccgtgccggagagagctcgaacaaagtggatctcgagtgccgtccgccactgcagggaggcagagagctcgagcgccgtcgtcaagctggagcaaagatccgtttctggcttcttggagaggataccgcgtcagggggggtttcgtaaaatgtacagagccagagtgggaggcgtggaggggcttgtttgtaaaatagacgtggcaccgttggatgtggaggactggagggtgtggtctggattgactttgctcatgggagcagcagcgctccttgcgcacaagatacggtgccttactgggaacgtggatgccttctgtacaaatggcaattcaaatgtaacatggatttcatgtgagaaacgacgtctcgatgctaaacgggctaaatgggctaaacgggcctaccgtgccggcacggcacggctaagcaggcttagtgccgtgcttgggcctggtcttaggcactag

SEQ ID NO: 16201 - DNA, 315 bp, Zea mays
  Peptide Sequence Number=SeqID_57980
atggatgatgtgaagaaaaagctagtggtaccatcaacatatgcaccaaatctgcagaatgctgataacattacactggaaaatgtggaaatatatgttgaggccgttaaaggtgctctgcatatgttagaaaatggtgcatctatagcagatgccaaatctgtctgcccacctaatgttctgtttcaacttgtaaagtggaagcttaagatgaacaagttgagtgtagttcttgcaccatttcttcatggcatgcgatacacatcgtatgggcgccacttcacaaaactggacaaactccagctgttctcttag

SEQ ID NO: 16202 - DNA, 126 bp, Zea mays
  Peptide Sequence Number=SeqID_57981
atgcagatagttgataagctacagtggtatattcaaagtggtgacacgttcattaaaggaagatctcggatgaagaaaaagctgttgtacaatatacatgataggttgtatccacaacaaacttaa

SEQ ID NO: 16203 - DNA, 336 bp, Zea mays
  Peptide Sequence Number=SeqID_57982
atggccagaccaaccacgtcgtgccagccacaccgggcgagcatgccacgccggggaggactgcgccgggggcggaccactgcgtgggagggccgtgccggcgaaggccggaccacgctgggagagggagacgggcggagaggggggggggcgagctcaccttggctccggcaaagctccacgcagacggtggcagttcttgggggaagaagagaaacagccacagagaaggagagagggacgctgtgctggttatacttcgactacaactctgacagcgatggtgtgctcctctgccctcatgacgacgaggctgttctagtgacaacactgtaa

SEQ ID NO: 16204 - DNA, 279 bp, Zea mays
  Peptide Sequence Number=SeqID_57983
atggccgagtcaccaccgccgttcgtcggtgtcgcgcagcccttttgcgccgtgtgcagtgccctcgccttaccaagcgacgccggggctcgggccattttccctgagtacctctccgagggccgtcaatgggggtcaaggcgtagtgctcgctttgccaagggggtacagaggttcattcaatttgattttgttagtcacccaccttgtggaggtaaagaagaaggcgtcgaggcggatctccgggagttccaggacttcggcgagttcgaggattag

SEQ ID NO: 16205 - DNA, 357 bp, Zea mays
  Peptide Sequence Number=SeqID_57984
atgggcaaggataagaagggtcgaggttcgccacgtcgctccggcgacaagcggaagcgtgaaccaagtcctccctcggaggacttcggtgactctgagtactcggaggaggagttttcctccgggttcgagggatcgccggtctacgcttaccccccggcgtcgtccgatgactcggacgactcccaggggatagccgccgaggtgtggacgtacatccagtatgtcgagcgtgccgggctcgagggcttggatgagtcggatgtcttctcggacgagaacttttccgactgctatctccgagagggtcggagactttatccagctcggtgtgcggacatccggctgcctccctga

SEQ ID NO: 16206 - DNA, 489 bp, Zea mays
  Peptide Sequence Number=SeqID_57985
atggccatgatgggttcaatatcggaaaagatgtacctctgccaggtaccaaactttgggtttgaaatgataaagctgagatcgggcggaaccgacacgggggcgccagagaacgcagaccgcagtgggaaagatttcgcggcggcgcagctagctctggtgcgatggagcttcgggtcgacggcggtagggctctggctgcgcaagaaatgctccagtgagagcggaccggacaaaccagagaggggaagggaaaaccagagggtgtcccgagtagctgatgatcgagagagagggcgagaggatttggctgagggcgcaagtgagcgggggaaggtgggcgagcagggcgcggggatcaaaaggggcggggacgtgcggaggtggcaggagatcgcgcggtggacattgttgtgcaaaattactctagatgaggcaaaccctcgaggactttgcctacaatacgagcaaagtccccctcctatgtga

SEQ ID NO: 16207 - DNA, 219 bp, Zea mays
  Peptide Sequence Number=SeqID_57986
atggcggattacaatcaagatggtgctgacccttgtgagaaattgattacaacgagggagggaatcgagaccattgatttgtactcctcgtccaatgggaggttcgctaatgcagaaggcgctttcatttatcctatgtatgggcatggtgagctgcctcaagctttctgtcgttgtgctgcggttaaggatgccatctctatctctactaactattaa

SEQ ID NO: 16208 - DNA, 753 bp, Zea mays
  Peptide Sequence Number=SeqID_57987
atggcggaggcggctgccgactcctccaacgcggccgtcgacggcggtggcggtagcgtccaaaacgactatcccaccattgacccgacctcgttcgacgtggtgctctgcggcacgggcctcccggagtctgtcctcgccgccgcctgcaccaccgctgagaagacgccctcctccctcgcctccttcttatcccctgaggccaccccggccacctcgactgtggcagcaactgcctccgattcgcatatcgtcgtcgatctccaccgacagatcgtgtactctgaggtcgagacctcgggggcggcgccagagccggcgaggcggttccccgttgatctggtggggccccgggtgctgtactgcgccgatgacctggtggggccccgggtgctgtactacgccgatgaggcagtggacctcctcttgcggtcggggggcagccaccatgtggagttcaagagcgtggaggggggcagcctcctctactgggaaggctgcctctacccggtgccagactcgaggcaggccatcaccacactgaagctcaaggagaagaacatcctcttcaggttcttcaagcttgtgcaggcgcacattgctgccgccttagcttctggtgatgagactggacagggggatgcatctgctaggatacttgaagaggacctagatcttccctttgttgagttcctcaggaaacagggagcttcctcccaagatgagagcgtaagagcaactccaagagattag

SEQ ID NO: 16209 - DNA, 393 bp, Zea mays
  Peptide Sequence Number=SeqID_57988
atgcaggtggtgtgcaaccgcaccacggagacgcaccccttcgacttcgacgcatccagcatggaggcccaggcccacacgtcatgtaaccggcgcgccgattactacgtgcgagaaactgcaccaccacttgcgccaatgccgcaccttctcgactgcggaaccagtgccgcgactcgaggcaaccctgcgcatagcccaacagtgccaaccgagcacatcggtcatgggtcagtcagccgcgagaggaggcgcgacggtcgatatggccagaagtgggccagcagtaatggcggcagctgggaccgggaaaggggatatttcgaaagggatccttctccgcgaaggaagcgggccccgagccctcctactaatcaggggtttgaaggctag

SEQ ID NO: 16210 - DNA, 204 bp, Zea mays
  Peptide Sequence Number=SeqID_57989
atgggaaccaatgggcatctcgacctcgacacggaaggtgaccgttggcgcgaagtagttgttgctcctgctggcttcaccagacagtcggtgaattatagcgaagcgaatttcccgaagctgtcgagttcagagtcgcttcattcctggaagcaccgtataactgttcgtatttataccggtacagttccgttgaattattag

SEQ ID NO: 16211 - DNA, 900 bp, Zea mays
  Peptide Sequence Number=SeqID_57990
atggcagtagcccgacctctggctcccttccagctcatcgccgtcctctcgctggcgctcctcgtcacgagccacgccggcgggatcgccgtgtactggggccagaacacgggagaagtgaccctgtccgcgacgtgcgcgtcccgcaggtaccagttcgtcatcctcgccttcgtctcccagttcggcgagggccgggcgccgcggctggacctgtcgggccactgcgacgacgcctcgtcgggcggctgctccggcctgagcgacgacatccgctcgtgccagcgccgcggcgtcaaggtcctgctctccatcggcggcggcgaaggcaggtacggcctgtcgtcgcccgcggacgcgcggctcgtggccgcgtacctctggaacaccttcctcggcggcacgtcgtcgtcgcgcccgctcggcgatgccgtcctcgacggcattgacttcgacatcgagctcggccgcgccaagttctgggacaacctcgccagggacctgaaggacatgggcaaggacggcgacaaggcggtgctcctgagcgcggcgccgcagtgcccgttcccggaccagtgggatggcgccgcgatcaacacggggctgttcgactacgtctgggtgcagttctacaacaacccggagtgccagttcagctcgggtcgcaacgccttcctggacgcgtggaagcagtgggagtcggtgccggcggggcagatcttcctcggcctgcccgcctccaaggacgcggcaggcaccgggttcgtgcccgcgggccagctcacgtcgcaggtgctgccgctcatcaagggctcgcccaagtacggcggcgtcatgctctggtccaagttctacgacgaccgcacgggatacagctccgctatcaagagccacgtctga

SEQ ID NO: 16212 - DNA, 990 bp, Zea mays
  Peptide Sequence Number=SeqID_57991
atggcaaaccgagctctagctccattcctgctcgtgaccaccctcttggtgtcgctccttgccacatgccatggcggtggcatcgctgtctactggggccagaacgacggcgaggcgtccctgtccgagacgtgtgcgtcaggaaactacaagttcgtcatcctcgccttcgtctacaagttcggcaagggccagacgccgcagctagaccttgccagccactgcgacccctcatcgggcggctgcacggggttgagcaaggacatacgttcgtgccagaacagcggcatcaaggtcctgctctctatcggcggcggcgacggcagctatggcctgtcgtccgagggggacgcgcgggacgtggccgcgtacctctggaacaattacctcggcggcacgtcgtcgtcgcggcccctcggcgacgccgttcttgatggaattgacttcgacatcgagcttggcggcgccaagtactgggacagcctggcccaggtaaactctcacacagccttctcgtcgtcgcacacgcgctcggtcgtgttgattgactccgcgtttgctcaccgtctccacctcggccgcacgccgccgtgcagggacctcaagaacaagggcggcaagggggtgctcctgagcgcggcgccgcagtgtccgttcccggacgagtgggacggcggcgcgatcaacacggggctgttcgactacgtgtgggtgcagttctacaacaaccctccgtgccaggtgaacgccggccgcggcgcgttcatggacgcgtggaaacagtgggagtcggttccggcggggcagatcttcctaggcctgcccgcctccaaggacgcggccggcactgggttcgtgcccgccgacgatctcaactctaacgtgctgccgctcatcaggggatcgcccaagtacggcggcgtcatgctctggtccaagtactacgacgaccgcgcaggctacagtgacgccatcaagagccatgtgtga

SEQ ID NO: 16213 - DNA, 903 bp, Zea mays
  Peptide Sequence Number=SeqID_57992
atggcagctcgagaactcactcgcttgcatttgcagctcgtagccatcgtcttggtggcgatccttgccacatgccacgccggcagcatcgccgtgtactggggccagaacgacggcgagtcgtccctgtccgatacgtgcgcgtcggggaactacaagttcgtcgtcatcgccttcgtctacaagttcggcaagggccagacgccggagctgaaccttgccggtcactgcgatccctcgtcgggcggctgcaagtgtctgagcaaggacatccgctcgtgccagcgccgcggtgtcaaggtcctgctctcgatcggcggcgcggacggcagctacggccttgcgtcagagagggacgcgcgggaagtggccgagtacctctggaacaactacctgggcggcaactcgtcgtctcgccccctcggcgacgccgtcctcgacggcgtcgacttcgacatcgagcgtggcggcgccaagtactgggacgtcctcgccagggaactcaaggatatgggtaaggaaaaggacggcaatgcggtgcttctgagcgcggcgccgcagtgcccgttcccggacgagtgggacgacggcgcgatcaagacggggctgttcgacttcgtgtgggtgcagttctacaacaaccctccgtgccaggtgagtgctggcccccgcgcgttcctgcacgcgtggaagaggtggcagtcggtgccggcgggacagatcttcctcggtctgcccgcctccaagagcgcggcgggcaccgggttcgtgcccgccggcaagcttacgtcgcaggtactccccctcatcaggagatcgcgcaagtacggcggcgtcatgctctgggccaagttctacgacgaccacacgggctacagcgacgccatcaagagacacgtctga

SEQ ID NO: 16214 - DNA, 861 bp, Zea mays
  Peptide Sequence Number=SeqID_57993
atggctcagatcaatcctcccaacggtggaggttgcaactacccacgcgtagagttcgccgcggacccgacggacgagcgtgctgttgcgacggcagcgttggggaaaggcgaacctgacgagtggggctcacccgacagtgactcgaggaacgctgttcgcaattccggcgccggcaccatgagtaagctgcagagtgattctctgagggacgcgattgcctcaattaccaatgattcccgtgagaagcagcgcaaatttgttgaaaccattgagctacaaattggactgaagaactatgaccctcaaaaggacaagcgcttcagcggttctgttaagctgcctcacatccctcgccctaagatgaaggtttgcatgcttggtgatgctcagcatgttgaggaggcagagagaataggtatagacaatatggatgtggaagccctcaagaagatgaacaaaaacaagaagctagtgaagaagctggcaaagaagtaccatgctttccttgcatctgaggctatcattaagcaaattcctcgtcttcttggtcctggtcttaacaaggcaggcaaggacctcttccttttctgtactttgggaaaattccctaccttggtgacacaccaggaatcccttgagtccaaggttaatgagacaaaggctacagttaagttccagctgaagaaggtgctttgcatgggtgttgctgttggcaactgcggcatggatgagaagcagatcttccagaatgtgcaaatgagtgtcaacttcctcgtgtcgctcttgaaaaagaattggcagaatgtgagatgcttgtacctgaagagcactatgggaaaggtgtaccggctgttctaa

SEQ ID NO: 16215 - DNA, 110 bp, Zea mays
  Peptide Sequence Number=SeqID_57994
atgccgcggatatttccgccacaaccagatgaagcctccgcactctccaagaccgaccgaggtggcgacgaagagcggtccgacgtcgagctcgcggtgaccgaacaccc

SEQ ID NO: 16216 - DNA, 177 bp, Zea mays
  Peptide Sequence Number=SeqID_57995
atggtgggtacaaagtgcggccactgcacgacggccagtcggggtcagtggggcattgtacgccaaggcggttctctggaggagatggttgctgggataacttggccgaccaccctgccgccgggttggattgtcgagtgggaccctgcctcggctgaggaggagcatgaggagtga

SEQ ID NO: 16217 - DNA, 132 bp, Zea mays
  Peptide Sequence Number=SeqID_57996
atggccggcgctcgggcgggcagcgcagagctcgtcggagctaatgacggggtcaggacagtggggcttatgggttttgttggctggagccaaagatatggtgtgatcaaattgggtttgtctcactgctaa

SEQ ID NO: 16218 - DNA, 459 bp, Zea mays
  Peptide Sequence Number=SeqID_57997
atgcctcactggaacagcgagatcaccgtcgccgaacatcagccgcccgccaccgcacgtagaccaagctaccaggccgaattccttgccaccgacgagctcccccacctgcgcacgtggaccggccgactccgaccatccccgggtaatgatggccccccctgtgacgtggtcggtccgagccctaggtcgggcgaggcggaggctcctccgaggtcgaggatgagtccgtcttccgaggtcgaggctgagtccgagccctggggtcgggcgaggcggagtccgtcttccgaggtcgaggttgagtccgagccctgggtcgggcgaggtggagaccgtcttccgaggctgaggctgtgtccgagccctagggtcgggcaaggcggagtccgtcgtccagcgtcgaggttgagcccgagccctagggtcgggcgaggtggagcttcctatggcgcctga

SEQ ID NO: 16219 - DNA, 687 bp, Zea mays
  Peptide Sequence Number=SeqID_57998
atgttgataagatccgacatattaaagggacgttatgatgtttgttgccctatgatgtctgcttgggatcttcataaggcttggcctgaatcagaattcaaggtggtagcagatgcagggcactcggccaatgaagttggcatcgctgccgaactgagtattaaaggtgtctacaatgcacacccaacagctgatgtatttatcaactttgcatccttccgaagggaacttagaggatttgggttcatccaatactttgatcctgaggatgcttctgatgcaaaaggaaaacaggaagaagccttgctgaccagtgcgcaggcacggtgtatcgccgacgtgcgcgcggacgccagctcgaccaccttcctcgccgggaccctcagcctcaaggaggagaacgaggtgcacctgatccggctttcgccggcggagagtgagctggtgtgcgatggagtcttctaccaccccaacgagatctgggatctcaaatcatgtcccttcgatcacagggtcttctccacagtctacacatctggtgagggctttggtgcgtcagtttggaagatcccagagcttaatgggcaatcaaactcaccgcagcttgagcagctctttgagcttagtgggcatacgggcaagattagacggtggactcctgtttctgttggtttttggctgctctag

SEQ ID NO: 16220 - DNA, 291 bp, Zea mays
  Peptide Sequence Number=SeqID_57999
atggcaactgtcgtaaaggcagattcgcagcgggggcgccacatgctacagagggttgagggatggccgctgtcaaaggtccgctcaacaacatcaaaccatgattctgataatttttttgaacgaagaatacaacagataaatgaaagagatgagtccgataatgaaaagggaaaccaagatataagtgtattaaccgaatttaccagtttgtacagtctcatcagattggcatcctcaaagggcagtatgcagaagcccatcctcctgacaaaagctcagaagagttaa

SEQ ID NO: 16221 - DNA, 267 bp, Zea mays
  Peptide Sequence Number=SeqID_58000
atggccatgatgggttcaacatcggaaaagctgtacctctgccaggtaccaaactttgggtttgaaatgataaagctgagaccaggaccgtttaactggtcatatgcctcatcatgggtaagctttgtctcgggcagactaataccagaaaggccaacacgcaatgggagtggagagatggcgagagtagcatgtaccctccatggcaagaggctggacggtgatgtatctgtgctctcggttggcgtgaacccggtctggtcttaa

SEQ ID NO: 16222 - DNA, 363 bp, Zea mays
  Peptide Sequence Number=SeqID_58001
atggcggcctggactcctggaggtgccgcggcggctgcaccggatgggcggacagggacagggacagggacggcgcgacctggaggcgccgcggcgtctacagcgaagtggcagactggacggactgggcggaatcctaattgggctggccgctgggccaaattttacaggcggaactttactatcagtacctttggccctatgcacctttcgctcgcctgcatgtcccaaagcagtgtgatgaagaatggtcttgctactaaggttgagaagtcccgcaagcaaatgaaggagcggaagaacagggccaagaagatccgtggtgtcaagaagaccaaagctggtgacgccaagaagaagtaa

SEQ ID NO: 16223 - DNA, 1005 bp, Zea mays
  Peptide Sequence Number=SeqID_58002
atgcggaagccggcggcactggtggtttctacggcggttttcgcagccgcagccgtagtcgccgtgatggcacgccagaggttgcgggaagcgaggcgatgggcacgcgcaggcgccgtgctgcgggacctgcaggagcggtgcgcggcgccggtggagcggctgcggcaggtggcagacgcgatggtcgcggagatgcgcgcggggctggcctccaacgactccgagggagatagcgggagcagcgtcctcctcaagatgctcgtaacctacgttgactccctaccgtccggttgccatgagtttgcatttttatcacatacatctaactctgagctgtttgattttattgctgctgctttagcgaagttcattgcctctgagggtgagggcttttatcttcctgagggcatgcaaagacaacttggttttacattctcctttccagtgaagcaaaattcagttgcatctggcactcttatcaaatggacaaagggttttgcaattgatgaaatggtaggaaaggacgtagtggcagaattaaacaaggctatcaaacgccaaggagttgatatggaagtcacagtactggtcaatgatacagtagggacattggctgctgggagatatgtggataatgatactgttgctgcagttatactgggtactggcactaatgcagcgtacatagaacatatggactcaattcctaaatggtgtggcccacctcctgagtctggaaacatggtgataaacatggaatgggggaactttaggtccacccaccttccactgactgaatttgatgtagccttggatgcagaaagtttgaaccctgatgaacagatttatgagaagttgatctctggcatgtatatgggggaaattgtccgaagggtcttgctaaaaatggctcaggatgcttctcttttctcagataatgtacctctggaacttgaggtcccatatatccttaggtatggcattctagtaacagttcagtag

SEQ ID NO: 16224 - DNA, 249 bp, Zea mays
  Peptide Sequence Number=SeqID_58003
atggcgccgccgctcagccttggggcgccgccgccctgtgtcctggtgtgggggaaagtggaagaacctggcccatcgacctattaccggacggtggtgatcaagctagaacgtactccttcaggcggtgaatcccaaccgttggcgcgtgatcagacgggagatagtgcatcatcggcatggatgattgttaaccgtggatctcggatccagtggcccgtattcaataccggttcacaagtgaagtaa

SEQ ID NO: 16225 - DNA, 252 bp, Zea mays
  Peptide Sequence Number=SeqID_58004
atggcggtgatcttcggtaagctggggagcgcgaggacgtggagttttaaaccccgacccgcgagcacgatttgttgcaatccgcccggcggagttgggctagttgctgcgctgccccgtgaaggtcatctgcatcaacccccacggctgtggacggcggagcggcaagagagacggagagagtacagagagggcgaggcccaggaggacgtcagtgcatcatcggccaagtcaacagagggaaaggggtga

SEQ ID NO: 16226 - DNA, 249 bp, Zea mays
  Peptide Sequence Number=SeqID_58005
atggcgccgccgctcagccttggggcgccgccgccctgtgtcctggtgtgggggaaagtggaagaacctggcccatcgacctattaccggacggtggtgatcaagctagaacgtactccttcaggcggtgaatcccaaccgttggcgcgtgatcggacgggagatagtgcatcatcggcatggatgattgttaaccgtggatctcggatccagtggcccgtattcaataccggttcacaagtgaagtaa

SEQ ID NO: 16227 - DNA, 252 bp, Zea mays
  Peptide Sequence Number=SeqID_58006
atgagaatgatggttcttggttttgactctggtaatggcgagctccccattcttccaatgcagacgccatcagatcttcgggagagcttggtcgccgcccatgcaaccctcaaggttgctgataacgaggtgggcagtcttcgtgcttgcctagaggaggcagaccatcgcatagcaggtgaggaaataatggcgaggtgcacccgcgcatacatgcagcatgggattcaatttggctacgaccggatatag

SEQ ID NO: 16228 - DNA, 384 bp, Zea mays
  Peptide Sequence Number=SeqID_58007
atggcggtgatcttcggtaagctggggagcgcgaggacgtggagttttaaaccccgacccgcgagcacgatttgttgcaatccgcccggcggagttgggctagttgctgcgctgccccgtgaaggtcatctgcatcaacccccacggctgtggacggcggagcggcaagagagacggagagagtacagagagggcgaggcccaggaggacgtcagtgcatcatcggccaagtcaacagagggaaaggggcgagtatgtgttcggatccttgaggatgtcctcaccagagaacaccaggacaaattgacgcgcggctgggcgaaggagagaactggccatggcaagataacagcgatgatgacccccctggtatttatcccctaa

SEQ ID NO: 16229 - DNA, 183 bp, Zea mays
  Peptide Sequence Number=SeqID_58008
atggcgctgggcttggctcgggcgcggcgctgggtcatgcggggtcgcggcgcgggcggtgctctggcgcgggcagaaggcgtcgaacacgtggaagcctttagtgccaaggtgggctctagccaaggtaacacctggggtgttacagggttcgtccgtgtgattgtgcatccgttcatctaa

SEQ ID NO: 16230 - DNA, 678 bp, Zea mays
  Peptide Sequence Number=SeqID_58009
atggctagccgcgacaccaatcaatctctcagaacgacgatccacttcaggagcctcattttctccttcgacgatgaaggtgaagcggagggcgatatgggtagggcgacgcttgcctggcctcctccatttgggagccccgacactgtctcggaggccctcaatgctctcggcctcgccccacgcaagcggcatgaagggcccaggctggccccactttctgaagccaacgaaataaggcgacagatcatgattcatatggggccaaccccctcatatgacaatctatcaactttcttcatgtcctacacaaagttttctacgtcatacgatgcgaaaacgtcatcctactatgacggctccagcagcagatccagtgccttctcgcctcgactttgccatgccctagcggtgatcgccaccctagtggcccatggccatcttcccacctctaacgacttggagtttgtagggatggctgacggcggcggggacctcatcttcgacgcactttgcacggactcagactcaaatctaaatccccctaagagcagtgaggaagaaccccgccccggaggcaaggagaatgaagaccacccgactgttgcggcctcatcgatgataccagcacaatggggcgccacacatggtaggagtcggaggggtcatcggacataa

SEQ ID NO: 16231 - DNA, 1941 bp, Zea mays
  Peptide Sequence Number=SeqID_58010
atggctgtttccgactgcaaggttatgcaagaactgaccgaccccgagcttgcgttgtgtcgcaaagacaaggtgaaggctgtagagttgaagggccacggcaacgcgtgcttctctaggagggagttcgggaaagctctcaggttctattcgcaggcattgcgccatgtcccaattaattcgggtggcatggatgtgaacttggcttggtacaggaagggaatggtaaaaacagcgctcaagaattattcatctgcaatacatgatttagaggtggcattgagccaggaagtgacttcttcggggaagagtaacatagaacaagagctgaagttgattttagagaagcatgaaagtgtcaatgaagctgggacatcaaactgtgatagcaaggatagagatttgcctcttgcaggacaacctcataaaattgttatagagagtatttcaacaccaaacaaaggtagaggaatgatttctacagatgatatccccccagcttcgttgattcatgttgaggaccctcttgctgcgtttcttcataagcatgaactgaagattatcatgaaatcttcccgtgaaacacactgccacttttgcttcagtgaaactccagccgatgttgtattctgtccttcatgtacaataccaatttattgttcaaaaaggtgccaggagcaatcagcaggtcatatttctcgtgatgaagatactaatcttggatattcaacgaatgttgcaaacctgagtataacttcgagttgcaagtctccaagatctaagctatttgctgaacataggcatgaatgtggaggtgcccactgggcagctgttttaccagctgatgtagttttagctggacgaataatagcacacagcatagtaaaaaggatgccgtctgggaagagctttgctttctctggcccaaatttgcccactggttacactcatggtggtcagacaagaaatcagacaagcttggaactcaagcttcagtcagatatgcctaagctggttcttttgatatttcaaatcaaagtcaattcaattgctattgtctgtatgaggtcgatggacagaggcccagagcacacaataaatagaggtttttatgtagctgaaggtgcaaaaatgtgtagtgtggagcaggtcagggttgcacaagctctttatgtatctggtagcctgttcaatcactcatgtcagcccaatgtgcacgcatattttctttcacgtgcgttcgtgctgagaactactgaatttataaagtccgggagcccagttgaactgtcatatggtccacaggttggcgagatgcatatttcagagagacagaagtcacttcaagagaattactacttcagttgtcaatgttcaagttgttcagagctaaacctatcagaccttgttatgaattcattctgttgtccacaaagcaactgccttggtgccatatcggaatcaacttactacaggtccaaagagaatttcgtgaatgtttcccttggaggatcttatgtctgcaaactatcattgcccgtacggttgaagaaacatacattcctagacaagactctcatcacagaggcattacaatctctaaaacaactcaagaagttgaggcacccatatagcaaggctctcgcgcaggccgaagacacaatcgcagaggcctttgcgaaggtcggagaccaagaactagcacgaaagcactgtgaagcatcaattcagatcctcgagaagctgtaccacccaaaacacatcatcattgctcacgagcttattaagcttgtttcgattctgctgtccctgggagatggggcaagcgccgcagccacattcgctcaagcagaggcaatattctctctttactacggatctcatgtggagaaggttttgacatacatgggtgccctgaagaaagctgtcattgacgtgtag

SEQ ID NO: 16232 - DNA, 225 bp, Zea mays
  Peptide Sequence Number=SeqID_58011
atggccgcggcgccttggtctctggctctctgcagccatggcacctgggtcgtcttcttccgtcggcgaccaccccatcgtcgttcttccccagctatggtggcctccatgccctgcaccctcggctccactcccgctgggatgcccagccaggcgacctgctgctcgccatggctgccacaagctccagctccccatctcctccctgtgtacgtgctgaaatag

SEQ ID NO: 16233 - DNA, 1782 bp, Zea mays
  Peptide Sequence Number=SeqID_58012
atggagacgtggctcgttttgacggcactcctgctttcactctctctggtttacttttttcttcctttcatttcatgtccttggattgatggcacctatggtgacgatgaatcatctacgcatacgcatgtgccgcaggctgccgccgccggcacggagacggtgaaagtgatcaccaccccagtcttcccccacatccctcgacttcaggcaagcaaggatttccaggtgctcgtgcgcgtcgaggcgccaccggcgctgcagcagcatagacgcgtccccgtcgacctcgccgtggtgctcgacgtgggtgccagcaccggcaccggcaccggcgtgccgaggctggatgcggtgaagaaggcggtcaagtttatcatcagccaggtccacgacaacgaccgtctcgccgtcgtcgggccgtccaactatcggctagtcaccgggttcaaggacacctacgacgcccgacacaatgcccagaaatccgtcgagcagctgcagcaccgtggtgagttcacgtcgggcgccggcttggaggaggccatcaagatcctggaggagctaccggcgacggcgagccgtagcagccgcgcgcgcttcgtcatcttggtgacggacagggcagtggcagagggcagcagcagattcagcaagctgccgcgcgagtccctccccccggtgcacacgttcgggctcggcgaggcgcacgaccccagggagctgttgcatatcgccagggaatcccagggcacctactcattcgtggacgaccagaacacggacggcatcaccggcgccatcgccgtctgcctcagcgggctcaagaacgtggtcgccgtcggcgcgcgcgtccgccttgagacgcccgtcgggagcggggtcaccatcgagaggatccagtcggggggatacacatacagcaggactcgccccatcaccaccagagacgacaagacgtacgtcgaggtcgccctcggcgccctatacgccggcgaggtgaagagcttcctcgtccacctcagcgtgcctgctcttcttgcttcgacgtcgaccgtcgtcgccgacggctgctacaggcaacagctgctcaccgccagcctcgtcggccactacaccaccagcgacgaagaatatgctgcggctccagcttctccaagtccaacggtgacacaggcaatcttgtacgtgcaaaggccgccgccggaagccctcgacgtcttctgcggcggcgcgctgcagacagtccccgtccccgtggtgatgaaccacatcgcgcggttcggcgtgctggagatggtggccaccttcgtcgacaccgacatcgggcggcatagcaccgtcaccgcggaagtggcgacgaagctgcgggcccagtgggagaagtttgtgcaggcgcggcagttctggagcggcctgaacctgggagtcctcgaggacgaggtcagctggatggttaacatcctagaaaaagcagcaagcagaagcggctcgtcggcggcgacggcctacatgctgtcgtggctgtcgagctaccagatgcagcgaccgacggccatgggatccccggacagcgtcgcggccgctttcgtcaccgtgaacatgcagctcacactgctggaggtgaggaaaggcatcgacacacttcctccaccacaaccaccaatcgtctgcgtggatccactgccgccgccgctgttcagccgtccggacggaacgacgacacctaccgcgtcttcaataccgcctaacccgccgatcgtactgatggacgacgtcaac

SEQ ID NO: 16234 - DNA, 231 bp, Zea mays
  Peptide Sequence Number=SeqID_58013
atggcgacgaagtacgacaacaatggcagagcagtggcgcggcacggactcgagcagggcacgaaggtgagtggggaggaatctgatgagctcttcggacgcgaagcaccggcgacagcaagcgatgcagtagcaatgccggcgacgactgcgagcagcggtaggcgcgccacgcggaggcgagaagacacaatgcgggctcggcaccatgaaggggtggatttttcgtaa

SEQ ID NO: 16235 - DNA, 849 bp, Zea mays
  Peptide Sequence Number=SeqID_58014
atggcagcgtcgccgcagcagcaaggccagggcggccctggcagcggcgggtggactcccgagcagttctggtcgctgctggacaaggcggaccgccggttcgcccgggtgcgagacctgccctccttcggccgccaggagcccgacgagttcgccaaggccttccgcgcctacacccagctctggcggatgcagcaggagcaccgtcaccgtcttctcgacgcgggcctccgccgctggcaggtcggcgagatcgccgcccgcatcgcccacctctactacgcccagtaccagcgcaccgccgacaccgcgcttctctccgaggcgttcgtcttctaccacgccgtcctcgaccgcgcctacttccaggacgccgaccaccacctcgcccccgccaaacacctccgcttcctcgccaggttcctcctcgtcgcactcctgctcggcaggcgttcgcacaccgtcccgcgtctcgcctcggacatacgcacgctcttagatgactccaaaaagtccttccaggatgccgaatacaaggagtggaagcatgtcgtgcaagagatcgcgaggttcctgcgagctgactcaccatttatgaacatgaggccgctcaggtacagctatgcattcgatccgcccccggacacgcttcgtactgtgccaactactgtcaagaagcgaggtctcgtcttaagtgacaccatactttgcagctactatcctaacgaggtcctttccacaaaatgcgaggagcttccttcaaatggtatcatgttaatatatctttcagctacagttaatattaaaatattatgcaggggagatgggaacttctggattttgtcctga

SEQ ID NO: 16236 - DNA, 279 bp, Zea mays
  Peptide Sequence Number=SeqID_58015
atggcgagcggtctccacgctgagcgcaacgaagggagaggaagaggggatggaaagaggaaagggaggggctcaccacgggcggacggagacaaacggcatgggctcgacacggcctccggtggatggcgtgctgggcgcggtgaggcgccaacggcaaggctaggcatgcgacaacagggctggtgctcggctgtgtggcacactcctagacacggggtggggctcgacgaggggaaagagggggagtggcacgggacatgggcgggcgggcggtga

SEQ ID NO: 16237 - DNA, 6123 bp, Zea mays
  Peptide Sequence Number=SeqID_58016
atggaagggcttcgtattggagcaccaattgtgcaggtttatcatgagaaatcgtttatcttacctgatgtttcaagggtgcttgcttgcctttatgagaaggatgtcaagtttgagactcacacagcctcatacaggagcctactcagattgcaggcatcatctcatgctccagttccattctatgatggccctacttttctagaagaatccagagaaatctgccgttatatagcagaaaagtatgaaaatcaaggatattcattcctccttggaaaggatgcccttgagagggcttcagttgaacaatggctccacaacgaggagcatgctttcaaccctccgagccgggccttgttctgtcatttggcctttcccttgggtgaagaagatgatgatattgatgttcatacaaggaagctagaagaggttctggaagtttatgagcaaaggctcagtgacagcgaattccttgttggaaacaagttcactcttgccgaccttgttcacctgccaaattcccactatatcaaagcatctaacaagtttctttacctttatgattcgaggaaaaatgtaaggaggtggtgggatgctatttctgaccggagttcttggaaggaagtgctgaggtatatgaagaacgtggaggagaagaacaaacaagaagaactcaagaagcagcagcagcagcaggaagaggctccttccaccgacccaattcgggtagactcgagaaagcagagcagaacagagcctcggacaatattggttcctcctgctgataatgagtcatcagcttccatagttcctcgaacaaagaagcctcttcctggtgatcacttagtgtctactcaacaaggaaaatcaagaaaaaatgtgcatcagtacccatcacaagattcagaactggcaacctcacattctgttcctcaagaaccaatgagcatggaattggttcaagaacgagaaaggacgactcgaagaccctacactgatcagagtcaagatgtcttcaaagaggcaaaggttgctaagtctacaccatctagtgcaaaacctatgtaccctcaacaacctgctcctacttcagggcatggagaagtggaagatacttgggacaaaggggtgaaaggtagagaaactgttcctgaccgacaacaaatgttgcaaaaatgggcaggtacagccagagagcaagtttctgatcgttggaaagcaagtcctccatcaagacaggctgcagctgaagatgttcgtggtgccactggtgatacaacacagtctgcagatgttcttgacacttccaagaaatctagaggtgcctatgaagaagctaaaggccctggctctgttaaggaggagaagacatcctctatttacaagaagaagcctctggtggcacaagacagtcaggagcaagctcaaactatcccagctggtgagaaaacagatagttctatacaaaagcatcaacaagcttcggatgccccaaatacttttgttgagaaattaaatgcttcagaaccagcaagagtaaaaactcacagtgacttcagtgctgaacagccatatagaaaagacaccactgatgaccagaaagtgataccacctctttcgactagagaactaacttcccaagtccaacctccctctaaaccatcgtatgatgagaagccaacaccaatgagtcagcaaaaatctgataagcaaagagtggaacctccaatacaaatagaagcagaaatatctggtgttcaacatgcttcaccatcatttccaagagcttccatggatgatcgtgccactatcggtgataagtttgccatgcagtcaattattgatgaaagagttggagaaccaacacaaatgcaaacatcaagtccagatgctcatcctgcttcattacctactaagagagaaactcctgaaggtcatgaaattggtgatttagggcttgccagtacacctggtggccaaatatcagaagcaaaaaaagtgggagatgacccagacacagtccatggagatgtttattatgtcaatttgtcaactcaagatgtgggcaaggatgccttcaaagaaccaacggtcactgactctttaccatctagtgcccaaccgattcagaaatctgctattactccatcaaggcaaacacaagttgaagaagctagggataaaagcatgcaaagtagagaaactattcctgaacaacacaaaatggtggaaaggaagacaggtacacctggagagcaattatcagaacgccagaaggagattcgtccatcaagacagtcagcagctgaggatgctccaataagtgatgcaatacagcctccagacatccttgacactcccaagaaatctagagccacctttgaagaatatataggtcctggatctacattgcccaaagcacaaattttggatgctcaagattctcaggtcaccaaaggagaatctacagtgccaactactgaccaaaggaaggactggaaatatgaaaaagatgatgaaaccatcgtgactgaagaaaagtcactatcaacagagcgatctagggagatgttccaggaaagtgcatctactgcacctaagacacatcttaccgattctgggggctctaatgcactggaaaaaacatcctctgtttatcataagggtcctctggttgcccaagacagccaggaggaagctcaagtcatcccagctgatgagaaagtagatggttctgcatcagagcatcatgaatcctctggtactccatacagttacaatgaaaaattaagtgcttcagcaccagccagaggagatattcatgatggtcacagtgcagaagagcaacataaaaattacactgccgatgatcagaaagtggctccatctctatcaaacaaagaaccagcatcccaagtgcaacctgcctctgaaccattacaaagagcagttcctgatggggatttgcctagcaaatcattcaccattgatcaatggcaacgcatggctgcttcattacatggtgtaattatggattctgctgatgatgaggcagccatatctcttaacaatgatcaaaagtcaagacccatgaatcaagaagcagctccaagttcacagagtgtcaatcagatggccaaacaatctggtgagcaaagggtcgaaccacctgtaccaattgttgtagaagcatctgatgttagacgtgctgcaccatcactcccagaagctgccagaactgatgttgccactatcagtgataaatttactgagcagtccaacattgatgaaagggtggggaaaccaaaacaaatgcaagcaccaattacatctgctcatcctgcttcaaaaggtaccttgagaagaactcctgatagtcatgaagctggtgagcttctcagcacatatgagggtcaaagattagaggctgcaaaagcttcacaagatcctgccacaatccacgaagatgtttatgatgccagtttgtcaactaatgatgtggctgttgataaaaagacagcaacagatcatgctattggtgatgaggttgtcacaagatctttacatgatcagcagacaccgcgacctgcatcaactcaagcacagccaactgctgaggctccacaagactctgattcattccaatatgtacgtactggtgacgtgggaaaaactgaattggcaaaaccaactgtaactgatcaagaagcaacagcgcctgcagctggcccaacatcagtcgatccccaacgtgctaacatcataccagctggagttgcccattctgaacagaaatccactccaccagataaaggatcagctcgtgttgcacaacctcctacccctgttgaaccaataaaggaagacggtaatgtttctgcagctaattatactaatgagctgcaaatgagttttcagcaacaggccagatcatctgcaccaaccacaataggaattccagcctcagatacccagagtgttatagggaaaatccaggtggtaactccggataaacatggcactgatgactcaggaaaaccatttgatctaaatcaaggacatgtttcacacgcatcacaagcaatccttggtcaagaagaactgacatctccacaaggcgcaagagtttttccaacgtcagatacccaacaaaattttgctgcatcagatgaaaaatctgataaggcctcaaaatcatttgactctgctgaaccaagggaagaagatacagatgctgccactgctgaccaaacgactgtaccaccgacagatgttactcgtcaggtcacaatctcgacaccagatgctagtgacagtgtatcaagggatcaggaatcctctcctgacgatagtcagaccagaaatttggggagcccacttattgctagtcaagaagaagcctctcgtgccggaggtgaaggatctactcctgaagtgcatagtaccattgtagatgagaagaagacacttccatctagccaagcacaatcttcaagcactgggcctgattcaatacaaattggtggtgatgctcgtcttagtgatgctggtgtgccagccacaagctctatagagaagcaagaggcagaacctcctgcagaaacacaagcaccaacttctaagggtctacaagactctggaagtatcgagtcaccaagacaagccttaactgatcaaaccgtggcacctgcgatgaactcagtggcaccatccgattctccagaaggtccaaattcttctcgatctgtacagaccccttatcaacaagccattacaaaaggagacactgttgttactgcagctgatcaagccgagaacatgcaaacaataacttatcaacaagccattacacctgttccatacacagctaaaccttcattcccaggtgctcaggatgcatcaaggcaggaaactattcctgatgaggggccaatggaaaattattctcctaaacctggagcacagacacagccacctgcagcaactctagatgtatcaccctatgcctcgagcaaggttaaatcaactgggcaaggagccaagccaccaacagggcaccaagcatcttctccagaaactcagcttggttcctcacaaccaggcgaagatgccccagcagtacaaaaaattgctgcatcagatgaaaaatctgccacggcctcaaaaccatttgactctgctgaaccaagggaagaagatactgatgctgccactgctgaccaaatgactgtaccaccgacaaatgttactcgtcaggtcacaagctcaacaccagatgttggtgacactttatcaagagataaggaatcatctcctgatgatgatcagatcagaaatttggggagcccacttattgctagccaagaagaagcctctcgtgctggaggtgaaggatctactcctaaggtgcatagtgccattgtagatgaagagagaacacttccatctaggcatgatgcacaaacttcaagcactgagactgattcaacacaaattgatggtgatgctcgtcttagtggtgttggtatgccagccacaagctctatggagaaacaagaggcagaacctcctacagaaacacaagagccaacttctaagggtctacaagactctagaaatattgagtcaccaagacaagcctcaacttataaaaccgtgacacctgcgatgaactcagcagcaccatccgatgctctagaaggtccaaattcttctcgatctgtacagacccctttatctactggaccaacaaaaggagacactgttgttagtgctgctgatcaagctaaggacatgcacacgataccttatcaacaagacattacacctagttcaaacacaggtaaacctccattccaaggtgctcaggatgcatcaaggcaggaaattattcctgatgatgggccagtgggaaattattctcctaaacctggagcacagacacagccgcctgcagcaattctagatgtatcaccatatgccttgagcaaggctaaatcaactgggcaaggagccaagacaccaacagggcaccaagcatcttctccgggaactcagcttggttcctcacaaacacaaggcaaggataccccagaagaacaaaatattgctgcatcagattag

SEQ ID NO: 16238 - DNA, 282 bp, Zea mays
  Peptide Sequence Number=SeqID_58017
atggacaagatcatggtcttcctcttatcgagcttcataaaatccatggagctcagagacaggctgcataactcggtgagcatctcttacatagggcccaagtacttggatcaccttagctggaacagctgccgcatgctgacgctggcagaggaagacaagaaggcggtggacctaacctcgtccgcgctcacctcgggcccttacgagccccaccgatccggatctgcgcgacatacgcacggtcgacagggtagggctggttgggggcgagagttctag

SEQ ID NO: 16239 - DNA, 615 bp, Zea mays
  Peptide Sequence Number=SeqID_58018
atggacaagatcatggtcttcctcttctcaagctccataaaatccatggagcttagagacaggctgcataactcggcgggcatctcttacatagggcccaagtacttggatcaccttagctggaacagctgccgcatgctgaagctggcggaggaagagaagaaggcggtggacctaacctcgtccgcgctcacctcgggcccttacgagccccaccgatccagatttgcgcgacgagcagaagcgcaccctgacgcgtcgatgcagaaggagagctggcgacaggaagaggcatcgaggacggggcagacacgcgatgaggacgcggagcggctatcacgacgtgggtcggcgcgacggacgctggtgatgaggctcggcttctctgggtcggagacagcgaggagggcgtacttggaggctatgatgcgtgcaaatctgggcgacacggaggagggcgaggaggcagagcacgaggaggagatgacgccgaggctgggcacgaggtacaggctgtcgcgggtggggcaggcgagatttgcggaggagcaggcgagatttgcggaggcgggggcatggtgtatcactgtgaacgccctcaatacagccttatag

SEQ ID NO: 16240 - DNA, 648 bp, Zea mays
  Peptide Sequence Number=SeqID_58019
atggatcccctcgggatccctaatcaccaaatcagcccttatatatatgtacccccttctctatgcaataagtcaagtatcacattcttacatggtatcagattagggtttctttccacccaccccaccagccgccacaatccacagccgccgccgccagtggcagcccaggtccgaccgcccccaggaggctcccccatcggccccggacgacaccccatcccggacgtcggtgcctccccctcctcgctgccgccggacatccctgcaccggccgcacgctcccccttcctcttcgatggacgcgcccgccgcgggcgagcacgcgggacaccacgagcacgcgtgcgggcgccaattgccaatttgcagccgcgggcgcgcaagcgcgaggccaccaccgccgccccaggtgcccctccccacgacgacatcctccctcccagccgccttccatggtgcacacccggcacgggctcggccatccaggtgcagcctcggcgcgggcaaggctctggcacgggcgcgtgctctgggccaggtgcgtcgctcccacaggtcgacgcgcggatctcgactctcgcgctggacaggggccgcacgacgctgatccccagcgcggccaccaagtcatcggctctcctctag

SEQ ID NO: 16241 - DNA, 1029 bp, Zea mays
  Peptide Sequence Number=SeqID_58020
atgagtgcgcaacatggagcccgcgctgacatagaggagcgcgagatgcgctgcctcggcggcggactggatgatgctgcgcgctcagagagccgccgagatgcgaacagaactgcggcaagcaggcaagtgcttagtaaagagaaattaggtttagaaaagaaacctaaccctaatttctggctctggttcatcttctgccgagcaactcattccctgttcaaaccaacaaaccataagacagagttccttccgacctgcatgcctcctttgcctgagtctgttgatgcagagagcatgctctcccaaagctgtgtgctgcgagtcgcatcattctttggcgctgccagtcagttctcatttgctgaggttaccacatggcctgatgttgactctgaggaggctgttgtcaccagttcatctggcagtgccaacaaagggttcaacgcaattcctgaggtgctgagccggctggcgggatcgtggttggacgaggacggatggcaggtggtcgagcgtaggaagaagttccgctgtgttggatcccctgtggacctccgtggaaagtgctataactgcttttcctcctcccaccttgtggcgaggattggactttcattgaccccttcatttgtcttggatttctcttctaaattggcaagggaggaaattgctctccggcgtgctctgtttgtaatggtgatcagaacaaggttagaggtttttggcatggaggtgttaactgaagtggcgcatatgtttgatattgatatagaatctttgacgatccaccattccatgccagaggacttcctgttgattttaccggatgaagaaacagctacaagcgttgaaatggtggagctgaaatccaggggcgcagtaaccatgttttcgtcgtgggatggcaccgcaagagcctggctgtccgagtgcaagtttagcctctcggcctggctccacagaaacgagatcaaggtccgtttcctgggagcctggctgcttgtggcgcaaggattccgcgtttag

SEQ ID NO: 16242 - DNA, 528 bp, Zea mays
  Peptide Sequence Number=SeqID_58021
atggagcagccacgacggaggagctacaacggccggatcgacgtgatacgagacggtggctgcagggaagcctgtctagggagcggtgtccggcgagctgagggaggaagtcgagggaaggatgccctgcgcaccatgggaaggagcagggagatgggaggagggtggcccgacggcgagcagggtcgcgcgcccggcaaggacgaccgacgcggagggcaagacgctaggcatggcagagcgacggccacggacgagctgcggcttgggatcgggctcggagacggcggcccgaggaggagctcgacgcggctaggcatggagacagacacagctggagagggaggagcagagagccgggaacagggagcagggggcgcggcagccagttgccatgaccgagcaggggggccgagcaggggatggcgagtggaggggaacctgagtgatgctgccgcgtggagaagaagacgtgagggagacggtggggaaaaaaatcagaagagtgcaaggcagataaaaatctga

SEQ ID NO: 16243 - DNA, 1050 bp, Zea mays
  Peptide Sequence Number=SeqID_58022
atggtgttgtgggtcttcggctacggctccctcatctggaacctcggcttcgacttcgacgacaaaatcctcggcttcatcaagggctacaaccgcacctttaatctcgcttgtattgaccacagaggcacaacagagcatccggcgaggacctgcacgcttgaaaccgacggcgaggcgacgacgaggccatatgccatctttgcatgcccccctttttacacggtgacacagtgttacatgggcaaggtcagcatggtacaagcctacaaggagaaagtttatccaaaaaacaaggtatgtttggttcatgctaatcctcacctccttcccttgctgccgtctcagtttggtgttggtttaatttctacgggtgtcgtatatcagagacttctaatttatatcgatatttatgacatgtgtttacctgttttgtcaagaaccattcaggtcataaacccctacgacaggggccacgagggctcatcttcgccactgcccctactcccaccttctgttaacagtattattcctggcccgattaaggaggtctctaactgtgtctatgagaacgagcatgtcctgctcggtgctgttccattccctagcgatgttctccggctaaagacgcttggagtttgtggtgtggtgacacttaatgaatcatacgagaggcttgttcccacatccctatacgagattagttttgcacaggcactcgtttgtggtatgctggttctactccctggatatgagcccttgggcctccagttcgggcaacaagcatatggcaaagagaaggcaaaggatccttcagagttcatcactcatcgagccaaagattttgtgtcaagcatgaaggacattgaaacccggtttatgtgtatagttgaagcaggaaataaggtttctagaatgcttgaaaccaagaagatcttgcttgacatatgtgctaaaataccaggtacaaaatacatggtgatccaaggtgaacctagagtggtcatccgaggaaagaagtttattgcatttgcaagcttcgtgtcctag

SEQ ID NO: 16244 - DNA, 2103 bp, Zea mays
  Peptide Sequence Number=SeqID_58023
atgccggcggcgctgaagccgtaccgcgacgacgagctccgcaacctccgcggcgacgaccagcagggcccctaccaggagcacgaccgcgtgtaccgctacgacgtctacaacgacctcggcgagcccgacggcggcaacccgcgccccatcctcggcggctccgccgaccacccgtacccgcgccgctgccgcacgggccgcaagcccaccaaaaccgaccccaactcggagagccgactgtcgctggtggagcagatctacgtgccgcgggacgagcgcttcggccacctcaagatgtccgacttcctgggctactccatcaaggccatcacgcagggcatcatcccggcggtgcgcacgtacgtggacaccaccccgggcgagttcgactccttccaggacatcatcaacctgtacgagggcgggatcaagctgcccaagatccaggcgctcgaggacatgcgcaagctcttcccgctccagctcgtcaaggacctcctccccgccggcggggactacctgctcaagctccccatcccacagatcatccaaggcacgtcacaggacaagaacgcgtggaggaccgacgaggagttcgcgcgggaggtgctcgccggcgtcaacccgatggtgatcacgcgcctcacggagttcccgcccaagagcacgctggaccccagcaagtacggcgaccacaccagcacgatcacggcggagcacatcgagaagaacctcgagggcctcacggtgcagcaggcgctggacggcaacaggctctacatcctggaccaccacgaccgcttcatgccgttcctcatcgacgtcaacaacctggagggcaacttcatctacgccaccaggacgctcttcttcctgcgcggcgacggcaggctcgcgcccctcgccatcgagctcagcgagccgtacatcgacggggacctcaccgtggccaagagcaaggtctacacgccggcgtccagcggcgtcgaggcctgggtgtggcagctcgccaaggcctatgtcgccgtcaacgactctggctggcaccaactcgtcagccactggctgaacacccacgcggtgatggagccgttcgtgatcgcgacgaaccggcagctgagcgtgacgcacccggtgcacaagctcctgagctcgcacttccgcgacaccatgaccatcaacgcgctggcgcggcagacgctcatcaacggcggcggcatcttcgagatgaccgtcttcccgggcaagtacgcgctgggcatgtcctccgtggtgtacaagagctggaacttcaccgagcagggcctccccgccgacctcgtcaagaggggcgtggcggtggcggacccgtccagcccgtacaaggtgcggctgctgatcgaggactacccgtacgcgagcgacgggctggccatctggcacgccatcgagcagtgggtgggcgagtacctggccatctactaccccgacgacggcgcgctgcggggcgacgaggagctgcaggcgtggtggaaggaggtgcgcgaggtcgggcacggcgaccacaaggacgcgccctggtggcccaagatgcaggccgtgtcggagctcgccaggcgcctgcaccaccatcatctggatcgcgtcggcgctccacgccgccgtcaacttcggccagtacccgtacgcggggtacctcccgaacaggcccacggtgagccggcgccggatgccggagcccggcagcaaggagtacgaggagctgagcgcgacccggagcgcggcttcatccacaccatcacgagccagatccagaccatcatcggcatctcgctcatcgagatcctctccaagcactcctccgacgaggtgtacctcggccagcgcgacacccccgagtggacctccgacgcccgggcgctggcggcgttcaagaggttcagcgacgcgctggtcaagatcgagggcaaggtggtgggcgagaaccgcgacccgcagctgaggaacaggaacggccccgccgagttcccctacatgctgctctatcccaacacctctgaccacagtggcgccgccgcagggctcactgccaagggcatccccaacagcatctccatctga

SEQ ID NO: 16245 - DNA, 165 bp, Zea mays
  Peptide Sequence Number=SeqID_58024
atggatagcacgggcacacgcgcggtttctaacggggctccggcgccgcgccaggtccacgccgagccagcaacgcgcagcagcggcaccgtgtcagcttcacctgccgccccagcctggttcgtatcgcagctgcagcatggtgccgtttctgagaacgtctag

SEQ ID NO: 16246 - DNA, 1002 bp, Zea mays
  Peptide Sequence Number=SeqID_58025
atggcgggatctggcttgagcgacggaggcagtaccggagggggaggattgggcagcagtggaggaggcagacgcggccgtggctgtggaggagcaggccgattcggtggtgcaggaggagccgaacgtggtggaggaggcggactcggtgctggggtaggaggcggacacggcggtggaggtgatgcaggcggacgcggcggcgactactggccagctgtgcctgcacgtgcgagagtcgtcgcagatccgttagcgtcgaccatgttcagctgcagggacgagttgccttcatcgttcggccaaggggaagatgtagttccagggaatggatacttttcaaacatgatgatggatgactacgttgaaggagaatttgataataatagcaatacatgtcctgatattcagccacaatcaatgcaagttggaccaatagtccccacatcgaggccaaaccataagagatcaaaaaatttcagtgatcaagaagatgaaattttggtttcagcgtggttgaatatcagtatggatcctgtggtaggtaaagatcaaaaagtaggaaggattcagttaagacgacagagtggtactacaatgcaagacatggttgcacaggcatgtgcgttgtacaagtccgaagatgaacatgaaaaaggatttcaattcatgcactgctggaataagctcagattacaacccagatggcttggtaaagtagatgatttggctgctcctaaaccttcaaacaagaaacaaaagaccactcgtgaaggggatgccaatagaacattaccatatgaaaccaaagaatctcaagttcaagtcgtagagaattaccaattgacccgggctcccgggaagaaaacagctaaagcagcactagtacagagagaggaaaagtgtgactgtagcatagaaatttgtgggctgcaagaaagaagtgatgccgagaaagagcagagaagaggaaagattcataaagcatttgcacttgagtga

SEQ ID NO: 16247 - DNA, 324 bp, Zea mays
  Peptide Sequence Number=SeqID_58026
atgccatctagatggtatatccgtgcaagaactggtcctccatggtgctctacgactgcgaccaccccaagaacgttgcaaactgttggctacgttctgggttttagccagctcgacgagcaacaaatgtcgtcgtcgtccgacctcgagcagcaggaatggaaatgcaggcttgctacggagctgatctcagaggccactgctacgaatgagcgactctgtagctcggttgtggattcagtgacaaaagggacaaagatgctgcaatcatatctgagcaacttcaaggtgtatggaaaatcaaagactctcactactggatag

SEQ ID NO: 16248 - DNA, 1431 bp, Zea mays
  Peptide Sequence Number=SeqID_58027
atgccgctggctcctctgtcgctggaaccccctcccttccgtctcatccgccccgccaccggcagcggcggacgcgtcctcccggtcccagggcctgcaccgcgcctatgtcgatcgctgagggcggctccggtggcacccgacaccacggaggagccgtttgcggccgcgcggggccggctagagtcgctgagccaggtcacaggagtgctgggcacgcagtggggcgacgaggggaagggaaagctcgtcgatatcctctcccagcgcttcgacgtcgtcgctcgctgccagggtggggctaacgctggacataccatatacaattctgaagggaagaagttttcacttcatcttgttccatcaggcatccttaatgaaaacactcaatgtgtaattggtaatggagcagttgttcatcttcctggattcttcaaggaaatcgatgggctagagtctaatggaatttcttgcgagggaaggcttttgttgtttgatggtcttagggaggcagagcttgggaattcctttataggaacaacaaagagaggaattggaccatgctattcgaacaaggttacaaggaatggacttagagttggtgacctgcgacatatggatatctttggtgcaaaactcaacaccctattaagagatgcagctctacgcttcaaagattttgaatatgataacaagattctgaaagaggaagttgagaagtataaaaagtttgctgaacgattggaacctttcatcaccgataccgtgcatttcgtgaatcagtcgattttgcagaagaagaaaatattggttgaaggtggtcaagctaccatgttagacatagactttgggacctacccctttgtcacttcctctagtccctcagctggtggaatctgtaccgggcttggtattgctcccagaagtctcggtgatatcattggagtggtaaaagcctacacaactagggttggatccggtcctttcccaacagaactattgggtaatactggcgatttgcttcgtgcttctggaatggaatttggtaccacaacaggtcgccctaggcgttgtggctggcttgatatagttgccctgaaatactgttgccaaatcaatggtttctcgtctttgaatctcacaaagctcgatgtcttaactggactcaaggaaattaagctgggtacctcatactacaccgatgatggtaactctgtccaatcattcccagcagatctctctcttttggagcaagtaaaggtcaaatatgaggccctgcctggatgggaggaagacatttcgtcaatacgagattacagtgatctcccagaaacagctcgtcgctacgtggagaggatagaggaactggtcggcattccagtacactacattggtgtcgggcctggacgcgacgccctcatatacaaataa

SEQ ID NO: 16249 - DNA, 186 bp, Zea mays
  Peptide Sequence Number=SeqID_58028
atggaatatggcccttcgttagagaggaacctgctcaaagaacaagcaaacatagaccaaaagtctctaactcacaggaaatcatgtaggaatattgatgagctgataaagaatgtggacaaggagtacaatgattacaaccctaagattcaaaataggatcgtgaccaaccagcaacaagcatga

SEQ ID NO: 16250 - DNA, 465 bp, Zea mays
  Peptide Sequence Number=SeqID_58029
atggcgtttctttttctacttgcatccaaatcctgctttctgcatagcaagaacagcgtcctctcgcgcgaagaagcacagcttgtaagtttgcatctgattgcacaaccgttgttcccgtgcgtgggggactgcggctcgttcttggatgaggttctgacttctgaggaggatggggatggctcacggcgccgtgacgcgacgatcggcgtcggcagcggcgcgtccctgctgtccctcctgcatgcttgccacccagcttcgcctcgccacgcgtctcgtggaccattgcgcgcgtccctcgtgccacggcgcacccgcagccatgagtgccagcgctcccgtctcccgactcccgagcaaatcgctcggcgcctactactagcccgaaacctaggtggtgggaactcgggatacgaggtcctcttctccgccgcttgtcctcggcaagcacaaacgcggtaa

SEQ ID NO: 16251 - DNA, 1398 bp, Zea mays
  Peptide Sequence Number=SeqID_58030
atgtccggtgcaccggctaggcgcgcgtggatctgtcactacgctgccctgtccagtggggcaccagacaaccactattcattgtccgagcactccctcaccgtcaccacctggtcaccgctggcgatcaccgtggtctggtctccagcgagctacacctgcccgtgcttggctccttcccctcacattcctctctgcatgtcagtagtgagtgcaggattgtgcagacgaagaatgtcacaccgtcagggggaagatgaccaggaccctcctcgccccttcaaacagtacaagggcaaggcagtctatctcgagcagctggggagcaagaaaaagagatggttggacagagccacctatgtagaagttgtcgaagaagcaatagcagatcaggtagagcagggagacccagtcaccactccaccttccactatgctagctcctaccactcttgagccttccaccacatcagttgtgcccactacctcctccacaccagcttccactgcccccgcttccgcttctgctccacctcatttccgagagcgtgatgagactgaggtgcgtcctattgttgcggacctacgcttgctcgaccttcagagagccacaactgttagggacccaggagtccttcagggctcagctcagattgctttgcgggctcaccagtgtctggatctctctactttccgtatagcggccgacacagagtcaaagggtcacatcacatatctgccagggttgtattctttgctgactttcggtggtcgatatgttgaggagtgggtccgagtgttctatgctacagtttggatcgaccctaaccatctatggatgaggttccggttcgagcgccctcctcatcgtcctcacggtggagtagctcctgacacctctcacatcgccgctctgttcagacctccattcatagacgtgtctcagcgttctcctgttgacttcaccccagcgacgaagttcttatatgagctcatgaggcgtaccctgctaccgaggatgggatacagagaagccaccacacatattcaactctggctccttggtgctctggtatctcactctgtgttcaatgtggttgatttcctaatctgtgagatagaggacatagtgttggatgacggtaaccttgctgacggagagtacgtcctcgtgccggagcaaggagctgctcaggaggtagccccagatccagcaccagagcctgcaccagaggacctgcctgccactgctttggaaggcaagccccggaatccttttgagatggatactagttctctggaggacatggttgctggagtgacttggccgtccatcttgccaccgggttggacagtcgagtgggaccctacctcggctgaggaggagcatgaggagtga

SEQ ID NO: 16252 - DNA, 402 bp, Zea mays
  Peptide Sequence Number=SeqID_58031
atggttatagtgattaatgacaacagaagattatatgtgactaacgtgtgttttgcagagcaaatgagcattcaggaccacgaagacactcttcaacagcagctcttagcagacagggcagagcaccgggcgttcatgactcatatccttcagcacaccggtgttcctattcctccagtgcagtctgctccacctcctgctcttcaggctacagttgtgcccgctatacagtcaggaacccagctccactcctttggtcctaccatctctctgctcaggccggtcaccctagatttctctacccaggtcatcggaccagtcagtgctcaatcaccagtgcctccagcgtctcctgttgctgaaagggaaatgtgcccttggaccatttctatattgttttag

SEQ ID NO: 16253 - DNA, 1251 bp, Zea mays
  Peptide Sequence Number=SeqID_58032
atgcatgcgaggcacgtgctcgtctcctccgtcttcctgttcttcgtcgtcgcgctatgtaccgtcgtcctacccccgccccggtggccaaggtcgacgtcgttcttccagccgtcgtggctgcctccgctcaacagaagagagcgcgacgacagcgccgacgcccacccgccgtgcgactactcggacggacgatgggtgagggacgatgctgccgacgtgacgacgtacacggaggactgcccgttcctcgacccgggattccggtgcacgcggaacggccgcacggactcgtccttccgacactggcgctggcgacctcgtcgctgcgacctccctaaattcaacgcgacggacatgctggagcggagccgggacggcaggatcgtctttgccggggactcgatcgggcgcaaccagtgggagtccatggtgtgcatgctcgccgccgccgtgccggccgcgtcgtcgtccagggtgtacgagcggtccgggaagccgatcagccggcacaagggctacctcgccatggttttcgccgactacaacctctccgtcgagtactaccgcgcgcccatgatcgtgatggtccaccgcttcccggcggcaaacaacgcgacggcaggcagcgtgagggggggcgtccgccttgacgcgctgccacggcacgccgaccggtgggccgccgccgacgtgctcgtgctcaactccggccactggtggaaccagcacaaaaccgtcaaggcaggaaactatttcatggtcggcgaccgcttgaacaaaaccatggacatcaaggaagcttttcaacggtccctgcagacggtgaaagattgggaattgagtagtgctcagctttcggaaagctatttcttcttcaggagtttttctccctcgcattacagcaacggcacctggaacactggcggttcgtgcgccggccagcgagagccaccgaccacaaacaatggccgctccgaggaagagtactcatggatgaacgcgatgattgcgaagatgacggaggatatcaagagccacgggaggaaggcgaggtttctgaacatcactcacatgacggagctcaggcctgatggccacccggcagggcacagggagcccggaacgccgccggacgcgccggaggactgcagccactggtgcctccccggcgtgccggacgtttggaatcagatcctctacgcacacctcttgtccgcagggtatggcacgcgcaggaaccagagataa

SEQ ID NO: 16254 - DNA, 222 bp, Zea mays
  Peptide Sequence Number=SeqID_58033
atgggatggcccaacaccgcctggaaggggatggcgcggagcgtcgtgtgggatgaggtactgaagggtcttttaggtcccttcgtggttagtggaatgggacagtgcagccacctggtggtccaaatcgtgctatgtcgacatgaagatgcgcttgacgtggaggacatcgtcggtggttaccagatcggggcaagaggtgccttgggggccagcatgtga

SEQ ID NO: 16255 - DNA, 138 bp, Zea mays
  Peptide Sequence Number=SeqID_58034
atggatcagctgaccaagctcgagctaccatcgcctccaaaaaagtattggttttttgcaagcattagaagagctccatcactttttaatataaaagccttttgtgtacatatgaaccaactgttggagcatttctaa

SEQ ID NO: 16256 - DNA, 1275 bp, Zea mays
  Peptide Sequence Number=SeqID_58035
atgtggagcggggctcctcgcatggcagaacggctggagctggagcgccaagcaactctcgatgggcacgtgcctcaagatctcgaagccggagtgaacagcggcggcgcacaaggtctgcatcctgtgcgagttcgtcgtcttcctccgactacaggacgatttggtgggatggacaacatttggcagcaatacggagacaccaaccaagcttatggtaatgtcacctacaccccaggaattgacttgactctctccccgggaaatgacttgactcggttccaagattcagctgttgtgcatggcccaggtccaattattcaggaaaaccagtcgttcagctctacctcacaagtgcctcaacctgtcaatgatcgaagaaagaagggggttgccaagcgtgagaagaactactccaatttggaggatgaaacattatgctcggcgtacctaaatgtgtcgaaggatccagtggtaggtgtgaaccagccaatgaaatcatactgggcaagaatcactgactacttcaacgagatgaggactactgacgtggagcgcagcagctcctctctccaacatagatggggcgatatctcaagggacaccgcattgttctgcagttactatgctgagattgaacggaagcatcaaagcggtaaaagtgaggacgacaagataaaggatgcactgaaaatgtatgaagggcttcgaagcagcaaattcaaatttttgcattgttggttgatccttagaaaagagcagaagtggtctgaatttctcgccaccacaacatcaagcacctcccaagctcgatcaaaggctgatcccgtgcagcaaggcgacccaacagcaacatccacacctgaggtgaatgtctcagagaaaattgcaaggccaattggtagggacagagcaaagaaacaaaggagcaacaactcatccagctcctctgcttgctttgaaatgcttcaaaagatacaattggaccgctccaggttcgaggaagacatgaaggctgcaagcaaatatgagtcagaagaaatggctgtccggtatgataggaaactggccattcaagaacaacaccttaaacttgtagcagagtcgacgatgatacagaaggagatgttaaggttccaacaaaaagaacgtgaggatcgcgtaatgaccatggacttggacaaggtggctccttgggtacgcgagtactacatcaacgagcagaaggctatagcggcaaaatcacgtcatgaagtgtcaagttctgatgtgtag

SEQ ID NO: 16257 - DNA, 582 bp, Zea mays
  Peptide Sequence Number=SeqID_58036
atgcagaccttgtgcgccgccgctgttcactccggcttcgagatcttgaggcacgtgcccatcgagagttgcttggcgctccagctccagccgttctgccatgcgaggagccccgctccacatgccggcgcgactgccggaccggagaacgacggcgttgcggcggcgcgagatagagggcgaagcagacaaaagagaggcagagaggcgaggcagctgtactgtgcgacgattgtggaggcacgggcggcggtgctgtccgccgcggagggccacgcggcgccacgcgccgtgccgctgcacgacgcgctcgggctcgtcctccgcgcccccgatccgctccctcctttccgcgcctccatcaaggatggatacgccatcgtggcctccgacgggccaggggagtacccggtggtcacggagtcgaggggcaggcgacgacgccctcggcggccggttcccgatggcgcgtacaccgtcgtgctggtggaggacaccaagcaggtctctgacggatcggatgggttcaggaggatgaggattctggcgcgggccgccgatgggctgaacattcgcaatgtg

SEQ ID NO: 16258 - DNA, 1338 bp, Zea mays
  Peptide Sequence Number=SeqID_58037
atggacaagatttacaggaaagagtgggctataaaaaggcgctcgagatccagatctgggccgatgcgaccgccctcgctgctctccctcaccctcgacgccgcgctcctccgcatcgccaatatcgccgacctctcccacctcccagaccacctcctcatcgacctcttccgtagaaccctcagtgctggtaagctgacagagaaagttctcaagttgtttctagcaaccgactgtgaggatatcatattggctgttcggttgctcaacattaagcagccactcaagatgcctttggaaattcaagatagtgaggttgacatagtgattgcggcactccagcccaacctgaccactttctttgaggcatggcgaccatttttctcccgtttccacatcattgtcgtcaaagatccagacatggcagaggatcttcaaatccctgcaggttttgatctcaaggtttacaccaagtcagatattaatgggttgcttggtgcctcctcatccataaacttatctggtcactcatgccgttactttgggtatcttgtctcacgcaagaagtatgtgatttcaattgatgacaattgcctcccagcgaaggacactgctgggtcgactgttgatgttgttgcacagcacatggccaatctgaaaacacctgctacacctttctttttcaacacactctatgatccatacaggaaaggtgctgactttgtccgtggttacccattcagcctgcgcgagggggttgagtgcatgctctcgtgtggtttgtggcttcataatgctgactacgacccgatgactcatgttgtgaagagaaatcaacggaacacaacatatgtggatgctgtgatgacggttccgcttggtgccatgctgcctgtgagcgggataaatgttgcattcaaccgcgatgtgctggggcctgctatgttcccaggcctgcgtctacgaaacgaagggaagcacagatgggatacccttgaagacatatggaatggcttatgtgctaaagtagtctgcgacagcttgggatatggtgtgaagaccggactgccttatgtgatgagaagtgatgcagaagcaggtaaagctctggagagcttgaaagagtgggaaggggtaaaagtcatggatgatgttctcccattcttccagtcgctcaagctatcgaggactgcagttactgttgacgattgtgttaaggagcttgctggagttgtccgtgagaagctaggacctaagaatgcaatcttcaccaaagcagccgatgccatggtggaatggaacaatctctggaaagtgcatggtgctcagaatgcatag

SEQ ID NO: 16259 - DNA, 447 bp, Zea mays
  Peptide Sequence Number=SeqID_58038
atggcgctgaaggaggagcctgagggcagccgtcgcggcttcgtcggcagtgggccgagctgtgaccctgggctggagatccaagtcccctcagatccgttccttctctggattaggaaggagagcctcaacgtgggggatcacatctactcctggaaggcgacttgttttttgagttttcaggttgtggatgctaaagttattcatctgggctataacaatagctgcatatttttgtcacttaaagatgtaaaggtgatggtggagacaacacttggcaaagaagagttgaaagaggcagttttgatgtgcactaatagggtttcacaagctgagggaatgaaggttgacatatccacgaggttctcatatgaagaactttccggtgctataaacaacttcagtatggaccataaaattgggcatgacgattttggctttgtttag

SEQ ID NO: 16260 - DNA, 1860 bp, Zea mays
  Peptide Sequence Number=SeqID_58039
atggcctcgcatcgccggccacagtcggcggggctaagcagcggcctcccggtcccggagcaagaggctgcgggcggtggcggaggaggagcggcggaggcgacacggaggcccagagggtggcgagccgtcgccttcatcatcgggttctacgcggcagcatctatagcgggcaatgccttctccttctccctcaccagctacctcatcggccgctacaacatgaagcagaacgccgctaccaacgtcaacaacatcttctccggcacgtacaacttctcgcccgtcatcggagccttcgtcgccgacgccttctggggaaggttcaggaccctgctagttgggaccgtgttcggagttgctgcaatggcagttatcaccctgtcggcgactgtccatcagcttaaaccgccgccgtgcagcccactggcacagcaggccggcacgtgtgccgccccgtcggcgctccagcgagccgtgctctacctcggcatggggctgctcgtggtgtccgccggcggcacgagcccgactggcctgcccttcggcgcggaccagttcgacgagaggaaagagcagcacagtaagcagggaggcctcgcgcgcttctacaactggtactacgccgtcgccatggtggccacgttcctggcgctcaccgtcgtgctatacgtccaggtcaaggtgagctggggcctcggcttcgccatccccaccgcgctcatgctcatcgccttcctcgtgttcctcgtcggcaccaagctgtacgtctacgtgccgcccgagggcagcatcttctcgagtgtcgctcgggtcttcgtcgcgtcgtgccgcaagtggaggctccggctgccgcaccctgacgatgcacggcgccaggaggagctcctgtacgaccctcccgccgttggcatcggcggcgggcgccgcgtgttcaagctccccctcaccctgcagctcagctttctaaacaaggcggccatcgtgaccgacgccgccgccgagatacggcccgacggcgccccggccaggccgtggagcctgtgcagcgtgcagcaggtggaggaggccaagtgcctcctgaagatcatccccgtgtggatctccggcaccgtgtggttcaccatggtgacggagcttacaaactacacgttcctccaggcgtcgaccatggacctccacatggggaagcacttcaccgtcccgccggcgtcgatcgtcgccgtgttctacctcgccgtcgcgctattcgtgcccgtctacgacctgctcgtctctcgcgccacgctgcgtcgcggcatcaccctgctccagaggcagggcgccgggctggtggtcgccgcgctggcgttcgtggtcgcggccgccgtggagccgaggcggaggcgctccgcgcttgcgcacggcgacggcatgtccccgctgtccgtgttcctcctagcgccgcagctcgccgtgatgggcgtgtcgggtgggttcaccctggtgggacaggtcgagttctacaacacgcagttcccagagcagatgcgcactctcgccaacgcggtcttctactgcgcgcagggcatcagcagctaccttgccacactcgtggtcaacatcgtcaacgccaggacgaggcgacacggtgggtctgcgggctgggtcaccgacgacatcaacgctgggaggatcgactacttctactatgccatggcggtgctctctggagccaacttcgtctactttctcgtgtgctcgtacttctaccagtacaagggcgagcaggccgctgatactcctcctgctagatgtgaacctgcaacggacagtgatagtagaacaagcgagagtgccgccgctctcctaaggacgtag

SEQ ID NO: 16261 - DNA, 333 bp, Zea mays
  Peptide Sequence Number=SeqID_58040
atggggaggctcatcaagcggcccatggagcgtttttgtgctctcgtccgaggttggtcttggggcgagtcacgactgtctctcccgcccgaggttagcctcgggcgagtcgacactttgtctcccgccgatattgacctcgagcgagccgtgactacgtcttccaccgaggttggcctcgggcgaatcgtaactgcctctcccgtccaaggctggtcttgggcggatcagaactgtatctcttgtccgaggttggtctcggacgagtcggaacagcgtctcctgtccgaggttggacttgccgagtcggaactgtgtttcttgtgctcataa

SEQ ID NO: 16262 - DNA, 174 bp, Zea mays
  Peptide Sequence Number=SeqID_58041
atggctgacatgcgagcgcgcgggtctgacgggatccggcgaggacagggcgcggctcaggcctacgcgcgggcaggcgaaccggggcgagctgtgacggtggcctcccctaggcgcgagcagcatcggatcccagaggagcatgcagtgggcaacgactcccttagggcgtga

SEQ ID NO: 16263 - DNA, 177 bp, Zea mays
  Peptide Sequence Number=SeqID_58042
atgggcaacggctgcccagcatccgatgatgcagagcccgccctcgctgcctccgccgacccgtcctcccgcctccactatggcagcttgtccctcaaagccgacgcctcagcaggctcagctcccaggcccaccaagccgcctgcgcccattggcccaggaggaaaagcagggtag

SEQ ID NO: 16264 - DNA, 195 bp, Zea mays
  Peptide Sequence Number=SeqID_58043
atggcctccaccgtgcggcgcctccgcgggcgctggtgtgtcgccgtgggtagatgcagagatgctaccatcgctccgatcgccgtgcgctgggcggaggaaatccagcgagctcccagggcggagctctgcttcgtcgccgccctgctgattggggaagaagagagggttgggggaaattcgcgcgagccgtag

SEQ ID NO: 16265 - DNA, 654 bp, Zea mays
  Peptide Sequence Number=SeqID_58044
atggatcttgccaacgggcgggacgacgcccagaaaggaggcgtcggtgtggagacaaggaggaaaaagaaggtggagcttgtgcaggattccatccatggcttcctggaggagaagtggagcgatggcaagggagaagagaagcgcttgacgtccaggcaggaggagcaggagctcctgtcgtcgttgctaaccaagttgggtgaagtagaaaacgacgcagattcggacatgttggaaccaaacttgccccacctggatcaccaggctgcagggaaaggcgaacacagcaaggaggtggagctagctgacatcgccaaggaactgaacaagatcaagaggcagaacaaggtcacccacctactcctcggcaccgtcatcgtcctgacggccgtgtggcaggtcaacgaggtgtccttcctcctctgggtgcggaacaagctgagcaacccattcaagtcgctgggagacatgatcaagggctccctcaagctaagaggtaggaggccggtgctcgagtcgtcgccattgccgctggcaggcgtccccgatgtcagccggcctgacctgccaacgcttgtcatcggcagcaccgaagacagggcaggggtcagcttggttagaagtgaattgaagggtatcgagggtgattaa

SEQ ID NO: 16266 - DNA, 174 bp, Zea mays
  Peptide Sequence Number=SeqID_58045
atggagcaaacgcagccggagacgcagggaggcgagattggagagagagctggcgagattggaggagtgaggcaacagccgcattggaaagagtgttacgcagtatctattgagagaatagccttaggaaatgtacaacctcgctcggtttttcgaagtagaagtgacggctaa

SEQ ID NO: 16267 - DNA, 615 bp, Zea mays
  Peptide Sequence Number=SeqID_58046
atggcttggagaaaaccccaaaagaacaagaagacaccaccgaaggaaaacattgaggtaactcttgagacattgctttctgattgttctaattatgcttcatggtctactaaggtgataaatgcttttagaaccgttgacccgcaattagaacaaattacagacaagagtattaaacccaaaggatcgacgacgtccattgcgggtgacgttggttcgttactgagaggcatgaaggagttgacaactcgagcccacacgtcggtcgagtcttgttgttcatcatccaagttagggacatgtggtcaaaacagatttgtaggtaacaacttagtaggtagagcatatggctcagcaggtggttgtcttcaattcctaaaggtcactttagggataggatttcaaagtgtgaaatcctctttcgtctttagaagtgaaaaggtaccaaaggttcacaataagccaataaaaagatcaagagaaagagttcaaacaaaggagcaaagggacaaccgaaggcaccctggtcgggcgcaccggacagtgtctggtgcaccaggggactccaagctaaacttcgcaccttcgggaaaactcggagccgccgcgctataa

SEQ ID NO: 16268 - DNA, 438 bp, Zea mays
  Peptide Sequence Number=SeqID_58047
atgaggcttgatcccggcaacaggcacaccacggtggagaagaagatcacgatgacaaattcccatggtctcgagttgtcgcagtcctcggggttgcccaagatacctccacagtgctcccacaaagccctccaagtaccccccaaggcgactattgcatgtagacgcgaatcccgtgtggcggcactctccccttttgctcttggctcgtcacagcggtcttactggcgttggttggagatggcgtggcgagcgcggccgagtgacttgccccattatatagccgcgagggtaacaacccacgatcaaccgatgctggatctccggcacaaacctcgacgatggaagcggtacgctctgctgagcaccggtcgtggcggtggggctaatgggaatggcccacggccagagagatctgggtttacggggcacaattag

SEQ ID NO: 16269 - DNA, 165 bp, Zea mays
  Peptide Sequence Number=SeqID_58048
atggcttttcagacgggggatttctataatgcgatccctagaaactatagcagcgcacatatgaaacgcacccggctttatcctttaaatccagcgcaacttcttgtaatgcgacaaaacttactatttgctctgcaaaacacatgtgagcctattgctgagtga

SEQ ID NO: 16270 - DNA, 186 bp, Zea mays
  Peptide Sequence Number=SeqID_58049
atggataatatcgatgaggtgaccgacaagagactgatggctttgagggagattgagaaagacaagatcatggttgtcaaggcctacaacaagaagacgactatacgttatctgagatgtcatgagtggcctaccgaccctgaagcactcttggaactctcctccccgacgggagacaagatatag

SEQ ID NO: 16271 - DNA, 237 bp, Zea mays
  Peptide Sequence Number=SeqID_58050
atgaggcaagtatgtcactcgttggggaagagggaggacttgtcgaaggcggaagcaacaagtccctcatcgtcggtgttgggggccttcggcttccgaaggtatcttcggactcgtatcagagagggagaagctcaaaagatacgaaggttgacacagcgccgaagctgtgaagcaggaaagcttcggcatgttcgcagaaaagggaaccgacttgaagatgaaaaggccatttag

SEQ ID NO: 16272 - DNA, 309 bp, Zea mays
  Peptide Sequence Number=SeqID_58051
atgggcaaaggcaagaggggcaagggatggcctcaccgtgccgacggcaagcgcaagcgtcctacaagtccaccctcagagtactttggagacctcctcgaaggaggtggatcctccaactccgaggagtggagaggcggcgacggcgacggcaagggcggcagtgatggtgaagatggcgacggcgagggcgacggaaacagcaagggcgacggcgacgacagtagcaagggcgacggcaagggcgatgacgactgcaagggcgacggcgacgacaacaaggccaacaacataacgtcgctggcgtaa

SEQ ID NO: 16273 - DNA, 240 bp, Zea mays
  Peptide Sequence Number=SeqID_58052
atggcggcagcggtaacctccctccttggcggctctcggcgaggaattcaggaagaggtgctggcgaggatgggtgaggggtctacgatttgtagccgcggaagtcggttgcatggccagctggtctggcagagattacgacgctcggttacagcgcccgcacgagttgctcagcgcatcgagccgaagaggagggctgaccgcacaggaccacaaaccagtgagggcgggcaagattaa

SEQ ID NO: 16274 - DNA, 405 bp, Zea mays
  Peptide Sequence Number=SeqID_58053
atgtgcaagggcagaaggttggggaggaagaacagggcgaaggtgaaaggtcgggaagatgaatgggacgtccgacgatggtgcgcgcatgctgtgaaacgtcctcgtggacgtgccatatccactgaccgggtcgatgtcgtagctggtgtcgaacgaatacggggaggaggcgactgctcccacgccctctgtcgtgaatggggtggcgggaggcggaggcatgaggggagagagaaaagatgcaggatggcgaacgaggtggcggcaactgaggcgaggaccatcattatcgtgcggagctcgggggttacacccaatggctgcaccttcggtgcacccaacggagtcatgaaatctcaagaaaaaacgatgaactcaaaagcgagtggtgaagacctttga

SEQ ID NO: 16275 - DNA, 1281 bp, Zea mays
  Peptide Sequence Number=SeqID_58054
atggcgaccccgctccgcgccaccgcggtcctcgcgtggggttccggggaggacgggcagctgggcatgggcgggaacgaggagaaggactggccccacttcgttgaggcgctggggccctacgccgtcaccgccgtcgtcgccggcagccgcaactccctcgccatctgcgacgacggccgcctgttcacatggggatggaaccaacgcggcacgctcgggcacccgccggagaccaagacggagagctccccgggccccgtcgacgctctcgcgggtttcaagatcgtccaggcggcgattggcgggtggcattgcctcgcagttgacgacaaggggcgcgcctacgcctggggtggaaacgagtacgggcagtgtggtgaggagcctgagaggaaggaggacgggacgagggcgctcaggagggacatcccgatcccgcagcggtgcgcgctcaagctcaaagtccggcaagtagccgctggagggacacattcagtagttttgactcaagaaggtcacgtctggacatggggacagccatggcctccgggccttgagaaagtgagggtcattgctgtaggtgcattccataatttggcactaacggaggatgtaattttgtgggcatggggtaataatgagtatggtcagctggggactggagatacccaaccaagatcacaaccgatacgtgtcgaagggctatctgatctctcactggttgacattgctgctggaggctggcattcaactgcactaactatagatggagaggtgtatgcttgggggagaggagagcacgggaggcttggatttggagatgataagagtagtcacatggtgcccctaaaggttgagcttctagctggagaggatattgttcagttgaacagttttcaagcctttcctatggccctgaagcggttgaacattttacttagccaagctgagcagcagagctcattttccatgtttgcaggtttcactaaccccagttcagacattatttatgtgtaccacgttttcgcattgcacatagttctatcaagttttgccgcgcatatcaatggcgagtcccttttctgttggcagtacgggaggggcgaccatggccgtctaggctacggcaggaaggtgacgacgggccaccccatggaattgcccatcaacctgccgccgctcagcagcagccgcgacggtcggtggcaggcgaaatacgtggcttgtggcgggcggcacaccctcgctattgcggagtggacagaggccactgattga

SEQ ID NO: 16276 - DNA, 348 bp, Zea mays
  Peptide Sequence Number=SeqID_58055
atggggcagaagtcgtcgtacctcctgctgctcgtcggcctcctcgccatcgccatgctctgcgccggcccgggtcacgcgctgagccaactgaacgacgccaacgacggtggcctggagttctccttgggctccaaggaagccatggcgggggccaagaccgagccgctggacccgtccctgagcgaagactacgaggtttgtgcggttatgggttatggggatggctggtttgtggctggtgggggcaggatggctatggcgttgcgctggggctgcgcgttgtggtctggggcaggttgtgattctgaaggaataggaggtacgactgcaatcgtcctgttttga

SEQ ID NO: 16277 - DNA, 282 bp, Zea mays
  Peptide Sequence Number=SeqID_58056
atggcgccccgcaagccctgtgacgacggcggctctcagctcccttacggaagcagggggacgtcagcaaggactcaaccgctccgacagctgtccctccgccagggagatggcaaatgcactagggcttgccttgatgaggagcagagtcatgctcttctactaggatattgcagctggcagcaaaccctacttggggaccttctgaacgaccttcaggatcaccttcagttggagaaaccccagattgaggagctgactcctcttccacttccactttaa

SEQ ID NO: 16278 - DNA, 1071 bp, Zea mays
  Peptide Sequence Number=SeqID_58057
atggatcacagtaagagtctagctctagagtcctctcaccaaggtcggtccaagcgccgcccgttgcaggaatggtgggtagtgaccaagcactcagtcgactcccgctcccccattgtattggtgactaactttcctcatagggtggtgggcttaagtgtcggaggagaggtcatatcgctttcatcttcttgttcaccggacagggagtcgaaggctggcccttatggcgacaaacctgcatcgttggttccgccggccggcaccatcggcaccccggtcattgtcggttgttccgtgatggtcgtgaggttggttttcactggccccaacctgggcaccccatacgtggtcttcgagaacattatacaggggtatgacgaggccgcctgcgaggggtatctgggtgttgagcccaacctcaccttatggcggtacttcttctgcgtcgagctgttgcgaaagagggaggagcaaaggctccctgtcatcgaccggagcactccgtctgaggcaccctttaattggagctccgatgctacacccaaggagaaaactcgaatccaaagccatctgtcgggggtgctcttccaccgagaaaaaggcgtcatagaagtggacgtcattggagcctaccttcaacgaagggatggctcctctgaaggtttgatatatgccctatacaagatggggaaggatttttcatcattgggtgtcgaggtccttccaagcgactcagacgttgctcgatggatgagacaagctttggaaatatggaaagaggtgcagggggcggcgtggccatccttgcctatagccctcgagtgcccaccgatgcggcctgagccgagcttcatcgaatttgcgctgtcggggactgccgtccccactgtacatccctcgttggcggcccgagagcctaccgtgatgggtgtagttgaagtcaggccagtagggtctgagttcggccaaccggcgtggcctgagcatctaaaggtcaagacgaatgatggcctcccaacggcccatctaggtctcgaggagacacggtcgccatgcggtcgtgtctag

SEQ ID NO: 16279 - DNA, 321 bp, Zea mays
  Peptide Sequence Number=SeqID_58058
atgcagcctgggggcaagataggaaaggttgttggccatctagaccatgtctgcaatatgctcgagaagacttctattgtttgccaacaagatttggataataggtatcctagttgggaccttttatcccctttggatgttgatgagcaccctaatgacgttgatgacctattgaaaggatacatctcagaagatccggagttgtgcgaaatgacgtttgaggaccagaagtggcaggataataaagtggtcgtctccttggctgagcattatcgtattatgggttacaattacgaagagatttatgatagtaatgtttga

SEQ ID NO: 16280 - DNA, 321 bp, Zea mays
  Peptide Sequence Number=SeqID_58059
atggtgacgccgaaggaggtccctgtggagcttcaccaccttcgtgtcgagaatggagtgatcttcgaagatagttctgaagagattttggaaacacccactacgttgtcagaatcggatgcctttgctgcgggagcttcatcttcagcaccacatgtaccagcagctcaagcctcggctcctggaggtgatgactcggatgattccggtgatgatgaagacgatgaggaagaagaagaagaaaataatgacaacattgaggatgccaacattggacaagaagacaactttgatggattacggactgtcgcagaacattag

SEQ ID NO: 16281 - DNA, 336 bp, Zea mays
  Peptide Sequence Number=SeqID_58060
atgcctagaattattttggtgccgacgctaataacagtttcagaattttccctttgcataattgtagtttcagaatcacagtttcacatccatttttttaaaaaaggatcgttaatactaatatctttgtgcagtgtagttcatcagttcaaaaggcagtttgcacatcttgaggagcatcatagtgagaaggagaaagaggttctacactgcaaagagagcatgcttctttaccaaggtacaacagccataaaactgaatattatttggctagaacctgaaatggcggaaactctcaggaatcatggtgcaaccgtgcatagatcacttgtctaa

SEQ ID NO: 16282 - DNA, 306 bp, Zea mays
  Peptide Sequence Number=SeqID_58061
atgcatcttcccccgcgtcctcgtggagagagccagacaagtgttgttccaggtgaagctggagaagatcgcctcaacacccttgtaggtgtggtggcaggtcttaacactgatctggacagtgctaccctggacctctcaagggtacatgaagaacttgaagatacacatgctaggattgcagcccatgaagctcagttcgaaggaagaaatccacccgaacctcaagtccctgccatagctgtgtccccgccccgcaagcgcattcgctatggagccccaggatctattaccagactactctag

SEQ ID NO: 16283 - DNA, 417 bp, Zea mays
  Peptide Sequence Number=SeqID_58062
atggaggagaggccatcgcccgaggcaagcgcgggcaactcgagggccgaggatgacttcaggagctgctgcggggacgaggaagagtgggaggacacggaggagtcgttcacggccggcgtcgccaagggggagctggacgaggcctcggtgcgcctcttcttcaagggcgtgtcgagccctgaggcggaggggaagaaactgtctagcatcggagtcagaatcgtccccggggtgcctgttctgcctcggtccccaccatcaacgcccgcggatccgcccccgccatcctccccaccgcccgtcatggaaggcgttgcggatccaccgtgcccctgccctggcgcctccggcctccacctgcgcgtccgcgcccgagccctgaaatctcgcatccacatcaatggaaggtggtga

SEQ ID NO: 16284 - DNA, 180 bp, Zea mays
  Peptide Sequence Number=SeqID_58063
atgtactacgacgtggttaatggcctgaggcatggcataacagcggtgaaggatgcaaactccagtgacggccgcaaggccacgtcaccggtgcaagtggtcgagggacagcgaggccatagaggtgaagctggtaacatggaggaccttgaggagttccaggactacgacgagttctag

SEQ ID NO: 16285 - DNA, 324 bp, Zea mays
  Peptide Sequence Number=SeqID_58064
atggaggaagaagaaagcgatccaagcgacaagaactcaaatgaacacgaaaatctctctctcacaggggggtgcagtggcttcggcgtcctccatgatgtgatgctggacatcccgtgccttcgcgtccctcgaaagggagtctacgccataagtcatcttgagagtttcgccaggtcacagggtgccatgggtggcacgattgcggttgttccatctctgcctcctacgacgagaagggcggtgacaggtgctcggacgctccagagggacaggtgggaggagtatcatgtcatactcaatgccgagcgacatgaactctag

SEQ ID NO: 16286 - DNA, 816 bp, Zea mays
  Peptide Sequence Number=SeqID_58065
atgaggacggccgccgccacggtgccagctgcccctgcgcttggcgttggcctccagtcccaactcccaatcgcagcagcagcaggcaaggaaggcccagcgctgctggcttctacagatgccaagagaattattgacgaagaaagagctaatgctcggttggagataggaagggctaaagcttctgtacaaaaaattcaatcagcacttaaagagcaggaaaaattttctcacagaactgggaagcaggatgtcgatgaactaaaagaagaagttcaagaagcaccaagagtgaaaatgttgcattgcccaagcaaggcaatggacattgagaacgagatccaagttctgtgtgatcaactggctaaaacatcttcatattctcttcgccttttgaaagtgatttctggaacagttcaatccagtggtttcgcatacagcctgaaggaagcaagaaagaaattatttgaggttgaacaattctcatcctacaaagcaccacaaaaccagcatatgctccagaaccacatgatgtgggccggtacacccaagctgaagtcaaatctggtggccaaacatcaatcacaaaaactgctggttcagtacatcctgttcttcagtttcgtagctgcaggattggttcattatgtagaggctcttgtaaggcgaagagaaactggttatgatgtagtcattcttcaagtgaatggagttgctcaggctgcagactctgttcacattctttgcatcgggagattgcagatgagacttgctaaagaaaagacgatcatcgtgaaggagttctattccacgtag

SEQ ID NO: 16287 - DNA, 504 bp, Zea mays
  Peptide Sequence Number=SeqID_58066
atgtcgcgaccgtcacctggctggcctcagccgtgcctgtccacggcgaccgggcggttggccaccgagctcttgcgtcgcgggccgagggaggaacggcggctgggcgtgattcgagctcctaggggcttggaacgtgcgtcgcgagaggaggttagggatggtggagtccatctggtggggccaggcggcgctggcagccacccacgagcgctctgggcgcggcaaggtccacggcgcgggacttggggcggcgtgcgtgcagttggcggctgggctgggagcggcgctagggttggggcgcgatgggcctcaggcgcgcggcacgctaggaggagcgctggccgagtgggccgcgcgctaggtgggccgcggggaggaggctgggcgctcgcagcgtgggccgcgcaggaaaaaggcgagttgggcctgggggaaaaggaggggggcgcagggggcagctgggccggggaagctgggccgccgggaaagagggggggctga

SEQ ID NO: 16288 - DNA, 444 bp, Zea mays
  Peptide Sequence Number=SeqID_58067
atgacgagggcctcagaagccctgtctcccttggcaagcgacttgcgcgacacagccggaagtctcagcgacctccgactcgacccaccacaggagaaccatgggtcgcagggcttgccatcaccagatcatactgaggtagtgggagtactggaccatgtttgggacttgttcatggatatcctcttgtcagggtcagaagacgggctcacattcctacctagcgaggcaagttgcgaccctggtcaggaatgcctcacaatcaataccaccagagatcacttcccctgtgtggggagcccaggtcagaactcgcccaacatcatggagcacatcatggtgtctgccccgcctcagctcaacctccctccccagaagctgtcgtcaggctcgagcctctcggggagcgaacatccccccacggcaaaaggcaaggatgcctaa

SEQ ID NO: 16289 - DNA, 1149 bp, Zea mays
  Peptide Sequence Number=SeqID_58068
atgccgtgctcgtcgccggccccgacatggctgctgcgagtgtcgccagcggctgccgcggccgaccaggccgccgcctcgtcctcgtgctcatccaagggcggaggccgcgtgctcacggccggtaccaccaccatggacacggccgccaccgctgccgccggcggcaatgccgccgacctccaggagagcagcagcagcggccagtcccggctcgcggcgcgcggccactggcgcccagcggaggacgccaagctccgtgagctcgtcgcgctgtacgggccccagaactggaacctcatcgccgagaagctggacggcagatccgggaagagctgccgcctccgctggttcaaccagctagacccccggatcagcaagcgccccttcagcgacgaggaggaggagcgcctgatggctgcgcaccgcttctacggcaacaagtgggccatgatcgcgcgcctcttccccggccgcacggacaacgccgtgaagaaccactggcacgtcatcatggcgcgcaagtaccgcgagcagtccacggcctaccgccgccgcaagctcaaccaggcagtccagcggaagctcgaggcagcctccgccgcggtcgcaatgccgccgggcgcgggcgcgggagacgtcgccgtcggccagcaccaccacctgctggccgccgccgcggcggcccacgcccacgacgccgcctacagcttcgccgcggacccctacggcttcggcatccgccaccaatactgcaccttcccgttcccgccaggcgccgcttcggctgaggacccgccgccgccaacgcaaatacatcccttctgcttgttccctgggcccagcagcgcggcggcgcacgccgacagcaggcgccttccctggccgccgtcgtcggacgcgcccggcgtcgcccggtacggggagccgcatcagctcctgcagctgcccgttcaaagcggctggatcgacggcgtcggcgtggccgcggccggccaccacgagccgcccttcgtcttgggcaacaacgggggcgcggccgcctttgaagggacgacaagacagcagggctccggcgctcactttgaagctgccgcggcgccgccgccgccagcgttcatagatttcctcggggtcggagccacatga

SEQ ID NO: 16290 - DNA, 732 bp, Zea mays
  Peptide Sequence Number=SeqID_58069
atggcgccccgcacgctcccaaacgacggtggctctcggcccccttacggaagcaagaggacgtcaacaaggactcgacagccccgacagctgtccttccgccaggctccgacgctcctacgacggccacgacaccacacgaaccgggccgggccgccgctcccgcgccttgaccgggatcgcggccagatccgcctcaccgcgctgccacaggcccacgcgttggggccgctgccgacgcgccgccgagaggcccgcatgtggggtcgcgtgacgccgtgcgctcgcgcagggcagcagcgccctggccgagccgtcggggccacgacgggccaccggcctatgctgagtcgcgtgcctagccggttgagcaaaccaggccgaccgctggggctacgtgcctgtcctgcccgtgtgtcgcacctgtgcgcccgagcccgcgcgtcgtcgagcccgcgcgccggggggccgcacgcccgtaccccgtcgtggccgctgcacccgcaacaggcagccgtgccgccgagccgggggccgcgcgccgacgctcgtgcaccgaacagccgagggcgctgcgggcccgcgccgggcaagcggaacggcgtcaaggggctgcttgctcgctctaccgcgtggcctcgcgcctgggcctccacgccgccgaccggggctgctggggcctcgccctcgcgccgtcgggggctggccgctgccaggaagaaagggaaaatg

SEQ ID NO: 16291 - DNA, 2286 bp, Zea mays
  Peptide Sequence Number=SeqID_58070
atgagcgtttcaacgtttcgtcgttttaataaccatgctaagttcgatgatcgtcaaaaactcaagctgtgcagcatcaataaccttctcagattcaacaatgtcaaataccttgtttgccttatttttgtcaatccttctccttgtggagcacttgttcatctttgtggacatcaacctatctcattcacaacacttacaataaatgttgtgcgtgaaaatcaagtggttgtggttgttggtgaaactggttctgggaagactactcaactgactcagtatctgcatgaggatggatatactaccacaggagttgttggttgtacccaaccaaggcgtgtggctgccatgagtgttgctaagcgagtcagcgaggaaatggagactgatctgggagataaagtcggatatgccatacggtttgaggatgtcactggtccaaacactataataaagtatatgacagatggagtgcttctccgtgaaaccttgaaagatgctgacctcgacaaatatcgtgttgttgtcatggatgaagcacatgaaagatcactcaacactgatgttttgtttggtatactgaagaaggttgttgcacgtagacgggattttaaactaatcgttacatctgcaaccctaaatgctgacaagttctccaagttcttcggaggtaactcctttgtttgcagtgtgcctgtattccatattccgggtcggactttcccagttaacattatgttcagcaaaacaccatgtgaggactatgtggaagctgcagtgaagcaggccatgactatccacataaccagcggccttggtgatatcctaatcttcatgactgggcaggaagaaattgaggctacctgctatgcgcttgctgaacgcatggaacagttaatatcgtcatccaccaagactatccccaagctagagattctgcccatctactcacagttgcctgctgacttgcaagccaagatttttcagaaggctgaagagggcgctcgcaagtgtattgttgctaccaatattgctgagacctcattaacagttgatggtatcttctatgtcattgataccgggtatgggaagatgaaggtgtacaacccgcggatgggtatggacgccctccaggttttcccagtcagccgggcagctgccgaccagcgtgcaggtcgggcaggaagaactggccctggcacatgctacagattgttcacagaatcagcctaccagaatgagatgctccctaaccctgtgccagagatccaaaggactaacctggggaatgtggtgcttttactgaaatccctcagagttgaaaacttgctcgactttgactttatggacccaccgccccaggagaatatcctcaactcaatgtaccaactctgggtgttaggtgcattgaacaatgttggtggccttacagaaattggctggaagatggtggagttcccgttggatccaactctggcaaaaatgcttcttatgggggagcagctagagtgccttgatgaggtgctgaccattgtatccatgctatcagtgccgtcagtcttcttccggccaaaagaccgagcagaggagagtgacgcagcaagggagaaattctttgtcccagagtctgaccacctgacactcctgaacgtgtatcttcagtggaagtcgaatcagtatcgaggcgattggtgcaacgaccacttcctccatgtcaagggtctccgcaaggctcgtgaggtgagatctcagctgctggacatactgaaaaccctgaagatccccctgacatcatgccatatggaatgggacgtggtgaggaaggctatctgctctgcgtacttccacaattccgcccggttgaagggtattggggagtacgtcaactgccggaatgggatgccgtgccacctgcaccccagcagtgcgctatatggccttggctacactcctgactatgtcgtctaccatgagcttgtcctgaccaccaaggagtacatgcagtgcgtcaccgcagttgatccacagtggctagcggagatggggcccatgttcttctctgtgaaggagacagacacctctcttcttgaccacaagaagaggcagaaggaagagaagacggcgatggaggaggagatggagaagctgaggcggcagcaagcagaggccgcgcgcatggagaaggagaaggaacgggagaagagagctaagcagcagcaacaggttgctatgcccggcctgaagaagggtgcgacttatctgaggcccaagagaatgggtctgtag

SEQ ID NO: 16292 - DNA, 252 bp, Zea mays
  Peptide Sequence Number=SeqID_58071
atgaagaagactgttgatattgacaacagtcaacagccactttctgaagggcctggagaacttgtgccaaaacacacaacagcaaagaaggagatcgccaaacttctcggacggctcctcgtctccaccacgccctcctcgttggacgctgactatgtgtcctcatccctggtccttgtcaatttcgtcgatagttgcatccacggcctagccctccccttcgctgacgtgctccgcttcccaggaacctag

SEQ ID NO: 16293 - DNA, 1869 bp, Zea mays
  Peptide Sequence Number=SeqID_58072
atgccaccgaaaagaggtgctgctggcacccgctgcaccacctctgctgcccatggcgccaccgagtttgccaccggcagccgatccgtcgcgggccaatccgccgcccagttcgtcgttgaagctgccacccagttggccgcccaagccaccaccccaaccatcgccctcgttcttagatatgcttcaaaggacaaaatggaccttgcacctcagggtttgataacacagcaacaaaaggcaaatgagcgaaggccagttggtagctcacaaatttggacacggtatggtgttctgcttccaagccagcagactcgaaagctaaaagaatggattctgactgatgagcagcaacagcttgttaatgctagtggtcttggacatctggcacttaccactgggtttaccattgaccgttctttgctgacatctttttgtgaaagatggaataatgaaacaaatactgcacatttcatgggatttgagattgcgccttcacttcgtgatgtttcatatattcttggcattccagtgactggtcatgtggtgaccgcagagccaattggtgatgaagctgtgaagcggatgtgcttgcattatttaggagagagccctggaaatggagagcaactgtgtggcttaattaggctgacttggttgtataggaattttcatcaactacctgaacatccaaccatcaataagattgcatatagcacccgagcttaccttctataccttgttggttccaccttgtttcctgacaccatgaggggatttgtatccccaagatatctaccactgttggcagattttgggaagatccgtgagtatgcttggggggctgcagcccttgctcatttgtataggggattgtctgttgcagtaacacctaatgccacaacacagtttctcggcagtgcaactttgctcatggtcaactggaacccttacaaggacatgaatccagcaattgttccggaatattgcattgcagcagataacatctgctactctcgtacttggctaatcagctttaacataaaggaggcgtatgtgcctgacaggtttgctaggcagttcgggagggaacaaggacgcctccatggtgtgccaatgtggacaagaagaacttggagtaagtggaaagactggaggactgagtatgctcgtgagattgaggagttccatcaattggttggctgccatttcacccctcctgcggaaaccaatatcaactcctttccactacatgagtctagtgctggacagaatgatgcaggatgcagtctgaatatctctcataatttttctgcaatggttgaagatttgaaaaatgatctcccagtaattggtcgatatcttgagggaaacttgcttccttcagatgttgcaagcttcctagagagggtgagcacgatgatcaagagttataccccaccacagggcagccgaaggaaagatcgagtaagtcatggccccgctgacccagtcaggtcaaagaacccaagaaaaaggggaagacattcactctttcaagattcttttcctcatcggtatctaggcaccccggtaaacatagtgtttgatggcaccattcctctactaaatgggggtgaggcattgaaggaacaagtggccatggatccctggcgggtctcccagtcccatttgacgatgaccacatcttcttcatctctagactcaagctcaccagaatcaatgaagcggaggcgggaaggtggggatgaaattccaatcacaagggacactgattgcctccaaagtggaaggctctgtgtgcagctgaaaatgttcaagcacagagatggagtgaatgccgaggcagctaatccgattttccgctga

SEQ ID NO: 16294 - DNA, 138 bp, Zea mays
  Peptide Sequence Number=SeqID_58073
atggccgtttctgatctggacccgggagccagcgagtttggacgcgcgcgcacagcgcactggtaccaggcaggcctggccgactgtcttctaggaatagaaggcaaatatgatttttggaagatccttagaaactga

SEQ ID NO: 16295 - DNA, 477 bp, Zea mays
  Peptide Sequence Number=SeqID_58074
atgaagatggaagtggagcttcgggcagtacatgaaatgagagctgagcttgcacaagttcgtatggacattcaaaaccttggtgcaatgaggcaggaactcatgggccaagttcagggattaacacaggatttggctcagtcggcagaagatttgcataaggtgtctgcattacaagctgaaacccaggagatcaaacatgaaacacaacatttgaggtgtcgaggattactaggtgaagctgatttgtctcctgcaggttatattggaagctatgggaaccctaaggccaattatgctgcaaacccttttaactctgggtatggcattaatcaagcaagtgctgccactgattatggttcccagtatggaactggtgcagcgcatggttcttgggtgcctacgacttgcaaagggcacccggacgtagataagtactgccaatttgccaggcctttcaccaaagtgtacacatag

SEQ ID NO: 16296 - DNA, 702 bp, Zea mays
  Peptide Sequence Number=SeqID_58075
atggaggagctgatgcatccatgtgcacctgtaaagcctgcggtacttgacagaaattccgacgatgacccggacgctggccccgacgacaacgacgaggcaccgacgtcgaccagctcgtctgcggccacgggggaccactacgactgcggtgccgcgtggacgacggcgaactacaggctgcagccgcgggtgacgcggtggaaggccaagcggcggcggtggctgcaccagaacccggggttcccgtcccgcgacgcgcgcggcggcccgcgggtgctgctggtcacggcatcgccgcaggggccctgcggcagccccgacggtgaccggttcctgctccgggccaccaagaaacaggctcgactactgccgcctccatggcgtcgatatggtgcacgccacggcgcgactggaggaccccgagctgcggtcgggccggctacggcgacgggtgggcccaagctcgcgctgctgcggcgcctcatgctggcgcacccggaggtggagtggttgtggtggctggacgtcggcgcgctcgtcaccgacatggggttcaagctccccgctggcgcgctacgagggcgcccacctcgtggtgcgcggcgactcgtaccagctcttccagcgtcgggcctgggacgccgccagcaccgccagcttcctgctccgcaactgtcagtggtcactggacctgcttga

SEQ ID NO: 16297 - DNA, 519 bp, Zea mays
  Peptide Sequence Number=SeqID_58076
atggacaatccgatattgatgcaaatgacctgttctcatgagaatgtaattcgatatttcacctcttggtttgagaacgagcaactttatattcagatggaactatgtgatcgttgtgtatctatgaatcagaaccagccactgaagtgtagggaagccctggaactgctgtatcagttcttcaggacagaaccatacgcctatgaaccatcaagcattccacgttattcaccatgcaaagaaagagacatgaagatgaagtatgagaaacataaaaggtttaatgatactctttgcacttattgcaactatttattggcttttgttcatggaaggcttcaacgtgtggttctttttaggaagtctagggtcaatgggtcagtataccgtcacagaaatcggcaacacacatcgcaaaatcttgggtcagttttttctcaagactccagtaataagctgcaagcaaatctaaagcttgtaattaagttagctcctatgatgtgggagcacgtgtgctga

SEQ ID NO: 16298 - DNA, 357 bp, Zea mays
  Peptide Sequence Number=SeqID_58077
atgcagaggtggaggtggtgtggcagatccatgctaaagctggcggggttgtgcgtcgccgttgccatctgcctgtgcggcgttcggtcctgggcttgcagtggcagcggcagcggctgcagggggagtactgtgttgctccgttcaggggtgctacacgactgggcaatggcggcggctgctggcggacggtccggggtcatacccgccacggtgcacgtccaagtgcggcgactgcagcccgtgctacccggtgcacgtggccgtgccgccgggcgtgcctgtcaccaccgaatactacccggaggcgtggaggtgcaagtgcggcaaccggctctacatgccatgagcccatga

SEQ ID NO: 16299 - DNA, 321 bp, Zea mays
  Peptide Sequence Number=SeqID_58078
atgatcagcaaagaatggagtagtaattgttcatcatcattgcatggcaagtccaccgatgtggatggcatgcatggtgaggaagcgaagggtactatgaccggtatcggtatcgaggtcttcgaccgaaattgtcgcaggcattggagcgaagggccacactgtttaagagggggctcgctgcagccccgcgaaggtgcccccttcggctcggacaattctgcacaacgagacagtctcgacgagcttaaaggctcggcttcgtatagtgaaagacgctgcgcacgggcgaaggctacgccgctctatggtggggtctag

SEQ ID NO: 16300 - DNA, 638 bp, Zea mays
  Peptide Sequence Number=SeqID_58079
atggagcaggaagagctagccctagcccgcgcagctgcgtccagaagatacgggcgcggatcggagcgcgtccgcgcgcaaggcaccatcctgtttcgggcgttggtcagcgtcagcagggtgtcctctgtctgctggcgaaatccatccaggcatccagctgctgaacagaacagcgggtggcagtggcaaggcatcgatcggcggcatgctttcgtcgggcctcggatacagacgttcggtgtgcctccagcaatgaccggcgccatcgacgtgtccgtttactaccgcctcgcgtcggagcacaagctgcccgctgcgtacgacgacgcgtgggcagcgctgcggtgggcggtgacgctcggcgaggacctgtggctgctggagcacgccgacctgtccggcgtgttcctggtgggctgcagcgccggcgccaacatcgtgcacgacacggccgtgcgagcctccgccgccggcgtggccatccgcgggctcgccttagtgcccccgtacttcactggtagggaggccatgggcggcgagacggtgttcggccccgagatccggtcgtccatggaccggacttggcgagacgacgttcgtggacgacgcggcgcgcaaggcctccgcgcgtgctg

SEQ ID NO: 16301 - DNA, 522 bp, Zea mays
  Peptide Sequence Number=SeqID_58080
atggcgtacgatggcggagcggcgaagaagagagggggcttaataagggcgtttaatggtgatgctcggggtttaatatttccggaagatgattggaagggggcaaggggcttgattcgtgtgataaagggccaccgccgtcggatggagacgagatggatgaatgggatgatgagtgtttcccggggaacgtgttcgatttccgcaattcacttcacgtgcgcgttctttttttccgttaacaagctgcgtgggagcgaggctgaccgcttttctccggtctcctggaggctggatcgtaaaaaagggctgacccgttctctggcggtagcagtacggcagtacctagaccggactatcgcccagagtaacaacccggcacgcggtggccgtggagaacggaggattggagaactggagccgcgagaagcggaggacaagggctactgggctaggcggcgcgacgagccaacggtggaggtggtgcggtgccacagtggagcagccgttaaagttttctag

SEQ ID NO: 16302 - DNA, 279 bp, Zea mays
  Peptide Sequence Number=SeqID_58081
atgtacaaatacacttgctctattcatagtgcttttgccttgtattatgagagattagcacatccatttggccttgagctgatgttcaggggataccagatggtggtttcttctgttcttttggtgggttacttcaagcttatagaaaatatcctagagaaacacaacttatatccatcattcttcaggtctgcagatgactgcatcttcatgtatgaagggctacctattcctgttttcttcagttatgtaggtatgcatatgactgaagatgactaa

SEQ ID NO: 16303 - DNA, 294 bp, Zea mays
  Peptide Sequence Number=SeqID_58082
atggagaaatcagggagtaggggaggagcaagacgctcggctagacgtgcggctgatggggttgacagagagtatggcaagaacgtaggacatccatggccatgtcgtgaccgagcaaggaccatagtgcaggggtgtctttggccggactcgagatggatcgcaaacgtcggggcgaggtcagggaggaccacggccggcaaggggcacgaagagctcgcagcgaggggcggctggggactggagtcggcggcgccctgcgcagggagaaagcacgcgcggcctagaaggtga

SEQ ID NO: 16304 - DNA, 477 bp, Zea mays
  Peptide Sequence Number=SeqID_58083
atgaagctttccaagcttgagccaagaccctaccccgccggaacaatgagcgcgacctcgccggacttcggccgccagccaccgcacgtagacccggctacgagacgagctcccccgcctacgcacgaggtccgaccaactccgaccatcttcaacgctgacccgcacaccgacgtgaccattgtgacctccccgacgtcgtcgaccacttcatcggagctaaatcgccactgtattatagttcaaatccatcccaaaagcataaatagaaaaggaaaaaggggagaattagtaaaggtgatgaatcttacccataatgacttcagcaagaaccttgttagaatttccactaagagactaaagagtgcaacatcgctgatggagagtacgtgctcattcccgagcaaggagttgtctaagaggaagtccaagagccagcccaagagcctgccaccgaggatcttcccgcagctttag

SEQ ID NO: 16305 - DNA, 600 bp, Zea mays
  Peptide Sequence Number=SeqID_58084
atggccggagctcctcctctgcgcgcccaactcctctgtgcagcgctcctgcaccagctcgcggcgcggccttcagccgagctcatggcgcgcgccggttatggctcagtcgctcctgctgctacacgccgcgcttcgctgatgcacgcggtttgtcggccatgtcccttcactagtggtctcctcgtcgcgtgcactgattgccttgtgttctcggccgtgggccgtcttgccttggccgtgctcggtttcctcagcatcacggcgctcacctttgtgactgcttcagcgtcctcgcagtgcaaaactgtcacagctgcgttctattctgctccaactcacgttcacgccctggatcacgctcgccccagcgctcgtgcttgccctcggctcgcgttgcgctcgtgcttgctctcggctcgcgttggctcacgcaagcctgttcgtcgtctctgcggtgcacgcgctctcgtccatcgagtttcgcacgtgctcgtgtttgccgtcgagccgttgaacccgtttttccctgctcaacctcgtcttcgcccttctagtggctatagtcaatatgatgctggactacgctcttttatctga

SEQ ID NO: 16306 - DNA, 489 bp, Zea mays
  Peptide Sequence Number=SeqID_58085
atggccaagaaggagaagtccaagcgccatccagggagcaggcgctggggcagagaggagcgcggatgggcggaactccggttgggcgcgcgccggcgagggagaagctcggctggggagggtaagcaggggcgtggtcaggcgagcaccaaagacgagccagggaccgcaggaaagggagctcggcggacagccatggaagcagggcaagggcgcggccagcgcgaggagctcggcgcgacgcaggagaaagatggggggagagaagcgcgcgtggaggagagccgctcggcagagaggagaacatcgggagagagcgacgttgggggccgagcgcgggagctggaggcgcgccatgggaggaagacgcacgcgcttgaggaagatgaaggcggccaggtttctctattactcgagcggatgaggctgggcactggaatcggcggcgcccaggaatatcagacgagggaggcggtggagagaaggtaa

SEQ ID NO: 16307 - DNA, 426 bp, Zea mays
  Peptide Sequence Number=SeqID_58086
atgtcgcggacgcgacgtagattgatgacgaggaacaatggggtgtcacaacacacaaagggtgtcatgaagatgtcgggcatcgtctatggcaaacgaccgcaacttcatggtagcttcacggacacggcgaggatgcaaggcgcggcgactgttcttcagtggcaagaagactggaattggatgctggtggtccggacagaggagcgcacggcccaggaagtttcgacggctcggacagcgagggtgctcgacgcgcacagggaaacttcatggcgccgtggagaactcgacggtggcccatgcgcaggaaggagcagaggccgagcaaagagtcggcatgcgcagatgcttgagaggagggagctgggcgcagcgctaggcgctggccagcagagaggcgtgcggcaggggagctcggcatag

SEQ ID NO: 16308 - DNA, 432 bp, Zea mays
  Peptide Sequence Number=SeqID_58087
atggtgaatcggagcctttacggcggcggatcgctcacccaatatctcccctctcaccggcgagacacacacaatgcactggagatgtcaaggcatgttgcaagggctcgcatgtcgacgcaatggcatcacaacgaggtaagtgggccgcacggtggaaattggcatatgggccggaacagagggaaattggcacatgggtcacgccagggggaggggctcaccgggtgggagagcctcgtcggggagaggaagggaggagagagagaaggggaggagagggaggagcttaccacgggctcgacggacgacaacaacctctcttcggtgatccaaacgagggcagggagagaggaggaagagggagaggtcggggctaattctactctactcgatctcgcctgcttttcatcaaattcattccgcgaatag

SEQ ID NO: 16309 - DNA, 642 bp, Zea mays
  Peptide Sequence Number=SeqID_58088
atggggcaggggacacacgcgagcagggggtcgtgcgctgggactgcgccgggggccgtcgcgccggggactgccacgccggggcagggcgccgagatgggcgaggctaggcaggggaggggcaccaccgagggccggggatgggttgcacgggggaagggaagaggctttgccaggtgggggaagtcgcgccgggcgggggaggccacaccgagggaggggcttgtctggcgagggagcctcgccgagcggggctgcacgagggggtgcagggggccatcggggggcacgccggggcgggtagccacatggggcaggggacgccacgcgcagggaggcgcaccaggcaggggcgccgtgcgcaggaagaggaagggaggaaagagagaggagagggaggagcttaccatgggctcgatggacagcaacaaccgctctccggtgatccaaatgagggcaaggacagagacggagaggaggctgcaccctttacccacaagtcgtgtttcccgtctagccagggtttgcaaggttcttagacactttcgaggtagagcaatagcaaaactaccgaatagttcttttgtttgcaaggaatattatttggtaaaggagagtgatcaagggcacaacttgccttag

SEQ ID NO: 16310 - DNA, 651 bp, Zea mays
  Peptide Sequence Number=SeqID_58089
atggcgaatgaaggccgcccagatccgccgcgacggcggctgaggatggcggatggaggccgacggcggcaggaaaccgcgacgacggctgaggatggaggctgcccagatccgctgcgacggcggcagaggaagcgggaaaagccggagagctggggtggacggacgaccggaaggctggccgcgatgggcggacggcgcagcaacgacgcgacggagccaaagaaatttgatcagggccggattagacggattttgaggcagttagcaaattatcttgatgccaatattccaaatgctgatcttattgctagtgcaattggtgtggcatcagcaattatagacaatgttccacttgttgctgcaaccatggggatgtatgacctgacttcgttccctcaagactcggacttctggcagcttgttgcattctgtgcgggtactggtggttcaatgcttatcattggctccgcagcaggagttgcttttatgggagtggagaaggtggatttcttttggtattttcgcaaggtgagcggttttgcctttgcaggttatgcagctggtataatctcttaccttgctgttcaaaatctccatctatcccttcccacgtcgctggttgagatcccttttatttcgggatcataa

SEQ ID NO: 16311 - DNA, 435 bp, Zea mays
  Peptide Sequence Number=SeqID_58090
atgtccatcaccggcggcgccacgcacggctcgatcggcgagaagggagaagcgggtgagaggaagctacagcaatatgcacgccttgctgaggaatattttttttgcaagaagtgtgccctgcccggctatccccctgcgtctagccgttgcgaccgtccactgcagcagatcgcgctggctccagggcaacgccgcgcctcacggccctgccccattctagactggcagggtacctgtggcctcgcccaacggtgcccgttcctccagggcgatccctgcggcagcagcaagcagctacacggctggcctcctgcctgtgcgcaaggagaatcaagaggatcagctcctcacgaggatcaagatctagagctaaagaagcaggagctggagctttgtcaaacggggcctaagattgttaggtctggctcctaa

SEQ ID NO: 16312 - DNA, 285 bp, Zea mays
  Peptide Sequence Number=SeqID_58091
ggccctgcgcggcgtggtcggctccgcggccggcacttgtccggcaactaccacacctcgccctcttctcgtagcttcggccaccgcaacaaaagctgcacctgctgctcgatcggatcggccgcgcgcggcatgtcgaccaccacccccaccaacgccgcctcccagcagacggtggaggtgcggtcctcggcagggcagcccgacgaggagggcgtgctcaagcccgtgaaggtggtgcacgagatccccgccaaggacagctccggcgtcaagcaggactag

SEQ ID NO: 16313 - DNA, 459 bp, Zea mays
  Peptide Sequence Number=SeqID_58092
atggatgacataacagatgaaaaacgagacctattggtgagagacttgtgtgtcgagggagcagtttggacaggttcccatcaaaagaactatacgttgcactgtcacttcctaacactgcaagccatattaggcaaactgagcccattcccactaccgaaatttcctgtgtttccaccaatcattcacaattatgacctctcttcctcggatgtcgacttagaagatcgagatagatcggtggcatccccacccattgtgcaggtctctgataatgagaaagaagaggaatctagggacatcgaagaatgcttacgaaagattgacaacttatttgaggatgatatttttgcgaataaagaagacactattgttgagaagaaagttgatgctgcaaaagcagaagttgttgcagaagaggaagttgttgctgaagaagaagttgttgctaaagaatag

SEQ ID NO: 16314 - DNA, 210 bp, Zea mays
  Peptide Sequence Number=SeqID_58093
atgaccaggttcaatgcaccacaagcttatggcaagggaagagcttttggcaaggaatcacacgagaagggtcggatcgataatgttacaacatggacacatgaaacacattgtgaatgtgatccaactcttgagtctcttgaactaaatctagcccgaacattttcgtttcttccaaatctgtccaacacaaaggtgtcctacacttga

SEQ ID NO: 16315 - DNA, 129 bp, Zea mays
  Peptide Sequence Number=SeqID_58094
atggacaacagagtcgtaccaggaaacacttcaattgcaaagtcaacctcccgatctggtggtaattcagataacagagcttggtcagagttgttatgcaacctacaatttaatcaggccaagatctaa

SEQ ID NO: 16316 - DNA, 491 bp, Zea mays
  Peptide Sequence Number=SeqID_58095
cgataacctggaacttcacgggaaagcaatggctcttcaataggggctccaaagttcgcagattgaaggagcggagatggatggaagaggcggaagtcgcctgggctgtcgcctcgggccgccgggattcaaggggtttccttcctgttcggcggatgcagaagctaaaaacccctatggacttgcgtgggtttatctcgattgattgtgccaaagactgtttttggaaacccgggaaacgggggagacgtgcgtgggtagcggagacagtggctaacggcgaccgtgactgtgtatatgctgaccagagccatgggctctgtataactattggaagccccgaccacgtaccgaccagtagcggtgccaccctgaggcaggtgaccgacggcagtgctccactaggaacgagcgacagcgacgctcccgaggcgggcgcgcaagcagcgacgacgttctcgaagcggacgtacggcggcggcgcaccctag

SEQ ID NO: 16317 - DNA, 225 bp, Zea mays
  Peptide Sequence Number=SeqID_58096
atgggcacgccgcagtacacaatgacgacgtccccgacacctctgggagcggccggcgtgccgttgccagcgacgtttcaccaaccttacggcaccggcgccaacttcggaggcgttgacgtccttggaccctacggctcggtccagggtggctggggacaatttgagggggccattgaaagggaaataggcttacaccttttcctaattgattttggtggttga

SEQ ID NO: 16318 - DNA, 438 bp, Zea mays
  Peptide Sequence Number=SeqID_58097
atgaccaccgtggagagggctacagggacaaccaccgtcaatgccaaccaaaaccccacgcgttgccatcttctgccatccacggacacaccaacccatgaggtaccaaccactagaggtgtggcgttgtcaaaccccaagatggccgaggtgaggaatcccacactgagggtgggggagatccaggacaacaccctcaataggttatcgaggccgccaccccatgaagactacgccactgtctcagccccctccatctctagccccgcctcccctaaaccaccgcaggcaacagtagagccgtcgacggccatggccctcatggccctcgccgccccgccaatgccaccgcgtcgcgagcacgctgcggaccaggtgcgccaccgccatcgcagccacgcgccaggccactcacccttgtcggcgcggaagcaataa

SEQ ID NO: 16319 - DNA, 1071 bp, Zea mays
  Peptide Sequence Number=SeqID_58098
atgcaggcatccgcgcgcctctcctactccgtggcctccaggaaagtgatcgcgggtgtctctatcgcgcccccacggtcgtgctatcggacctcccgagggaaggcgcatgcggcgccgctgcctgcgcaggagccgccaccgaaggggctgaagaggattacaaagcaggagcggagggttcgaatagtggaatttgttgagaattatagggcttcaaacgaaggcaagtttcctactgtaaaaaatatctgtcagcaaattggaggtggttactatgcagtgcgtgagttacttcaagaaatgaaatataatcatgcaaaattaccactgggtaatgctaaggcagctccacttcaaacaacagttgaagtcactgaacaccccatgcctaaggatgaagctagagtggttgaaagtcaaggaatactagaagtttctgagcactccatggccaaggatgatgctgaagtggctcaacctcaaggaacagctgaagtttttgagcacttcttatctaaagatgaaggtaaggtggctcagtgtcaaggaacgtttcactttcctgagcactcaagacctaaggatgacagtggaaagactgctcgacatgatatggacacttcagaaacctgtaagactgcagatgccccagctttatctgatctaacagagaatgagggaattttatctgaccaaacagagagtgaggacaaaccagatcctggaaatcagcaaagagaaatagaagctaacaaatttgatttgaagaatttcgaaaaaaatctgaatgcaaatgattcaaacgcatcagatcaaagtggaagtgatacggtgaatgaggcaaagacacatgccagttcttttgttatgatcaactacttggacttggcaagaggactgcttctgccacttagtgtgtacaattggttaattcaggctgtggaagatgaattttcccttagacttaggggagacaacccaaagcttgaggaatccgcgaacacgggtcttttgggcagcctgagatcttttgcttatggcatcagaaacttctggaaaaatatgtaa

SEQ ID NO: 16320 - DNA, 339 bp, Zea mays
  Peptide Sequence Number=SeqID_58099
atgtccgggcgcgaggtccgcgagtacaccaatctcagcgaccccaaagacaggaagtttggtaaagggaaggataagatcgacgatgaggacatcaccttccagcgcatggttgcaaagatgcaagaggttgctggtgataggggaggctaccttcacggacgaggagcattggacagcgatgatttgctttacctgaaagagcaaatggaagctgaagaagatgcagagcgccttcttcgtcatactgagaagcgggcatttgctgcttttaagatatcctttattaatcatcaacaactttgcttttcctgttatacagttaatgatacggtctga

SEQ ID NO: 16321 - DNA, 261 bp, Zea mays
  Peptide Sequence Number=SeqID_58100
atgtcgcctaaattccctccatacctcacctcatcgcttgcagagccgagaccagagaatacagttcacttcagggagaaaacagaaacaaataaacgtagacaagagggcgaccaatctggcggagctgctggagcttgctgcagtgaccgcacggtgaggaacggtgacggtgcccccctcctggtatccccagcagctagcgcgctgatggccacagtcttggaactgcccatgggcgacgccggtgggaggccctga

SEQ ID NO: 16322 - DNA, 1749 bp, Zea mays
  Peptide Sequence Number=SeqID_58101
atggggcgtcccgggcctccgctctcggcgcccgcctcagggagccacggacccccattctccccagatcttgcgagtaatagcctgaatccagcatcgctagccgcgattcctcactctcagaccggggatcttcaactggggggggggtgcggggaggatggttccgttgctcgggagcgttttcccccatcgcgcaagccaggtggtgtggtttcttcgttatctcagatcgatctgctggattccaccttttctaccaagtcacctcccagatctgcaaagtcaatttcggatccaaaaaccagagatcagaagatgaaaggggcagcggatatctcgccggtcgcccgtcagctcgcagggggcttgaatgcggatagcgacccatcacgtcggcgcgtcctggccagcggttgcgcgccggatcatgatgaccatcctcccatcagtcggcgcaaggctgtttctcaacgtgcggaagacgatggctggactgaagtcaagccaaagtactggtggcgtaaaatccaaggaaatctcgggaaatctctgcagcagatcgatgcaatgggagccagactgttcaaatcgaagcttcagggtaaatgcttcaactgcctttcaccaaaccacttcgcttttcgctgctcggctactgcgcgttgctggctctgtttgcataccgggcatagggcgagactgtgccctaggaatggctacacgagtaaatccagtgcctctcgtagctgcgacatatctgtaaagcattcatcgcagagcgcaggcatttacagttctacctaccggcagcccgctcctggttccattccacttcataaggggcaggggatgcaactaggaactgcgcctggcttctcacctctcacactcaagaaaaccttcaggcaagttgtacaacaaggccagaacatggaagctcgctacccaggagacccgagggggaggcctgctcatgctcactgcgctgttgcagcaaccggctcaatcaagcgtcgtagggatgagatgatcaacaaggcagtggtttgctccttcgacgacaacagccatgaagtggacagtcttcaggcaggtgacatgctcagggaaaagttcaatctacagcatgagttaaggttcgagttgaaggtgttcctgttcactgctggggggagtgatagtcgcctagaggggggggaggatgtggttgcaagggtactagggaagagttgcgccatccactatgttcaagagcgtgctaggcgcagaggaacccctccggtctccacccctttgtcgcttgctggtgttaattatgatgttccatcagatctgaaaaagggccatgtctacacattgcgcaatcacattgagatagtggaagatctctcgttcttgcgcgggagggacagcaggggggacctccaaaccgtaagcctcgcagagagtttgaatggacctacggtgtccctgattccattggtgagaaaagagaatatccgggtgttcgtcgtggaagggatgtggttcgccgggactgggaccaagatgatgatgatgagtatcagcatggtagaaggcgcggccctcgtcgacatcgcagcctttctggctgggttcgttcgtcgcgctgtcggggtgggactgctgactgcatcagctcgaatggaaaattcagagcttccacccccttcaggcgccatgagatggggatgccacactcaaagcgttgggttcctaaattaa

SEQ ID NO: 16323 - DNA, 450 bp, Zea mays
  Peptide Sequence Number=SeqID_58102
atggtcaccgtcgggcgccggcgcgggtttgtcaccttcgccgctgcggcgatcgctctgatgcagatcagttatctactgttcccgatcagtgcgcagcaatccaatggctcaagggttgtaccagcagaaggttactgttccatgtacggcatttgtgcacaacgaagtgacgggaaggtcttaaactgtgcaaatgcaaccaaagctgttaagattaatagcactatgactgttgatggcatagattactatgtaactactaactacggtgaagagctatataactcatgcaaggatgttaagtttggcactctgaacacccgtgcaatggattttatcggtgctggtgctaaaacttacaaagttgatgttattaagcattttagtgccagactggatagaagactatgcaattttgaatgcattggttacttcgtctcattctaa

SEQ ID NO: 16324 - DNA, 231 bp, Zea mays
  Peptide Sequence Number=SeqID_58103
atgccaaatggtggaggtgatggtagtagcaagagcatggggggaggctacgctggtgggggaagtggagggcaagtgaatagagtagagggggccggagctatcacaacgggcgagcacggacacaaaaatacaccggataaggtggtcgtcgtgaaggaggacgtgcacaacgaccatggcgaaaaagggagcaatagagggcgcgccaagggaggtactgctgtatag

SEQ ID NO: 16325 - DNA, 480 bp, Zea mays
  Peptide Sequence Number=SeqID_58104
atgtaccaggccatcccctacagcagcgcccggccgtggctgatgccggcgggcgaggcggccgccgtcgtcgccgtgaagccggagcctgagccggcggcggcggcgaccgtcgcggaggagcgcgcccgggccgacgccgcgggcgggacggacgacgacggcgacggcggcagggcggaggtcgggagggccgtggcggagagcccggtgctggtggtggggcggcgcgggtgctgcctgagccacgtggtgaagcggctgctgcaggggctcggggtgaacccggccgtgcacgaggtcgcggacgaggccgcgctcgccggggtcgtcccggccggcgcggaggccgccgccgccgcgctgcccgcggtgttcgtgggcgggaagctcctcggcgggctcgaccggctcatggccgtccacatctccggcgagctcgtgcccatcctcaagaaggccggtgccctctggctctaa

SEQ ID NO: 16326 - DNA, 555 bp, Zea mays
  Peptide Sequence Number=SeqID_58105
atggacagcgcggtgcagccgctctggaccgcgtccaagcggcagttgcgctggagcttaccagaattgtcggggaccataattaggggtaccctcaaggctcctaattctcagctggcagtcaggcctgacctcacgcgccataggaagctccgctccgcccgacccagggctcggactcgggctcagccccggaagacggcgaactccgctccgtccgacccagggctcggactcgggctaagccccggaagacggcgaactccgctctgcccgacccagggctcggactcggccccagaagacgacgaactccgcttcgcccgaccccagggctcagactcagccctggcctcagccgacggtctccgcctcgcccgacccaggggctcggactcgaccacggccacggaagacagactcgacctcgacctcggaggagcctccacatcgcccaacctagggcgcgggccggccacgtcaacgagaggcgccatcattaccctgccccaagctgactcaggctacggggaacaagaccggcgtcccatctag

SEQ ID NO: 16327 - DNA, 1563 bp, Zea mays
  Peptide Sequence Number=SeqID_58106
atggagaagaggaagcggatcctggagctgcgggatcggctggaccggacgctggcgatgcccgacctcgcggaggaggcctcgctcagggcgctggtgaagaagcagatcctggcgtcgtccctgcccggctccgatcaaggtgacatcgatctcattgctgaaacgcgggcaaaagaagtctctgagtttcttgaaatgctagatacttcgagggacggacgatcttccaaggtccatgggctgccacagaaggagtggaaggtgaagcaagatacagaccaattaagagtgatgtaccgtgagggtccagaggggacaccatttcataccttacttgctgaaggctttgcagatggacctattgacgcagtcagcaccgtggccagtcatgatgatgactacaggaaagctttgagaggaccgctctacgtcaggatccgtgagtaccaggattctgatgacaaggcgaaggtggcagcaacagaggaaaatgctaccgaggcgccccctgataatgccactacacaaaatcgtttgtcactaacaaataccgtatcgaatagcgagattgtggaggagtccgaacagaacacatccgtcactgtggatagtcttccaactagccaacaaccctatgtgccagttgagcaagcatggcaggtcggaaacaggccatacaccagtcctgaggtggagcgtgcgctgtgcatattagacacttctattgcacttctcagaggcgatgataaggctggaaatgtcaccacgctacaaaatctgctcagttacgatgcatctttggaagcgagtactgctgctggttccgtaacttgtcaaacaaacgttcttaacgcagacagtcttccgaatggccatcctgttgccgcagcgccacaagactccagagagaaagctagcgatagtgccgcagaggaagaagacgccggcgacgaaaactctctgaaaaatccgacagcttccactgtgacgaagagtgtgtcgatgacattgcgaagtgcaataagggtgcacggtgaagagagcctggacactgatggcttcttccatcagaacgtgggattctcatccgctcggcagctccacgtcgaccaaaaaatcgtcaccgttcgtgcagctcagatcctccgccggcatggctcacgcgcgtccgtgtgctggtgttatcccctcatcccaatgtcaccacgccctcccctccccacccccacgccagcttcgtcgtccgggtccgtggatacagtctccctctctcggatcctccatcggtggccctgtcgatgcctctgttgtcaccgttccgaggagagcctcagcggtaggatccttgacgtgctgggccccgtcgaggcgattctcaccgctgcacacaggggcaaagtgtggtcggtcctcccccctccgaatccttcgccgccaaagctcgatgcctgcgccgacaaagctcccatccgaagtctcccctttcggatcctgcctcccacccccgcccgcgcttgcttcctcgtcctaggatactccgccgaccccttcatcgtttag

SEQ ID NO: 16328 - DNA, 627 bp, Zea mays
  Peptide Sequence Number=SeqID_58107
atggagtcgacgagaagaaaggagtgcctgccagtcagggggaaaaggaagacaacaacagagggacttcatataaggggattgggagaaagcagcggcatgggcgctgcggtggaaggacaggaacacagtgggatgacgctgttatggacacggagcacacttagaggcacggcaaggcgcggatttatcggattttggaatccgggtgaacagccgtcacatgccgttagcgacaaggatgcccaggcggacgcccccaggtccgccaactgcaacggctcggcgaccggcgcggacatctttgagagccccgccgtgcacgacgctattgcgcacgcgtcgctgcgcgagaggagaagcttcgtgatatacacaagtgcttgttgcatgtctgaagagaagaagatgtctaaggagaagaagatgtctgaaaagaagaagatatctgaggagaagaaagttgtggacccttttcttgctaggttttacgaatctatggcaaaaacaaatacaaagaagattacaaaggaaataatggtggatttgtctgaagattctgacgatagcgatgactatgatgtggaaagtggggatgaagattctgaagaccggccctgcggctaa

SEQ ID NO: 16329 - DNA, 1263 bp, Zea mays
  Peptide Sequence Number=SeqID_58108
atgaagtcggccacgtcgctcctgctcggcgccgcgctcgccaccgccttcttcctgctctacacctccctctgccgcgacctcggcagcgccgctgccgccgcgcccaggtcgggatcgccgccgccgacgacgccgcggcgggagcaggagaccggcgacacggccgccgctcggcaggaggccgccacgggagagggcggggaagaacgtgtggctgcgagcagcgacggcgaccacagaggcggcgacgccacagcggaggagaatggtcagagcaaggaggaggagcagcggcggattgtgatgcctgccacgtcaactacccacgagcgttccgaggtaaatctgatgttccccaccacccaccaggccacctcccaccatagaccgcagccgaagcagcagaagaagagcccaccaccagcgtcccaggatctggcggacctgctccggcgagcggcgacggcggacaagacggtgctgatgacggcgatcaacgaggcgtgggcagcgccagggtcgttcctggacctgttcctggagagcttccgccagggcgaggacacagcgggcctgccgcggcacctgctggtcgtggccatggacggcagggccctggagcgatgcaacgccgtgcaccccttctgctacctgttccgcgtcgacggcatggacttcgccgccgagcagaagtacatggagggcgactacctggagatgatgtggcgccggaaccggttccagcagagcgtgctggagctgggctacagcttcctcttcacggacgtggacatcctgtggttccggagcccgttcccgcgcctgccccgcgccgcgcaggtcgtcatgtcggccgacttcttcgtcggcgacgccgactcgcccaacaactaccccaacggcggcctcctctacgtccgctcctcgcccgccacggtgggcttctaccgccactggcaggcgtcgcgcgcgcggttcccgggccaccacgagcagtacgtcttcgacaggatcgtcaaggaagggtacgccggcgcccgggtgcagttcctggacacggccgtcttcgggggcttctgccagcacggcgacgacctgggcagggtggccaccatgcacgccaactgctgcgtggggctggacaacaagctcttcgacctcaagaacgtgctacaggactggaagacctacagagcgcgcgccgccgctggcaacgcgcagggtttctcgtggcgggtgcccggaaaatgcatacactga

SEQ ID NO: 16330 - DNA, 756 bp, Zea mays
  Peptide Sequence Number=SeqID_58109
atgtcgcggtcggacggggagagcggcagcggcgcaacgggggccatctgggtggtgatttgcgcgccgccacctcctagcaagccgaacggagatggggacggcgtcgcctgctgctggaacccaaagggcgagggcgaaggagtcgcgccaaacgccggcgccgaagagggcgtgccgaatgccgaggtcgacgagggtgttccgaaattgagtgcgccgaacgccggcgccgaagacggcgtgccgaatgctgaggtcgacgagggcgtcccgaaattcagcgagccgaacggcggggtcgtggaagtggtcccgaacgctggcgtcgacgacgatgccccgaacgcaggggtcgtggaagcggtcccgaacgctggcgtagacgacggggtaccgaaagcgggagtcgacgaaggggtgccgaaggcaggcgtcgacgagagggtgccgaaggccggggtggacgacgtcgcgccaaatgcgggggtggcggatggcgtgccaaaaaccggggtgctggaggggttcccgaaagcgggagtgatggatggggtcccgaacatggcggtggcggcggagatcgccggcgtcaatgttcgggatgcgggtttagggttctgttctagtgagagtagaggtgaggaaacaaggaggggccgggggttattcaaatttcaaaaactttcgggggtcggcacgaaagcatctccggtctcgagaagggggtgtttggttactcctgctaaagtttag

SEQ ID NO: 16331 - DNA, 600 bp, Zea mays
  Peptide Sequence Number=SeqID_58110
atgaacagtgctctgaatccaagaaagagcttgactgacagagcaagttcagggttttccagggttccaattagggtttctggtatcccaggggataatgatggcctcccttgtgacgtggtcggtccgagccctgggtcgggcgaggcggaggctcctccgaggtcgaggtcgagtctgtcttccgaggtcgaggtcgagtccgagcctcgggtcgggcggggcggataccatcgtctgaggccaaggctgagtccgagccctggggtcgggcaaggcggagttcgtcgtcttccggagccgaggccgagtccgagccctggggtcgggcgaggcggagttcgtcgtctttcggggccgaggccgagtccgagccctgggtcaggcgaggcggagttcgtcgtcttccggggccgaggccgagtcctggggtcgggcgaggcggagcttcctatggcgcccgaagccggacttggctgctgtcagcctcactctgtcgagcggcacagcagtcggagcgacataggcggcgctatcctcttgttaggccggtcagtggagcggcgaagtgactgcggtcacttcggctctgtcgactga

SEQ ID NO: 16332 - DNA, 492 bp, Zea mays
  Peptide Sequence Number=SeqID_58111
atggccggaacaggctgccgacggctcgccggcaagggggccgggccggataggcacactgggacggcgcgcaggggctctgcccctggccgctgcgcctggcagcaggccggctgcgccgtcgcgccgaggcctcgccatggcccctgggcgaccttgctgcatggccgagtgggcagggaccaagggaagcggttaggcgtcgggtggagggagggagaaggaaatggggtgatggggctccaaatggaaccgacccgggagagacatgcgtatgaggcggtttggagaagaggaataggggtgggcagactggtgggtagggcccacgcgctggcggcggcggcggctgggatcgcgcgtggaggcggtgcggttctgcgtgtgcaggatgtgcgtacagagtggttatgttatagcagggatttggggatgaagagactttgcaagtggtccccacttgacatagagagaaggtggggagggaagtag

SEQ ID NO: 16333 - DNA, 2388 bp, Zea mays
  Peptide Sequence Number=SeqID_58112
atggacgccgtcgcccaccgcctgggcgcatgcctgccccgcgtcccggttgcatgggccgacatggctccgcccccatcgcagacacatggaaaggacggcggagccgcggaggggccaaggagcggactgtcgtccttcacctggcgaatggtgacctacgacctccgtctccggctgccgtcctccggctccggctgccgtcctctgccatggtccatggaccgtagtccggcagcagcagggctccagcctctgcccaaccgcttgcccgccaccggcttccggcctcagcccgccaccggcgtctgccacctccgcatccggcctctgggcaccagtgtcccgtctctgcccccgacgttcatcgtccggtctccgacaccaggccctcagctacagcagtacagcaccagttcccgcaacagcgaggaggagccatctcctccaaatccacagccaatttattgcccgccaggtgttcgaccaaagtcccgcgtcgtggcgcgccttcctcaaggcctactcccacggtcctttcccctggaagctctgcacctcttcaagcacgcgcgccagcacctggctgatgacacatttgtcttcaagttcgtgctcaaggcttgtgcgggtctggggtggcatcgagctggtgcacagctccatgcgctcgttgtccagaaggggttcgagttccatgcctatgtgcacatcgcccttatcaatgtgtatgtcatgtccaggtgcttggtggaagcacgcaaggtgttcgatgaaatgccagtgaagaatgtagtttcgtggaatgtgatgatcactggctttgctggatgggatgaggttgagtatgcgaggcttctgtttgatcagatgccctgcagaaatgttgtctcatggactgggctgattgatggatatacacatgcttgtctttatgcagaggctcttactcttctccgccacatgatggcaggaggcattagcccgagtgagataattgttttagcagttattcctgcgatatctaatcttggagggatcgttatgggtgagatgctgaatggctattgtgagaagaagggtatcatgtcagatgtccgggttgggaattcactcatagacttgtatgctaagattggctctgtgcaaaactcgctaaaggtgtttgatgaaatgctggatagaagaaatttggtgtcatggacatcaataatttctggttttgcaatgcatgggctgtcagttgaggcacttgagttgtttgcagagatgagaagagcagggattaagcccaacagaatcaccttcttgagtgtcatcaatgtctgcagtcatgggggtctggtacagcaagggttagcatttttcaaaagcatggtttatgagtacaatatagatccagagatcaagcattttggtaagtatggagaagttgagatgggggagagggcaataaagatgatatcagacttagaaagagaatctggaggatcaacgccctactacacgacgggggttttccccttcggccgccactccgtcctttcgcagcctgccgccggcgccatgctgtacatcgtgggcctcggcctgggcgacgagcgcgacatcactgtgcgggggctcgatgccgtacgcagctgctccaagatatacatggaggcatacacatccctcctttccctcggcctcgacccggccgcgctcgccaacctggagaagctgtacgggaaggagataacggtcgccgatcgggagatggtggaggagcgtgtcgaccaggtgctaagcgaggctgccgacactgacgtcgccttccttgttgttggcgacccgttcggggcaactacacatactgatctggttgttcgtgccaagaaaatgggagtagaagtgaaggtgatccacaatgcatctgtcatgaatgcaattggagtttgtgggctacaactttaccgctatggagaaactatctcaataccattcttcacagacgaatggagaccagatagtttctatgagaagattcagaacaatcgccagcttgggctacacacactttgcctgcttgatatccgtgtcaaggagccaacatgggaatctttagccagaggaaagaaagtctatgaaccaccaagattcatgactgtaaacactgcaataagtcagctttttgaggtggaggaagcacgtgggggatatgcatatcgcagggaaacattgtgcataggagtggcacgacttggaagtgatgatcagaagattgttgctgggcctatggagaagctactagatgttgattttgggccaccccttcactgcctgatcatagtgggagagactcatcctttggaagaagagatgctagagttttacatgatcaagtag

SEQ ID NO: 16334 - DNA, 837 bp, Zea mays
  Peptide Sequence Number=SeqID_58113
atgggtcggcgcgagacggagcgcgaaggggggaagaagccgaagggagacaggcgtgagaggcgtaaggaaaggatccagggtaatgatggcgcctcctgtgacgttgttggtccgagtcctaggttgggcaaggtggaggctcctccgaggttgaggtcgagtttgtcttctgaggccgagtcgagtccgagcccctgggtcgggcgaggcagagaccgtcggctgaggccagggctgagtccgaaccctggggtcgggcgaagcggagttcgtcgtccttcagagctgagcccgagtccgagcactaggcccgagtccgagccctggggtcgggcgaagcggagttcgtcgtcttccggggctgagcccgagtccgagccctggggtcgggcgatgcggagttcgtcgtcttccggggctgagcccgagtccgagccctggggtcgggcgatgcggagttcctcgtcttccggggctaagcccgagtccgagccctggggtcgggcgaagcggagttcgtcgtcttccggggctgagtccgagtccgagccctggggtcgggcgaagcggagtttcctatggcgcctggggccggacttggctactgtcagcctcactctgtcgagtggcacggcagtcgaagcggcgcaggcggcgctgtcctcttgtcaggcctgtaagtggagcgacgaatcggctggcatggcgacttggccaaggttgcttcttggtgaagattgggcctcgggcgagccgaagctttgtgctgatgggggttacccgctgagatttaggagtcttgagggtacccctaattgtggtccccgacagtag

SEQ ID NO: 16335 - DNA, 213 bp, Zea mays
  Peptide Sequence Number=SeqID_58114
atgacttgggaggttccatcacacgttccgccaccactgttgggcgctcgccgtgccctttgcctcgacaacgagcagcccatggttcctgagtgtgttgtcgaagatctttctgagcaacaacctggtgaaggcaagtgtcctttgacctattatgtcctacttacttataattcaccgtcccgcattacattattgaaacctaaggattga

SEQ ID NO: 16336 - DNA, 309 bp, Zea mays
  Peptide Sequence Number=SeqID_58115
atgacggcggaaaccgaggataatccaagaagggtggccacagcgggggctctttcgcggtggcggaaaacagaattggggagaaagagaaattggagagttgtggtggctaatcggaggcaggagcggctgctctggcttcgtgattatctaacagagctagcggtacgcttaatttatagtgtgcaagagcggtggcctccaattttggattggcgcgctagcagtcggagaggaagatgggtactggaacacacgattggtggccacacccttggcaacctcaccggcgatcattggataagttag

SEQ ID NO: 16337 - DNA, 390 bp, Zea mays
  Peptide Sequence Number=SeqID_58116
atggcccttagtgatgatgcagtgggcggcgaccgccaggacatcggtgatggctctgcgtctgaggtatcacattccgctaatgatctcgccgctgaggtaggagagctaacgactactttggctagtcaggataagttacttaggcttgctactcatgagaggaaagatttcaagaggaagtatgagagcacgcttaggggacttgagtctgctagagcttctgtcgtggtctccgatgagactagatactatgagctaggagttagatatgagcatgatgggagagctcaacttcttccttgggatacaaataaagcagacccaagacgagaacattatgagaaatgggacattgatgatcttcatcatgttgatacccacagatag

SEQ ID NO: 16338 - DNA, 318 bp, Zea mays
  Peptide Sequence Number=SeqID_58117
atggatgtcggagcgctgtgtgttcatgtccaggcgtggactggtgtgctgcgcattgcggtcgttctcatcttccggctgtcgggtgtcgccatcattgctagaatgttgtttgttgaagtccaggagggcacagacaccactaaactggtacgaaaggggatcatcgtcatactcactcgtagatcacagattgcatcagttctgattattctctgtttgcagaagatcgaagtattcatcctctttgatggttcgtacatccgtgaaccaacatctcccctttacactcatcgagactctggccccaaaggttaa

SEQ ID NO: 16339 - DNA, 549 bp, Zea mays
  Peptide Sequence Number=SeqID_58118
atgaagcaagtgaacacatgcctcggatcactgcctagaagaggccaggcatgtccactatgggcaggtgcggaagacagagacaagctcccctactgggaatgggatggtctctctcttccccccaaacatctcccttcaaaccagcgaagggacaccaaccaagcaccactgcctgcccacaaaaccagtaatctgcaggatctaagcaaagacttgattcagttatggacggattggtccgagcggccgcgggaagggagtctgaggaacggcgccatcatcaggtccgagcggccgagcgccaggagctgcctcgccgacgagagccacatccgcctggttcccatctggtcgagttttggttcccatcggaaccagagcgatgagcatgaaccagatgcggttgccatcgacaccgcgcccgcctgtcgcgtttcggacgctggaggatcgatgggagcgcccctctggctgcggctccctcccggggcgccctcctcctggagctcgccgtgggcgactgcacgccgccgccgccccgcctag

SEQ ID NO: 16340 - DNA, 135 bp, Zea mays
  Peptide Sequence Number=SeqID_58119
atgggtgatacgctcttgggcaagtctgtccttgatggccctgtgatgcttggagatgatgaacctgttctattaactcacttattttgtgcggctgatttgggaactgatgctctcaaccccttgtctacttag

SEQ ID NO: 16341 - DNA, 264 bp, Zea mays
  Peptide Sequence Number=SeqID_58120
atggctagggctcgagagcataaatccctccttctccccctcgtgtgtgacagcccccatcaactaccccacgccaccaccgttgtcttacccgttgccgtcatccacgcccctgaccgcttagcgccgccggagctccacgccactgaggtcgcctgcagtgcccccaaggctcctaacttcgtttcaaattacgcgcctgttgcctgggtctcgggaaacttctctgctagcccgcaaaaacaagggttattcacagattag

SEQ ID NO: 16342 - DNA, 177 bp, Zea mays
  Peptide Sequence Number=SeqID_58121
atggctccacagagagcaccaccagttggttcactccaagtgtttagcgcccagatcggcgtcaagaatgcccttactcgacatgctagaatagaacagatcaaggcagatgtcgaccagagcaaggcgatggagcggggaggcgcgctgaaaagagtggacaattcatgtttttag

SEQ ID NO: 16343 - DNA, 884 bp, Zea mays
  Peptide Sequence Number=SeqID_58122
gtcagtttgctccgctcggaatggcctccccgtcgacggaagccccgctgcctcacccgaccatccgggacgtcatgggccacgacgacgacgacgactactacggcgaccacaccatcgcagaggaggaagaaggggacgaggaggaagaggagtgggacatgagcaagcgcatgtcgcgcctgtccttggagggttccgacggcggcgacgccgacgacgaggccggggttgacgaggaagaggacgacgagttcgaggtgccggaacggtcggacgtcaacgctgccaccgcgtaccgcgcgtggcctccgtacgaggatccgcagcaggccccgtcatcggcgtcgctcccgggcacgccggaccgcggcgcgcaggcggcggggtggcccggggcgagcgccaaggagtacgcgagcgagacggaggcgcggtggccgcccggcgccgacgggcgcggcgggaggcggcagcggcagcaccagcgccggtggcagcggatggggcgcgaggcgtggctggagcgcgcgtggcgcatgcggaagcagcggcggcagctgcaggaggaggtggtgcccgtggtggtcctcggcggcggcggcgactccccggcgagccgcggcggcgtggcgatggacatggaggaggtccgcgcgtgccgcgacctgggcctggacctcccctgcgactggaccgtggagatcccctcctactacgcgctctccggcgtcgacaccgccagcagcggcggcaactcgccggcctccgccggcagctggcgcatctccagccccggggacgatcccaaggatgtgaaggcgcggctcaaggtgtgggcgcaggtggtggcgctcgcgtccgcctctcgtctcggttcttga

SEQ ID NO: 16344 - DNA, 282 bp, Zea mays
  Peptide Sequence Number=SeqID_58123
atgacacttaggttttggtttatacatgacatggacacctgtcaccatactggtttgaaattgggaagaaggagcgaaacaggaagagaaaaggcgttacacaaggagtcaatgattgttgaaagtctaattgccactcttgatgttgaggagaaggcgagatctaaggatgtgcctcgttctggtccaatggatagtggcacctctaatggcaacatggttgaaggaaaatctagtgggaaaaacaaaaacaagacgaactggaaaccaaatgccaagtag

SEQ ID NO: 16345 - DNA, 522 bp, Zea mays
  Peptide Sequence Number=SeqID_58124
atgacgcagggtgaatccgcggcaaggatggcactctggcgaggaattatcgtcgtttcggaggcgctcaagggaaaccaccaacaccacagggttccagagatcgagtcgagcaccaagacggatgtgtgcggaagaggggagagcctccccgcgccacgccaagtcaccccgagctctttcccgtggcgagatgtctgttcccacgctcgatttctcccaattctgctctgtattggccaatttggcttcgccggtgtttggccgcgcatccggaccctcttgacccattctagccctccgcggcttcccagactccccggtggccgcgtctgcctcatctccgacaacgagcagctcgtggttcctgagtgtgttgctgaagatcttcctgagcaacaacctgaatgggaatcacggcttgtgggtaaagtgtacgacctctggagagtgttagaaactggaggagatactggcaacatggaggactttgaggagttccaggactacgacgagttctag

SEQ ID NO: 16346 - DNA, 276 bp, Zea mays
  Peptide Sequence Number=SeqID_58125
atgaagctgggcaccacaaatcttcaacaaccgcccaaccgaatccctcacctgccgccaggaaactcggacttggcccgcgcgttcggacttgtcccctccatgaatgatctgtggtgttcatcggtgctcacgagggtggagctcgcggcatggccgccattgccgctgggcaaaggaattggtccggcctatgcctcaatcgcagggatgggattagatctggggaaggaatcactgtgggccgttgatcgacttatgatggggtcggattaa

SEQ ID NO: 16347 - DNA, 387 bp, Zea mays
  Peptide Sequence Number=SeqID_58126
atggcggggctccggttgcgcgaaggttgctccggtgagcgcgggccggccaaaccagggagggaaggggcacaccgaagggtgtcccgagtagctgacagcaaggcggagctcaccgtggcactgtacagggcgcggacgcgacggtggccacagaacaggcagcggttgacggcgggcggtggcggggctccctgcacgcgtgggcagagcgagagagagggcgagcgagtctggcagagggcgcaaatgggcgaggggaggtgggcaagcagggtgcggggctcaaaaggggcgcgggtgcacggacgtggccggagaatgcgcggtcgtgggcgcatccacgacggggagatcgtggacgggaggttgaggacggcggggtag

SEQ ID NO: 16348 - DNA, 573 bp, Zea mays
  Peptide Sequence Number=SeqID_58127
atgtggatacgagatttgcagctggcatttggaaatctgtctggatgccatctgcaagaatactggtcttcagttcaggttgacttagtgcgagctcagcttagaagagaaatggaaaagaatggaggtcttgatgtaaccgtatttatgaaagttcatgatatcttagctcaaattgacaatgctgcaccacaatctcaacagccgcatcaacaaccagagcagccacagatggagaaattcagtaatgatgacctggagttgcgaaatgtcgtattgctagtttctgaaataagcgggttatccaaacctgacatgtcaaaaatagtatcagatctaattcaaggacttgaaaatgttgaaactcctgagtctccgaaaccagacaacgttgatcgccaaccaccaagtgatgaaacaaaaggctcatctgaggaagttaagaagtcggactctgtagctattcctgaagatttccgttgcccaatatctctcgagctgatgagagatccagtaattgtttcaacgggacaggtgaggcttcacactatcaccctttcattggtcctttaa

SEQ ID NO: 16349 - DNA, 251 bp, Zea mays
  Peptide Sequence Number=SeqID_58128
atggcgcgccgccactcccggcgcgtcccgcaggccgcgcttcgcttgctgccgcgaatcaatgccgctgtctcctggcacgcaccgtcggagcttcgcctcgcgtgtcacttggatctacgcgcacactatggtgcacccgccggcgagcccagctggagctcctccgagccgtcgggccaccggctctccctccctccggcggttggcccgctcgtggccaccaagctcgtggcggcggcgctacccag

SEQ ID NO: 16350 - DNA, 288 bp, Zea mays
  Peptide Sequence Number=SeqID_58129
atgacgcgtgtcgtcgtctttgatctcagtagctcttccaatacgcacctggacgtgcttcgcctcctcgtggtcagcaccatttgggccatgagggcggtagatctcgacactgcttcacatttctattttagagagaaattagcgaaaggtgtggagaaggaagcgaagctgcacaacacccgtatgatgttcgacgacaagcccgagtcaggatttatcagcattcttacgagtattgagtcacgtttgatgctgatgtttgctaaaatacctcagcacctctga

SEQ ID NO: 16351 - DNA, 450 bp, Zea mays
  Peptide Sequence Number=SeqID_58130
atggagcagagacgcgcggtccgagctaggaggccgaggcgctgggaatggcgggcgactagggcgagatccgagaggggtgccatggggacgagcttgacgagctggaagtcgtgtgccggccaggagatccgcaccaggagccgagcgccagaggagcagaggtgggggcgaccgaggatgcaacgacaagaaaactccggcggccatggaggtgagctgcagcagggggccacgacgaggtcgtggcttggcgagtccagggctccaggcggggtcgatgactttgaggatgaaggccggggcgagcacgcagcggtggccaacatccatggcgagctccggagagagaagcgatgtggcggtggcgcagatgagccagagcgggagcgggagatccggatggcatggcgcgcggaatggctcggcgtggtggccatggccgtgtag

SEQ ID NO: 16352 - DNA, 494 bp, Zea mays
  Peptide Sequence Number=SeqID_58131
gggctgcactcgcccaggggcaaaatgcgcggggcaggggcggctcgaccgcgcccaggctacaggcagggaaggaggttgaggcaacgtcggattgggcgcagtgggcgtccgggcaagtagaactcgacggcgagcatagaagctatttggccatggatggcaagcatgcatggggaatgcggatgtcgtgggcgcactgggaagacgtgggcgacgcgaggaagatgctcatgcgcgacgtgcagcaggcgagcgcacgcggggcatgcggctgggcgtggcaaggcgcggcgcgctgggcagactggccaggcggtgcggctgcgctgggcgctaggtttgcggggcgctgggctggcgcgtctggggagaacaccgctcggccgcgcgaggtgggccggccacgcggcccaagagaggggggaagggaggagaggcgcgggaggggctacgtgggccgcgggggcgcgcgcagccgcgcaggcggctga

SEQ ID NO: 16353 - DNA, 342 bp, Zea mays
  Peptide Sequence Number=SeqID_58132
atggcgttcggcgcggtgcagctcgtcgtgcccgtgtggaccgctcggcacgctcccctggcccgcggctggctcgcggccagtgcccccggcgtggcctggggcgcggcctggtgccccggcgtggcgcggcccagccccggcgcgaggaactggggtgtagttcgcttcgccgtcgtgccgttaatggggctcggtgtatgcggctcgctctgccaaggtggtgacgtggatgatgtctatgactatggtaatggttgtccacattgcaaccactgctcaagagaagatgaagccgtggaggacgacttccaggagttccaagagtacgacgagttttag

SEQ ID NO: 16354 - DNA, 297 bp, Zea mays
  Peptide Sequence Number=SeqID_58133
atgggtgttaatttggctcgcacatccaaagaacgtcctaaccatgcgcatggcagggtacacgatgtcgagcccgtgttcccacaaaatcgtgcccgtaatggtcaaatgatcaccacaatgagctttacggaatcataccaggttcgtctggccacgaagcgcgaagaaggacgtgctcggcgggttccgatgaggggaaaatggcgtcgtgatgatttctggtggaaacagtgggtcacgtcggggctatacggtcacaaaggaccaccgattcaccgtgcacaaccaatttga

SEQ ID NO: 16355 - DNA, 1890 bp, Zea mays
  Peptide Sequence Number=SeqID_58134
atgtcgccgccgccctgtgacgccctgcccaccgctgccaacaacatccagccttttcttcgccagattcagacctcacagccatcctcacccaaccgcaaatcagcaaacagatgtcgtcaaccagcgggtgaggagtgtgaggacgaaggggattcggagctatatgagcagctgcgtgctgaggccttccaccgaacttggtccaagatccagtccaccatcgacgaggtcctcagggccatcaacctcaagctgttcgaccaggtgctgcagtgggcgaaggagtccttcgcttcggcccatgccatcacgaaaaagcaccacactgaagtccagcagccataccctctcctgactgatgtgatctgcagaaggatcccgacggtattcgtcctcaccaagaatgcagagtttgttgatgatatcacaacgtttcatgaccttgcagggcatatgaagtccaatggatgtcacatagtcaagctgtcagcggctgagttatcagcaaaacatggagttggtggttgcttcaggagcctgttgggacagctattatccgatgttccagatgttgctgatgtatctgcgctagcatcatggtattgtgaagctgagaactttgatcagcctatcattgtcataattgatgatttggagcaatgttctggcgatgtgcttggagagtttgtgatgatgctgagtgagtgggtgtttaaaattccagtcttctttgtaatggggatagcaactacccttgatgctccaaagaagcttctctcgtcagaggctcttcaacgattagagccctgcaaacttaccttggggtctccctcagatagattgaatgcacttgttgaggctgtccttgttaaaccatgcgctggattttgcatcagtcatgaagtcgcactgttcgtcagaaattacttttttaggcatgatgggacaataacttcttttattactgctctcaagcttgcatgcagtaagcacttctccatggaacctctaagctttttgtgcttaggaatggtggaggaagattctgaggaattttggcatgataagcttgaatcgctccctcaaacaatatggaaacatgctttcgatctaccctcaaacaaaaatgcaaggaattcttgcaacatggtagaaggattgtctaggctgctgaaatcgcaaaaggattggagttctgttctcttgtgcctgtatgaagctggaaggcatgacaaagtgcagcttttggatatcttctgtgaggcagccagcccagattggcaaactgaaaatgcaccagatagttacctatttgcttctaaagtggctttattaggagtaaagtcagggtctgctagaagatttatagcccaagtaatgaatacaataaggatgttatcaggaaatatttggtacctgctgaatgcttaccttttccatgaaatagtctgcttcaagaatgttgacatcctccgatctgcgctgattggaaacccaagaagaatgattcaactcgatcttctgaggtcacagagccatctgaaatgctcttgttgcagtaggagtggtgctgccgtgtcaggatcgttgcacgacacatcaatcctgtgcagtctagcccaagagtatggtgacatgattaacctccatgactggtacacggcctttgaagggattataaagagcacaaactcaaaagccaaagggaaatcttgcagctctccctcgaagaagaagaagaaatcaaaccccacgcctctggagggtgatggcatgatccaagcaaggttctgcagcgccgttactgagatgcaggtcactggccttgttcggatgccgagcaagagaaggcccgatcttgtgcagagaatcgcgttcggtccttaa

SEQ ID NO: 16356 - DNA, 276 bp, Zea mays
  Peptide Sequence Number=SeqID_58135
atgtctcctgccgtggtcgacgtatgctcgcgataccggtccaggattcgggttcgattagcggggcagtcgctccgcctcgaagctaggcctgcaaatggggctttgttcggtggggacctggtcgatcgtctgccttgcaaacttgctcggtggggacttggtcgttcgacattgcaggatttgctcagcgaggacctgatcggtcgtgtcgcctcacagatttgctcatcaactttactcggcggggatctagtcgatcacttcgcctcgtag

SEQ ID NO: 16357 - DNA, 441 bp, Zea mays
  Peptide Sequence Number=SeqID_58136
atggccgccgccgtccccaacggccacaccgccgccgccggagacgacgacgcaccacccgccgcttcgtcgtcgttggtgttcctgggcacggggtgctcgagcgcggtcccgaacgcgcggtgcctgatccagccccccgacccaccctgccccgtctgctcccagtccctttccgtcccgcccgagttaaaccctaactacagcgtgtttactatcatcacggggtcggtgcggatctgtgatggtatgagatcggagaggtttggcctgacactagatgctgttaggaggatttgccccaaaagagcactgcttattgggatgacccacgagatggatcatcacaaggacaaccaaacattggaagaatggtccaggagggaggggattgacgtgcagttagctcgtgatggcttgcgtgtctacattgatctgtag

SEQ ID NO: 16358 - DNA, 585 bp, Zea mays
  Peptide Sequence Number=SeqID_58137
atggacctagtcgacgcgtcgccgctggaggtctcgccacggacggtgagttgtcggcggacgaagccgtggagacggagcatcagcatcgggcgtagcagtagcggcggcgggggcagcaacatcgagtacacaagcctccgcgatgtattggaggaggaggagtgcggcggcggaggcgccggcggcgactgcgtgggcggcgggggcgagcagcaccagcaacaacagccgtggcgttggggcagcagctggggcgagtactcgtgccatgacatccacgaattcgatgcgtccaacatcggcatccgcaaccagctgctaaagcacgcggcgtccgcgtacctacagtcggctgtggtcgtggcggccggccgcgaccagggctgctgcctcacccgcctctggcgccgggcacagctccgtgccggcgggcggcgcggtcggggcggccgtggccgcgtgctcatgcgcgcctgctcatggcagggctgcgtcgacgaccccgctgcgttcctcgctcgctccgctcgacgcctcgcctcgttcgtcgccgaccgcgtcagcgccatctgggcatggtag

SEQ ID NO: 16359 - DNA, 489 bp, Zea mays
  Peptide Sequence Number=SeqID_58138
atgggcggaggagggccgcacagtgcagaactatcagctcaatcacgtcgtcagggagcttcggaagtacagtcgcttgaaacacaccatggagatggtccaggaatccaggattactccaatgccaatgatatgcagcttgcacttgcacatagaagttgctcttttttgtatggtaaaggtagggtttcaatagagtggggcagtgggcctgattgcattgattggggaagactattgagaaatcatggcatttctgattctgaaaaggtgctcattttctttgatgaccaccaaagtgagttgaaaaggttaaagcaagcgctaaaggctggattcaggcatctcatatttgaggacaactatgatactggtacatgtgaccattatttcttgaggcatatctatgatccgtcatatatcagaggtttgtggcttgtcaccttagactctaaatgtccatggtacaactggtccattgtgcaatag

SEQ ID NO: 16360 - DNA, 228 bp, Zea mays
  Peptide Sequence Number=SeqID_58139
atggccaaaaagcacgaggcccaaataggggttctagaggatgaagaagaagaggacaacaacacaatttcgtactatgctcagtacaatttctttgcagatgctataatgggtgatgttgcagatcctaaagaaaataatgctcatgaacaaacattgtgtgatgaagagaaatactatcacaaggaaaagattagacaaactagagagcatgttagaggaccatga

SEQ ID NO: 16361 - DNA, 672 bp, Zea mays
  Peptide Sequence Number=SeqID_58140
atgacggactccgcctcgcctgaccccagggctcggactcaacctcgacgccggatgacggactccgcctcgcccgaccccagggctcgggctcaacctcgacgccggatgacggactccgcctcgcccgaccccagggctcggactctacctcaacctcggacgacggtctccgcctcgcccgaccccagggctcggactctacctcgacctcggacgacggtctccgcctcgcccgacccccgggctcggactcaacctcgacctcggaggagtcaccgcctcgcccgaccttgggctcggaccgaccacgccacaaggggggccatcattaccctactcctagctagctcaggttacggggaacaagaccggcgtcccatctggttcgccccgaagtgtagggtacaacggttgcgaaacctggaagaggctgaagccaggtaccttgaggtgctcaagaaggcatgcccggacctggcaatcaagtttcacgcaccaaaacctgaagacccatccgtggctcagatggacctcggctcgcaaccagttgtattgaagaagccaacagaaaaagggtacaagcatttaaaggtactgtacctcaaagggtatatcaatggtaaacccctcaaaagaatgatggtgaatactagagatggcaatgggtaa

SEQ ID NO: 16362 - DNA, 1878 bp, Zea mays
  Peptide Sequence Number=SeqID_58141
atggactggactgttagttgcttcgctggagacatcgttttgtccatagaaatcgacggtaaaatggtctccttcaaggcgcgccggagcgagccacagctggtgccgccggcgcggccgacgccacgcgagaccaagatgctctccgacatcgacgaccagcacctgctccgctactacgagacggtggtcgggttcttccgcacctgcccgggccgcaccgacagcccgggcgacctcaagggggctatcaaggcggcgctcgcggaggcgctggtgtactactaccccgtcgccggccgcctccgggaggaagccggagggaagttagttgtcgactgcaccgcggaaggggtggtgttcgtcgaggccgacgccgacgtgcggctgcacgagttcggggagccgctgctgccgccgtatccgtgcctggacgagctgctgtgcgaccccggcgatataaaagccgtcattggcagaccattgctcttcatgcaggatctccttggtggggatcatgaggctcaagcgacagtcggtgatgaagagatggaggcagagctgaccacggagagaacatgggtgaagtctagcgtcgccgccacttcagagcccccgcagcggccacttcggagcccccgcggcctcaaccggctttggcaccgctgcctgtttccgcactcgcttcctcggacccacgctcgcttgctcatgtacggatctggcggcgtcgcgaacgccgtgaggatggtgatggggaggatgacacacatgatcggggacgagggaagcgacgcacatacgacttttgcggcaccgaggccgaggaggatggggcggcgggcgggaaccgcgcggcggggcaggggcggagtgaggggtgtacggagacgaagacaggggaggcaagggcacgcgatcaaggtgacagaactcaaatgtggcggatttgttgctggattccacatgtgtcataacatcgccgatggattcggtatgattcagctcatgataagtgtagctgaactaatggtcggtgaagcaaccccgagcattgttccagtctggaatagggagcttctaactggagcatacaacacaggccccatcccatacccaaacccagcatacaaaccactgctaaacagcctagacaacacatcggacgacgtaatgctgtcgactccgcccgaccgcatggtagcccagtacctggtgttcgggcagagagaggtgaccgcgctgcgaagccacatacaagggcacctcgccgactcggccacgtccttcgagctcctgacagcagtcatgtggcggtgccgcaccagagctctggggtacgagcctagccgacgcgtgcggcttatgatcaccatgaacgcgcgtggcaggtggaaccaccacaccctcatcccgtggggctactacggcaacgcgcacgtctcccctatagtggaactgaccgccgacgagctctgccggcagccgttcgccgacacggtcgcgctcgtgcgtgacaccaagctcagcgtcaccaaggagtgcctggcgtcgatggtggatactaccgcgtacatccgccagtggccgtctctgaccatggacaggacgtacgaggtctccgacaccagatggattgctgccggggacgggctgcagctcgggtgggccgagtacgtgggcggcggcataccgctagccggcgaccttacttccaagctgggtagccatcacatgaggtgccggaaagaggacggcgaggactccacggtcgtgtcgctgctgctgccgagaccggcaatggagaggttcaagaacgagatggctgtttggctcagcaaagacgacaagaattttgttatacccagttccctctag

SEQ ID NO: 16363 - DNA, 144 bp, Zea mays
  Peptide Sequence Number=SeqID_58142
atgacgaaggactttgccaagactgctaaattaccaccatatgaagatatgtttcttgcctccctgaggagagcttcgttcccttggttggtgtctaaggttcggaggacggagctagttgttgccttcttcggtatggtgtga

SEQ ID NO: 16364 - DNA, 474 bp, Zea mays
  Peptide Sequence Number=SeqID_58143
atgggtaaaatgatgaaaaaagttaagtatgtaagtggaagccttaatccgccacctggtgacagatctgagcaaacggaggaaggagttgaaatagactgcaagccagatcccatcttcgagggatttaaggaggctactgaagcgtacgccgagaggactgtgaacgatgccatagaaaacatgactaagggctttatttgggaggccaaactcgtctttgacaacaacaatgacggtgacgacggggatgacctagtggtcactgtgtcagactatagcaacatgttaaggggcattgccacaccagatcctaacgggtcaccagatccactaccaaaaccttataatgccgaaaatggtccaacattgaaagaaatccatgcggaattcaaggtggtgcatgcagcgatagatgaagctattgagacaatgctaaacgaagctgcaaagaaagttttgaaggaggactga

SEQ ID NO: 16365 - DNA, 249 bp, Zea mays
  Peptide Sequence Number=SeqID_58144
atgcctgccgccctcccctcgtcggcggctcggctccaatccacgacggtcgacagcggctccacctccagcttccaccgccacctcgaggacctaggccaggagcgcgacgttggggaggagcgcgagttcctgcttgccaccacagccatgatgcacggcgagctagcgaggttgggcacgcccaggagtaggctgaggaatgggcgccgatgcaggctacagttcgccgccaacaaggctgagtag

SEQ ID NO: 16366 - DNA, 519 bp, Zea mays
  Peptide Sequence Number=SeqID_58145
atgaataaattatcaacaaatgaaactcgcacgcgattcaatgcagttcataaatcggggaaggagatcagcactagccttggacttgagattgtctatgctctcgcactgctcctcgaccagcttgccgagcgacgctgccttctgctccagccggacgacctcgacagcgttcctcgaggagaggcaggcctgggtacacgctctgggtggaggaatggatggtcgtgccaaagcggtgctggatctaccacctcgcctcgctgccgccgttcctgctcgtctttgcaggccacatctgggtggtggaccactggtggaaccagcacgggctcggcggcgacaacgtcgagggccgatgtcggggtctccattagggccatatcaacctccttcactggagcggcaaggacatgtaaaccaaaaggggcccgtcgattctgcctcaccaacgtgaactgtatggaagccacagcgtccgcggctgggctcgttccatgctggtcaactgtggcctaa

SEQ ID NO: 16367 - DNA, 174 bp, Zea mays
  Peptide Sequence Number=SeqID_58146
atgcagaatgctcagctatttcaattttcattcagcatgagtgcagattccacccttctgcagaaaaagaggctggacacagggagctgtgggaagattaggctttcagatcttctggagagccatcacttggttccagaagccagggacaagaaaaaggggaagaaatcttaa

SEQ ID NO: 16368 - DNA, 588 bp, Zea mays
  Peptide Sequence Number=SeqID_58147
atggcgaggtcgctgctgtgcgatagagactcggacgtggtgagtacgcagcaccgaacacatggttccgatcaggctgtttcaacggcgagctctgaacgcgcgtcgacgaggctccaggacgcgaggccggatgttgggcacgacgccgaggcctccgggagaggatggaggcgtgtgggccgagggaggagcgacggctgggcacggttttcccatttcttcgcgtcgtgggttgttgacgaggaagacacggggcaccagtggggcatcgtgcctggagctgagggcgagcccacgaccaggggcatggtcgagcgcgacatttgcgccccatgtgcacgcgtgcgacagagtgggggcgtggcctggaagccgagcggagggagagtggcgcggcggcagctgggagcgcgcatgcggctagggtttgaggcgtggctgggccaagaaggggggtgcggtgctgctaggtgggccagcgagaaaaaaggaggggggctggctggactgggccacgagcgggaatcctgtgactactatgactttgtggttgtcaaagtagtgccggagcttgcgagcggttag

SEQ ID NO: 16369 - DNA, 510 bp, Zea mays
  Peptide Sequence Number=SeqID_58148
atggggccaatgaaggtcgtcgcccctctagtgggtctcttgataccgctcgcacgggcagtgcagccttcatccacaatcggcatccgtgatgtggcagaaacagtcgtggcgtcaccagtgcgagggttccaggaggctaaggcccttgccaccgtgactacgaacctatcgatggacgactacatcacaaatgaaaatttttactttggtatccgtgagcggaccacatctagtggtgtagtggaggtcggtggtgatgttgctggtgttgtgatttcggatgaggtggccaaagccacagcgagggtggcgaggaaggtggtcgaggctgcaaaggttgctggcatcaaaggctaccctgggggccgcaaatgcatcctcacaatagtttgtgatatagcattcgccgaccacgttgcaatgggagaccttgcctcctcggccacctcgcaactagaggcagaaaagaaagccttggaaaagaaggtggagtggctcctctcgtaa

SEQ ID NO: 16370 - DNA, 594 bp, Zea mays
  Peptide Sequence Number=SeqID_58149
atgggcaaggccccggctctcccaaccccagccgccaccgtagcaggccttggctataaattggaggaaaaaggagagacgttcaaaagccaagaagttaaagaagcactgagagcgcagatggaagtccaaagaagactgcatgaacaagtggagggtgctttcaggtttgcgaatactgtgttgattaaatggtttcttgctaaaaccacagctgcatacaaggccttgctcattacaatcgttggctggttttaccattaccaggtccaaaagcgcgtgcagatcagaatggaagcgtttcagaagtacatcgacagtatcctggagagcgcgtgcaagatggtcaccgaacagttcgcttcaagtggcttcagcatctctgaccctgatctcccggagatatcccctggaggggtggtcatgtgtggcggccccacggacacgttgagctcgtcggtgttcaaccagctttccgtcagctccatcggctcgcacagtccaggaggcaaaccttccccttccccatcaggcatggaatgtccgccgctgctcctccacaagtcgcatgagctcaagcggaggtcctcttga

SEQ ID NO: 16371 - DNA, 216 bp, Zea mays
  Peptide Sequence Number=SeqID_58150
atgggctttcgacagaatgccctcgttctaaccggtgaggcgaaggcggtggtcgagactcgagaggacgagcagccacgaggcggggaagacgaaggagaggatggaacggaacaggatcttttgagagtgtttacggataaccagcgtcagcagatttggaatccgtggatgcgcacgccgtcgtactgtacgctcgcgctacgggccaagtga

SEQ ID NO: 16372 - DNA, 411 bp, Zea mays
  Peptide Sequence Number=SeqID_58151
atggacacaactcggcaacggttacggatcgctattcattcgccttcctacttctacctcgtggacgcgggaaagacgccgcaagatctctgcggccttggattcttcacttcatcatggtcaaaaggcagaaggaacgggcgggacagggacacggcctgccccagctcaccacccgatcagcatcagcccaaccgccactgcttgctggacgctgcactattgcatttgcattgcattgcattgcagcatgtgagagctgctaaagcctgtagccaaccagccatggccacatttgctgcagatcagaacaccacgcttcacttggagcgcaaagcctgtttgtttcagttcagacttcagactcgcagactggatgcatgcagcaatggctgcaatgtcgaggcatag

SEQ ID NO: 16373 - DNA, 741 bp, Zea mays
  Peptide Sequence Number=SeqID_58152
atggaagcaggcgccgggggaggagagccaagcacgccgcgcagccggaccctgccgtgtaaggtgcggctccagctcttctgcctcgaagtggtcgctggcggtctctcggcaaggcgtccggtccaccgacatggacgtggacgcgtcgcgcggcctgtgggcgcgcgcgtgttctggccgtcgacggaggcgtcctcgtcgccgctccccatcgtggtgtacttccccggcggcgccttcgcgctgctctccgcggcctcgtacgtctatgacgccatgtgccgccggttctgccgcgagctgggcgccgtcgtcgtgtccgtcaactaccgcctcgcccccgaacaccgctaccccgccgcgtacaaggacggcgtcgacgtgctccgacacctcgcctccgcgggcctccccgacggcgtcgacgacgtcccggtggacctctcccgcggcttcctcgccggggacagcaccggcgccaacatcgcccgcctcgtggcgcagcgttggacgacggccagtgtcgagtcatcatcctccccgccgcgttctagccccgtctgccctgccggcgccgttctggtgcagccgtacttgggcggcgaggagcggacggaagcggaggtcaggctggacggggaaggtgccggtggtgaccgtcaggggctcggactggatgtggcggccgttcctgccagaaggcgccgaccggaacgacccagttgcgcacgtgactga

SEQ ID NO: 16374 - DNA, 795 bp, Zea mays
  Peptide Sequence Number=SeqID_58153
atgtcgtcgtcgtcaccgccgccgcggcccgacgacgacgacggtgcgcaggaggtgggcgccagcgatgggaggtcgctgggctacggcgaggcggagtactgggacgcgcggtacgtggaggagggcggcgcgccgtacgactggtatcaacgctacgacgcgctccgccccttcgtccgctgcttcgcgccgccggcgtcccggatcctcatggttggctgcggctccgcactcatgtcggaggatatggtcactgacggctatgtggagatagtgaacattgacatttcgtcggttgtgattgagatgatgagaaagaaatacttcgatgttcctcagctgcaatacttgcgcatggatgttagagatatgagtatgtttccggacgaatcgttcgattgtgcaatcgataaagggactctggactcattgatgcaatgccgtcttgctgctttcatagtgtggtgtggatgctcccctcagtgcagctcagatgattttggaagtggacagataacatatggtgatccatcggtacgaatgcctcatttgaatcaatcagcatgtgactggaaagttgtactttatattctaccaagacctgtgttcactggaaagataacgaggcgtgtactggatcctgttccactgaccgagaggggtagactccctgatggatttgtcccagaggatcctgactcccattatgtctatgtctgcaagaagatgcagggattaacaggcacaggttccccaactgtaaaccacatagagaggcaaggggaagaataa

SEQ ID NO: 16375 - DNA, 1740 bp, Zea mays
  Peptide Sequence Number=SeqID_58154
atgaaacccaccaccagcagcacgctgctgctggcagcggcggtgctctgcctcgcgctgccgctgctccccggcgccacggccaaggcggcgcgggcgcggcagggcgactacctggcgcgcctgcgcgggtcgtcgccgtggccggccgagtcggcgtcgctggcggtcgcggcgacggacagagcgtcccggcacgcggcgtcgccgggcgtggggcgcaaagaggacgaccgcgtggacaggctgcccggccagccgtcgggcgtggacttcgagcagtacgccgggtacgtgacggtggacgccgcggccgggcgcgcgctcttctactacctcgccgaggccgtgggcggcgggtcggcgtcggcggccaagccactcctgctctggctcaacggaggtatggcttgctccctactccctagagtaggtagctggttagttgacttattaactgcggtcacgctctggttgcttcgatctcttctcatctcacgcgttggacgtggaccccttgattcccggcgtttatgccatgggctgatgggcgtggacggacggacaggccccgggtgctcgtcgctggggtacggcgccatggaggagctgggcccgttccgggtgaagagcgacggcaagacgctgtaccgcaacccgtacgcgtggaacaacgcggcaaacgtgctgttcctggagagccccgccggcgtgggcttctcttactccaacacgacggctgactacagccggagcggcgacaacaagacggccgaggacgcgctccggttcctgctcaactggatggagaagttccccgagtacaagggccgcgacctgtacctggccggagagagctacgccggccactacgtcccgcagctcgcccacgccatcctcgggcacgccgccgccggcaagccgtcgtcgtcgtcgcccctcaacctcaggggcatcatgatcgggaacgcggtgatcaacgactggacggacaccaagggcatgtacgacttcttctggacgcacgcgctcatctccgacgcgacggccgacgcgatcggcaggcactgcaacttcagcgccgccgccgacgccgacgccgcggcctccaacgacaagtgcaacgaagcgacgtcggaggccgacgaggccctgcaggacatcgacatctacaacatctacgcgcccaactgccagtcccccggcctcgtctcgccgcccatcaccccctcgatggacaggtttgacccgtgctcggattattacgtgaacgcgtacctcaacgacccggacgtgcagagggcgctccacgccaacgtcacccgcctcgaccacccctggtccgcctgcagcgatgtcttgagacgctggactgacagcgccacgaccgtcctgcctattctcacggagctcctcaacaacgacatcagggtctgggtgtacagtggagacaccgatgggagagtgccggtcacttccagcaggtactccgtgaaccagctccagctcccagttgccgcaaaatggagggcatggttcagcagcactcagggcgccggagaggtgggcggctacaccgtgcagtacaagggcaaggagaagggcagcctcagcctggtcaccgtcagaggagccggccacgaggtgcccagctaccagccaaggcgagcgctcgtgcttgtccagggtttccttgcaggcaaaacgcttcctggctgcaaaacgtgcgagtcggcttag

SEQ ID NO: 16376 - DNA, 630 bp, Zea mays
  Peptide Sequence Number=SeqID_58155
atggcggcgctctacctaagcagtagcggttgtggtggtgttgcagggcagggcggtgcagctgcgagggctcgaggggtgacttgcccgctgcagtggtggagtggagggcagcgatggctgtataggcgctgcctgcggtggcagttgcagctcctcgttggcgatgggtgtgcggccaagagctctcgacacaggatcggtcgtgaggagttccttaacatttcttgcgacatggagtacaaaaagagggtggatgcgctagtgtttttctctttacttctcctaggatactttgctgctcatgcgcatgggaacgctcttgcacatgatagtcatgcccgagcatctacttttggctctaccttgcaacgggttgagacccctactatgttcatccatgaccaagcacaaccaccaccaaacactgtatattttatccatgggtacacagtttcgccttcagtgctggggaaatctttagttcaacgtttagtggtgggatcgtcactaagtccacaatcattagatatgacatgtgtggataaggcaccaggcctagatgctatgggtttgagttccccaataactacatataggggggatgctttgaggccattagtgttgtga

SEQ ID NO: 16377 - DNA, 288 bp, Zea mays
  Peptide Sequence Number=SeqID_58156
atgacccggttggagcagagcaggtccctcgccgtcgcgcacccgggccacgtgatgtccgtgccgcccaggctcgatctcgcgctcttcctcctcgtccttggtcggcttgatggagtcgtagttcacgctatgcagagtgtgggaatgggaaacgcggcacagatgtgtgggaatgggaaacagagaagagtctacaagagacatgggaatgggaatagagaagaggctacaagagacatgggaatgggaatggcagaaccaggaatggggcagcctaccccttag

SEQ ID NO: 16378 - DNA, 1548 bp, Zea mays
  Peptide Sequence Number=SeqID_58157
atgggcggcgacccggggaaggtcatcaggaacgtgaagggcgccgcgcagaagtacctcggcgttggcttcctgctcggcttcttcctcgtgctcctcacctacttcaccgtctccgagcagttcgcgatcacggcgcccaacgctgttcggaggacatcgccgggccacgcgcacaccacgaggtcgccgatcacctcggccgtcgaagagaagaggcagcagcctcctgccatagaggagaagccacccaagccagaggttgcaccggaggagaagcctccgaaggaagagaagccgccacgcgttgatgttgaagggccccatgctgaaacagatgaggaccagaagaagcctgtccctgacgatgatggtaggagcagtggtatcagcggcggcgatggcgtcgccacggagagtgctccggccaagaagccggcgtgcgacatccagggcccgtgggcgtccgacgtgtgcgacatcgacggcgacgtgcggatccacgggtcggcgggcaccgtgctgatcgcgccgtccatcgagagcggcggcaacccgaacccgcaggagtggcgcgtccgcccctactcccggaagcaccagggcgggatcaaggaggtgacggtgcgcgagctggcgtccagcgccgacgcgccggcgtgcgacgtgcggtcccccgtgccggcgatggtgctggccatgggcggactgactggcaactactggcacgacttcagcgacatcatgatcccgctctacctccaggcggcgcggttcgagggcgaggtgcagctggtggtggagaacatccagccgtggtacgtgggcaagtaccgggccatcctgcggcggctgtcgcggcacgacatcgtggacatggaccgggacgaccgcgtgcgctgcttcccgggcgcggtggtgggcatccgcatgcacaaggagttcagcatcgacccggcgctggagccgctgggccactccatgccggagttcaccgcgttcctccgcgagacctactcgctctccgcgggccgcgccggcgaggctggcgggcgccgacgacgaggaggacgagcgggcgcggccccgcatgatggtcatctcgcgccgccacccgcggaagctggtgaacttggacgccgtggtggctctggcgcggcgcgtcggttcgccaaggaggtgaacgccgtggacgtgctggtgggcgtgcacggcgccgggctcaccaactcgctgttcctccccacgggcgccgtgttcatccagatcaacccgtacggcaagatggagcacatcggggaggtggacttcggcatccccgccgtggacatggggctcaagtacatcgcctactccgccggcgtcgaggagaccaccctggtggacacgctggggcgcgaccacccggccgtcaaggacccggagtccatccaccggagtgggtgggggaaggtggccgagtactacctcggcaagcaggacgtccggctcgacctccagcggttcgagcccgtgctccgcaaggccatgcagctcctcagggagtag

SEQ ID NO: 16379 - DNA, 819 bp, Zea mays
  Peptide Sequence Number=SeqID_58158
atggagtcgcggctggaacggaagctcatcgatcacaccgcgatgaaggatgagcgcaccagcgctctagaaggcgccgctgaagagttggcgttgtgtccagtccagcccagcggggccgcgcgcctgcgtcgcctgacaggtgggctccatttgtcaaaggcagttctcgcgcttgcgcgctctctccttccccctctgtcatctgagagtcgcgtgttggcgcctttcctcgcatgtccgcgcgcctacgcgctctctgctcagcatgccccatctatcggcgcctctgcccgttgccatgactgcgcgtttgtgtctctgtcttgcgggccctgcttgtcagctccccctccctcgtctaacctccggtccgcgcgcccgtcatggccgcgcccacgtccgcgcaaatcccagccactacccacgtgcccgacccctactcaaacccccctctcgttcgctctaccatttgctccactcgcagacagctcccagctcgccttcgctcgtgcgctacctcttccccgagcttggaagaccgccggctttcaccgcgcccacgcgtccgttctgccgccgtcgttgaggcctcgtcgtgcccattgcctcggtgagttctgcctcgatgtccgcaactcgagacgcgcttcaatttaccctatccccctttggttctctctgcccgtgttcactggagctttccccgcgctgtcgccattgaccgaggctcgcaccgtgtccctgtcgccgttcaagggtcccggagtcttctctcgagttcacaggatgctaaagttacttggaccaagacattga

SEQ ID NO: 16380 - DNA, 5526 bp, Zea mays
  Peptide Sequence Number=SeqID_58159
atggattcctcgggcgacaacaactccaatcccgtcccgccgccgcggcgccgcggtcgcccctccaacacagataagggtaaggagcagcagcagccggagccgtctcacagctcccgagtgcgcgaggccgagcgcctgctgggtctaggtttcgagggcattgatgatgatgaagattcagggttcggggctggggccatcccccacagcctgacttccgcgagcaccgcgctccagggtcttcttaggaagcttggtgctggcctggacgatatactgccatcgtcggcactgtcagctgcagctgcagccgcgtcatcgtcatcagcatccgggcagctgagtgggaggttgaagaatattcttgcaggtttgcgtgctgatggggaggatggaaggcaggtcgaggcgttaacacaactctgtgagatgctgtccattggcacagaagagtctcttggggcattctcggtggactcatttgtacctgtcctggtcggtctgctcaatcatgagagcaacccagacatcatgttgctcgcagcacgagccctaactcacctctgtgatgtgctgccgtcttcttgttctgcagttgtgcattatggtgctgtgccttgcttttgtgcccggcttctcaccattgaatacatggacttggcggagcaggtactggagcatgcttctgtctgccttacccgtattgcggaatctttttcaccatttccagaaaaattggatgagttgtgcagtcatggattggttgcacaagctgctagcttagtgtctgttagcaactcagcaggacaggcatccttgagtacatcaacatatacgggtgtgattcgtcttctctcaatatgcgcaagtggatcacctctggcagctaaaacacttctccttcttggaattagtggcatacttaaagatatcctttcaggctctgggttggttgctggcacgactgtgtcccctgctttaacaagaccagctgatcaggtggtggcacgcgcgctgccagagtttggttcaggcgtggctctggcagcggcacatggcctggcggtgcggctgccggtcggcacggccctgctcgctggcatgaatgagattgtgaagcttgcagatgagttacttccttctctgcctgttgggaccatttctttaccagtgtattctggtgttcacatgaaaggttgttctgtaaagaaatccacttctagtaagcagggtgaacatggttcaacagcaaatgaactatcaggtcgggagaagttattgcgtgatcagcctgaacttctgcagcaatttggcatggacctgttacctaccatgacacaggtgtatggctctagtgtaagtggaccaatacggcacaggtgcttatctgtcattgggaaattaatgtactatagctcagctgagatgatccagtctctccttagcacaacaaacatttccagctttttggctggcattttagcttggaaagatccacaagtgttgatccctgctcttcagatagcagaagttttaatggaaaaacttccagagatttttttgaagatgtttgtgagggaaggcgttgttcatgctgttgagtcacttatatgcccagaattatctggtcaggtgactcctcatgtggattccattacatcttcacataataggcgcaaccgccgtagaaataatgctgtgaacactggaaataacttgcctgatggaccaaaaggttccaattctatgattgccaattcacccccaagcatggctgaagttccaaataatagtcttcgtgctttagttagtaatcatgcaaagtcatttaaggataaatatttcccttccgagcctggctcaagtgacattgcagttaccgatgaccttcttaaactgagggcactttgtgcaaaactgaatacaacagctgacactatcaaaacaaaagctaaaggaaaatcaaaggtagtgtctgacaatagttttgatgtcttgtgcaatattgaggagcaattggatgatataatagctgaaatgttgtctgagcttagcaagggtgatggtgtttcgacatttgagttcatcggaagtggagttgttacggctttgctaacctatctgtcatgtggaacatttgggagggaaaaggtgtctgaggcaaacataccaaatttgcgtcatcaggcagtcagacgatacaaaacatttatatcttttgcacttccaaatgataaagatgggaataaaactcctatggcattcctagtccataaactgcaaagtgccctatcttcgttggaacgtttcccagttgtgctcagccattctggaagggcatcgactttgggaggatcccgcctgacaacaggtttaggatctctgtcgcagcccatcaaattgcgtctttgtcgagcgcctggtgagaagtcacttaaggatttttcgtccaatgttgttcttattgactcattagctagtctggcagctgttgaagattttctttggcctagagtccagcgcactgaaccagtattgaagcctccaatgtcatctgcaaataattctggatctggagcagcaagctccacagcttgtgcgccttcaattccatcagaaactcaatctgtccgtcgcacatcgttaagatcaaagtcatcagctgccaccagtggtgcaattaagaaggattatcaggagggaagcataaacacctcaaagggaaaaggaaaagctgttcttaaattgagtttggatgaacctaaaggcccacatactaggaatgctgcgcgcagaaaagctacttcagagaaagatgttgaactgaagccatcacatggtcacatcacttcagagcagcctcccattcatgagcagttgagcacactgcacaccatatcagcagctgaaggtgcagctgcagtttctgatgacatccttaatcctttgatttctttcacttgtacactgcacaggggaggaaagcagtttcagcaggggaggaaagcaggggagggggatgagcagggaggggagcagccgacgggggaggagaactcaccggcgggggagcagggaggggagcagccggcgggggagcagcaggaggggatgagcgccggcgggggagcaatttccgtgaccgatgaagatcttgatgcttctcctgttgagattgatgatgctttaattcttgatgatgatgacgaggatgtcccagatgatgaagatgatgatcatgaggcggttctccgaggttctcttccttcctgtgttcctgagagagtgcatgatgtgaaattaggagatgctgatgattctagtgttgcctcattggcaaatgataaccaggcacagccctcatctggttctagtacaaaaaatacttctagcaggggattggacactgctgaatttagaagtccagccacatttggttcacgaggtgcaatgtcgtttgctgcagctgcaatggctggattaactccagtaggtggtcgtggaattagaggtagccgagatcggaatggccttccattgggtgctcgtgcaactgagcattacaacaaattgatatttacagctgctgggaagcagctgaacaaacatttgactgtatatcaagctgttcaaagacaagtagttcatgccgaggatgatgaagatcgattcggtggatctgatttacctgatgatggtaaccacttctgggatgatataaggggtgatgtgttcactataacgtatcagaaggctgataacacagcggagaaggggtctgttggaggttcagcttcagtgccaaaatcttccaaatcagattcttgcagaactttgtctgaaaaacagtgtacttctcttcttgatagtattttgcaaggagagcttccctgtgatttagagaaatcaaaccaaacctacaatatcttatcactattacatgtgttggagggtttgaatcagttatcacctcgtctgagactgcagtcagcctgtgatgattttgctgaaggaaaagttgctacattaaatgggctatacgatgttggagctaaggtaccctcaaaggagtttatcaacagtaagatgaccccaaaacttgctcggcaaattcaggatgttcttgcactgtgtagtggcagtttaccatcttggtgttatcagctgacgaaagcttgtccttttctgtttcctttcgaaacacgaaggcaatacttctattccacagcttttgggttgtctcgtgcacttcatcgtcttcagcaacaaccgggcaatgataataacactgcttttgaaagagaagtcaggattggtagattgcaacgccagaaagtccgtgtttctcgtaaccgtatcttggattctgcagctaaagttatggagatgttctctaatcaaaaggctgtcctagaagttgaatactttggtgaagttggaactggtcttggtccaactttggagttttatactctcttaagccgtgagctgcaaagggttgacttaggattgtggagatctcattcttcagataattctgggatgcaaattgatgcgaatgctgatgatttaataagaagtaaaaatcatgaatcagaatcacttactgagagcaggaacatagtacaatcacctcttggattatttcctcagccttggccacctactgctgctgcatcagaaggtagcaaattcttcaaagttgtcgagtatttccgcttagttggtcgagtgatggcaaaagcattgcaagatggaaggcttctcgatttgcctttgtcgacagcattttacaaacttttgcttggacaagaacttgatttatatgatatattatcttttgataccgagttcggaaagacattgcaagaattgcaaattctcgttgcacgtaaacaatttttggactcctgctctagtgagagccaaaagatagatctatgtttccgtggtgctcccgttgaagatttatatttggacttcactcttccgggctatcctgaatatgttctcaaggaaggtggagagaatgcagaggtcaacatttgtaacttagaagagtatatttctttggttgtggatgctactgttaagaccggcataatgcggcaagtagaggcatttaaggcaggattcaatcaggtgtttgacatatcatcactgcaaatattttctcctcaagaacttgattatctgatttgtggtcgctgcgcgactggtggccttgttggccctacggttggcgccttgcccaccggtgctttagtcccggtcacctcgattgctgccccagtcgctcccgtcgcccttgcctttgctgtggccatctatggcatgggtgccgccagccagggcccagacctagctgactctggcctagcttatctttcggtcgcgttacttccccctgatgtcgctttcgctcactccaccttggccatagcccccattgctgccaagacgaccaatgctgagggtcacctgctcggctcctcctgcatcgagaccctcccagcgctctag

SEQ ID NO: 16381 - DNA, 492 bp, Zea mays
  Peptide Sequence Number=SeqID_58160
atggggctatctatagggcggccaagggcccaaggcctaaaatatcgtaatgcccttggttacctactacatgccatagatataccgtgcaacaggccttcgcacctcctagtcggttactctgcattaggaatcttgaacaagggaaaacccttagtgaaggtgtcatcaaactacgagctcgttgaaacatacgcggacgtccccaatagtaaaacggtcaatacggtggtgttgaaaagggttgacagagaggtagacgatgctgacgttgtcgtagtagaccagggtactcatggtgagtgggttgtgaagctactggagaagttggtgcagcttgctcgcctcagccaccccattagcaacagccagtactcaacgtcagcactggaacgggagaccactggctaccgcttggaggaccaggagatgaggttcgccgaggtataccgacaggtgtccaggacactcggcccatcggcgtcagtatag

SEQ ID NO: 16382 - DNA, 1218 bp, Zea mays
  Peptide Sequence Number=SeqID_58161
atggagttcgcgagctcttcgagtaggttttccaaagaggaggaagagcaggaggaggaagaggacgaggaggtgtccccgcgcgagatccccttcatgacagcggcagctacggccggcaccggagccacctcctcctcgccctcgccttccgcggcagcctcggcgtcagcgtcgagttcggctgctgccctccgctcgagcggcggtgggggcgggggcgacgacgacatggaggtggtcgagaaggagcacatgttcgacaaggtggtgacgcccagcgacgtggggaagctcaaccggctggtgatcccgaagcagcacgcggagaagtacttcccgctggacgcggcggccaacgagaagggcctcctgctcagcttcgaggaccgcgccggcaagctctggcgcttccgctactcctactggaacagcagcccagagctacgtcatgaccaagggctggagccgattcgtcaaaggagaagcgcctcgacgccggggacaccgtctccttctgccgtggcgccgccgacgctgcgcgggaccgcctcttcatcgactggaggaagcgcagcgccgactcctcccgccacccgcaccgcatgctgccacgcctcccgctccacatgccgccactcgcgtcgccctacggctatggcccctgggggcggcggcgcgggcggtttcttcgtgccgcccgccacactctacgagcaccaccgcttccgccaggccctcgacttccgcaacgtcagcgccgcggccgcgccggccaggcagctcctcttcttcggctcagccggcatgcccccgcgcgcgtccatcccgcagcagcagcagccgccgccgccatctctgcacagcattatgatggtgcaacccagccccgaggccacggccggcctgcccatgcttctcgactcggtgccgctcgtcaacagcccgacggcagccgcgaagcgagtccgcctgttcggggtcaacctcgacaacccgcagccaggcagcagtgccgagtcaagccatgacaccaacgcattgtcgctgaggatgccgggatggcagaggccggggccattgaggttcttcgagtcgacgcctcagcgcggcgccgccggtgcagcagctggcgctgagtcatctgcagcctcgtcgccgtcgtcaccgtcgtcctccaagagggaagcacattcgtcagtggatctcgatctgtga

SEQ ID NO: 16383 - DNA, 1917 bp, Zea mays
  Peptide Sequence Number=SeqID_58162
atgactcctctgccgctccacctccaccacctccttctcgcgctacttgcagcatcagccgcgcaggccaccgaccccagcggctgcggcgggggcgaggaccgctgcggcgacctcgtcctcccgtaccctttccatctcaactcttcgtgtgccagcgccggaggcgccaactcctccctcttccgcctctcctgcaacgccagcggcagcgccaccctcaccctcgcgctcggctccgccacattccgggtcctcgccttcctgccctcagggtcgctcctcctcgactacgccccagctgcgtcgaagtccccgtgcgacgcggcctacgccgccttctcgcgcccttcctcgccggcgaccgcgctcgacgccgcgcccttcctggccgtgacgccggccaacgtgctccgcctctacgcctgcgaggactcctccctctgccgcgccggctgcgacgacgtcgcgacctgcggcggcaggtctgggtgctgctacccgctctcggacggcagcgtctggaagcccgggaacggactgggcgttttcgctgactacgggtgccggggcttctcgagctgggtcaggaaccggtcgtcggcggcggcgggggcggcacgcggggtcgtgagaggggtcgaggtcgagtgggccgtgccgaggggcagcgccatggcgaaatgcgcggatggcgcggcgctcgtgaatgccacggcgctgcacgacggcgtgcggtgcgcgtgcgcggcgggcctcgtcggggacggcttcgcgcagggcactggctgcaccaaaggcacctcctgcagcaatggtggtggtgagcatgcaagtgacggcagggattgttgccagggacggttctgctccaggaaggcagtcgtccttgctggcagcctttcaaaggaaagccgccggtgggacctcgacccggcgtgcatccccaagatcctgcggagcgtgtgcgacgcgaggcagttcacgtacgagcagctggaggaagcgacgaggagggtcgacggcgagaaggccgtggacaccgccgacgacggcgcggtccacgccggcgtgctcgacgacgggtccctggtggcggtgcagaggatcggctacgagacgcaggggaggctgaggctggtcctggaccggatggagctcctgtcggagatctcgcacccgagcatcgcgcgcgtcgtgggcttctgcctcgactccagcagcaacgcgctgctgctggtgcacgagcacttcgcggggggcacgctggaggagcacctgcgccaggtgaggcgccgcgtcgtcctcagctggtaccaccgggtcaacatcgccatcgagctcgccagcgcgctcacgtacctgcaggcgcacgaggcggccccgaccttcctgcacgacctcaggtccagcgacatcttcctggacgccggcttcaccgccaagatcgccggctacaagctcacgggcccgggcccggcgacggcgtgctgctccgccgccgcgtcgtcgtgtgagcaggacgtcgtgtgcaacttcggccacctcttggtcgagctgctgacggggctgaggcagcaggtcccgctggactcggtggcgcccaaggtgagggaagggcgggtccacgaggtcatcgacccgacgcttctgtcgtcgggtggtgggaatgggaagcagctcccggcctcgcacgacgaggtgaggaaggtgttcgagctcgccgtccgctgcctgtcctgcgccgagaccggcctgtgcatgctcgccgtcgccaaggagctgatgcacattctgagggacaacaacgggagcagcagcaagatcgagatctccctcgaggagacgttctctagctccagcctgctgcagatgatctccatgtcgccggagacactgcaccaccatcttccttaa

SEQ ID NO: 16384 - DNA, 315 bp, Zea mays
  Peptide Sequence Number=SeqID_58163
atggggtggggaaggtgctgcgcgcggctcggtggatggtcggcgcagagagaagggatagggggagagagccagggagggaaggagctggcggccgccatcaatggcgccgggcgtttccacttggagagaatgggggagaaggagtgggggagaagaaggggagagggtggccgttactcggcgcggagagccgagcggtcgcgacgtgggaggcacgggctgggcacagaagttgaggagacgagggggagcgcggacgtcggggcggcggctgaaaggggaaggggccgggttggccccgcctggaagtga

SEQ ID NO: 16385 - DNA, 294 bp, Zea mays
  Peptide Sequence Number=SeqID_58164
atggtgcctggccacggtgacgcagggttctgcggcggagcaggagtgccgacccctccgtcccagtcgaacgcagatgcgcacgcgcagtggctacggtggcgcggcgatcagagcatgcggcggaaacttcacccaggaccgggtctcactggcggcgggatggtggagggtttggctcggcgcaggcgcgagagggtagcagggggaagaacgagtctcgggaagagcctttatgggcggccgggtcgtgcctggagaggatcccgggacgcgggcttcgcggcgcggtga

SEQ ID NO: 16386 - DNA, 624 bp, Zea mays
  Peptide Sequence Number=SeqID_58165
atgtccaagacatccacagagtccaagacatacttaagtgcggaaatacgaaacaatctcctcctgagcactgagtacagtggggacaacctggggtggggtgcgccgccctactccgcggtggagttccaccgaaggcgagggcacgggcacgacgggggtcctggggtcctggagaggtctcaggcgagttcgaggtggcacggcagactcggtcgtgggctcgacactgacatagaggcaccggagggtaccggtctacgacagagcgacccggtggcagcgctagcctacttcggcgagcaattacgtgagcaacaagggcgaggagctcggctgagggcacaaatgagcagggggaagtgggcgagcggggtgcgggctctaaaggggcgagggcatgcgaatgtggccaggaaatgcgcggacatgggcgcgtccacggtgggggtgcgcgggcaggagattacggacggggggtctgacgggtggggtccacggccagcgagagaggatgtgcacatgctcgaagtaaacagcgtcaataggactggcccaccgggcagcgggagggagagaggggggaagagaacgcgcgggcagtggcgggcccaggatttatag

SEQ ID NO: 16387 - DNA, 192 bp, Zea mays
  Peptide Sequence Number=SeqID_58166
atggctgcaggcactgatcgcaatcctttagagcttgaggttgtcccgaatcgctcaataggttacacgccatactttatggtctatggagccgaggcagttctccccactgacatcgagcatggcaccgcaaggaagtatgaggacaacctcctagcagaccccgcacttggatcctgcgaaaggaactag

SEQ ID NO: 16388 - DNA, 402 bp, Zea mays
  Peptide Sequence Number=SeqID_58167
atgtcatttgatgaggatgacactgaggagggatcagattgcgtgaaacccttcatcacattgcaggactgcatcaaagcaaatccagaggcattctctaaggagattctggaggaagaggaaaatgatgaggaggcagataagtccaacctgaaagttagagctccatcatggctgcggctccgagctccggcgctccgcggccgggctggcgcctccgcgccaggcgccctggcggtggcgggcgagcgcgctatggtcctacgggctgcggtcaccatggccgtcgccaacagggtccagctgtcgcagctcgccgaggagcagcgcaacgccacgcggctctggaagcagctcgagcgcgacgtccgcgccacgctccagcaggacaaggaggcatag

SEQ ID NO: 16389 - DNA, 822 bp, Zea mays
  Peptide Sequence Number=SeqID_58168
atggcgccctcggcagctgcactccggtaccaatccgcgattattccttgcacgctaaggcacggctctagaagtgtagaactagccatgatgaagaagtcgagcagcggccatgtcatcggggtcccggtcatctccaaggcgtacgggatagaggaggaggcgtccagggatccgtcgtccttcagcaagggcggcgacgtcgacgccgatcaccttgctgtctcgttcacgcaccccagcccttacgcgtctttcggctacaagcacagcagcagcaaccactgggtgagcaagctgagcagaagggcgcaaggcttcagagagcatgtgaccttgggcccgaagctgtcggagacggtgaaggggaagctgagcctgggcgcgcggatcctgcaggccggcggggtggagcgcgtgttccgccaggccttctccgccgccgacgacgacaagcagggggagcggctgctcaaggcgctgcagtgctacatctacaccaccggcgggcccatcgccggcatgctcttcgtctccaccaggaaggtggccttccgcagcgaccgccccgtcaccgtcgtcacctcctcctcctccccggccggggtcgtgcgcggcacggcgcgggtcacctacaaggtggtcgtcccgctccggaggatccgcagggtgcggcccagcgagaacgtccaccggccggaggagaagtacgtccacgtcgccaccgtggacggcttcgagttctggttcatgggcttcgtcagcttccagaggtcgtgcaggtgcatgcagcaggccgtctcggaggtgcagacgcaatga

SEQ ID NO: 16390 - DNA, 1149 bp, Zea mays
  Peptide Sequence Number=SeqID_58169
atggaccgcggtagcgtttgttttcgtcgctgcccgttcagcctaaccatccccgcccgtacagcgccccggcgaccggcgccgcttctcgtcgtccgcgctaagcgcgccggcagccagccccctgctgccgccgcctcgcgtcagcccgcgaatcccagcgcggtcccgaagcgggacgtggaagaagaggaggaggaggtcgaggaggagatgccctggatccaggacaaggcgctggacctcgtggagttcactggcaccgtcacacaggccatcccagggccccgtgttggctctagccctgttccatggcttctcgcggttcccctcgcctacgtcggggtctcctttgtgctcgcggtcgtccgcaccgtgcgcaagttcacctcgccgcacactaagaagaagcgaaggaagggcagggaggcaataaattatcctgctcttcaggacctaatgcaaaagacaggatttgacatggatgatgtagtaaggaagtacatccgttacacactgaatgaaaaacagttcagtcctgatgtggttgtggatctcatacatcttaggaaggcatcaatgctggaagatgcagaagttgctgaaattttaaatgagatttcaagacgaattgtccgggaaaaagagcaaggttttaagcggaagcttgctgtacaagcactgtttggaaaaatcctatacttatcagaacatggtgccagtgtgcacggcggtggcagtggaggggaagaagccagggaacaagctgcagaggcagagtgcaacaaaggtgtggtggaccgtggttgggctactgggctgaaccaatgtgacgtgtatgggctgggcttcgagcgacgttggcagcttccggagttctgttcacgggacagctcacttgtagtcaaagaaatctttggagttacagatgaggatgcagacagcctgcggattcacaccctatcagcaacaggtgatatcgaatctatacagaagatggtggacgatctagacctagaacaagctgctgaagtaggacttgggcctgtgaacacaggatactttcggctggagcctggaggttttaacgcggggttcttttcactaggtcacgcttccattctgaccctgcgccgaaagatcctctga

SEQ ID NO: 16391 - DNA, 864 bp, Zea mays
  Peptide Sequence Number=SeqID_58170
atgctgccaggtcgccacccggcgcgccgggccgacaccaccgggacggggccgctcctgccggacgccactcgcgcggtggtgtcggagttcgtcgccacagccatgttcgtgttcgccgccgaaggctccgtctacggcctctggaagctgtacaaggacacggcaacgccgggcggcctgctcgcggtggccatcgcgcacacgctggcgctggtggccgcggtggcggtagcgagcaacgcgtcgggtgggcacgtcaaccctgcggtcacgttcggcctgctcgtgggccgtcgcatctctttcggccgtgccgcggtatactggctcgcgcagatgctcggcgccgtggtcgcgtcgttgctgctaacgctcgtctccggcggcacggttccagttaggcatacaaaggtactcgggggtctgtttggcaaaatatgtctgaccataccaatgcgtcccgtgggcttcgggctcgtccgcggcgtccacgagcggcacgcgctcctgctagaggccgtcatgacgttcgggctcatgtacgccgtgtacgccaccgcggtggatcaccggagccggggcggcgcggtcgcgatcgcgcccctcgccatcggcttcgtcctgggcgcgaacatcctcgccggcggcccgttcgacggcgccgcgatgaacccggcgcgggcgttcgggcccgcgctcgtcggctggagctggcgccaccactgggtctactgggtcgggccactgatcggcgccgggctggctggcggcttgtacgagtttgtcatggttgagcaggagcccgaggcgccggcgccagctgcagttcctcggatgccagtggcctctgaggactactga

SEQ ID NO: 16392 - DNA, 525 bp, Zea mays
  Peptide Sequence Number=SeqID_58171
atgaaaggtccttgctggtttgtcctagatgcaaaaggaaaggtcccttggttatggatagatcggttggagggtggaggtttgcttatgttccttggttttggtctgatatatggctatttttatgtcaatcacggtggcgtgaagattgccaccggactaattagaagcttggttgtccttaattggaataatgttgtagaggcaactgagttttggaggcattacaacagagataggacttcgcagctgaacttgtcgacgaatgattggacttcatcctatcccacattatttgatgaacgttcatgctgtttaagtgttctaagtgatcatttagctcaagtaattggtagtccaacgcttttacattggggtgatgattttctacagcaactcatggatggatgggttggaggcgagtttgatcctgcttctgcttgtgcaatcagaagtttggaattgttcagagttccttgtgtttgttcactgaccatcctcctgtcaatgttctttgaaaattaa

SEQ ID NO: 16393 - DNA, 648 bp, Zea mays
  Peptide Sequence Number=SeqID_58172
atggctcctctggcggccgccgcggccgcagcagtgaagatggaggcggagcaggcggcgatggcgagcgcggctgcgccgcagctggggtcggcgcaccagcaccagcaccagcaccagcagatgcagccgcggcggcagtaccgcggcgtgcgcatgcgcaagtggggcaagtgggtggcggagatccgggagccgcacaagcgcacgcgcatctggctggggtcctacgccacggccgtggcggcgggcgcgcgcctacgacacggccgtgttctacctgcgcggccgggcgagggcgacggcgacggcggggagcccgcgcgcgaccccgccgacggcggcggcggcggcacgctgtccgccgcgtccatccggaagaaggccatcgaggtggggtcccgcgtggacgcgctgcagaccggcatgatggtgccgccgccgcaccaccgggagcgccagaggcaccaccatcaccaccaccaccacctgccgcagctgcggatgcacgccgccgccgcggaggcggcggcggcggagcaccggcaggaggtgaagcagtcgccgcagcggccggcgtggagcgggcgcgtcaagaacccggatctaaaccgggcgcccagccccgagagctccgacgccgagtga

SEQ ID NO: 16394 - DNA, 225 bp, Zea mays
  Peptide Sequence Number=SeqID_58173
atggcaaatggctcgatctcggatttggctgttcctgttgaagccagccttagcccttctgggtacggtttgaagcgtgaactgtggctccggctcaggctacgagagcctaatgagtgctgcctttataaccttgccaggcaagttccggcgagttttcggcgtgcatgtgtcagaatatgttggttcgttgacctgttaactaaggagtacatgggtgagtga

SEQ ID NO: 16395 - DNA, 375 bp, Zea mays
  Peptide Sequence Number=SeqID_58174
atggcgcagggccgcctgagcctcactgttttcttctcccagcaggcacaggcgcgccgcagtccgcttgtcgccttgcgcagagatgccgctgccgcctgccggccagacggacggagggagggtggcagccggcttctgttggcgcaggagcagaaagcatcccctgttgcgaatcacatgtggaaaggagggaaaagcggtggacgcagaggcccatgcgctgtctgctcttgcattggcaagcctgacgaagcagcagctgcagtcgcgctgccgtctttcaagtctgcaaggtccccaaccaaccaccgccgcgtaggcctgggatgggaagatgctactactacgctacccgggttccagagtgattag

SEQ ID NO: 16396 - DNA, 1455 bp, Zea mays
  Peptide Sequence Number=SeqID_58175
atgtgggaccttaacgactcgccggccgccgaggccgccccgccttccccgtccgccgacgactccggcgcgtcctcctcgtcggcggccgcgctggtcgagatacccgacgacgcggacgacgactcggccgccgccgccgcggaagccgtcgtcacgcgccagttcttcccggccccggccgccgtcggcgcggcgcccgggcccggctcgtcgagcgcgcgcgcgggctggcttcgcctggccgccgcggctccaccgcccgcgggcgggcggcactcgcagtaccgcggcgtcacgttctaccgccggacggggcggtgggagtcgcacatatgggcgtacgatcgggcggcgatcaagttccgcggcgtggaggccgacatcaatttcagtctggaggattaccaggacgacatgaagcagcagatgggccacctgagcaaggaggagttcgttcacgtgctccggcggcagagcacggggttcccccggggcagctccaagtacagaggcgtgacgctccacaagtgcgggaggtgggaggcgcgcatgggccagttcctcggcaagaagtacgtctacttgggcctgttcgacaccgaggaggaagccgccagggcgtacgaccgcgcggccatcaagtgcaacggcaaggacgcggtgacaaacttcgatcccagcatttacgccgaggagctcgagccggcggcgtcgacgggcggcggtggcgatgaccacaatcacaacctggacctgtcgctggggagctcggcggggaacaaaaggggcagccttgacgacggcggcggcggaggaggcggcggcgacgacgagacctcggaccagcgcgtccccatggcgttcgacgtcgactggcagacggccgcgccccggagcacgaaagcaaaggtacccgttcggttcggtctcgcgttccgcatcaacgaggcgtgtcttgtaaaatgttgcctaataaagcaagctttgtcacgtttcaaccaccgggtacggtggccggcgcagctggacgcgagctccaagcaaccccagacccagatgctgcctcctccgcctcctgctgtcttgcgagtcgcccaccagctgccgttgccgttcggtcccaggcatccgcaattcctgagcaacggcggcgatccggggacctcgggaggcctgtccctcgcgatcggcggcgcgggcggcgggcactggcctccccagctgcagcacctgcagcagcagaggctgcacggcgcctgggccaacggcggcggcacgagctggccgcctccgccgcacccgcacccgcacccgcacccgccgccaccgagcaccgccgcgaccgcagctgcagcatcatcacgattccctccctacgttgttactacgacgcaaggcccggcaggctgggctcagaagaatgggttccattcgctggccaggccaacctag

SEQ ID NO: 16397 - DNA, 468 bp, Zea mays
  Peptide Sequence Number=SeqID_58176
atggaccgtctccgcagccgcagaaggttgaaagcattgccgggcggtacaactgtagtgatttgcagccagatcgacgccaacaaagttaaattcgacaagcacggcgctgagttccagggcaagacgcagtcatgcagcgcagtcgcccaatctgagcatccggaacaagcatgcattcattcagaacgatcgatggcgccagatggctacgtttccccgcccacgatgcatccggtggatcggagcagcgagctagcagggcacgacgagggcgcgcagcactgcggcaggcagcgaactgattcggagggccgaggagagcgacggggcatcgaagccgagtccacattaactgatgcccaaaaggccacagtggcaactcaccagacggatgagacgacgcagcggaggctctgtcgcctgaccggcgtggggtggatggagcaaatctccccccaaccatag

SEQ ID NO: 16398 - DNA, 879 bp, Zea mays
  Peptide Sequence Number=SeqID_58177
atggccgcccgtgtaccaccaacgacccatgatggcgaagcaggtttggtcgttgagcaaacgtcaaaggtacggaaaaaaaatacacacatgaaacttatcaacgtgggtaaaggcttaccattacctggcctggttcaaaatatgtttgatccacttttcagggaaatgttgggaaaagggttaaatctatcaccaataactgttagatgccccttaaaacttatttgtaggagtcattatttcgtggagagatcttcgagatgctctattgtcacaccattgagatcgtgcttcattaataaaaatcccttatattcgggtaccgaacaaaagcaacagatcgcgaaccgccggcgcgcgcggcgtggccgtaccagctcagcttcaagaagatggcagcgcagcgtgtggcggacgcgtggtggctttgtcgtcaatgcggatgcggccacaggcgccgaagcctgcgagcagagcaggcctcgggcaggtggcacgcgaacggcagacacgtcgagcggcaacgggccacctggccacgcacaggggcgcaccgcatcagcggcgccgaggacacctgctacgtacatgcatggagccccggtgacgccgtcgtcgccgtcggcgtcgcagtacgtgtcgcacgcgcgcgttttcagctggttgaatggtctcggtctcgcccattcgcacacaacactcccagtcccagaggagccagagagaacggtcatgcttcgacgggttaggttcgcactcgcacgagacggcgacgtgccgagacaacgtcgctacccgctggtgcgtgatactgatttgccggcggtagggttgcgcttgcgcccttccccagttgcgagcggcaaggacccgtag

SEQ ID NO: 16399 - DNA, 2034 bp, Zea mays
  Peptide Sequence Number=SeqID_58178
atgccggcgtggtggaagagcaagggcaggagcaagtctagcaaggcggccggagcggcggcggcggcggcggcggacgaatcgatcgcggcggccgctgccatcggcgatgtgaaggaggagaaggggaagaagaaggcgagcagcttcgacgaggcgctcctcgccaagggcgtccgcgggaagcagcagcatgcgccggcggcggcgggggagggtatggggctcccgctcccgctcccgcgcccggcgtccttgccgacgccgctgccgtccgcgtccgcgtcggcctccgcctcggcgtcggcgtccagcggcggcgactcctcgctggggtcctccacgtccgacgaccagctggatctcggggtttacaggttgtcagaaacaagcagcactcttctgggcagaacagtagcaattgaatcccggaaacaaagtcaggtgccagcagaggggaccattttcaccaataatcaggctgtggagcatacccggttgtctgaaacatcagtttccccaaggaaagaatttcgccctcaaaatttggatcttgcaaatgatcgaactacatactgccgtggtcggagatcaaccgaaatcgtgttcagtacacaagtgcccacttctcctcctagttcaagaggacatcactatcaaaattcgcctgtgccatcaagaacatttgggcaatgccctgcatctcctacttcatggcaggatgattcgcgaagctcaagctcaccccaaccacttcctcttcctccaggttccccatgcttgccttcctcttctctacagtggaagaaggggaagttgctaggtagtgggacgtttgggcaagtatacatgggattcaacagtgaaggtggtcaaatgtgtgcaattaaagaggttaaggtcatttcagatgattctaactcaaaggagtccctcaggcagctaaatcaggaaatcgtgctgctgagtcagctgtcacatccaaacattgttcagtactatggcagtgatttgtgcaatgagacactctcggtctatctcgagtatgtttctgggggctctatccataagttgcttcaagaatatggtccgtttggggaggcagtgcttcggaattacacagcacaaatcctttctggccttgcatacttgcatgggcggaatacagtgcatagggatatcaaaggggcaaacatacttgtagatcctaatggtgacatcaagcttgctgattttggtatggcgaaacatatatcagcatatacatctatcaaatccttcaaagggagcccttactggatggcaccagaggttattatgaatagcaatggttacagcctttcagtagacatttggagccttggctgcaccattcttgagatggcaacagcaaagcctccttggagtcagtatgaaggggtggcagcaatattcaaaattggcaacagcaaagacataccagatatcccaaataatctttcttctgaggcaaaaagtttcctgaaactctgcttgcagcgtgatcctgctgcccgccctacagctgctcagctgatggatcacccttttgtcaaggaccaggctacagtcaggagttccaggtccagtatcacaagggatatgtttcctaattcaactgacggaaaaaacagcagggtgaaaattgaaacttcgtcatacagaagtttatctcctttaagagatcctgatatccttggaagaaacttgccaggaccaacatcccctattccttcgacatcaagtcgcaggatcgcagcattgaacacatccaatgttcggatgaacatgtcgctgcctgtctctccctgctctagcccgctacggcagtacaggcagtccaaccgaagttgcttgcgctcccctccccacccagcctattcagctggagcagccaactacaatcctatcaacaatgcactctacccaacgcgaccaagcagcggtctcacagatccatggctcgaaatctctcaggtgaaaacgcaaacttttgattctccaagaagattgtag

SEQ ID NO: 16400 - DNA, 276 bp, Zea mays
  Peptide Sequence Number=SeqID_58179
atggctgacatccacacagtaagaagaaattcacctaaagtatacactactagcagttgtcacatttcttatttcccattgcaagccatcacaatgcttcatgatggagatgcgaataacttggtagatccacaactacatggtgaattgacgcataaaaagtttatacctcgcgtgggggcgacgatggtcactcgaaacttggaaaaccgtgcatgcaaaaatgatatccatgttggaacttgctctcaagcgcaaggaggccaacaagggtga

SEQ ID NO: 16401 - DNA, 381 bp, Zea mays
  Peptide Sequence Number=SeqID_58180
atgcaggcggcatgcaaccgcaccaagggggcgcaccctttcgacttcgacgcgcccagcatggaggcccaggcccacacgtcatgtaaccggcgcgccgggtactacgtgcgagaaactgcaccgccacttgcgctagtaccgtgccttctcgactgcagaacggtggcgacgactcgaggcacccctgcgcatggaccaacagtgtcaaccgagccacatcgggtcacggggaccgggaaaggggatactccgaaagggatccttctccgcgaaggaagcgggccccgagccttcctactgatcagaggttcgaaggctggcccctcggaagggttcgacagccgcctcagagcactcgggccccgcgcctactactga

SEQ ID NO: 16402 - DNA, 222 bp, Zea mays
  Peptide Sequence Number=SeqID_58181
atgggcaacgacctggggtcagcggggctgacaggccaggcccgacgacaggggcgcagggtccctgggtcgacaacagtggcgccgctcacgctcatgggtggaggcccgccggaaatgagggtgtggggcgcactggggggccccgggggcatcgggaagggctcagggaggttcgagggaaacgtggcgaacacgagtgtgggtatggctacaacgtag

SEQ ID NO: 16403 - DNA, 921 bp, Zea mays
  Peptide Sequence Number=SeqID_58182
atgacagcccaggtcgagccgaaccctgatgataacctagtggatgctagcctagaggatgttgtggaaggtggaaatggggtgaaaatggctagatatgtggtggaggaggaagatgatgaggaagaagaggtgctttccttggttcggcgcaagcggcgctctaggactcatagtaacacctcaagccttgctgctgcagccaagatgatggatatttgtggtttgactatgtctactattgagggtgtacttgaagatgccattcctcaggatctacttctcgaattacctgaaattagagctattgatatccatatagatcacttgaacgtggtaagcgtgctagtccaccatggtgcttcagctcctatcctggagatcactcttgctcctaagggtcctctagcccccaagggtgctctagaccccgagggtgctccagcccacaagggtgcttcagttggttctccatctgctgcttcaatggatgttcacgttgggtcgctaatgcctcggactaacgatgttggggcaacaagctctattatgcccattgaaccatccgagccaaccaccttagagcttagtggttctggtgctgaaatccgaatgggtacttctagtgctgaaatcccaatgggtgcttctggtgctgaaatcccaatgggtgttgcacttagccttggagatctagatcctttgacgcttgtccctgctcatactatggcttctgttaatgccatttcctctaggggtgtcttggacctggtggccgctcaactagaagcacatggagctctgaagttggaaactgcttatcgaaatatcaaggtcttagaaagcgaccgtgaaatcatgaaggctctagcctctagtgatcctgtgatcgatgcccctcttgaaaatgctcctacatga

SEQ ID NO: 16404 - DNA, 1482 bp, Zea mays
  Peptide Sequence Number=SeqID_58183
atgtttttcgacgggtcgctgatgaagacgggggccggcacgggcctgctcttcatctcgcccctcgggaagcacctacgctacgtgctatgcctccacttccccgcgtccaacaacatggctgagtacgaggctctggtaaacgggttgcgaatcgccatcgagctaggggtccgacgcctcgacgctcgcggtgactcgcagctcatcatcgaccaagtcatgaagaactcccactgccgcgacccgaagatggaagcctactgcgatgaggttcggcgcctggaagacaagttctacgggctcgagctcaaccacatcgcccgacgctacaacgagactgcggacgagctggctaaaatagcctcgggcccctcgggcatcctccagcgatgcatttccatcgccgaaggtcaggagctcttacaagagatacactcgggggcttgcggccatcacgcagcgcctcgaacccttgttggaaacgccttccgacaaggtttctactggccgacggtggtggccgacgccactagaattgtccgcacctgcgaagggtgtcagttctacgcaaggcagacccacctgcccgctcaggctctgcagaccatacccatcacctggccgtttgctgtgtggggtctggacctagtcggccccttgcagaaggcacccgggggctacacgcacctgctggtcgccatcaacaaattctccaagtggatcgaggtccgacccctaaacagcatcaggtccgaacaggcggtggcgttcttcaccaacatcatccatcgctttggggtccctaactccatcatcaccgacaacggcacccagttcaccagcagaaagttcctggacttctgcgaggatcaccacatccaggtggactgggccgctgtggctcaccccatgacgaatgggcaggtagaacgtgccaacgacatgattctgcaaggactcaagcctcagatctacaacgacctcaacaagttcggcaagcgatggatgaaggagctcccctcgatggtgtggagtctgaggacaacgccgagccgagccacgggcttcacaccgttctttctagtctatggggccgaggccatcttgcccacagacttagaatacggttccccgaggacgagggcctacgccgaccaaagcaatcaagctaatcgagaagactcactggaccagctgcaagaggctcaggacatggccttactacactcgatgcggtaccagcagtccctacgacgctaccacgcccgaggggttcggtcccgagacctccaggtgggctacctggtgcttcggttgcgacaagacgcccgagggcggcacaaactcacgcctccctgggaagggccgttcgtcgtcgccaaaattctgaagcccggaacatacaagctggccaacagtcaaggcgaggtctacaacaacgcttggaacatccaacagctacgtcgcttctacccttaa

SEQ ID NO: 16405 - DNA, 2196 bp, Zea mays
  Peptide Sequence Number=SeqID_58184
atggacgtgctgcggttcgtgcgcgccgccgcggcgccgcagcctgcggtggcgccgccggcgtcggctgcgacggtgccggcgcagcgccagcggctgcgcatgtggccgcgtggcgggggagaccagccgcccccggtcggcgccgcctccacgcgcggcgcggagccgaggagcccgcccgacgaggagcggaaggcggagggggcccagcgggggcagggcaactgggtgctgcagatgctgcgggtgcagccgcggtgggtggatgcggcggacgcggaggccaccggcggcggccaggaaccggacgaggagacggcggctgcggctgcggctggcgctggtggcgtcgaggagtgcgcttcctgcggctgcggggaagacgacgaaggctgcgccgtggggtacggcgacggcgacggcgaggtgttcgaccgcgcgtcgttctcgcggctcctgcggaaggcgtcgctcggggaggctaaagagtattccatgatgtcctacctctgcaacatcgcctacatgatccccagaattcagtgcagctcgtcctcggtgaatgtggaattgctttcggtaaacgctcaaatatcgtcggagtttcctctgaaccagagtttcttacctttcccaccgcctaactcaggaatccttttgctttcatgcttcccatcccagccaaaatgtcttcggcgatacaatctgcggttcgtgacgtcgtcagtgcaagacaaggccggagttagcaaccctgaccagaagcaggagcgtagcaccaagaaagacgaatctggcgatcaagcatccgaagctgtcgacgacgcggtgccacgacgtgggctagggacgataaaaccgtttggtgcgtaccatgtagtgtcttctgctgcctcttacctgcactcccgggccatgggcgttatgccatttggtcccgggaatggcgtcaaggacgatcatccagcagccgtcacgtcgctcgtgagcggcgcgagcggtgacggattgagcgtggacgaggcttcgttcgtggccacgacgagttcggtgacctccatggtcgcggcgaaggaggagacgcggcaagccgttgcggatgatctcaactcttcgagatcttgcccttgcgagtggttcgtctgtgaggatgatcagaacagcacgatatacttcgtggttcagggctcagaatcaattgcttcttggcaggccaaccttttgttcgaacctgtcaaatttgaggaggtggacgtgctggttcacaggggcatatacgaagccgccaaggggatgtatcaccagatgctaccctacgtgaaggcgcacctgaagagctggggcaaatccgcgcggctgcggttcacggggcactccctcggcgggagcctggcgctgctcgtgaacctgatgctgctggtgcgaggggaggcgcccgcgtcgtcgctgctgcccgtgataacgttcggcgcgccgtgcatcatgtgcggcggcgaccacctgctccgccgcctcgggctgccgcggagccacgtgcagtccgtcacgatgcaccgggacatagtgccccgggtgttctcctgccactaccccgaccatgtcgccaacatcctgaagctcgccaacgggaatttccgcagccacccgtgcctcgcgaaccagaaactcctgtacgcgccgatgggggaggtgctgatcctgcagccggacgagcggctgtccccgcaccaccacctgctcccaccggacagcggcatctaccacctgggcggcggtggcggtggcggtggggcgggaacggcggcgaatgcgggcgaaggctccctgccgcagctccggtccgcgctgtcggccttctttcaactcgccgcacccgctcgagatcctcaaggacggcgccgcgtacgggccccggggctccgtgtaccgggaccacgacgtgaactcgtacctccggtccgtgcgcgccgtggtccgcaaggaggccaggcgcgcgcgggaggccgagcgggagcgctggcgcctgctcctctggtggccgttcggcgtgcacggcgtgtcgtcggcgtcggcggggcggcgcgggggcctcgtggacgccgtcagcgaggctgccaggcgcgcgcatctcttgctggtggtgctgctgcccgcggagctgctcgctctcggcgcgctcctggccgtcattag

SEQ ID NO: 16406 - DNA, 177 bp, Zea mays
  Peptide Sequence Number=SeqID_58185
atgaccggggatcgtctcgtctgtggcctgtggcctgtggcctgtgggggtgggatgggtgctgcgaatgcgacttgcgaggttcctgtgtacacactacacagccagcaggtcaaattgtacaggagatatacatacaacaataatcacgaatccacctcatgcttcttcggttag

SEQ ID NO: 16407 - DNA, 531 bp, Zea mays
  Peptide Sequence Number=SeqID_58186
atgactgttcctcgaacggctcgcacacgcgcaacgaccgcctcgcgaaccactcgccccgtcgcattaactccgcggcgggacaggcggcgcctcaggcgggagaagcaagcgacgcttcgccttcgccataatgaccgcgtcgaaaaagggaccgggaaaggggataccccgaaaaggatccttctccatgaaggaaacaggccccgagcctccctactgatcagaggttcaaaggctggcccctcagaggggttcaacggccgcctcagagcgcttgggttctgcgcccactactggtcagaggttcgatggacggcccctcggaagggttcaacggccgcctcaggccactcgggctccgcgcccactactgatcagaggttcaaaggctggcccctcggaggggttcaacggccgcctcagagcgcttgggttctgcgcccactactggtcagaggttcgatggccggcccctcggaagggttcaacggccgcctcaggccactcgggctccgcgcccagtactga

SEQ ID NO: 16408 - DNA, 195 bp, Zea mays
  Peptide Sequence Number=SeqID_58187
atggtggaccagctccatgaaagggagaatcaaggtgtagcccaagtgcccacccaacagccgaagcagatgatagcccctatgctgtgcttgtcactagtagaaaagagctcaaagcctgcggcacgttcaacttttcactggcggttttcgttatcaaacgtcagtgaaagaaacaggtgggtccggttttaa

SEQ ID NO: 16409 - DNA, 1185 bp, Zea mays
  Peptide Sequence Number=SeqID_58188
atggccaaggccgtgccctcgccgctcgcggccgtggccgtgttggcgctgctcctcctgtgccgcggcgccgaggcccgcgtcctcctcacgctcgacgacttcggcggcgtcggcgacggcattgccaacgacacccaggctctcctggacgcgtgggccgccgcgtgcagctccacccaggaggccgtcctcgccgtgccggccgggaaggtctaccagatctggccggtgcagctctccgggccctgcaagaagaggctcaagctgctgatttccggcgcgatcgtggcgccgtcgagccccgacgagtgggccgggcgggaccccatgaagtggctctacgtctacggcgtcgacggcctgtccgtcagcggcggcggcaccatcgacggcatggggcagcagtggtgggccagcacctgcaagcgcaagaagacccaggcggtgcacttcgaggagtgccgggaggtgagcgtgcagggcgtgacgctgcagaacgcgcagcagttccagctgacgttcacgcgctgctcctgcgtgaaggccagcttcctccgggtggtggcgccggcggacagccccaacaccgacggcatccacctcaacgacacctcccacgtccgcatcacggacaacctcatctccacaggggacgactgcgtctccatggatctgatctctgacacagggactaacaacgtgcgcgtcagcatcggaagccttggaaagaaccggaccaccgacatggtggaggacgtgaaggagcagagagccaccacaccctccggctccaacacgtgcgatttctttcagggaggcacgggcttcgcgcgggacctgcggttcgagaacatcgtgatgaggaacgtctccaaccccatcatcatcgaccagtactactgcgaccagcccacgccctgcgccaaccaggcacgccattcctcaacgcaggcggtggaggtgcgcagggtggagttcgcgggcatccggggcacgtcggcgacgccgcaggcgatcagcatcgcgtgcagcgacgccgtgccgtgccgggacctggagctggcgaacgtcaacctgacgctggagggcggtggtgccggccgagccaccgccctctgctaccgggcgtcggggaagagcgccggcaccgtggtcccgccgtcctgcctcgccaggtcctga

SEQ ID NO: 16410 - DNA, 189 bp, Zea mays
  Peptide Sequence Number=SeqID_58189
atggcggcggcgttgtcgcagctggacgacgagatcgtccgcggcatggccatcggcgctgtcttcaccgactatgccgggaagataaactgcctcgacttccaccgcaaggaagatctcctcgtcacttccagcgaggacgactccatccgcatgtacaacatcaccagcgcgacctgtaatgtgtag

SEQ ID NO: 16411 - DNA, 543 bp, Zea mays
  Peptide Sequence Number=SeqID_58190
atgatgagatacaccaacatagcacttgtttctgataagaaaagagattttgtatacacggcctggaaaagatctttggatttctactctcatcctgacacaaatcattccacgaattatcaacccaatgaaaacactctcgctctgtacaatcctgataacacacaagaagcgcctgttgatccatacgattcagatatgactcaaagcctccaggaggctttgcaccggtcaactatggacataagtggtgcagagtatagagggaaggaggtgccactttttgtgctcccgacaagtttgagtccagctgttattacgcttcaggaccgcctgaaggaaaatgaacttcggctatctatgttaaaagaggagtgtaagcaactggaggctgatacccaaggcatgagaaatggttctcctcgtcgcctcatgaatcacggagctggtggcagcggttcacctatggctcagagcaggcatcctttctccagccaagggagccctagaagcccgagcggcggcagccggaggagggcttga

SEQ ID NO: 16412 - DNA, 336 bp, Zea mays
  Peptide Sequence Number=SeqID_58191
atggcacaaaagcttggtatccatacactcatcagtgactatcatgatctgattgataatatcgatgaggtgacccacaagagactggtggctctaaaggagatcaagaaagacaatatcatggtggccaaggcctacaacaagaagcttacccaaaaggcaggggcatgtgttgagcaccatatgtggcaactgggaaggacacacagtccaaccatgttgcccgaacggtctgcgattagattagatcaggtacgtccttcacaaccttcgtccgaagatcgttatatccttacggaaataatgcttcgaaggacgaagggcattgaccattaa

SEQ ID NO: 16413 - DNA, 396 bp, Zea mays
  Peptide Sequence Number=SeqID_58192
atgtccgatgccccaggctggctcggcggcgaactggccgttcttgagaatcggcagggcgacgtggctaaaaatcaccggactgtccggtggtgcactggactgtccggtgagtcttcagcgcccgcgcccaagtacaacggcaacgaactcgtccctctcgggaaatcaccaaggacactgcggctaaaattcaccggactgtccggtgagtcagagccgcccgagccaacggttaccaacgatcagcgagcgacacgtggcctgcaccaacagtcggttggggggcccattaaggacttgaaaggagtacagagggtcatgggattccttgcggctttgagccgtttcatctcgcgcctcggcgatgaggcctacctctataccgtctcttaa

SEQ ID NO: 16414 - DNA, 321 bp, Zea mays
  Peptide Sequence Number=SeqID_58193
atgacttcagccatagccttcacgggcgctgatcttggcactcaccctgcgattgaatgcaacaatgcagatgatgttggcgaacccgaggcatcctacgagcagcagcgcccactcaggtggcgcgccaccgtggaggtggtcgctgtcctcgtcgacgacaccccagcctcaccgtcgtggtgccccgcgcccgcgccgccgcgtctttggttagagagccggctgtccacgctgtgcaccaggtacagcacgcggctccagcacggggtcgcggtgggtgagcctccccaaggggtggcagggataacctggatctag

SEQ ID NO: 16415 - DNA, 663 bp, Zea mays
  Peptide Sequence Number=SeqID_58194
atgacgacgaacagagagcttcgcgcgcggccaacagatagcttagcgatgacgacgaacagagagcttcgcgcgcggccaacagatagcttgcgcgcagggacttcccggcgcacggcgcggagctcaacgcgcggcatcggagagctcggccgccataggagcagggaacaagcgctggagctgggcgcagcgtacgtgtgcagagggctcgacgacggccggcagagggagctggggtacagggagacgagcggccgaactggagcagtgcaggctccatggccgagggccagggccgctgggcgagatccgagccggggagaagcgctgcgagagctttccggcgaggtcgcggccaggtatggagttccatggcgcggactactccgcgcgctggaggaaagttccggccaggtgcggccatggggagctcggggcgccgtacagggcagagcgagctcgctagggaggagaggggctgggcgaccaggcgtcgagccagaggggcgcggctatggcaagggagaagcgccagggagaacctcagctgccatgggagcaggggagctcgcggctgggcactcggcgatagagcaggcgcggctgggggttgaagagaggaaaagctgggcgacggaatcctctctgccgcgcgcgtag

SEQ ID NO: 16416 - DNA, 678 bp, Zea mays
  Peptide Sequence Number=SeqID_58195
atggtgtctccagaagctccgcctcgcccgaccccagagctcgggctcaacctcaacgctggacgacggactccgcctcgcccgaccccagagctcgggctcaacctcaacgctggacgacggactccgcctcgcccgaccccagagctcgggctcaacctcaacgctggacgacggactccgcctcgcccgaccccagagctcaggctcaacctcaacgccggacgacggactccgcctcgcccgaccccagggctcggactcaacctcgacctcagaagacggactccgcctcgcccgaccccagggctcggactcaacctcgacctcggaggacggactccgcctcgctcgaccccagggctcggactcagcctcgacctcggaagacggactccgcctcgcccgaccccagggctcggactcaacctcgaccttgaaagacggactccgcctcgcccgaccccagggctcagactcagcctcgacctcggacggcggactccgcctcgtccgaacccagggctcggactcagcctcgacctcggaagacggactccgcctcgcccgacccccgggcccggactcagcctcgacctcggaggagcctccgcctcgcccgaccttgggctcggaccaaccacgtcacaggggggcccatcattaccctacccctag

SEQ ID NO: 16417 - DNA, 1134 bp, Zea mays
  Peptide Sequence Number=SeqID_58196
atggtgggctgctttgcatgcttcaagccagcgggtgaccaagaggcggacgaagaggcgccactgccgtcgacgtcgaggaggcgcggtcggagcctgcgattgccgtcgtgttcgtcgtccaacaagggtaaccagcaagccgataacccaatagcggcggcgtcgagcagcaacgtcgacagcagagcccgcgcgttcacctacgacgagctcgcggcggcaacggaaaacttccgtgcggagtgcttgctgggggagggcggtttcgggcgcgtgtaccggggccgtctggagagcgggcaggtggtggcggtgaagcagctggaccgcgagggcgtgcagggcaaccgcgaattcgtggtggaggtgctgatgctgagcctcctgcaccaccccaacctggtgaaccttgtgggctactgcgccgacggcgagcagcggctgctggtgtacgagtacatggcgctggggtcgctggctgaccacctgctgctggacaccagcagcagggacaagggcaacgccgctcccgagcaggagcagcgcgcgctgagctgggagacgcgcatgcgcgtcgcgctgggcgccgcccgggggctggagtacctgcacgagacggccaacccgcccgtgatctaccgcgacctcaagtcctccaacgtcctcctcgacgacgccctctgccccaagctctccgacttcgggctcgccaagctgggccccatcggcgaccggtccccgcgcgtgatgggcacctacggctactgcgcccccgagtacgtgcgcgccggcaccatcaccgtcaaggccgacgtgtacagcttcggcgtgctgctgctggagctcatcaccgggcggcgcgccgtggactccaccaggcccaccgcggagcagctgttggtggcctgggctatgcccatgctccgggacagcaagaggtaccgcgagctggccgatccgctcctgcgagggggcttcccggagagggacctcaaacaggccgtggccgtggccgccatgtgcctgcaggaagaggcatccgctcgcccgctcatgagtgacgcggccatgacgctggcatacctcgcagaagcggcggcgtcggcagcggcaagcagcagtactagctaa

SEQ ID NO: 16418 - DNA, 1494 bp, Zea mays
  Peptide Sequence Number=SeqID_58197
atggcggcggccccctacgaccgggaggacggtctgcagccgtcggcgccgccgcacgcggtggacgcttacgatcccagctacgtgccggactccgtcaagaccttcgtggtgcacctgtaccgccacatccgggacaagaacgtctacgagatccaccagatgtacgagggcggcttccagcgcctctccgaccgcctcttccgcgacgctccctggccctccgcggaggccgtcgcaccctactgcgacggcgatcccgtcttcctcctcctctaccgcgagctctggtaccgccacgcccacgcccgcctctctccgctcactgccgcgcaccgcgccgagtcctggaccaactactgcgacctcttcagagtcgtccttcacggcgtcgtcaacatgcagctgcccaaccagtggctctgggacatggtcgacgagtttgtctaccagttccagagctgctgccaataccgcgccaagctcaagaccaagacggaggacgagctcaaccagctcaagcagttcgacaaggcgtggaacgtgtacggggtcctcaactacctgcaggcgctggtcgagaagtccatgatcacacagatcctcgagagggagaaggagggcctggagcagttcaccgccaccgatggctacgactacgagggcgggagcaacgtgctcaaggtgctcggctactacagcatgattggcctcctcaggatacactgcctccttggggattaccacactggcctcaagtgcctcggtcccatcgacctcaaccagcaaggggtctacagcattgtcatcgggagccacatttccaccatctatcactatggcttcgcaaaccttatgatgcgcaggtatgttgaggccactcgtgaattcaacaaagattcttctgtatatcctcaagtacaagcagtatcatcagaagtcccctcaaacaagctcattgatgaaaatgttagcacccagctgaaagaaaagtataacgacaagatgacaaagatgcagaggtatgatgatgaagcatacgctgcttatgatgagctattttcgtatgcttgccccaagttcattacaccatcacctccagtgctggaccagccgctaacaaactataaccaggatgcataccgtctacagttgaagctgtttctttatgaagtaaagcagcagcagttgctttctgggatccggagttatctgaagctatattcaacaataaccattagcaaacttgcccaatatatggaagtggatgaagcaacgctaaggtcaatcttgatgacatacaagcacaaaatgcatgcggttgacagtgacggaaagatggtatcgagtgcagactttgacttttacattgttgaggatgttattcatgtcgtggagtccaaacctactaagcgtcatggcgattactttttgagacaaattttgaagttcgaggaaatgatcggtggactggataaagtacagcttgactga

SEQ ID NO: 16419 - DNA, 348 bp, Zea mays
  Peptide Sequence Number=SeqID_58198
atggtcggcaggtcccacggagacggctgcggcgacccgcacgcttcggttcttgctcgtcgcagaggttacagtgagtatggggcaaaaacacataatgagatcttctctctccaaattgtttacaaattggatattacatccgcctcgcccgaccttaggcctcggccttgggaggaggtctccgcctcgcccgacccaaaaactcgacctcagcctcggcctcgggaggaatcacgtcctcgcctgaccccgacctcggcctcgggagaagtctccgcctcgcccgaccttgggctcggaccgaccgcgccacaagggatacatcattaccctacccctagctag

SEQ ID NO: 16420 - DNA, 213 bp, Zea mays
  Peptide Sequence Number=SeqID_58199
atggctatccaagaagttactcggccaggagcttggcccttgcaagggcatcattgcgagggaatccagcaagaacaagagaaaagtatagtcactagaaacaccttggagttgaaacatggaacagctcgccaggtagcagcagcgtctgtactgtgcgtgtactgcggccagcacaatgcctatgacgctgacattgctctgggtgcgtag

SEQ ID NO: 16421 - DNA, 939 bp, Zea mays
  Peptide Sequence Number=SeqID_58200
atggggctgagggagatcgagtccacattgccgccggggttcaggttctatcccagcgacgaggagctggtgtgccactacctctacaagaaggtggccaacgagcgcgccgcgcaggggacgctggtggaggtcgacctgcacgcgcgagagccatgggagcttccagacgacggctttgagaatatatatgacgttggcctagtgatcagggattttgcttatggaaaatggaaccagagtaagctagcgatcttccgggaccgcaagtacgccacggggtcgcgcaccaaccgcgccaccaagacggggtactggaaggccaccggcaaggaccgcgaggtgcgcagcccggccacccgcgccgtcgtcgccatgaggaagacgctcgtcttctaccagggacgcgcacccaacggcgtcaagtcctgctgggtcatgcacgagttccgcctcgactcgccgcatacgccaccaaaggaggactgggtgctctgcagggtgttccagaagcggaaagacagcgagcaagacaacggcggcggctcctcctcgccgccgacctttgccggcgcgtcgtcgcagggggtcgttctagatctgccggacgaccagcagcccagcatgacgatggccggcgcgtacgtagcagtggaccaccaccagccaggctcttccgccgtcgggttcgcactgccgccgcatgcgcaggacaacggcctcggcgatggcggcctggacgcgttgctgatgaacggagcgaccatgtggcagtacagctcatcggccctcgccgaccacttcccgccggaggaagtgaccgccgcgcccatgatggggctaggctccaggggaggaggtgacgggtgcagcttcttctacgacagcggcttcgacgacatggcgaacatggggttcccgcagggatggatgggctga

SEQ ID NO: 16422 - DNA, 1728 bp, Zea mays
  Peptide Sequence Number=SeqID_58201
atgtctttccttgatgcctacttagggtatcaccaaatcaggatgaaagagtccgaccagctcgcgacttctttcatcacaccttttggcatgtactgctacgttactatgccatttggtttgaggaatgtgggtgcaacataccaaaggtgcatgaaccacgtgttcggcgaacacattggtcgaacggtcgaggcttacgtcgatgacatcgtagtcaagacaaggaaagcctccgacctcctttccgaccttgaaacgacattccggtgtctcaaggcgaaaggcgtaaaactcaaccccgagaagtgtgtcttcggggtcccccgaggcatgctcttggggttcatcatctccgaacggggcatcgaggccaactcggagaaaatcgcggccatcaccaacatggggcccatcaatgacttgaaaggcgtacagagggtcatgggatgccttgcggctctgagccgcttcatctcgcgcctcggcgaaagaggcctacctctataccgcctcttaaggaaggccgagtgcttcacttggacccctgaggccgaggaagccctcgggaacctgaaggcgctcctcacaaacgcgcccatcttggtgccccccgctgccggagaagccctcttgatctacgtcgccgctaccactcaggtggtcagcgccgcgatcgtggttgagagacgagaagaggggcatgcattgcccatccagaggccggtctacttcatcagtgaggtactgtcagagaccaagatccgctaccaacaaattcagaagctgttgtacgcggtgatcctgacgcggcggaagttgcgacactacttcgagtctcatccggtgactgtggtgtcatccttccccctgggggagatcatccagtgccgagaggcctcgggtaggattgcaaagtgggcggtggaaatcatgggcgagacaatctcgttcgcccctcggaaggccatcaagtcccaagtcttggcggactttgtggctgaatgggtcgacacccagcttccagcagctccgatccaaccggaactctggaccatgtttttcgacgggtcgctgatgaaaacaggggcaggcgcgggcctgctcttcatctcgcccctcgggaagcacctccgcaacgtgctgcgcctccatttcccggcgtccaacaacgtggctgagtacgaggctctggttaacgggttgcgcatcgccatcgagctaggggtccgacgcctcgacgctcgcggtgactcgcagcttgtcatcgaccaagtcatgaagaactcccactgtcgcgacccgaagatggaagcctactgtgacgaggggacgggaaggagctctaccaccgcagcccctcaggcatcctccagtgatgcatatccatcgccgaaggccagaagctcttacaagaaatacactcgggggcttgcggtcaccacgcagcgccccgagcccttcttggaaacgccttccgacaagaaggcacccgggggctacacgcacctgctggtcgccatcgacaaattctccaagtggatcgaggtccgacccctaaacagcatcagaaagttcctggacttctgcgaggatcaccacatccaggtggactgggccgtcgtggctcaccccatgacaaatgggcaagtagagcgtgccaacagcatgattctgcaaggactcaagccgaggatctacaacgacctcaacaagttcggcaagtga

SEQ ID NO: 16423 - DNA, 471 bp, Zea mays
  Peptide Sequence Number=SeqID_58202
atgaacagacaccagagctcaaggtgccattacaaacggaactccggttccacctccgcagggaccgggaaaggggacaccccaaaagggatccttctccgcgaaggaagcgggccccaagcccccctactgatcagaggttcgaaggctggccccttggaagggttcaacagtcgccttagagcactcgggctccgcgcccactactggtcagaggttcgaaggctggcccctcggaagggttcaacggccgcctcaggccactcgagctccgcgcccactactgatcaggggttcgtaggctggcccccgaagggttcgacaaccgcctcagacgcagagcgagggatgaccctgggctcgggggctgctctcgcaaacctggctctggccaaaccgttgacaacgtcaacataccagcccgagacttgggactcgactgtgcacccgggctacgaccagttcgcataa

SEQ ID NO: 16424 - DNA, 441 bp, Zea mays
  Peptide Sequence Number=SeqID_58203
atggcgggtggctccctgccaggtccgctcgaccagtcctccttggcgagctccctcctgcgcccgggcttctccgccgcctccccatggccacactcggctttcccttttccctccctagcgtgggaactacttcggccaccaattcgacggggatcccacgaatttgtcgccgcactccgactctcgcggccgagccgccgcgcagcgtgggcgagctcgcaacctcctcaacagccggtgagaacttctcctatagctccgccatgggctagtaatgctgtagctcgggttcgatttgtgaatgggggcgtggatggtggaatcgactgtgaccggcgatggtgttcgtcgcgggtgagcacgccgccgtgtattttttcgcctgaggtcgcagatggcttcagcgccgtcgattggatagccaacgtccgagattag

SEQ ID NO: 16425 - DNA, 441 bp, Zea mays
  Peptide Sequence Number=SeqID_58204
atggcgggtggctccctgccaggtccgctcggccagtcctccttggcgagctccctcctgcgcccgggcttctccgccgcctccccatggccacactcggctttcccttttccctccctagcgtgggaactacttcggccaccaattcgacggggatcccacgaatttgtcgccgcactccgactctcgcggccgagccgccgcgcagcgtgggcgagctcgcaacctcctcaacagccggtgagaacttctcctatagctccgccatgggctagtaatgctgtagctcgggttcgatttgtgaatgggggcgcggatggtggaatcgactgtgaccggcgatggtgttcgccgcgggtgagcacgccgccgtgtattttttcgcctgaggtcgcagatggcttcagcgccgtcgattggatagccaacgtccgagattag

SEQ ID NO: 16426 - DNA, 282 bp, Zea mays
  Peptide Sequence Number=SeqID_58205
atgcggtctacgccggttgttacggtagggaagaacagtctggccatccgagcccggctgccagtgactttagcgggggacgcggcaccaatccgcgcacgtgtaagaggtagcccacggagcgggccccacatggaagtgtctccaaataaaaagaaaaaaggaaggagcgtagagtgggctggcggggaagattttcagcccaagcggtcgtcagagggggcagatgggtgggccgaattgaatgaagttagcccaggtgcagaaataccatcaggatga

SEQ ID NO: 16427 - DNA, 2658 bp, Zea mays
  Peptide Sequence Number=SeqID_58206
atggagatgggtgacgatgacaattcttcaagcagaaaatgtaacacatcatcattaaaaatgttactagagaaggagatgtctaaagaagcagagtcaaagagaagacatccaagtgtcattgccagattaatgggtcttgaggaggatttacctactaaagaaccaactgtacaccataccgtaagtgacttgagtagagatttgaatgccacaaacaacaccttacagggaaaagaacaccatcactttataatgtcgaagacacaaaactaccaatcctgtcatgaaaaaatcgaatacaatgatgtttttgaagtatctgaaggacaaccgggaacagactgttttcatgatagaacttcacagaaaggatggtcttccgagaacaagagtgagcaattcaatattgcacgagacaagatcatggaaccagaacagttagctattgaagagaagctcctttgtacaaaggagttgcctgaagctcttgtttttccatgttcaaatagagatttatttcttgaatttcctgaagaacataaccccacattctcaagacagtcgagtgggcttcatgcaaaccaagcaccgcctcaaacaaaacgcattacagtgctgaaaccaattagatctgttgatagtgatggcataagacgacccagagcagaaattggtaagcaaaatgtattgaagatgagaaggttccatcagattcctagttcaaaggaagagataccttcccaaccaagtagaataatccttttgaggcctaccccagggaagccaggtatatcaaaggcaaagctgacatccagggcaacttcatttcagttacctaaccgtaacagtctcaatggatcattagatgataaccaggcatccataggatctgcaggactagtgcatggtatgatgcagtgccggcaagatggatgtcaccaaagagatgattctttattatcttctgcatactcaaatggatatgggggagatgaaagctcattcagtgattcagaagttgattataccagtggctctgaaatcaactatattgaagattgtgataccctcagtgactccgagggaggtagccctctgtcaagacactcatggaattacataagaagatatgaaggtcaatgctcaagttcatcctttagcaaaatatcccacttttctgagtcgtcagttgtaacggaggccaaaaaacagatttcagagcgatggtcaatggttacatgcaatgagatgagtcaagtgcaactgtcgagaagaaaatgcacgttaggtgagatgctctccattaaggaagcaaaggaagacgaggccaccactgggatgttttatgtttccagcaaccagtcatgtggcctggagaatgaactgactacacgttctacaaatgtaactacttctagaaaaaatggtgacaatggggagagatcttcgaaattgccaagatcaaaatctgttccagtgatttcatccacgtctgataacatgacggtgaacatgcaagcttcaaatcctgagagctgcaaacttaaagtggctgttgtgtcaaataaaggaaaatcagctttcaagggaagagtttcagattttttcttgtctaaaagtaaaaggccaagaaggcagatgcctgcttatcatcaatctgattgtattgctgaggggcttgaaggctgtattactcataatagacaggactgcaatcataaaatggatgccatcgagaaagcgatgcattacgatgatgaattcaatagtttttcgacacgaatatcaactagcataccagatagaacaacttctggtgcatctgtttcattgggcagttcaaccggaaacctggataaactaggagtaaacaaatgcctaaatggtaaccgtgatcaaccaagccctacctcagttcttgatgcaccctctgaagatagcagttgtaatgagcctgaaacacttggaacaactacttccaagaatgcgatatcaagatcttcagcaattgaaactgtggcccgtttcttgtcattggatgacaccgcctcagagtcacagtcactttgtaacccaagaccgagttctcttctccctgatgcagatgatgatgagtcagagtgccacgtccttgtgcaaaatataatgtcatcagctggattaggcacttcacagtcacgtatggttttcgccggctggcatttacctgatcaccctcttgacccggtgctgcgtaacaaagtatctcagctgcaggagaaaagttcatacagaaggcttctttttgactgcgtgaatgttgctctaattgagatcggtgagaacgccttactgagcgccctcccatggagtaaaagaagttccagaacatggaggggcacctcatctcctgatctgggggtggaggtctggagtattctcaaggactggatacacggggcacggatgtttgtggtgagcaagagagataatgctgggatcatactggacagaattgtgaagcaggaggtcgaagcaagagggtgggtgaaactgatgatggcgcaggtggttgtcatcaccgaggagctcgaagggggagtaatggaggagctggttgaagaagcggtgctggatttttacagtctgttttcagtggtgagatatcgattgtga

SEQ ID NO: 16428 - DNA, 1500 bp, Zea mays
  Peptide Sequence Number=SeqID_58207
atggcggcgctgtggcttaagctgctgctcgccgtcgggctccccatcgcggcgctgatcgcggtcgtgtttctggtgtaccggcgtaggagcttgccccgtaatgcgccgccggcgctgccagaagtttcccctacggccgttgcggagccgacggcgagccccgggctggcgaagctcaacatgaggtacaacgccgccagcggccgcgtggggctccggttccagcagttgcaccagcaccagcaccacgcccgcgtcgacgcgaggcaccgtggctcgggcggcggcgcgcagcagggcccgttccagtgggccgaccacccgcggctggtgaccgaggcggcggagaacgggtgggcgcagttcgtgttcgcggtggcgccgccgcggtccaagtccaagtccgcgtcgtcgtcgccgctgtgggggacgtgcccgctctgcgacgccgggacgagccgcgacatggcggaggcggcagcgtgggagctgcccatgggatcgtccgagcggatgcaagcggtgcggctcgacccggcggccgccgccgcgtccagcaggaagtggctccccgggagcaacccgagcccgctccgcggcgacacggacgcggggaaccccaacgcgctgtgcctcgccaggatgagccttccgctgccgggcccgcccctcgccggcgcgccgttcccgcaggacgcctacttcgagatcaccatcatctacctgaacacgaaacggccggagtggtccgcgtcgagggcgagcaggcgtgggcgggacggctccagcgagagcgaccgcgtcaagctcgtcagttttgcacctgccgccaagaacccggtccaagaaaacagagccgtcaaggacgacgaacaggataaacggaggcatttggtcatgtcgctcggcctcgccaccgcgtccgccgctccacaacggccgtcgctggtcggaacgtacgcgtcgtccatcggcttccattccgacggcgcggtctaccttgacgggatgaagctggtgtacgaatcggacaagtcctcgtgggcgggcgtggacaaggttgtggggtgcggcttcgagccggcgaagcgcaaggtgttcttcacggtggacgggcagctggtccacgccgtgagctgcaacgcggaggcgttctcgagcccgctatacccggtgctggcctccagcttcgacgtgatggcgctggtcaacctcgggcagagcaagttccggtacgcgccgggcaacgcgcggcgcacggccaacccgtgcttcgtacgcgccgcgtccacggtggacgcccgcggcagcggctcgatgggcctcgacttcgacgacagcggcgagctcttctccgtgggccgcgtggactccgggtggctggagacggcgaagacgagcaggagcaggaaggagagcgtcggcggctccggcgcggcgtccgtcggcgacccggaggccgagtccgacctgttcgagatcccgctacgagactga

SEQ ID NO: 16429 - DNA, 2358 bp, Zea mays
  Peptide Sequence Number=SeqID_58208
atgactgaaatgggagaagctctgagaacctgcatggagcggctggtggttgccagagaagagcgggagcagatcatcgtcgaggcggccaacgagatatcctccaagaagaagaaagtgcgcgagctccagctgaagctggaggacgcgaacaagaagatcgcgaagctcgccgccgagaacagcaacctctgcaaggccgctgacgtcaaggacgcgctgatcggggagctgagggagtccgcagcggccactggggacaagctcgccgacgcgacggcgaggctagagtcggcgcagaaacaagccgggtcgttggagtacgaggtgcgcatgctccagaaggagctggaggtccggggccaggagcgggagtacgacctcaagtccgtcgacgccgcgcgccggcagcaggcggagcaccagaagcggatcgcgcagctggaggctgagtgccagcggctgcgcgccatggtccgcaagaggcttcccgggccggcagcgatcgccaagatgagggacgaggtcgatcagcagcaggcccagacccccacagccagcccgaggcgaccccgtcccgcgacgccctcctcgccgcggtcggccgtcgcgccgttctcgccgcggaccccgtcgccgcggcgatccgtctcgggcggcgccgacggctacgcgttcaggctccgcgccgtggaggacgagaacacggcgctgaagcaggcgctggccaagagggagagcgagctgcagttcatgcagatgaagtacgccgacgaggcctgcaagctgacggcggctcagatgcaggtcaaggagctgacggaggagaacaggcagctgagtgacgccaacactcagtctgaatcctgggcttctgctctggtttctgaactggacaagttcaggtcaggcaacgagaacggtggtgcctgtgcgtccatcatggcatcatctgagatgaacctgctccatgatttctctgaggttgagaagctggagacggcgtcaggtgatcaaaagcgcaacgtgcagcgtgcatctccgcacaaggcggatacaggactggcaacggaagaacagaatggtaatgctcctgtcctggatggtagcgtctccaacggccatcctgagaaggttaggcatatctgggaattagttgtgcagaagcatgaagcgagcggggaaagctttgaagctattattgaacagataagccaggcattggagcagacagctactcgtgccaagagagatggttcggacgtgccaagtgaccagtctgaaatagagaaggcggtgagagatatggttgagcagaccacttccatgatccaggcggcatatgcagaagaagacgacgtcgcaagatcaagagcgctgtcgcaccacaagtctgagatgtttcgccgcttcaagcgcctggttcaggtccgtcatgagctactggaagggaaatgcgaccttggaaagtttgtagacgaggtctgcctcatcctaaagtacgtagtgagccaatgcttctcggatcaagatcagatcgacactgtgagccgtgatacagaggattttgatggagctaagccatcaggtgcggttacagcagacggtacgcatgacactgaaagcgctaaaccaacagcgacttcagcttttcggacagaagcagatggagaaccagttcagtcagttgaaagccagactacggcggccaatcgtctgcagaaacctgatatagaactcatacatgccctacaacacgaggatggtagtagtatcctttcagagagaaaatcggcggcataccgtgagatgcaaagccctgcttctgaggcaagtgtggaacgtcgggcagtgcaagaggaaaatcatttagcaacaaactcagagattctcgcagcggctgataagctcgccgagtgccaggagacgatcacgatgctgagcaagcagctgcaggctctaaagacgccggcaactccaggtcctctagacgcctcctccgcctgcatccccaggacgagctcggcgaagtccgactacaagccgcagtcgctcgcgagcatcctcgccgaggcctccacgtctcccagtcccactcccaccacgcccacgccacaggtgctgtccaaggaagacgaaggcgaggttcgtgctactgctacgccgacgacgaggagcgcagcacggcaggaggagaacgacgccggcggcaataattcgatgcagattgtcgtcgtccatgccgagccgcggccggacgacggtggttccgctgacccgacgaagaggaggaagaagcgcggcacgagcctgctgggcaggatcgtgttcaggaagagagccgaaggcggctcctag

SEQ ID NO: 16430 - DNA, 147 bp, Zea mays
  Peptide Sequence Number=SeqID_58209
atggccttcattcaaatcttcacggttgccgagtgtctgccttgtgataaatcaccaggccccgatttggtttcacaggtcgcttttgttgtcaacgtgttcaatgccttgtttgaaataggtgcaaaggagccttcacttggttaa

SEQ ID NO: 16431 - DNA, 504 bp, Zea mays
  Peptide Sequence Number=SeqID_58210
atggcggtcaggatcgtcgacgccggagtactgatcgccatcagaagatgctccacctcactcatgaggctcgcctccaccccgtggtgccagtcctccgccgataccggctctcgactgcgtgatgaagcacaccacgtgaaggatattgttgggttgaaggttatgaacctccagctgatagtagtgggggagtccgcccacaaagggatgcaggggcaagccgaactcgcgctcatagaaggacgcaaaccatggagacgactctctcagatcaaggaaacgtggaatgacgccatacgtgtagtaggcaagctggacgggcacgaggaagcaaggaggcacaatagccagagggcttctagggaagaaaggaagcaagggttcaagcgcaagaatatgggccaccttgggtatcaggcaagaaaagactgtgtgccttgtaggttctcgccgcttgggacagagcgccagcggggcacgccgcagaagatacaccagtaa

SEQ ID NO: 16432 - DNA, 243 bp, Zea mays
  Peptide Sequence Number=SeqID_58211
atgacgttgcagcacctacggtatgctcaaagtgtcgcgtggaattcgcttggacctgggggtggcgagggagcaatggcgcaggtggtgtcacacccctcggtgtcatcggtgttgctagggcatcacgcgggaaagagctcgtgggaactccctcctccgtggttgaagtggcgtcacggatggcgcttcaagcggtgccgccacctccggcaccttcaacggttgctcggaagaaagtga

SEQ ID NO: 16433 - DNA, 435 bp, Zea mays
  Peptide Sequence Number=SeqID_58212
ggatattgctcacctcaagaggaaactctggagcaccggggcaacggcgaggacacagggatagctcgggtcgacagcggcgggcttcggctgcacggggagaacgccggtgagcgtggaccgggcgaattagagaggctgggggcaaactggaagggtgttacaatgggccaccccaagcctcagcgccctcctccgcctccaacttttgcctaccccaagactctcaatgaatggcaccagcaggagtatggtgtgtcatttataactcctaaggatgaagctgaagggtttgatgactcctttttccagtctgctcctgccgccgctccaggacctatccctggtgaccctaggccttcaggctcagagcaccccccctcctccccctccttttcagggtccttccccttcctctggttttccttcatctaa

SEQ ID NO: 16434 - DNA, 441 bp, Zea mays
  Peptide Sequence Number=SeqID_58213
atggggactgatggacacttggacctcaacaagggaggatcacctattcacccctctaggtgctctcacatccgccggcgtgggaagaagttatttggtaggggagaggacattgatggcgtggactttatccagacggagatagcggagggcggctggcacaacggctgtggaagctgttggctgaggcatggtgcggagggcggggtgagggggcagtgggcacgacgtgcgcctggcgatggtgagggcacggatggcacgagagacattgaggatggggatacaacggaaaccgcggcgccgcgcgtcggtgtgggccgtggggagcatcgcgcgcaggggcgaaggcgggacacggttccactcgtggtctacattacagtcttaatggtagtagaatctattttatatgcaaggtcgagagggcaaagctcatag

SEQ ID NO: 16435 - DNA, 243 bp, Zea mays
  Peptide Sequence Number=SeqID_58214
atggccggagtacgcgccaccggcgatttctacagctattttccaatccgtcctatggtacaggcagaggaggaccgtgcgaatttgataggggcgtactcaccgcgaaagagccagctccagataaagccttgcatgatccttggtgtcttttactttctgatttcctggttttggatgggtgaagatgtaggcctgctgatgatggtggataagtgccggtgggctcggccttctacatag

SEQ ID NO: 16436 - DNA, 501 bp, Zea mays
  Peptide Sequence Number=SeqID_58215
atggcccacttcaccacatcctcatgcgagtgtgtcccaggtgtcagccaccacgccgacccatcctcgcttggttccgttgtacgaggctcctgcgcgggaaggttcatgcttcggaggtcagcattttgtactgttggacttcgaacttcattgggtgtagcccccgagcttcgagtggatttttgcgaacgatccactcgaaggtcttcacttcaagggatcaccgcggaggtatggacttacatccggtccatcgagcgtgctgggctcgagggctcggatgagtcagagtactcctcggacgaggagaattcctccgactcgtccgaggagggcagcggcggcgacggcggtgacggcgacgacgacggaggcgacggtgatggcggcggcggcgacagcggcaagggcggtgacggcagcgacaagggtggcagcggcgacggcggcagcggcagcaagggcagtagcaagggaagcaacaaggccagtggctag

SEQ ID NO: 16437 - DNA, 240 bp, Zea mays
  Peptide Sequence Number=SeqID_58216
atgaagggtattattaagagcactcatgtcgaatgtgtcttttttgtttactctatgttgacaccttccgtatcaaccactaggaacaggttcatctcaggatacatgctcacagtcacattggttcagtcaaaagtgcttgtgctaatgggagagttgctaaaagggcaatatctttcactacagatctctattgaaattataaaaataccacacagcataaggggaacttttgtttag

SEQ ID NO: 16438 - DNA, 276 bp, Zea mays
  Peptide Sequence Number=SeqID_58217
atggctttggctatgactatggtgctggtggaaaacttggatgccattgaatgtggggtggttggggctgctgtcgcatggcgcaccggacagtccggtgcaccaccggacactgtccagtgcgcagccacgtcaaccagccgttgggttctgaccgttggagctctgacaggtggggcctctgggctgtccggtggtgcaccggacaggtcttgtagactgtccggtgcgccaattgtgcgtgctctgtcctctgcgcgcgcaggcgtgcattaa

SEQ ID NO: 16439 - DNA, 246 bp, Zea mays
  Peptide Sequence Number=SeqID_58218
atgtcagagctccatcaaggtttgcacacccatggcagcacggcggcagcggctatggttattcagggcaagataggtcctggtgaccaggatcatctgcagaatgaccccaatttggttgagtttttctttgaagtggttgataccggcctgcgttgggatgcccaaggagaagaggatgttcgtgttcgaaaactatgttcaggtgaacaatggccaagaatagtggaagccgttcgcagatag

SEQ ID NO: 16440 - DNA, 723 bp, Zea mays
  Peptide Sequence Number=SeqID_58219
atgcccaccgggcctgagcaatgtacagccactggcagacgaacactggccgtctccctcctggcctcctcagtcctcacgagagaaacgcaagcgagacagcagcagagcagagacgctgctaccgaggcaggtgtcactggccgcctagccgtggccggggcagtggcatatgcactgaaagatcgattcaccacgagaagagaaccacatgtggcccgcaggagcggagcacccgatgggcacgggccagggccagggccccgcggcgccgtcgccggggtcgagcgcatcgacggcgtggcagtcgccggtgccgtactacctattcggcgggctggcggctacgctggggctcatcgcgctgtcgctcctggcgctggcctgctcccactggaagctgtccgtgtccggcggcagcctgctgccgggccggcgggccggacgacgacggcggcggcctggaacgccaggatggcggcgggaaggccgcaggggagcgtcggcgggagcgcgtgctggtcatcatggccggcgacgagatgccgacgttcctggccacgccggcgctgggccggggcctggacgacgcccgtggcggcgtcggcggcgtgtgcggcgaggatgggaggtgcggggcgaggagctagctcttggctggcggccgacgacgcgcagagtggtggtagcactggtagctctgcggtaatcagtgagagatga

SEQ ID NO: 16441 - DNA, 780 bp, Zea mays
  Peptide Sequence Number=SeqID_58220
atggcgaagcaagctgtcctccttcccatggctgcactggcactggttcttggagcacttgcaaccattcctgcaggtgtgcgatccatcggcgtgtgctacggcatgaacggcgacgacctgccgtcggcgagcgacgtggtgcagctgtacaaggacaacggcatcgactcgatgcgcatctactccccggacaccgacgtgctccaggcgctgagcggctcgggcatcgccgtcaccgtgggcgtccccaacgcggacgtgggcggcctcgcctcgcgcccctcggccgccgccgcctgggtccagagctacgtgctgggccttcccggccgtccagttccgctacatcgccgtcgggaacgagcgaccccgggcgccgtcgacatcaactacgcgctcctcgccatgcccgccggcacggtggtggtgcaagacggcgggtacagctacgacagcctgttcgatgcgatggtcgactgcttctactccgcgctggagaacgccggggccgggaacgtcaccgtcgtcgtgtcggagagcgggtggccgtcggccgggagcgacgcggccaacacgaccaactcgcaggcctacagccagaacctcatcaaccacgtcggccagggcacgccgaagcgccccgggcccatagaggcctacatattcgccacgttcaacgaggaccagaagcttggagacgacgagacgcggcggcacttcggcttgttcaacaaggacagatcgctcgcgtaccccatcgattttgtcaacccataa

SEQ ID NO: 16442 - DNA, 861 bp, Zea mays
  Peptide Sequence Number=SeqID_58221
atggcccctgaagttatggagcaaaaggattacgatttcaagtatatcttgttaccttgttactactatcgaaagttgttgatttttatttattcatcaccggcggatatttggtcatttggcattactgcacttgaacttgctattggtcatgcaccattttctagccaacctccagcaaaggtttttctcatgacgttgcaacatgcccctccatcacttcataacacgaaggagaagaagttttcagactcttttaaaagtatgattgccacttgtctcattaaagacccaacaaagaggccacctgcaaaaaagctattaaaacacccatttttcagaagagcaaggtcagaccataatgccgtgaaatgtatgctaaataagttgccgtcattggctgagcgaatgcaatttataaaggaaaacgaggcgaagttgcaggcagataaaaaacctcttgataactgcaaagagaaagcatcacaggaagagtatagaagaggtgtgagtgagtggaatttcgatattgcagatttaaaagcacaagcggcattgtaccccgatgagaacgaagcagaagacttcttacgttttctatttgaactggacattgttgatgaaacaacccagttaaaagatattagagcagaaagtcactctataaataatgatggaacggaaaatcaaattcaacaagtccgatgtcttcatcccaaagtttctacgtgcaacgatgttgatgaatatttagagaaaacagcttttcagaagggtcgttttaaggtgatacatgattatagcaaggtgtttgttttttactatatattgttataccatgatatctttgattatcaatga

SEQ ID NO: 16443 - DNA, 270 bp, Zea mays
  Peptide Sequence Number=SeqID_58222
atgagctgtggcgcaaagcctgggggaggccagctacgagtctacgacctcaccaccatgcttgtcgttagtcctggtccaggcctatctacctcatcgacttcgcctcctacaatctggtcgacgagctccaggttacatcctgctggagagcctccgtctccgagggccgcgcatgctgcaactgcagtgggcaccatggttgttttccagttgcgatttacaaaatggcgacacagggtggaattggaccagcagggcactccatag

SEQ ID NO: 16444 - DNA, 234 bp, Zea mays
  Peptide Sequence Number=SeqID_58223
atggagtcatcgatgcacgggcaggcgcgggctggggccatggggcgtcacggggtgtggacgccctcgaggacttggggactgccggaggagtgggggcggggtcgctggagcgagattgccggcggcgcgagggtcacggaggctgggggcgtgcgtagaggtggagccacgggctccaccgaggatggcggggtccagggcgggtggatccgaggatgccggaggcgctag

SEQ ID NO: 16445 - DNA, 186 bp, Zea mays
  Peptide Sequence Number=SeqID_58224
atggcgtctccgccttggaggcgcagctctggcatccggaaagcagtttgtttagctttcttacaaccattagccacttcctcacagctaaatcagattgttcagcaatatgtagctaacccaacagacactaccatcccctcttcaacgttgcgtatcgactcaacacagcaaatcactaattaa

SEQ ID NO: 16446 - DNA, 1995 bp, Zea mays
  Peptide Sequence Number=SeqID_58225
atggcgaacctgacgaacggctttgcgagcctccattgcgcaggggcgatgcatgtggacaaagggcacatgcaagcatcgggactgccttttctctctttcagaagatgcgcccagcttgatatctccagactaggtagcgtgcctcgtttcatgggcgcaacatctgctactgtctcccaacatcatgtgaggcagaggatcagcgccatcagagcctctactctttcctgcctgcaagacgatgccacaaaattctttgattttgtggttattggcagcggtgttgctggcctaaggtatgctctggaagtttcaaagcacggctctgttgctattatcaccaaggcagagcctcatgagagcaacacaaactatgcacaaggcggtgttagtgccgttctatgcccctcggattctgtagaaagtcacatgaaagacacaattgttgcaggggcttatttgtgcgatgaagagattgtcagggtagtttgcacagaaggtccagagcgtgtcaaggaactaattgccatgggtgcctcattcgaccatggtgaagatggtaggctgcaccttgcaagggaaggtggtcattctcacaacagaattgtccattctgccgatatgactggaagagagattgaaagagcactgcttcaagcagttcacaatgatgataacatatctttgtttggtcatcactttgctattgatctattgacatgtcagaaaaatggtgaaatctattgctatggagtggattcaatagacattgaaacccagaaggtagtccgcttcatctcgaaagtgacattgcttgcatcaggaggagctggccatatatatcccacaaccaccaatccaccggtagctactggggacggaatcgcaatgtgtcatcgtgctcaggctgtaatatccaatatggagtttgtgcagttccatccaactgcactttcagatgagggcctgccaataaagccaaagacaagaagagagaatgcatttctcataacggaagcggtgagaggagacggaggaattctttacaaccagtccatggagagattcatgccgatgtacgatgaccgctcggagctggcgccgagagacgtggttgcgaggagcatagacgaccagctgaagaaacgaggcgaaaagtatgtcctcctggacatcagccacagaccaagagacaaggttcttgcccacttccccaacatcgccgccgagtgcctgcggtacggcctggacatcacccggcagcccatcccggtggtcccggcggcgcactacatgtgcggcggcgtccgggcagggctgcagggggagaccaacgtgaagggcctctacgtggccggcgaggtcgcgtgcacggggctgcacggtgccaaccggctagcaagcaactcgctgctggaagcgctggtgttcgccaggagggcggtgcagccgtccatcgacctcatggtggatgccgacggagatgccagaccgtcgctggtggcgaggtgggcacggccgacgctgccgcggtcggtgctgggcgacagcgtgctgtcggacatcgtggggcggacgaggcaggccaggatggagctgcaatcagtgatgtgggagtatgtcggcatcgtgcgctcgacggggcggctgaagcaggccgagtggaggatcggtgacctggagtcggagtgggaggagttcctgttccggcgggggtggaagccgaccacggtgggcgtcgaggtctgcgagatgcgcaacctcttctgctgcgccaagctcgtcgtcaggagcgcgctggccaggcgcgagagccgcggcctgcacttcaccgaggacttcccgtacctggaggagagcaggaggaagcctacggtcatcttcccggccgccgtgcaggagctcacgtggagctccaagccgttgcagaggcagctgcaagcagatgacaatgcatgcagttcatccggctgggccttggggattcgttaa

SEQ ID NO: 16447 - DNA, 571 bp, Zea mays
  Peptide Sequence Number=SeqID_58226
atggcgctccaggcgcagcagcaggccaccccgtcgccgacgcgcgacagggcgggcagcggcgagtggctggccgacacggagaagctccccggcgccgccgcgtccccggaggacgtcgtcgtcgcctccacgcaccacgccgccgccgccgccaggtacgtgccgccgcgcgccacgtcgcacaccgccgaaccgaaccctggccgcggcggcggaggcgggtggtactcgtggaacggcggccgtcgcgctcgccacgatccgcccgcgccgcggcggcagcagcccgcgaagacgcccccgcccgccccgcctctgcctgcggctccccctccccctcccgctgcctctccggctccagctccaagggccccgcctcctcacgcgcaggtcaggtcggccgaccgggtcgtgcccgccattctgtcgcgcaagcgccgggccgcggtgatgcagcgcgccgcgctgctggccagggccgccgccgcggggcttttcctcgccgcgctcgccgtgctcgcctccgacaaggcttgcttcccgcgactcctacagctttctacgccca

SEQ ID NO: 16448 - DNA, 204 bp, Zea mays
  Peptide Sequence Number=SeqID_58227
atggcgactacagcggtgaaaagaagaaaaatgcgagtgcaacagaggcgcagaggactcggaggagaaaggatgcaacagttgaagaaatggatccggacccccgtgagaaagtgccggaccctagcatacatgacccgggacctccgggtaggacccgggacctccgcgttccccgaatgggacctggacccctctaagtaa

SEQ ID NO: 16449 - DNA, 321 bp, Zea mays
  Peptide Sequence Number=SeqID_58228
atggacgcgttctactcgacctcctcttcctcgttggcgtcgtacggtggcggctggggctacgattcgctgaagaacttccgccaaatctgtcgtgttgtccagacccacctcaagctcagaaagaggtacgggatgttaatggcgactaccctcctggaagacccctcatcattcttgccgtggaatatgacccaaggtgtaaacatttctcggatcggagagactctcctgaatgttctacggagagagctaggtgaagttgaaaagaacaaagacactttcttggcagaattcacaaagggaggaaaagcagggtag

SEQ ID NO: 16450 - DNA, 300 bp, Zea mays
  Peptide Sequence Number=SeqID_58229
atggcggaagcctcttcgccgtcgtcgtcgccgctgcgcgtcccgccgcagcgggccgtggcactcgtcgccgcgctcctcgtgctcgtgctcctccgcgcgccgtgcggcggcgccatcaggccggtgcgcgagggggcgagtaacggtggcgccgctactgttgcgcgggcgcaggacggcggtcaccgccaccgggcagcgacgcgtgcgctcgggtcggatcgagctcccctcgccgccgagccgatcgtcaaggttcacggccggtcggctgtccgtgtccggcctggagcgtaa

SEQ ID NO: 16451 - DNA, 318 bp, Zea mays
  Peptide Sequence Number=SeqID_58230
atgtcgaggagccctgccaaggaggccgatggcagcgcacacgtctgcgccgatcatggtgtctgcgcccgcggcaaaatagaaggggtaacagcggatccggccgagaaggccacgacagctacgaatctggctgggaagacgcgatccggccaaagggatggcagatcgagccgggaaggtcgcagcaatgttcgcaccgggaagaaggtcggcggtgggaagatccgtgcgacgtggtggccctggaaggcgtacgttctaacggcagtaggaggatactcccgcgtccatggccagcggcgaatgggcgggtag

SEQ ID NO: 16452 - DNA, 267 bp, Zea mays
  Peptide Sequence Number=SeqID_58231
atggagtggcagcccgcactatcagtgttgggggccttcctcttccgaagcccgaaggtaataagaatggacgacgaagctatagtcgaagagcttcggcttgatgtgatgacgaagaccaagtatgatgatgaccgaaaagggacaaagactattcaatccttaatgattcgtgttatgcttattgtcggtgttttgggtccgaccgcacacccggggttgcccctcaaggtgtttttaggagtaggacggtgtcgccgactgtag

SEQ ID NO: 16453 - DNA, 261 bp, Zea mays
  Peptide Sequence Number=SeqID_58232
atgcgtttttaccatgtctggggaaaaatgattgagaaggagaagctgactgaggagacgaagctgtttgaggagaagaaggctgcagatccttatatttctggatttattgggtcgatggcaaagacaaacatagagaagattactaaagagatactggaaggtttatctgaagatactgttgaagtgctgaaaatctaccagatcttccttcatcagatcacccccgaagctataatgaggatggggatttttgtctag

SEQ ID NO: 16454 - DNA, 261 bp, Zea mays
  Peptide Sequence Number=SeqID_58233
atgggaaggggattgttctacccaccctggactgttataggtgggcctgattgggatggggaggtccgattttgcgaaagggacggcgactcccgccaagaagccagagccagcttgaatgcgggggagaaggccgcgcaagcgactgatcctccgaaggcgctcaacagggtgggcgccagggagggggaagaagggggtgggcctgcgggcgagtccaaaaaggcaggggactgcgtcggacctggcaaagggtgttga

SEQ ID NO: 16455 - DNA, 375 bp, Zea mays
  Peptide Sequence Number=SeqID_58234
atggcagcggccgactgggcggctagtagagctgagagggaggaccgcagtccgccgctggtggcacaggaactcctcgctcccggacgtgcggacgtaggcgtcgtgcccggatgtccggacgtaggcatcacatccaaacgctcgcgtccactgtccgcaggccacgggacaaagttcccatggatgcacgcacctttgcatgtggagaagattgcttatgtgagacttggtgtgcatatcttggagacaactgatcaagccaaggatggaggcaagaagagcttcaaggtaccgagtgcacggaagaaggtcaaggaggccgaggaacccaaagctaggtgtgaagaagatgacttgcaactcaaggattga

SEQ ID NO: 16456 - DNA, 243 bp, Zea mays
  Peptide Sequence Number=SeqID_58235
atggggaagcctgtcccatcactcctcatgctcctcctcagccgagtgaccgcacttgtacccaccataaccggaatgggagaccacgtctcaggtcgcgtgaggggtaaagtctgcgggcaggttcactcagaaatattaaaagatttcctggaaaaaccagtttacaccgaggaccctgggttctccctaaaccatttctttgatttatacccctgcgcaactattcccctaagccagtga

SEQ ID NO: 16457 - DNA, 1065 bp, Zea mays
  Peptide Sequence Number=SeqID_58236
atggaagtttctgcctgcagagaaggaaatcagcagaaactggaaagctacataatggatcccattgtttctgttgatgtctttcatttagtttcttcgatgttggattacaatgtgcttggaggaaagtgcaatcgtgggctatctgttgtcgatagctacaagattttgaagggtgttgacgttctgagcaaggaggagacatttctggcctgcacccttggctggtgtattgaatggcttcaagcttattttcttgtgcttgatgatattatggacaactcccagacacggcgtggccagccttgctggtttagagtgccacaggttggtctcattgcagtaaatgatgggattatccttcgcaatcatatctcacgaatccttcaacgccacttcaaaggaaagccatattatgttgatatcattgacttgttcaacgaggttgagttcaagacagcttcagggcaaatgttggatcttatcactacccacgagggtgaaaaggatctaactaaatataacttgacagttcaccgccgcatcgttcagtacaagacagcttattattcattctaccttcctgttgcatgtgcattgctgctggctggtgagaacttggaaaactttgttgatgtaaagaacattctcgttgaaatgggaacatactttcaagttcaggatgactatctagattgttttggtgatcctgaattcattggcaagatcggaactgacattgaagactacaaatgttcctggctagttgtgcaagctcttgagcgtgctgctgagaaccaaaagagcattctgtttgtaagcactattaaactggccaatctttttcacaacataaacgacaaagaaaattacggaaagtctgatccagcgtgtgttgcaaaggtgaaggacttgtacaaagagcttaaactggaggaggttttccatgagtacgagagggagagttacaacaagctgattgccgacatcgaggcccagccgagcaaggcagtccaaactgttttgaagtccttccttcacaagatctacaagagggacaagtag

SEQ ID NO: 16458 - DNA, 1059 bp, Zea mays
  Peptide Sequence Number=SeqID_58237
atggcgggcgccgtgtcggcgctcttcctgctggacattaagggccgcgtcctcgtctggcgcgactatcgtggtgatgtctccgcgctccaggccgagcgcttcttcaccaagctcctcgacaaggagggcgactcggaagtccactcgcctgtggtctacgacgacgccggcgtcacgtacatgttcatccagcacaacaatgtcttcctcctcaccgctgctcgccagaactgcaacgcggccagcatcctcctcttcctccaccgtgtcgtagatgtgtttaagcactacttcgaggaactggaagaggagtcgctcagagataacttcgtcgttgtgtatgagttgctggatgagatgatggatttcgggtacccacaatacacggaggcgaagatcctaagtgagttcatcaagacagatgcgtacaggatggaggtcacacagcgtccacccatggccgtgacaaatgctgtgtcatggaggagcgaggggatccgttacaagaagaatgaagtcttcttggatgtagtagagagtgttaacattctagttaacagcaatgggcagattgtgagatcagatgtggttggggcactgaagatgcgaacatatttgaggtgtgtacgtttagctagattcgagaatgatagaactatatcgttcatacctcctgatggatcttttgatctaatgacatacaggcttagcactcaggtaaaacctcttatctgggtcgaagcacagattgagaaacattctagaagccgtatagaactcatggtgaaggcaaggagtcagttcaaggaaagaagcacagcaacaaatgttgaaattgaagtgcctgttccttcagatgccacaaacccaaatataagaacttcaatgggttctgctgcatatgctcctgagagagatgcaatggtctggaaagtaaaatcattccctggtggcaaggtccgttatctgaagataattgaaaagagtggttaccaggcactcccctgggttagatatatcacgatggctggcgaatatgagctgagacttatatga

SEQ ID NO: 16459 - DNA, 318 bp, Zea mays
  Peptide Sequence Number=SeqID_58238
atggctggggtggccaccatatgttgggctctttggcttagtagaatgacatgtttttggatcttgttagtctacaacatatttgcaggatgtgctggccataacccaagactaacaatgtttttttttgctaccacgatccgcatgcagctagttcgaatcagagctgaatattggatcaatgcaatgcatatgcagtttgcagtccctcactatattcaagatagacatggactccccggcgactacgacgaggcatcgctcctccggcgactccgatccgtgccgtcccgttcaaggcgtgccgaccggccatga

SEQ ID NO: 16460 - DNA, 552 bp, Zea mays
  Peptide Sequence Number=SeqID_58239
atggacgaagccgcctccgcctccgctgccgccgtgcgcctccgcgcctccaccccgcgctccaagaaacgcacctcctgctccaagtcccgcggccgctcccaggatcgtcgccgctccccgaaccctaaccctagctcccgtcgcgagcgcgccgcggaccacggctccgccgcgccctcgcgcaagagcgaccgcaagccgaaccgctccttcccggattctgccacgctcgccacggccatggcctcggtcgccgccgcctcggcgccgtccagaagctctggagcgaggtcaatgaggtcgcgctgctcacgggcgctgacgccttcaaggatcgcactggcatcgcgccgcgccttcaaggacctctgggcatgggcggcggcggttggacgagggtcgagcgggggaggagggggttgcgatggacgattgggcgatggacgagtggttggcggattcagccttgggagggggatggtcgagcgggcggtggacctcgaatcgagcggcgggatttgtgatgaacgatggtggaggatggactga

SEQ ID NO: 16461 - DNA, 408 bp, Zea mays
  Peptide Sequence Number=SeqID_58240
atgtcggtcgtctcccacgagtctggcacagcagatgcggtgtccaaggtgataacaaaattcagctctgaaagaattgcaaagtatgcttttgactatgcataccttaataatcgaaagaatgtgacagcagtgcataaagccaatatcatgaagcttgctgatggtttgttcttggagtcttaccgtgaggttgcaaagaagtaccctggaattaaatataatgtaatcattgtggacaactgttgtatgcggcttgttgcaaagcctgaacaaatcaagccaaataagcataagtcctcatttaaccacaaatttaatccaaaacttgatttggcgaatcatactaatagcaaaaaaactcaaacaaagctaagaaaaaatgaatcatccaagcaaacggaatga

SEQ ID NO: 16462 - DNA, 1488 bp, Zea mays
  Peptide Sequence Number=SeqID_58241
atgccaaataaaccccaagagaagttcgatgttggtgttcctgagacctcacactcttattctgctgcagtccctgctggtacaagtagcaagcggcatgctgctaggaagtggaagcgctcgctcagtgaccccttctgttcacggccgcacagtgctccggaattggtgtcaggatgcaagggatcaccgcccgtgactgtggctccagaggacagagatgcctgcataaccatccagcagcgttctctttctatgtttgaggatggcttacaaaactttttgcagctgttgcaggtcttcaagagcaaagtagaggagcaatgttcaaaaattgaatatctgaggaacaacatgtttcaaggtgagatattcgataaatacttcatgtcatttttgccattgtttgtgatgcaaacttacatgaaaggaattgttagccagtcttcagataatcagtactgggatatatggaaccgtcagaaattgagtccagaattcgaagtgaagagacaaaatagtctcagagctaaccaggagaataacatgtcctttgtaatacaggatttgacaaatcagctggttgagctagagaggcacttcaataatctggagatgaacagatccggtaacttggtgaaaattgtaattccacgatctaacccaaacgatgctcatgtcgctggtgttggaaaggaacagatcagtgatggtactccagttattggagctggtgctggcacaagcatatctgcgaagttcaaagaagctggtggggttgatcttatagtgttgtacaactctggacggtttcgaatggctggaaggggctcactagctgggctcttgccctttggtgatgcaaatgacattgtacttcagatggccagcgaagtgttgcctgtggttaaaggagttcctgttcttgctgggttcctcatgtttcctagagagttgcaactctcaggggagtcagtcaagctaatgaagcttggggaaggagttgcaatgttcaaggtgccagattggttccttgacaggaacgactacaaggacaacatgttctcacagacaacacttcgggtatgggatattttattcaatgaaggggacaatgttttgttctgtgttgctctcacaattttcaagatgcgagaagatgatctactacgcacccaacatatcagtgatgtgattgatattttttgcaaacaaccacacatcatctatatgaccctgatgaactgcagacgcacggtgacgggggcatcacaatgtcctactctagcacgtggctcgcagagggcccgtggccacagttcgttagccgtcgaggaacgtgagttcacggttgccttgtccggtctgggcatgcggctcatggaggcgcaggctacgtggatcaccagggagcaggtcgctcagtataacttcctatctatttttaccgtgttaatatattttgtacaaaagatgagaaataagtga

SEQ ID NO: 16463 - DNA, 168 bp, Zea mays
  Peptide Sequence Number=SeqID_58242
atggccgtgatgggttcaacatcggacaagatgtacctctgccaggtaccaaattttggggttttaaatgataaagctgagaccgggcggatccccagctgggtattaatcgaattggatcgtcgttacttctcggacatgaagacttggtcacttctctacacgtag

SEQ ID NO: 16464 - DNA, 465 bp, Zea mays
  Peptide Sequence Number=SeqID_58243
atgcctcccaagaagaacacacgagctagctccatagatgaagatgacgcaatgagggtggccctcaccgctaaaaagggcaaggtggccatcgccgacgaaatcccaccaccatccaatgatcccaaaaccaccaccgagctagaaggtgaaggccatgtcacaaaacaaaagtggataccatcccccaagctagaagtccatacatccagcttagactaccaaagcgacccatcacccaatccaaaaaagccaagcctaccaagccataatatggctagatctaacaagatacatgtcatcgattccccgggctacgaagcatccgccaaccgccaacctcatatggtagggacgtcaatcatatacgatgatgaagacctacaagatgacatagacctcgacatcaacactgaggagcagctgctactcataagtctttgcatgcgcaacaacaacctctag

SEQ ID NO: 16465 - DNA, 276 bp, Zea mays
  Peptide Sequence Number=SeqID_58244
atgacaactaagttgaagaaggggaaggctgaggaagcaactaaagaaggggttgactcagaggagaatgtctctgatggcgaggatgatgttgttgtggaagaagaagttcataggagacttggatacattgaagacgaagacttgattcattttgctggtgaggagactgtcctcgaaccaaaggaggatgaaattgtagtgtttaagagctttttctgggtaggccttcggttgccaatgcatataatgattggcaaggtgctaaaaacatga

SEQ ID NO: 16466 - DNA, 429 bp, Zea mays
  Peptide Sequence Number=SeqID_58245
atggcagagaaggagcaaagagggcaggcgagcagatccaaaactagggttttccagtgcaagctcgagcaggcgcgaagcgacgcctcgggaaaccaacagtcccacaataacacatcccatcaacggtcgcatttcaacaacccccgcgggaccaattcgagcgagggcagcgtcatcaccatcccacagcagtcttcggcaccacctaacttggtcgaactggtcccttggagggcaaatgctggggcgaaggcgaacacgcccccctcgcttgaagattcccacatcaacgtaccacagatcgaaggccccatcggtagttcccgcaagccaggcccaaggacgacgcccatgcaaaggctcaagcgctcccttcgctttgacgagccaaggcgaagaccgtcgaaggcttcggggcccggatga

SEQ ID NO: 16467 - DNA, 447 bp, Zea mays
  Peptide Sequence Number=SeqID_58246
atggttggtttacaggttgtgatgaggatgatggtttttgattatgctcatggtaatggtaaagaagaaggcgtcgaggcggatctccaggagttccaggacattgatgagttcgaggacgtgatcatccccgggaagcgcgtccagccccttggacaactcgatctacccgtctgcttcgggactccctccaacttccgaaagggaacccttatgttcgaggtggtcgggttccgaggaacctaccacacggtgctggggagaccgtgctatgccaagttcatggccgtccccaactacacctacctcaagctcaagatgccgggccccaacggggtcatcaccgtcggatccacataccgacacgcgtatgaatgcgacatggagtgtgtggagtacgctgaggccgtcaccgagtccaaggccctcatcgccgacgagtgctga

SEQ ID NO: 16468 - DNA, 198 bp, Zea mays
  Peptide Sequence Number=SeqID_58247
atggagtctcccgtgccgtattatggtgggtacaagtgcggccattgcacgacggcaactggggacaattggagcattgtacgccaaggccgttctctagagaatatggttgctggagtgacttggccgaccaccttgccaccaggttggatagtcgagtgggaccctacctcagtaggagaggagcatgaggagtga

SEQ ID NO: 16469 - DNA, 219 bp, Zea mays
  Peptide Sequence Number=SeqID_58248
atggatgattcttatctctcaacctttctgcagcctggtggagatccacatgtgttgtgtttcgttgattttgacaaccctgctcaggctacaattgctctggaagcattacaaggttataagtttgacgaacacgagcgtgattcagcccatttgcgtctgcaattctcacgctttcccggtccaaggtcagctggtgggcctcgcggtaggcgttaa

SEQ ID NO: 16470 - DNA, 384 bp, Zea mays
  Peptide Sequence Number=SeqID_58249
atgtcgaccaacaagggcagcgcggccaagggcggcggagggaagaagaaggaggtgaagaaggagacgaagctcgggatggcctataagaaggacgacaacttcggggagtggtactccgaggttgttgttaacagtgaaatgattgagtactatgacatttctggttgttatatattgaggccatgggcgatggaaatctgggagctactgaaagaattctttgatgcagaaattaaaaagctgaagctcaaaccatattatttccctttgtttgttactgagaatgttctacagaaggaaaaggaccacattgagggctttgcacctgagatttgcacagttaggatatctattcaattcttccagtctgctcaactataa

SEQ ID NO: 16471 - DNA, 333 bp, Zea mays
  Peptide Sequence Number=SeqID_58250
atggtgatgacacatggtgatgacaaaggcttagtattaccaccaaaggtggcgccaatccaggtaattgtgattccagtgccttataaggatgctgacacaactgccataaagggagcctgcgaatcaactgtttacacactcgatcaatctggaattagagcggatcaggacacccgtgaaaattactctccaggttggaagtattcccactgggaaatgaaaggtgttccattgagaattgagattggtccaaaagatctggcaaacaaacagcgtggtggggaagctgagaacccgaacgtcaccgacagcgacacactcatggagtaa

SEQ ID NO: 16472 - DNA, 513 bp, Zea mays
  Peptide Sequence Number=SeqID_58251
atggcggtggcttgtgttggtccacccatcggacatgagtgtgaaaccgtactctttccaagcatcctcatgcttcttcctaagttttgttgtcctgttaacaaccctatcaagcaatggatccctaacctcatggtgcgtgttgtccgccgggacaacggtgcaaaggttgacatccctgtgaccaatttggttgaagaggttaaagtgttactggatgagattcaaaaaaatctgttcaaaacagcccaagaaaagagagatgcctgtgttcatgtcgtgaacacttgggatgaattcacaactgctctgaataacaaaaagttgatcttggctccatggtgtgatgaggaggaaattgagaaaaatgtaaaaactcggacaaaaggggaacttggagctgcaaaaacattgtgtactccatttgagcagccagaacttccagaaggtaccctgtgctttgcatctggaaagccagcgaagaagtggtcgttctggggccgcagctactga

SEQ ID NO: 16473 - DNA, 1023 bp, Zea mays
  Peptide Sequence Number=SeqID_58252
atgacgacggcggttctcagcccctacggaagcaaggaaacgtcagcaaggtcccagcagcaccgacaactgtgcttctacagggctcaagcgctcctccgacggccacgataccgcgggctagtgtcggcgacgcggaacggcacgcagaagtgcgtccacgcgaggaagacgagcgaggcggcgctgccgagtcttcgagaggagcgatgcttgcctggtcccgaacgcgtggcgcgggaccccgccgacggacacggtaacaatggagctctcggtggcgcgcaaggcgaggcggagcacgtactcgctaccgacgggcccggcaagctgacgcgaagcaagagcgcgtcgtcgctcaaggaggcatggtgcgggcccgtggcgacgaacgtgaggatctcctatagcgtgagcagcgaacagaggatctcgatgagcgcctgcgcgtggtggagcggcttggccgctctgcagggcctgccagagcccgcaggtgtcggctatgggctacgacgggtgcagagtggggtcgcacgcctcttcacacacgacgatggaacttgcggcaacgacgagggacagttgtggaaggggttcagaggaggaaagggatcagggaagatgatgacctgcggcggccgcggagtgggggctcggactcaacctcgacgccggacgacggactccgcctcgcccgaccctagggctcggactcagcctcgacctcggacgacggactccgcctcgcccgaccccagggctcggactcagcctcgacctcagacgaagatctccgcctcgcccgaccccagggctcagactcagcctcgacctcggacgacagactccgcctcgcccgaccccagggctcggactcagcctcgacctcggacgacgatctccgcctcgcccgaccctagggctcggactcagcctcgacctcggaggagcctccgcctcgcccgaccccgggctcggaccgaccacgtcacaaggggggcatcattatcctacccctag

SEQ ID NO: 16474 - DNA, 258 bp, Zea mays
  Peptide Sequence Number=SeqID_58253
atggccaagtgctgtgaaaaacagactgacgactactggtgccctgtgcagcatcatagatcaagtgcaccccctcgccctcccctggttggtggatactggatacagaggcattgcagaaggaaccaaactgaaccttcaacttgcttgttctgggagatctgtgagcaagcgagttgtcctagaacagttggctcctcacaatgggtattccacgctagccccatccctgccacagacttgggaaaggctcagtga

SEQ ID NO: 16475 - DNA, 798 bp, Zea mays
  Peptide Sequence Number=SeqID_58254
atggctagccccaggctaaagctcttcggcttccacgtctccaaggaggagcacgagctgtgtccggagacgacgacggaggcggaaacaaccgagccagaggaggcgccggcgtgcggtaacaacggcggagggtccgactcgtcgtcctcgtccaccaccaccaccaccacggccacggcggccggcggcgacgggcggaggtacgaatgccagtactgctgccgcgagttcgccaactcgcaggcgctgggcggccaccagaacgcgcacaagaaggagcggcagcagctcaagcgcgcgcagctgcaggccgcggccgcggccgctggccgggtcgccggcggggccgccgccgcgctctaccctcgggccaacccgatggtgtccgccttcgtgccaccgccgcacctcctcggcggcggcggagacgcatcgcccacgagctgggtctacttctccccgcgcgccgcagccgtggccgggggcccgcagggccagcagttccacgtctcccacaactgcgtgttcccgtcgcgcgccaccccggccgccgccgtgacggcggcctcgccggcagtcttctcctacaccccggcgccctccgccgcctcggcgccgtacgtcaccgacgaccaccacagcgggcggagggtcgtccacgtcagcccggcggccgccctggggagataccccggcatggcagctggccctgggatggcggagccggtggtcaccgggcccgaggacgccctggggctggacctgcagctcagccttgcgcccgccggcttgtga

SEQ ID NO: 16476 - DNA, 861 bp, Zea mays
  Peptide Sequence Number=SeqID_58255
atggcgcgtcggccccggacgggtgtgctcgggccccagcagcatagcgccccggcgcgggccagccccggccatgacgcgacctcgcgcgggcgtgacatcgaccgctacgacgcggacgctcgaccatccgcggcgcggatgcctagccgcgtgccttcggcacgacacggctcggctggcctccggcgcaggctgggtcgcaagtgcggcgcgcgtgcgctcggcgtggccgacctcgacgcgaccgactccggcggctcctcggcgtgggagcctggcaagggcgcgcgacatggggcccggcgaggacggctgggcgcggccggttcccggtgcgagcgcgacccggcttcccggcgcgggcgctgctcggccccggcgcggaagccgaaaccggctatgggcgcggccggtaaccggtgcgagcgcgacccggcttcccggcgcgggcgctgctcggccccggcgcggaagccgaaaccggctatgggcgcggtcggcctcagcctcgaccccgacaggggcaggcgggttctcggcgctggtggctcgccgcaggggcgggcgtcctcgcgcacgtcccccaaggcggcagcggggactggcgagatcggcggtcgcgcccaatggcggcggcggctccctgctagggcggctagggttaggaaaaccctaaccgcccccatttataatgggcgcgtaggccttctggtgggccgcctgggccggccagcttggctggaccggcgtgctggccaccaggccgcttcctggcccgtcaagcaggcgcctgggccaccctcatgggaccagattggtcctaaaatggccaatttttttttaaattctgaattttaa

SEQ ID NO: 16477 - DNA, 588 bp, Zea mays
  Peptide Sequence Number=SeqID_58256
atgccagaggagattgctaatttttcgttctcatggtggcaggtgcatgttcaatcagatcctgctggacgtctggttatcataggggatccagagcagcctgataatccttgggggatcactccgttcaagaaggtggtggtcaacttgccatcaagaatcaatcctcaccaaacatccgctgttgtcacgcttcatggcccccatcctcaccattttcccttttgcctgacacaacacaacagggaggatgcaccagaggctaatggttaccatcacaacccccattgtctggaccagagtcaggttgtggatgctgataagcatataaaccatcattccacagacgacaatgctccctccaatgcttcaggccacatacatggtggtatcagctatcatgcatccacaccttctgttgatgaccgctccatcaagtctggtgatgattctgatggggtcgagagtaccaatggcagaagcaataacacggagatctcgtttctagaaaatgataccgtctggataccacctcaagcggcagataaggaggatgaggcccagagtggatacatgatgtcaagctaa

SEQ ID NO: 16478 - DNA, 1608 bp, Zea mays
  Peptide Sequence Number=SeqID_58257
atgaacctgccgacgccgctcccgcccaccagctccccggccgcggctccccgcgccagccgtgcgcctgtcgtgcctgctgcccgacgcggcaccggccgccggcgtcggcggcagaaaccgtcttcgtccccgtccacccgcgagaccgaggccgagtacgagcagccggacgccctcgcccgcatcctccgcacagaggccgccatctcgggcgtctcccgcaaggctgcggccgcgcggcagcagtccacgaacctttggccccgcgccgtcctcgaggccctcgactccgctgtcgccgcctgccgctgggagtccgccctcgagatcttcgagctgctgcggaagcagcactggtacgagccgaggtcgcagacctacgcgcggttgctgatgatgctcggcaagtgccggcagcccggtcccgccgccggcctcttcagggagatgctctcggagcggctccggccgacggcagacgtgtacacggcgcttatcggcgcgtacggctacagcggcttgctggagcacgcgctggccgctgtcgagcagatgaaaggcgccgctgactgcaagccggacgggtacaccttctccgtcctcgttgattgctgcgccaagtcgcgccgcttcgatctgatccctgccgttctcgacgagatgtcgtacctggggatcgaatgcaattcggttatccacaacgcgataattgacgggtacggcaaggccgccatgttcgaggagatggagggtgcgctctccaccatgcttgagagtggtagcaatgtgccggacatttacaccatgaactccgtcgtcggggcgtatggcaaccatggaagaacagatgagatggagaagagttacagtgagtttcagctgatgggtgttgagccagataccaagacgttcaacatcatgatcaggtcttatggtaaggctggcatgtatgtcaagatgatgtcgatattcagatacatgaagaaacggttcttctcaccaactgccgttaccttcaacacagtaatagagtgtttcggacgtgctggcgacatcgaaaagatggagtactatttccgtcttatgaaaattcagggtgtcaaacccaaccccatcacctactgctcgctggttaacgggtacagcaaagccgggcttcttgataaggttgcgggggtcattcgacagaccgagaacactaatgttgtcttggacacaccattctttaactgtgtgataagcgcatatgccaagtctggggatatcaaaatcatggaggagatgctgcagcttatgaaggagaagaggtgcaagcctgacagaataacttatgccaccatgattcaggcatacactgcacacgggatggatgaagctgctatgttgctggagatagaagctgaaagatttgataaacggttgctgcagcctccaagtgagactgggaggctggggatcgagagcatgaagcaagcagcatggatgacgctgtcagctcacgaacaaatcgctggtggaggcactcgcaggtcatgggatttgcgttgcaggcttggtccaagtgaaacgaactatatagatcttcaatggccgcagaagtggtaa

SEQ ID NO: 16479 - DNA, 432 bp, Zea mays
  Peptide Sequence Number=SeqID_58258
atggcttctctctcgtcctcgtcctcgtgcgtcgactggcgtgctcgtggcgcccactgcccacagcgtgcgagatggaattcagtcaattcacccaccgggctgcagcttgggcggaccaaagggaagggaatactagccagatggaactcgtcgctgctggctggtgctgcaagtgcattcggcggcgggacccaggagctttatttctcggtccgcatccccacgcggtggcacggctaccggagaaggaagcgcggcgaggatgagatggacgagtcagtccccgcacgggcacgatgctcgatcaaggtcaccttccgctacaatggttctgttctgctcaccaccttcaaggataccgacgtggcgacgagcaccacgattcgggtggggagtgggctgagtggtgaagcaccgagaaaaagttag

SEQ ID NO: 16480 - DNA, 480 bp, Zea mays
  Peptide Sequence Number=SeqID_58259
atggccatggcgatgggtcctctccctctcccagattcctcgtggcacggggacgccatcgccgccaggcaggccatcatcagttcagttctggtgcagcaggagttgagtgccgggcgtgtactgatgactgtcgcgtcgcatgcgtctctgaatgaggatcacgccacggcatggggatccatcgcctcccccccgatccccagcacgccgctacgctccctggcgctaggaggaaaacccatcaggaccaactgcaccagccctatccagaaaggcctgcgctgcacagaggtcccccacaggccacagccacctgaccccatgtccagatgccctccaccgcaaggcaaagcagcaatgggcaatggcgtgagtctcaacacagggaaaacggaagcatcagctgcgcacagctccgctgccataaaggcaggcaggcaggcaggccatgatatgaatggtggcggcggcatgtga

SEQ ID NO: 16481 - DNA, 786 bp, Zea mays
  Peptide Sequence Number=SeqID_58260
atggggaggactgctaggatatccaaaaatagcctaaggatttttcctccctcgaggacagggaatggaagggttgaggggggaaattatttccccctcaaggctattgggaaccaagtcctctccaaatccctaaggggttcctccccatggaccccctccatttttctggtcaccaaactagcccttagtttaatggtcaagctgaagaacatgttgtaccacacagccaggataaactccctggcttggtcacctgacagtcgattggttgccactggctcactggacacctgtgcaattgtctacgagatagacaagccggtagccagtcgcgtcaccatcaagggagcccatcttggtggggttcatgggttaaccttcctcgacaatgatattctggtgactgccggtgaagatgcttgcattcgtgtttggaaggaagactcctttgtaagtggatccggtatccctgcatctgattttgttaggagttgtgagaatatagggatactgttgttgctttttctaccccaggcgacagaacgaaagaagagaactgacagcagggagagaaatgagcagcgcgacggtggtcgacaatggcctctgctcaggttaatctatgtcagtttcttctcgggtgggcgggtagcgaccgacggcgacctgcttgcgatggcgttggtgctgagcaggagggagatggcggcgcaccggcgtgtccttgcgcggagggcggcgcgagcccccagtggtgtggccccttcttggctgggggcgtag

SEQ ID NO: 16482 - DNA, 1005 bp, Zea mays
  Peptide Sequence Number=SeqID_58261
atgccaccacgacgggcggatttggagccaggacgccgaatcgaggagatagaggactgtgtggtcggatcgatggaaaattgttctcaatttgatggattgcaaccctacactagtgttttggactctgcatattacactgatctactagtgaatgttgttgaggaatctcaagatcccacacctcctattgatgcaagaagccatcatggacgtgcaacagccaagagtactcagggtagaagcaaaaattttagagacaaggaggatattttgcttgtgtccgcttggctgaatgtgggcatggatcctattcaaggagttgatcaaagtcatggaacactttggacaaggatacatgagtatttcaatgataacaagacgttcgagtcgaatcgttctgaaggatctttgatgaatcgttggattgaggctcgaaaccatagtggttggttagttgatgacaagattgcaaatgcttgtgcaatgttcaaggccgaagacccgaaggagaggaagttctcatacttgcattgctggaagattctgaaggacaagcccaagtggatggataggcgcaaagaaattggcaatgcaaagaagacaagttgtaagaaacagaagacattggctacttctcctacaccatttgccgctccagatggccctgttgctgttataaatcaggatggtgaacaagcagcaagacctgagggtaagaagaaagagaaacagaagctacgacaacgttcgaccatagaagcagtggactatttaatggaaaagaagaaagaagctgatcacgataaagagttgaagaaagaagaaaaatccaattggaaatgtcttggctcgagcagccaagaatctgctgagtctgggagcaccggactgtccggtggtgcaccggacagtgtccggtggtgcatcggacagtgtccggtgcgccaggctggctcgagcgaactggccgctctcgggaattcatcggcgacgtacgactaa

SEQ ID NO: 16483 - DNA, 465 bp, Zea mays
  Peptide Sequence Number=SeqID_58262
atgacgatgcggatggtgtcccgcaggggtgtcgtgcagctggtgctcgtgtcggccatcgcctggtcatgcttggacttgtcactctcgccttccacctccggccatgcatctcccccgttgccttcctctcaggtgaacactgacgaccttgtgtttggaggctgggacatcagcatcatgaacttggcagatgccatgaccagggccaaggtgctggacattgacctacagaagcagctcaggccctacatggagtccatggtgccacttcccggtgtctatgatccggacttcaacgccgctaaccagggctctcgtgccaacaatgtaatcaagggcaccaagaaagaacaggtggagcagatcatcaaggatatcatgtattcagcattgatgctaacatgcctttgtgcaattaaagaagtgtcctcagtgcaacctaacatgcctttgtgcaattaa

SEQ ID NO: 16484 - DNA, 201 bp, Zea mays
  Peptide Sequence Number=SeqID_58263
atgataaattctgattcaaaacatttcgtcaagcacaagggagggagcgctggcgctgtcgagggcgtggcaggggcgccgaggcggctccacaggcgcggcgcggtcggggcttcggctgctcctggcgtcgtgctcggggtgcaggtggcgcgttgggcgcgtgcagagagagggaagaggagagtgggtggcggctga

SEQ ID NO: 16485 - DNA, 201 bp, Zea mays
  Peptide Sequence Number=SeqID_58264
atgcaaaggaagaaggcaaacctgccttgctcagttcgatcagtttctcaggaacatcttatcggagcatctcagcttgtgtgctgtccgcccggcaccgtaccggcagccactggaagaaggatgggaggccgtaacaaggtgaagaagagcatctggcagctgctctgcggctgctcgtcaccccagacgaaggactga

SEQ ID NO: 16486 - DNA, 579 bp, Zea mays
  Peptide Sequence Number=SeqID_58265
atggctgccgagaagcgcaccattggcatgggcatggactactcgccctccagcaaggccgccgcgaggtgggcggtcgacaacctgatcaaggccggggaccgtctcgtcctcgtccacgtcctccccaagggcgtggactccagccacaaggagctctggaagaccaccggctcacctttgattcctctctcggagttcatggagatgaacctgcaggcgaggtacgggctcaaccctgataaggagacactggagatcctgcgagctgtatccaagtccaagcagggtagctggccagccaggaacaaaaaaatggaccgaacacttcccaactactgtattaaacaacctgaagaattagtaagggtggaagtactagcaaaggtttactggggcgatgcaagggagaaactctgtgaggcggtagatgatctcaaggtggactcctttgtgcttggttgcaggggcttagggccactgaaaagggctctccttgggagtgtcagcaactatgtagtcaacaatgcaacatgcccggttacagtggtgcgcggaccaactgggttgagtgcctga

SEQ ID NO: 16487 - DNA, 780 bp, Zea mays
  Peptide Sequence Number=SeqID_58266
atgctggcgctgcgggccatgctggacccaacggccgcatgctctcgtcatggacgctcaaccacaatcagcgtggtgccctcaactcttgcgttacgacgccgtacggggattcgagggcgccaccttcgaagccctcgacgtcgggcaaccaccggcactgatgagtgggttgtgtgcgacgtggccaaggtgttcggcggtcagtactgtgccgtgagcgtgttcggtgcctcggcggccgacgactggctacgggaggggaggcatgcgccactgtgcggcctacgagaggcaggagagttggggaacgtctcttcacaacagatccgaaagtacataaaaaaccagtggtccacttcagcttatccttactactccttaagcacgcagcgtgggcgcctatgcgataccgtgcctacgcgccatgcagagctcccgcaaaccgctcccccaccctccgcaatcccctcccccaccctgcgcactcagtgccccctccgattccctccccctccacttccccagctaccaacgccgcgcaccgagctcccgcaattctcgcgcatggcagaaccctcctcccgcaatccgctccaccgtctcccgcaaaccgctcccccagctgccccaccctccacaatgccctcccccacctgtgcaatcggctccccctccgattccctccccctccgcttccccaactgcaacgcgctcgacaccctcgccgccaccgccaccgccaccgccaactacaacttcggctcgtcgtcgctgcag

SEQ ID NO: 16488 - DNA, 760 bp, Zea mays
  Peptide Sequence Number=SeqID_58267
gaggttggaaatgcaactcaggcgccgtgatgttgaaaagtggatgagccataggcgattgcctgaagatttgagaaggagggttagacgagccgaaaggttcacctgggcagctactcaaggagtgaatgaagaggagcttttgagtaatttacctgaagacatccaaagggacatacgtcgccacttctttagattccttaataaggaaaagattttgaacgttagcttttgcgacaatatatacatctatagatgcactatggatgtccgattattcaccttgatggattggcctatattggatgcaatatgtgacaaattaagacaaaacttgtatattagtggaagtgacattctttaccaaggtggcactgttgaaaagatggtcttcatagtgagagggaagctggaaagcatcagtgcagatggcagcaaggctccattacatgatggagatgtatgtggagaggagctcctcacgtggtacttggaacactcttcagcgaacagagatggtgggaaaattaaattccaagcttttgtactcagagcaagtgatctggaagaagtcacctcgcagtttgctcgattcctgcgtaatccacgagtgcagggagcgatcaggtatgaatccccctactggcgaaccattgctgcaactcgtattcaggttgcatggaggtatcgtaaaaggcggctgaagcgagctgagaagtcgaggttgagcgaagagacttatgcctcacttggatcttga

SEQ ID NO: 16489 - DNA, 297 bp, Zea mays
  Peptide Sequence Number=SeqID_58268
atgaggcggaggatgctaggttcttttatttgttttgatgagacccatggagatcctattgagattgatactgtcgctggctctggaatagggactggcacatgctccacgagcccggtagagtcagtccctgatcttgatgctggtgatagcaacttgaactcgaagaaaaggtctaagtattggaatgactttgatgaattgactaagattatgaatggtaagaaagtcaagaatgttgctcgttgcaagcaccttcgctacattatcagtgacaatctgaaccacgtgctctag

SEQ ID NO: 16490 - DNA, 186 bp, Zea mays
  Peptide Sequence Number=SeqID_58269
atggaggactacgggttcgagtactctgacgaagagccggaggagcaggatgtcgacattgagaaccagtattacaactccaaaggtttggtcgagacagacccagagggtgcacttgctggttttgatcaagtggtcagtatggagcctgaaaaggctgaatgtatgaatgctaaagtgtattga

SEQ ID NO: 16491 - DNA, 528 bp, Zea mays
  Peptide Sequence Number=SeqID_58270
atgaggccgcaaaggcagcctttgtctccaagaaaggcaacccccacagtcgagaacaccaccaataggtctgagacaggaaacaaccaactacctcggaccgaagacccatccacccaagaaggtccgcaaggagtaataacagtctatggagatcaacaaacaaccaggaacatagaaagggactttgtcccatggcgacataatgtacgctgcctcctcgcggagggcgaaggccctagtcgccctcgcccaacaaaaacagaagcaataaaggctccgatccagagcaacgaggaggctaaaaaagtcaccttggacccgtcagtactgaatcaaacggtactaattagcgaggacctcagtcagaagaatggcaagtggaggatgtgcatatctatcagagctcaccacactagtcagcccagacccacatcaacacttttgttgtacgtcgcaacatcgcatggaacagtcagtgctgatggaataagtcttgagcatctagaggacaacagtcgcttttga

SEQ ID NO: 16492 - DNA, 309 bp, Zea mays
  Peptide Sequence Number=SeqID_58271
atgactctcggtaaggaggaatacaagaagcaaatgacttgcaaggaaaagcattgcatttgctacaattaccatgagaaaggttatctagttaaggtttgtcaaaaaggatctcctattcacccccctctaggaactctcactttcttcagtgattttgatcaaaaccataaaggatttggcaaaattaatgataatggagtagatgcaaagagatttgaagaacatggctatgtcttcgtctcaaagaccttaggtggaagagaacactcccatcatgaatctttgtttgtgacgaagcttctataa

SEQ ID NO: 16493 - DNA, 348 bp, Zea mays
  Peptide Sequence Number=SeqID_58272
atggggtggtggtggatgtccatggccccgagggggaggcgggtacacatctggtggcggtggactcaattcagacaagatttcgcgcatggcatcggtagcagcatcttcggagctatcacattcacagctcgcaagaacagtgacgtcttgaggaagcgagcacggagtaaccatagaaacaggattagcaacagcggggctgatccttcgcagcagaaagaatcacaacaaagatatcgtagcgagagaattacacagcaattgcaccgtcctccaaaaaaggcgtgggagcaaagctttagctgccaaaggggcggaagcggaagagggcagcacattctgtag

SEQ ID NO: 16494 - DNA, 333 bp, Zea mays
  Peptide Sequence Number=SeqID_58273
atgaggcaacatgaagagtatgaccaagatcatggtgcaccggcgcacagcggtgccaccagaaatgagtcggcatcagcctctgcgaaaagcccggctctaggccggccctggggatcctggctgtcgacttcatttagtatgataccacattctttggcatcgtaccgactgaaggaggctcggttcgactacgggtgcaatgccatcatggccaagttcatggccatcccgcactacccgtacatgatactcaacttggaccttacggcatcatcaccgtctgagctgacttccagggagctgtggaatgctttcaggggggctatctag

SEQ ID NO: 16495 - DNA, 672 bp, Zea mays
  Peptide Sequence Number=SeqID_58274
atgaccggggataagcaaaggcaaaagctcaagcaaaagccaacaagcaaaatttccaatacctacatcaacaagatggacaaaaaacctgctacaccatatttgatcaagaagaaaaagaatggaaaggtgatagcaatcaaggccaacaagcaagccaacaaaggaaaggtggccaaacgcatctgggtgccaaatgaaataattactaggcaacaccgaatcttaaaggaccagcaagtacttgggaaaggacaagatgtcaaggaggagaaactaggatgttcacaacaagagaaaaccaagtatgactcaactttgtctccaccttggagttcaagactagtctgcactaaaatagacgcccatgatgcatccaaaatccgattaggttgggctttatatggatggaagctaaggagttttgattacgttcttcctgttcttgcttgtgttcttgattgcgcttgcaaggataagccttcatggaaagagctgtcgattggtgaaaaggtgaagtccggcttcgaggatgaagcctttgttcgtagactatcacaggagtcgaaggccactttcctcaggaaccgcagtagatgggccttcgactggcaaggggccgacctgccaaggctaacgaaaggcgaaggccacaacagtgcccaccattag

SEQ ID NO: 16496 - DNA, 471 bp, Zea mays
  Peptide Sequence Number=SeqID_58275
atggcccccaaagatgacattggcctccctgtcaatgtgcaagaaggcaccaccaccacccccaccctgctgatgtggttgttcttgtttgcacatctattcttgcctgaggacaatggggaagtacgctgtcacgacgtcctctgttgcctcggtggcccggacggcagtcgtgtagacagccaaccagtcgcctggacgacagtcgtgtcgacgttggagaccttgagggatcctccccagtacggtgggctcgtattaggagacagcatgtcctctactcttccctggatgaagaggatgtccgaggagaaagagcttggtgcgatgcttcgtgtttcagccatctcctttgagggcagagtggaaagggatctgaagcagaagatctctaaaggtgaccgggatgttgaatatgatagccatggaatcatcgtagatcaatgtcgcacaccctacctggcgtgctag

SEQ ID NO: 16497 - DNA, 315 bp, Zea mays
  Peptide Sequence Number=SeqID_58276
atgaaggttgtgctctctaaagttggaaatgggaccaataccaaattctggaaagacaaatggctgcacggtcaaagaattgcagatctggctcctagactccttgctgcaatccataagtggattggtaacattaggactatgagtgatgccctgattattggaagtgaattgctgacattaaaggggctctctcagttgggatggtggtcaacagcgatggtgaagatcatgcaggtttatggcaatgggccgagagaagcaaaggacatgcactgtgccttgattgaggaattgaataagccaggtgactag

SEQ ID NO: 16498 - DNA, 432 bp, Zea mays
  Peptide Sequence Number=SeqID_58277
atggcctcgcgcgacagagctcgaggaggcggcggaggtggaggagcctacaagcggcagcggtgcaggggacagcgggaagcgggcaatagcgggcgagacggcgatggcggtggcatgctgaggctgagcgtgcggccgagtgggagcgccggagagaagcctacggcagtggtggcgcacccttacccaccgccaccagatgtgtacccgcctccccctcggggccatggacatccaccaccaccccatggcgtgtacccgccgccgccgcagggtccttaccccccaccacagcagcctccaccggggtaccagggctacttcaacgaccagcagcgtccttactacccgccgccgcatggagagcatcaacacaaccaccaccagggaaaccagggtagctcctctgggttcctcaaaggatggtaa

SEQ ID NO: 16499 - DNA, 390 bp, Zea mays
  Peptide Sequence Number=SeqID_58278
atgggtaagcttagcctcggccggaccagaacagctcgcactcactgggagtggggagatggcgggagtaacgtgtgcccacctcgcaccctcctggcaaccgttgcaagcgccacaggcgaatgcatcacaacagccacagtggagcccttcacgctatggcgcggcaccttcgcctcgcatcgtgggtccacaagtcgtagcgacgccttccgctttttccgtgcggactcctggtggtccttttccatcactattgttacaacagcaccaatgtttctcccttgcgcacacctaaagagctatgcattaggcgatgacccggctgagaaggtgattggactccggatatgtaggactacaacccgcgataatggaggagatgagtag

SEQ ID NO: 16500 - DNA, 573 bp, Zea mays
  Peptide Sequence Number=SeqID_58279
atgggctcctccgtcagtcaggccagtgcccctcctccacctcctccgacatacgcgtcgacccctccttccttcgtgcatgctgccgctgacgtcgctgccccgccgccgaagccccatgaggaggaggcgaccgaggagaaggtggactacctcaacctcccgtgccccgtcccatacgaggagattcagcgcgaggccttcatgacgctgaagcctgacctattcgagggcatgcgcttcgatttcaccaagatgatcaccccgtacttcgctttgactcacagcgttgccatgggatccattgatatcccggcacagaagagtggggtgatcaagattcccacctccaattatgagtttggtgccaactttatcaatcagaagacgatgctcatggggagggtcgcacatgatgggagggagaacatccgtgtcaagcacgatattacggacaacctttctttaaagataaatgctcagttgacaagtgagccccactactccaaggggatgctttattttgattataagggcttgcccaagtgcccattctccctttacgttagatga

SEQ ID NO: 16501 - DNA, 1449 bp, Zea mays
  Peptide Sequence Number=SeqID_58280
atggcgctccggaggctgctgcaggggagtgtcctgccgcgggtaaccggcagggtttcggcaccggccgtggcgccgttttcaacggagtccggagagaccatccgtgccacgctctttccgggcgacggcatcgggccagagattgccgagtctgtcaagcagtttatttttgaggggttctttatggagattgatctgacactagcatataacagtttgggtgaccatgtgaggatgctattatcgaaagttgttcttattgccggaggagcacttgagactgtgttcttccaaatggatgtcacttattttgtgatctacaccttgaccaattctctgtctgaaatgcattatatcaagtatacgttcagtcgttcagtgactactgtaatctgggcagtctactgttgcgttcactgtaccaactctattggatccaatgcagggccaataagatacgagtcaccaggtcctcaagttgcacttgagggtcaaggcatagaaagcatatgtgtattcaatgttgcaggggtaccaattgaatgggaagaacactatgttggtacagaagttgatcccagaacagagagttttttgacttgggaaagcctggagtcagtgcgtagaaacaaagttggcttgaaaggtcctatggctacacctattggaaagggtcatcgatctttgaatcttacattaaggaaagaacttgggctctatgccaatgtcaggccttgcaacagcctcccaggctacaagaccagatacgatgatgttaaccttgtgacaattcgtgaaaatactgaaggagaatatagtggtcttgagcatcaggttgtgagaggtgttgtagaaagtttgaaaattattacccgccaagcaagtttgagagtggcagaatatgcttttcattatgccaaggccaatggccgggaaagggtctctgcgattcacaaggccaatattatgaggaagacagatggtcttttcctcaagtgttgccgtgaagtggctgagacgtaccctgaaattcaatacgaggaggtcatcattgacaattgttgtatgacgcttgtgaagaatcctggtctttttgatgtattagtgatgccaaacctctatggtgacatcattagcgatctatgtgctggtttgattgggggcttgggcctaacacccagttgcaatattggtgaaggtggcatttgtctagcagaagctgttcatggttctgctcctgatattgctggcaagaaccttgcgaacccgactgctcttatgctgagtgctgtcatgatgttgcgccacttgcaattcaacgacaaagcagaccggatccacaacgccatcctccagactattgctggggggaagtacaggactgctgatcttggtggaaaggcatcgacatccgagtttacaaatgcagtctgtgatcacatctga

SEQ ID NO: 16502 - DNA, 441 bp, Zea mays
  Peptide Sequence Number=SeqID_58281
tgttgccgtgaagtggctgagacgtacctgaaattcaatacgaggaggtcatcattgacaattgttcttgtgaagaatcctggtctttttgatgtattagtgatgccaaacctctatggtgacatcattagcgatctatgtgctggtttgattgggggcttgggcctaacacccagttgcaatattggtgaaggtggcatttgtctagcagaagctgttcatggttctgctcctgatattgctggcaagaaccttgcgaacccgactgctcttatgctgagtgctgtcatgatgttgcgccacttgcaattcaacgacaaagcagaccggatccacaacgccatcctccagactattgctggggggaagtacaggactgctgatcttggtggaaaggcatcgacatccgagtttacaaatgcagtctgtgatcacatctga

SEQ ID NO: 16503 - DNA, 564 bp, Zea mays
  Peptide Sequence Number=SeqID_58282
atgacgaccgaggaaatacttggaaagtttgtaagcgggcgtatgatgatcaaggaagcaagatacgttgatgaggcattgaatggtccaatgcccatctacgagcctcaaaccgttgctctcaaagcaacaagtagcagggaggcgctacctagcaagggagacgaaagacatgggaagagggagaaaaagaaggcctacaagaaggcgaagggcgaggcgcaccttggcaaagagtgggactcggattgttcttcgtctgactccgacgacgaaggactcgccgcctcggccttcaacaaatcgtcgctcttcctcaacgagcgccatacttgcctaatggcaaaggagaagaaggtttatgcatccgggggctcaagctggattatcgatagcggatgcacaaaccacatgacgggggagaagaagatgttcacttcctacgtcaagagcaaagattcccaaaattcgatcatctttggagacgggaatcaaggcaaggtgccaaaggttcacaacaagccaataaaaagaccaaatatgggttcaaataaagagagctaa

SEQ ID NO: 16504 - DNA, 264 bp, Zea mays
  Peptide Sequence Number=SeqID_58283
atgtcgggagaacacgccaaaagggagatggtcaccaaagaaaagcctggaactttgggaaagaagaatgaagaaaggactccatcaaaggaggccgacgacaagcacaaggagcataaggaggaatcgattggctccatcgagtcacataaggaggatgacaagaagaaaaataagatgaaggtggtctactacgtgaccaatttttcctcaccctcaacctctggcgccgagtccacatttttcgaagcgccaagagcgtaa

SEQ ID NO: 16505 - DNA, 2637 bp, Zea mays
  Peptide Sequence Number=SeqID_58284
atggctgtcggcctaaacagcctgcatggtgctcttctcaagttcatcacggttcccgcacggccctccttcaaccctcttcccaacagccacacatacaaccttcgtagtaggggtgatcgtatcagtcaacaacccccagatttcaaactttcaagtgatgtggacctctcctccaacagtggtcttagtggcccactacccacttcgattggcaacctcaggcagctcacaacactaatcttggctgggtgcagcttcacaggaggcatccccgaagaattaggaaacttggtgcagctctcattcttggcaatgaattcaaacagatttacaggcagaattcctgcttcaattggcctactcaacaacctcttctggctagacttgtcagaaaatcaactttctggtcctgttccgatttcatcagccacttctccaggacttgacctacttacacacaccaaacattttcatttcagtggaaaccaattaaccggtaatctcaatggcctcttcagccctagcatgagactcgaacatatattatttgacaacaaccaattgactggtcctatccctgctgaacttggtagcatcaccaccctccagattctccgattagacaataataaattcacaggagcagttccgaccaatatcagtaacctagttgacctcaatgtactgaattttgcaggcaaccagctgcgtggaacaatgccagatctcagtaccctgacaaaacttaatgtggttgatttaagcaacaattcatttgatccgtctgccataccaacctggatgctgacactgaaaacactagcttcagttgaaaccatatcacgttataaaatcctaacatgcagagcaatagcttctggaggactgtatgacagtattctaagcaataatgccttcaatgggacgcttaacatgactggcaacatcactcaacaactgcagcgagtcattctgttaaataatcgtatagttgcggcaaaaataacacaaagctacaacggaatactagtcgatcaaagtctagaccctgcaaattgtggctgtgcctatccctacatgggtagggttttcttcaggtcaccactgtttgcagacttgagaaacaatgagcactttcagctattggaagctagcctctcaacagaactgggactgcaacctggttcagttttcctttctgatatccacttcaccagtgatgattacctccaagttcaagtcagactatttccatcgaccggaacatcctttaacttgtcggaaataacgaggataggctttgatcttagcaatcaaacttacaagccaccacaaggttttggaccttattactttgttgcagatccatatgtccactttgcaggagcagatgacggtggaaaatcgcaagtaagcacaggtgctgtcgctggaattgcagtagcatgtggtcttattctgattgctgtaacttctggggcaatatttgctttattacagaagagaagaagtagggaactatcaggacaaacaaatcctttcgcttcatggggaatcgctaaaaaagatagtggaggtgctccacagctgaaaggagcaaggttcttttcttttgatgaactgaagaattgcaccaacaattttgcagagaacaatgaaataggatcaggaggttatggaaaggtttacaaggcaatactggtaggtggaacaaatgtggccataaaacgagcagagtatggatcaaagcaaggcgcagtagagttcaaaaatgagattgagttgctatccagagtccaccacaagaacctggtaagtctgataggattttgctatgaacaaggagagcagatgctggtctatgaatacgtctcaaatgggacattaagacataacttacaagctagaggaatttacctggattggaagaagaggctcaggattgctctaggatcagcaagaggactagcatatcttcatgagctcgccgatccacctattatacacagagatgtcaagtccacaaatattcttttggatggaaactttaaaccaaaagttgctgattttggtctgtcaaagttagttgcagacactgaaaaaggccatatttccactcaagtaaaaggaacattgggctatttggacccagagtactacatgacacaacagctctcagagaagagcgacgtgtacagcttcggtgttgtcatgctagagatactgagtggcaggctacctatatcaaagggaaggtatatcgtccgggaattcaggatggccataaaccccaatgaccacaactactacggcctgcaaggcatcgtggacccagccatccacgatgccgcacatactgcagggttcaggaggttcgtgcagctggccatggagtgtgtggacgaatcagcctcacggcggcccaccatgaactctgtggtgaaggagatcgaggcgatgctgcacagcgaggggctgagctcaggcagctcatccacagtggagtttgagcacgtggggaccgcatccacctcgcacctgtacagtggacaggttgccacggcacgctcgaacagcagcagcagcacagcagaagaaccaccccgcccagagcttaaacacagcgaaccgtag

SEQ ID NO: 16506 - DNA, 294 bp, Zea mays
  Peptide Sequence Number=SeqID_58285
atggccaacacggtggcctctgcgtcggttgggacgagctctgcgatcacacattcaccgccgtcggcaacaagttggtcctcgccggcagtggtacgccgccagtgcgtattcgatggtatgtatccaaacctggctggagcattgttgctcgcctatgaagagatgcggttttggagtttggcgagagctcagggcttatcaccctccttgccctggagccggctgccctcccacatgttcgaggtgttcgagggaaaaaatatcgacaatgatgtgaaacatggagtttga

SEQ ID NO: 16507 - DNA, 357 bp, Zea mays
  Peptide Sequence Number=SeqID_58286
atggttatccttggagaagtctatgcaatgagatgctattcgttcaccaacacgaatgggtccggaaggccaggttttggatgcacctgctcaactggttcctttgtcgggaagcttgccgtgcagataaattttttatgcatgatgttccagaaaatgcagataaaggacggcttccacacagaaggtttggtttcagcttgttcagctaagggccgtaggagctatgggctggagtattcagggctcaacaaaaaggacctggctttcagccgagctgattggatatggcatcatgaattcatgacaaggattgatgtgtatgttaaatgttacttgaactcagttgacccgtaa

SEQ ID NO: 16508 - DNA, 2760 bp, Zea mays
  Peptide Sequence Number=SeqID_58287
atggtgctcgagggaggttccgtcttctctagtgttggccagcacgtggcagcatcggacccccttaggccagaggtccgggtggcccgccatgaggaccaaaagccattcccgggggtccagccccctggcataggtgctgagagccctcgtcttcaagacacgtggcaaacccggacccctccactggggttccagagtgctgattatagggatctgtctaataaccaaaatctcgggggtccacttactccaaatattggaaatctgaagcagctcaccgttctgattttgcttggatgcacgttcacagggaatatcccgaaagaaataggcaacttgtcacagctcacattcctggcactaaactcaaataaattcactggtggaattcctccaacacttggccttctttcaaatcttttctggttggacatgtcagcaaatcagttgtcaggacaaataccagtttctccagggttggatcaacttgtcaacacgaggcatttccacttcagtgagaaccagttgacaggcccgatgagcgaaagccttttcagtgataagatgaaccttatacatgtgatatttaataataacaactttactgggccaatcccagcatctcttggacaagtcaaatcacttcaaataatccgactagatcataacattgtcacaattgttgccagccgactagatcataaccaattcagtggtccagttcccaacagtattaccaccctaagtaacctcatggaagtgagcatagcaaacaacctactgaacgggaccgtgccggatctcactaatctaactcagctagattatgtatttatggatcatggtgaacttaatgggacaatccctagtgctatgttcagtctccccaacctgcagcaagtatcattagctaggaactcattcagtgggaaacttaatatgacaggtaacatcagctcacagttgcaggttgttaacttgacatctaatcaaatcatcgaagcgaatgtaacaggctacagcaacacccttatattaacagagaatcctgtatgtttagacaacactagtttatgcaaactcaagcaaaagcagcaagcgtcatatgccactaaccttggcccatgtgctgccattccatgcccctttgatcagtcagcaagtccagtcacttcacagaactgtgcatgcaccagtcccattcagggtctgatgatcttccaagcacccgccttctctgatgtcataagccccacaatgttccaaattgtggagtcaacacttatgcagaatcttagcctggcaccaagatcagttgccatttccaatgttcaattcagccaaggaaaccctctaacattcatagtgagtatttttccggccagtggaacgagcttcaatcgctcagaagtcataagaatcatttctcctctggtcaaccaaacttataaagccccacccaattttggaccatacagcttcatagcgaacacatactttacagttcccagcaataagaagccctcgatgggcaaggctgcaataattggaatatcaattgggggtgttgtccttattcttggccttgttgcagtagcaacatatgctctacgacagaaaaggatagccaaggaggcagtagagcgaactacaaatcctttcgcatcatggggagctggtgggacagacaacggagatgcaccacaattgaagggtgcaagatactttccattcgaggaactgaaaaaatgcaccaataatttctcagaaactcaggagatagggtctggaggatatgggaaggtgtacaaaggaagacttgcaaacgggcaaatagctgcaataaaacgtgcacagcaagggtccatgcaaggtgcagctgaattcaagaatgagatagaactgctgtccagggttcatcacaagaacctagtgagcctagtgggtttctgctacgaacaaggggaacagatgttggtttatgaatatattccttatgggacactaagggagaacttgatgggtaaaagaggagtgaacttagattggaagaaccgcctcaggattgccattggctcagcaaaaggtctagcatacctccatgaacttgctgatccaccaatcatacacagagatatcaaatcaaccaatatccttttggatgaaagtctcaatgctaaggttgccgattttggtctttcaaaacttgtgtctgacacacaaaagggtcatgtttctacccaagtgaagggaacattgggctatttggatcctgagtattacatgacgcaacagctctctgagaagagtgatgtctacagctttggagttgtcctgctagaactagtaactgctagccagcccatagagaaaggcaggtatattgtccgtgagatcaggacagcaatagatcaatatgatcaagaatactatggcttgaagggcctaatcgatccaaaaatcagggattcagctaaattaattggcttcaggagatttatacagttggctatggaatgtgtggaagagtctgctgttgaccgcccaacaatgaatgatgtggtaaaggaacttgagatcatcatacagaatgaaggggcacaattgttaaactcagcgtctttatcagttgaacaatttggaaatgaaaagagacgagatccttatgcagaacatttgcctatgaatgatgaaagcagcagcagcacttttgactacaacagtgggtattcatactcagctgttcaaccaaagtag

SEQ ID NO: 16509 - DNA, 291 bp, Zea mays
  Peptide Sequence Number=SeqID_58288
atgcagggcgtgtttgccgccgtggcccagcagcctggctgcgctcccgggatgcagtttctgtgttcgcgtcgcctggtcggctcgggagccaggctgtgcacgtgcaaattgagtctctcagcctggctccacagaaacgagctcaaggaaaaggagacgccggtgatacttcaaccaccagagagcgtcggatggggaccaccatcgtacgggtccgctgggaccgctgctagcctactagggcagcaacgaattgacaggtatatcaagttcgtaattaacttttaa

SEQ ID NO: 16510 - DNA, 210 bp, Zea mays
  Peptide Sequence Number=SeqID_58289
atggcggttatggttacaaccaaggtggatatggaggatatggaaatggaggctggaattacaaccggaatagaggaggtggcggtggccgaggacgaggcaactggagatatggtggtgaactctggtaagttgatgagacttagaggtccacttagacacttaccattatgtttggcatgccagttggagatggtttggttgatctag

SEQ ID NO: 16511 - DNA, 366 bp, Zea mays
  Peptide Sequence Number=SeqID_58290
atggaagtgttctccttcggtttgctcatctatatgaggtttgcactgctacccttactctcacttgttccaggtgaggccggggaggacaaggatctttcgtctttagcgagtatcgacctcaagagagtgttcccggagaagaagattggcaaggtcatcgagacaagcttatcggcaaaccaagaacgcgcagccatggagaagaagcgtttgaaatggaaggcgcaaggttctgcggctgacgagaaggtggttcggggtggccctgtggatccttcgaagctcgtcgttgagctggggccaatggagatccgcacattcatcgtcagctttgatcacatcagtgacaagcaacagctataa

SEQ ID NO: 16512 - DNA, 327 bp, Zea mays
  Peptide Sequence Number=SeqID_58291
atggctgctggtcgttggatggttgcagaaaattcatatcaactccctatggaccacaggcgtggcgattatcccgttgtcatcgcaagagtcgagtggggaagcaggaggactccctatgttgaaggcgctctaggggttcgacccctttttgtgggttgtgatattaaatcgatgaagcaaaaagaggatgttcatggatcttcacaagatgggttaggtctcacgtggaccaagggtcatatcctcaactccttgggagctgagggagaaggcgagtcatatcctaggatgtggtcatgtggggtccaagtcaaagatttgtaa

SEQ ID NO: 16513 - DNA, 234 bp, Zea mays
  Peptide Sequence Number=SeqID_58292
atgggggtcgatggggacggcgctctagcggcggctgacgacgaacagaaggccgacgtcgagcatcgcggagcaagggagttaggggcgcgggacgagcatggggtggctgagaacagaatccatgggctcggtgtcaggttttatagagaagagaagaagggaggggtgccgggaggagagaaatggccagtggtgccattaatgccatcaatggcatcggtggttacttag

SEQ ID NO: 16514 - DNA, 1479 bp, Zea mays
  Peptide Sequence Number=SeqID_58293
atggagttgctgacggtgccggcgcaggggcacgaggagcagaacctcctagccctggcctcggccgccgccgttgccggggccggatgtgttttcagctcaccggcgatgctcgatgacgactggtacttcgaccccgtggctgcggccgccgccaccggcgcgcaggggcacctgctcctggcgccgccggggccggtgcccggccccggcgccggctcgcagatgttctccctcttcaacgttggcggcgccgcgacgttcgacgtccatgggttcgacattggcctcggcacgctcggcggcgggtccggtggcgacctggtcccgttggcgggtgcagggaacacatcgaattccgcgtccttttccatgtccctgaacgccggcctcctcgcctcctcgttcggcggctttggcacagcgccggcgcaaatgccggacttcggcggcctgggcgggttcgacatgttcaacaacggcgccggctcctcctccgcggcgccccctcctgcctcggcgtcccttacggtgccgttctccgggcgcgggaagcccgccgtgctccgcccgctggagaccttcccgcccgtgggcgcgcagccgacgctgttccagaagcgcgcgctgcgccgcaacggcggcggggaggactacgacaagaagcgcaaggcggaggccaccgccgcggctgcgggagcttcgtcggcctgtggcggtgacgacgctgaggacgatgacggcgggagcatcgacgcgtccgggctcaactacgactcggaggacgcctgcaggggcgtcgaggatagtggaaagaaggacggcaagggttccaacgccaacagcgcgggcgacgggaaaggtaagaggaagaggttgccggccaagaacctcatggcggagcgccgtcgccggaagaagcttaatgaccggctctacatgctccgatccgtcgtgcccaagatcagcaagatggacagggcctccattctcggcgacgcgatcgagtacctgaaggagctgctgcggaagatcgaggagctccagaacgaggtggagtcatcagcatccccagcttccacggcctcgctgcctccgacgcccacgagcttccgccctctgactcccacgctgcccgccctaccatctcgcgtgaaggaagagctgtgcccgagcgcgttgcctagccctacttccaagcaaccaagggttgaggtgaggacgacgagggaagggcgggaggtgaacatccacatgctctgcgctcgcaggcctgggcttctgctcgctaccatgagggcaatcgaagggctcgggctcgacgtccagcaagctgttgccagttgcttcaacgggttttccttggacatcttcaaggctgagctgtgcaaggacggcccagcgctcctcctcctgccagaagaagagatcaagtccgtcctcctgcagtctgccgggctccatggcgtggcgccgtga

SEQ ID NO: 16515 - DNA, 951 bp, Zea mays
  Peptide Sequence Number=SeqID_58294
atgggccccgttcgactcgccctcctcctttccgtcgccgccgtcctcgccgccgcgggcgcggtgtacatcccctacaacacgtcggcgggggtggtgccggggaagctcaacgtgcacgtcgtgccgcacacccacgacgacgtcggatggctcaagaccgtagaccagtactacgtcggatccaacaactccatccagggggcatgcgtgcagaacgtgctggattcgctcatcccggcgcttctcaaggacgagaaccgaaagttcatctatgttgagcaggcattcttccaaagatggtggaggaaccagaatgacatgatcaaggatacagtgaaggggctcatcagctctggacggctggaattaataaatggtggcatgtgcatgcacgatgaggcggctgtacactatattgacatgatcgatcagactacacttggacacaagtacatcaaggaggagtttggccagatcccacggattggctggcagattgatccgtttgggcactctgcggttcaggcttaccttcttggcgcagaagtaggattcgatgctttctatttcttccggattgattaccaagaccgtgatacacggaaaggaacaaaagaactcgaggttgtatggaggggctccaagaccttgggctcatcggctgatatctttgctggcatctttccaaaaaactatgaaccacctcctggtgatttttattttgaagttgatgataattcccctgttgtccaggatgatccccttcttttcgattataatgttgaagaacgagttaatgattttgttgctgcagctgtagcacaggggttcagaggtttctttgacctgcatgagaatgtcttttttcttagcaaaatccccaggggctatcttatttttttttctcgaacacgcaggagatctgcgtatcattccattaatagatag

SEQ ID NO: 16516 - DNA, 660 bp, Zea mays
  Peptide Sequence Number=SeqID_58295
atggaccgggttcctccggttgaagctgtagccgacgcgtacaacgccgcacgagcagctgccgttgctgcagtagaagcgcattcggcggccatcattgcggaggaggcaatcgctgctgtgaagtatgctgcaattgctcgcgaaaagtttgaaggagctgttgattcagtgaagaactcaacctttgtctatgctaatgccactgttgaggctttggacaatgttgatttgaagtatcatgttagcatcaagaattctctgcgatacgcgattcaagagatgaggagacaatcaacactgctacatacaattaattctatctgttctagtatcccagaagttgaggggggcaagatagggaaggttgttggccacctggaccatgtctgcaagatgctagagaagacttctattgtttgcgaacaagatttggataataagtgtcctagttgggacctatttgaccccccttcggatgttgaagatcaccctgatgttgatgaactacttgaaggatacaactcagaagatccggagctgtgggaaatggcgtttgaggaccggaagtgggaggagaataaagtggcagtctccttggctgagcattgtcgtattatgggttacaattacgaagagatttatgatcgtactgtttga

SEQ ID NO: 16517 - DNA, 1068 bp, Zea mays
  Peptide Sequence Number=SeqID_58296
atgtctgaagattgggtattggaatgccatattcggaatatgcatgctcctccatcaccgttagtagagaactacctgcgggaagtgggtttttggcatgtggcgacgggcacccagtcaccgggtctgcccaatctagcaattgagaggcggtgtgctacgagcttttgggcgctattctggaaaaaatggatggaggcacggtttcgctttccatttctacgtcctcgagtgagccacccatatacattcccacttgtaacgaggtggaaccatccggcaagttttcgtggattaccgtctgaacttgaagatatacggcttctattggaccaacggtcggaagcagaatttcaatggacaccatacgaggatccggatccatggcaagccgtatttacttacgccagaggagaggcaacggcaattacgtctcggaagggaaaggcgcgggcctctaaatccaacaggagaagatttcgaaggcaggccctcaacgaggcccagacagtcactcggcgcatcatcagcgggcatgcaatcatcggccccaacgagagcaccgacgcagcaattcaacagatgatacccacgcaaccgcctttccctatgatgccagatatgtttcctagcccatatatgtaccctaacccttacatgtatccttttctgaatactatggcaagttggagccaaatgtccggttcagctccatttcctgttatgccgagtggaccgtcgatatctaggccagcggcgcaggagggatcgactatgccttcggagagctatcctttttaccaatcgccagcaacgtatggctttcaaacaccgtcgtcgttcatgatgcaaacacctccacatacaccattctttgaaggtggatcatcgtcccaagtccgacaaccagatgcggaaccggaagaaccacaaccaccaccggaggaaggaccacaatcaccaccagaggaagaacaaccgctgccggaagctagaggaaggaggaatccagcgcgcaaccgtcgacggccgccatgtggaaccgaatcccccggtcatagacattga

SEQ ID NO: 16518 - DNA, 1662 bp, Zea mays
  Peptide Sequence Number=SeqID_58297
atggaatttcatgaatatcaaagtcgtttttcgaggcctccaccttccttctttggggatttccttgaaaagcttaaagatttttgcaatttcgccttttccgccattattggcaacattttctatgcgatcttaaccttcttctttgcattagtgggcaccctgttaggtgccatgacgggggctttgataggacaagagaccgagagtgggttcgttcgaggcgccgcagttggggctatatctggagctgttttatcaatcgaagttttcgaatcttctcttgttctttggcaatcagatgaatccgggatcggatgcttgttgtatttgattgatgtcattgcaagccttctaagtgggaggcttgtccgagaacgaattggtccggcgatgctgagtgcagtccaaagtcagatgggagcttctgaaacagcttttgaggaggttcagaacatcttcgacaccggtggtgttaaaggattggctggagatttggttgaaaaaatcccgaagatcataatcactaaaaataacaatgtcgatgcttctggggagaaagtctcctgtacagtttgccttcaggactttcagctcggagaaacgatgcttgtaaagagtcaaacgcagcctaagttgcaaggaagtttaaaagctgaggaatcaaggttaaggcgtttccagttggaggaggtggctaaggctaccaaaaatttcagtgcagagtgtttgttggggtctggagcatttgggaatgtgtataaaggaacctttgaactccatgaagtgaggcttctttcgactgtaaatcaccccaatctggtaggcttggtggggtattgtgaagaatccggaatagcatacttacacgatgggattaagccgagcataatccaccgtgatataaaaccgagcaacatcttaattggagatggtatggaagccaaggtttcggattttggacttgtgaaactaggaccggtcggagatcaatcacatgttagcagtcaaataaaaggaacaccagggtaccttgaccctgcatattgtaccaccttccatttgactccttttagtgatgtttatagctttggtgtcatccttctgcaacttgtatctgcccgcccggctgtggattcaactacaagatgtcaacctaattatcatatcatcgattgggcaaggccgagtatagagaagagcagcatcgaagaaatccttgatattagtcttttatctccggcccagacatgcaatatggagatgatgctgaagatgggtgaactcggcctaagctgtgtggagaaaatgcctaaaaaccggcctactatggctcgggtctggcaagaactagaagatacacttcatttagtggacaactccacgcacaaacagccctggagaagtagtgtaagagcaactagcaaacttgctccacctacagaacgagtacatcatagaacattggataaggatttttctcaaagcttcgtaagcatagacggtgttgggtttcagaagttccgcattgaaatggatattgtttcattgcaaagtagtagcagcttaagatgttttgagttcaacactaatgatggtgttgaagttgataagaagaatttgacaccagttacggaggagacaagtaatcagtgtttttaa

SEQ ID NO: 16519 - DNA, 1119 bp, Zea mays
  Peptide Sequence Number=SeqID_58298
atgagggatgttatcaaggttggtcaactttctgaaggcctgctggtggccatccttggaccgttatgcgcacaaaggttcggatgcatccggctggcaagatgggctcctatggccaacaatctgcttgaggatcagagccagattgaatctggctccttgagcactcttgagtctggtccatacggtacctttgtaggaatatacgatggtcatggtggccctgagacatcgcgctatatcaacgatcacttattccagcatctaaagaggttcaccacagagcagcaatcaatgtctgtggatgtcataaagaaagcatatcaagcaacagaagatggatttttctctcttgttacaaaacaatggcctatgaatccccagattgcagctgtcggatcatgttgcctggttggtgttgtttgtaatggaaccctttacattgctaacgttggggactctcgtgctgtgcttggaaggcttgtcaaggcaactggggaggttcttgccatccagctgtcatcagagcataatgtagcaatagagtcggtcaggcaggagatgcattctttgcaccctgatgactcacacattgtagttttaaagcataatgtatggcgtgtaaagggcctgatacagatttctagatcaataggtgatgtttatcttaaaaaggctgagttcaacagggagcctctatatcaaaagtttcgtcttcgtcaaccttttaggatgccaattttgagctcagaaccatcagtatcaatgcatgaactccaacctcatgatcagtttctcatatttgcttctgatgggctctgggaacatctcagcaatcagggcgcagttgatatagttcaaaatcatccacgcaatgggagtgctaggaggcttgtgaaagttgccttgcaggaagctgctaaaaagagagaaatgaggtactcagatttaaagaagattgatcgaggcgtgcggcgtcatttccacgatgacatcacagtcatagttgtatttcttgattcgaatctcgtgagcagagccagctcagcaaaaggcccttcattatccctgagaggaggtggaatcaaactgcctgcaaaaaccaaggctccctgttaa

SEQ ID NO: 16520 - DNA, 174 bp, Zea mays
  Peptide Sequence Number=SeqID_58299
atgagccaaaacccttcgccttccctctccggcgtggcgcggcacgaacaaaagatgaccggcggcgcaagtggcatggtggatgtgaccgtgggcggcgcggatgggacgtccggcggcgtcagagaaccaaaggcttgtaattgggttgagggtttggttgtgtttgggtag

SEQ ID NO: 16521 - DNA, 1587 bp, Zea mays
  Peptide Sequence Number=SeqID_58300
atgagcgaaaatgacaccaaaggaaagggtatcacgatatccataccttggaatcgtgatacctctaacaacatagaagattggagaccacccttcagtgcagttaatcactctcccagttgccctgaccaatcacatcctgccacgaggcctatttctgcctcctggtcccaaatcgtccttggagaatcggaaccgctcgctggtgttcctttatcgccttcctcatcttcttcgtcatcaacggctgtgattgaaccacctgttcccacggcggtcgaaggcgaaggcgtagacaacgtgagtgctgggcccaatagcaatgccggtaagaggctagcttggaacaagccctccgacggcgctaccgagtttgctcccgttatagaggccgacgcgtggcctgctttgtctaagtccgctagggtttctttgaaaccctcttcagattcatccagagctttaccggatggatctccttttgtccccttttcccagaaagaagccaagaaagttgaaaaattgaatttaaattcaacaccaaaccatgcaatgcctgcacgccagaggtcaatgaagcgaaatagtaataactcagcatctagtagtggactcctgcagccaccacctcaaggtgctctagttgaagcacctgtgaatggcccatcttctagggaccatatacagagaagtggatttgtgtcacaggctggtaatgatcacccaaggaattcattcagacatcgtaatgctgggccacgtcctcgaggagatggctctcaccatcagaattatggaggtaggcgcaatccatccctaggaaatcaagactggaatggtcgaaactttaatagcagggatgctcatatgcaaccaagagttgttcccaggttaatgaggcatcaaccaccagctccaccgcctaatgctgcaccatttatcgctcctccaccagtacggccatttggcactcctgtaggatatcctgaattggcatctcaattttatttcatacctgctccccctccagaatcacttagaggtgtgccatttgttgctccaatgcccccagtgcttttccctgctccagagcctccagaccgccagttgcatgctaacatagtgaatcagattgattattacttcagtgatgaaaatcttatcaaggacacttacttgcggcagaacatggatgaccagggatgggttcctattaaattaatagctggctttagaaaggtttcgcttttgaccgataatattcagcttatacgggatgctctgcgaagttcaacagttgtggaagtggagggtgaaaaagtaaggaagcggattgattggatgaaatggatcctgccaccttccgttaagttccctgccatgtctggtcaggatatgctggttgcccgtgttcaggatatttcattggatcagagaactgctgacgtgagtggctcaaggaaccaagaagatgcttgtgctggactatcagatagatcatcatctggggagttcaataatcggtcacaggtattcagcagtgagggaacagctgtgagtgctcaaagtgttgcagcgagtaactaa

SEQ ID NO: 16522 - DNA, 3180 bp, Zea mays
  Peptide Sequence Number=SeqID_58301
atgagcgagacgcttcctccgccgccgtccccctcatccgatgaagacttcgcgaacgacggcgcgtggtatggcaacatccagtatctcctcaacatttcaaccatcggcctcctctgttgcgtcctcatctttgtcttcctcaagctccgcagcgatcatcgccttattcccgggccatccgctctgttcgctaagctccttgccgtctggcacgccaccggccgcgagattgcccgccactgcggagctgacgccgcccaattcctcttaatcgaaggcggcagcttcgcgattctcttgtcagtcgcctttgtggctgtttccgtcttgctccccgttaatctctacggcggcactgctttattagacgatcagttctcgaaaaccactgtaagtcatatcagtaaaggttcagggttactttgggtgcattttcttttcgtggttttcgttgttgctattttccattatggaatgtctgctgttgaagaaagattaagaattactaggtttagagatgggaatggaaatttaagtgaccccaactcgaattcaactgcaatttttacgattatggttcagggtttgcctaagaatttaggggttgacaaaggtgttgtgctcgagtattttcagtataaatatccggggaaagtatacagggttgtcatgcctatggatttatgttctttggatgatttagccactgaactagttaaggttagggatgaaattacctggttgatagcaaagatcgattcacgtcttctgccggaagaaagtgaagatgtgaatggaaatgaagggtttctgggttggatccgttggttggggaggaaaatacaacgagtttttgatcagatttcgggtacatttgggtttacagatgaagaaaaattaagaaagctgcaagaattgagagctgagttagagactgaattagcggcttataaggaagggcatgcaccaggtgctggggttgcttttgtgatgtttaaggatgtatatacagcgaataaggcggttcaagatttccggaatgagaaaaagaggcggtttgggaaattcttttctgtcatggagttaaagttgcagaggaaccaatggaaagttgaacgagcccctttggccactgatatttactggaaccatttgggatcaacaaaattgtcactgaaactgcgaagagtgtttgtaaactcatgtttgttgttaatgcttttgttcttcagttctccacttgcagtaatcactgctgtgcagagtgctgctcggattattaatgcagaagcaattgataatgcacagtcgtggttggcttgggtgcagagttcaagctggctggcatccctagtctttcaatttttgcccaatgtaattatatttgttagcatgtatatagtggtcccttcagctctttcttatctttccaagtttgaacggcatctcactgtatccagtgagcagagagcagcattgctaaagatggtttgcttcttccttgtaaatttgatcctattgagggctcttgttgagtcatcattagagagtgcaatccttcggatgggtcgatgctatctggatggagaagactgcaagagaattgagcaatacatgagtgcttcattcctttcaagatcttgcctttcttctcttgcatttctaatcacaagtacattcttgggaatatcatatgatctgctggctccagttccttggataaagaacaagcttcagaagtttcggaagaatgatatgctccagttggtcccagaaaatactgaagagtacccattggaaaaccagaacctgaataatttgcggagaccgctgatgcccgaaagtttatttgactctcctaggatgggtgacattgacattccaggacaggatctttctgtctatcctatcagcagccggacctcgcctatacccaagcagaaatttgactttgcgcagtattatgcatttaatttgacaatatttgccctgaccttgatatattcttcatttgcaccactcgtggtgccagtgggtgcagtttattttggatataggtatgtggttgataagtacaactttctgtttgtgtatagagtccggggatttcctgctggcaatgatggaaggctgatggatactgtgttgagtatcatgcggttctgcctcgacttgttcctcatctcgatgcttttgttcttttcagtcaaaggagactcaacaaagctgcaagccatatttactcttgggttgctagtaatttacaaactgttaccttctgatagtgatagttttcagccaggccttttggaaggcatgcaaaatatagacagcattattgatggaccgattgattatgagaggaaggccgacgagagaaccatgcagcatttaccagttaaaagcaaccttcttgattcaggacagggtatcccaagccacattggactcgaggtccctctcaacaagtgcgcttctcaagctcaaacttctacttctggggttctactggaggatgttcttcacctaacaactgaagatggtcatgcagaattggttgaggcatatgtcacattcggctgtgggcaggtacaaagcggctcattcctggatgttgcagctcccaacggtttatttgggcttggcatggagaagatagcagttccgagcattttatcacaggaaggtttgacagctaattctttctccatgtgttttggacacgatggaattggaaggatcagttttggagacaaaggtagccctgaccaggaagagactccgtttaatcttaacccaccgcatccaacctacaacattaccataactcaaattcgggtggggacagctataattgttggtgatattacagctctttttgattctgggacttcgttcacatacttggttgacccaacttattcaaaactagcagagaatgcacaagataggcgccgcccacctgattcaaggatcccttttgagtactgttatgacatgagcccggacgcaaatgctactttaatacccagtatgagtttaaaaatgaaaggtggaagtgactttccagtctatgacccgataattgtcatttctactcaagtaggatccttctcctggacttctttcatttcgtacatagggagtgaagatcatgttaaacacattgatctctaa

SEQ ID NO: 16523 - DNA, 342 bp, Zea mays
  Peptide Sequence Number=SeqID_58302
atggatgaaatatgggtcccttgtttgaggctgaatggtagggctagagggttgaagaaatacttgaagaggctcagtgccctcaggcattggatgcttgacaagcttggtgacgccaaagccatcgtctggaccccacaagtcgagggaatgtttgccacttattctcattctacgaaacaaactgaattcttgtattactatataagtgataggataggagcaaatagtttggagaactccctttggaagaaagtttgtgggatgcaaacgagtttggaaaacttgttatgttttagaacttggatccagcttactcttcaacagaagtggaggatatag

SEQ ID NO: 16524 - DNA, 570 bp, Zea mays
  Peptide Sequence Number=SeqID_58303
ggtgttggtccccttggtattgcttgggctgtcggcggcatgatcttcgttctcgtctactgcactgcgggaatctctggtttagcaaagtccgtcatgaagcactactataatacactaggaggtggtacaaacgtcgtggttgctgggaactcgaaaggcgccgctttgggagctgagatcatcggcaccttcgtcctcgtctacaccgttttctctgccactgatcccaaaagaaatgcacgcgattcccatgtccccgtgttggcgcccttgccaataggatttgctgtgtttgtggtgcacctggccaccattcccatcaccggcactggcattaacccggctaggagtctcggtgctgctgtcatctacaacaatggacaagtgtgggatgatcagtctgagtctgcccacaactgcaaaaaagagcagaacatccaaatcataagagcaacaactcgggagaaccaggttattttccttaggaataacagcgcatatcatgttgatcaaggggcgctgctacagggaactttggagcttgtattggaggaattaaggctatag

SEQ ID NO: 16525 - DNA, 588 bp, Zea mays
  Peptide Sequence Number=SeqID_58304
atggaacttgtagacggtgaagacatggggacaatggtcacattttattgccggattgggagtgtcaacattgaatcgattcagtttgctaagttagctaatgtggaactagttgaagatttcactcaattaagtgaagaatatggagttcaagatccgtgtacgaaggttctgatagcgtctgtcaataggcgatcatctgtacgctggtttgacatcgaccttaatgctccacctgcatctgagaaccttaacctaggcccccatttacaaatatatctagtgttgattgagaccgatacggatggtgaagatgaatatgataataatggttgttttgatcacgaggttgaagattatagtgatcctgatctagatgatgtattgaatgatatcgacgacgaatgcgcgaatgatgatggaaatgtttacgcgtctttagtcgggaatccgagtcgagacattgtcatacgcaatgatcctgggaaccatatgtcgaacgtaaatcttgatatggcgcatgcatccgagtttcctaagtatctcgatatactacctgctcacttattggccacagctctcaaatga

SEQ ID NO: 16526 - DNA, 273 bp, Zea mays
  Peptide Sequence Number=SeqID_58305
atggcgctgacgtgtgggcccaacacgccagtcgccttcttcgagtccgactccgccttgggatgttgtgatccttcgtcggagatcgcggggtcccgaccaaccgatttggctcggaggaagcgcatacctcgggggaaaagctcggaggcgcctaaggtgttagctacctatggaaggaaggaagaattatgggaaggatacagaagggagggagttcaggagaaggagaagaaggtagacgaggatggcatttccatagagttcagatag

SEQ ID NO: 16527 - DNA, 561 bp, Zea mays
  Peptide Sequence Number=SeqID_58306
gaacatggtaagacaaaggagaaagatctcaccgcaattacagatgctggatttcgtggccacggggaagcgcgctccaacgacagggactcgaaccactcgccacagccgggggactcggccgagcggactccggcgacattgcaacaagctggagagtcgagcgagtctgaagctggggtcccacgtgatagtggttccggtctggtacctggttgcggctgggacgctggtgacctggtcccacgtgatagcttgtggcacgccgaaatcatctgctctttcgagaagacccacaaccatggcatccggtggaaggggttctcgcctgagggtactcttgacgaggtagatctctcggtgccctcggaagagcgccctagggctttgcatcaagaagtcaactatatgttggctcattcgcaccatcgtcactatgagtctgatgaatgcatccggacacatggccattcgcttcgtccaagagatcatcaaacatcggtactctccaacaggcctagttctgggaagtcacaaaggggaattccctttctagactag

SEQ ID NO: 16528 - DNA, 219 bp, Zea mays
  Peptide Sequence Number=SeqID_58307
atgtgcatggtgaggagaggtggtgaattcgggagcgggaggagaggtggcgacaaggagagaggaagaggcgctgaggatgggggcaggcgcacaatgaggacaaggggcgggcgtcgcgggattagggaagcagatcgcatggggaagggcggcgatggcatgacggaggcgccgcgcatgcggagtacggcgaggcatggtgatgggtggaggtga

SEQ ID NO: 16529 - DNA, 1149 bp, Zea mays
  Peptide Sequence Number=SeqID_58308
atggccgggcgagactccctcccggagggttctctcttcctcgggttggacagctccactcaatcactgaaagctacggtgctcaataatgagctcaccatagtagcttctgaaattgttaattttgactctgaattgccacactacaaaactgaaggtggggtgtacagagacccagcagatgataggcacattttttcaccaaccattatgtgggtggaagctttggatgtgctgcttgagaagctaaaaccaaagatcaacttcggtaaggtagtggctgtttctgggagtgggcagcaacatggcagtgtttattggaaaaagggcagccatgctgtgttatcctccttggatgctagtaaaagcttgttatcgcaactaaaggatgcattttctacaatgaactcaccattatggatggatagtagcacaacaaagcaatgcagagaaatagagaacgcagttggaggtgcactggagttagcaaaactcacaggatctcgtgcgtatgaaagattcactggcccccagataaggaagatctatcagacagagcctgatgtttatgaagataccgagagaatatctttggcaactgctcctggacttgaagcaaagcttggaaatctagcaccagcatattcagctgctggtcgaattgctccttattttgtagaaaggtttcagtttgataagaactgtttggtcattcagtggtctggagataatcctaatagccttgcaggtttaactctgaatacccctggtgatcttgccattagccttggtactagtgatacagtattcgggataacaacagaagctaaaccaagccttgaaggacatgttttccccaatcctgttgagcctaatggttatatggtcatgctatgctacaaaaatggctccttgaccagagaagatgtacgaaatcgctgtgcagacaaatcatgggacgtttttaacagctatctggagaaaacgccccctctaaatggtgggaagataggattctactacaaagaccatgagatcctccctccacttccagtgggtttccatcggtacactgtcgaaaacctcaacgacgtctcatcagacgctctgttggagcgtgaagtggaagaacttgacccaccgtccgag

SEQ ID NO: 16530 - DNA, 1011 bp, Zea mays
  Peptide Sequence Number=SeqID_58309
atggctaggcttggcgtcctcgtcttggttgcgcttctcgccgctgacaccacagctcaacttgctcaagcgcaagggtcctcctcctcctacggcagtgctcctcctcctcctcctccaactagcccgccgagcgcaagcccaccagcccagactccaccaccggctcctactccgccaacgccaaagctgaggtacaacttctacaagcgctcgtgcccttacgccgaggacatcatcaagcaagccggctgcgacggctccgtcctgctcgacgcgacgccggcgaacccgcggccggagaagctcggcccgccaaactttcctagcctgcgcggctacgaggtggtggacgcggccaaggcggcgctcgagaaggcctgcccgggcgtcgtctcctgcgccgacgtcgtccagttcgccgctcgcgacgccgtcttcttcctcagcggctccaaggtgctctacagcctccccgggggccgcttcgacggcagggtgtccttcgagaacgagacgctcaggttcctgccgccgccgtccttcaacctctcccagctcgtccagagcttcaaggtcaagggcatgagcgtcgacgacctcgtcgtgctctccggctcccacaccatcggccgctcccactgctcctccttctccgaccgcatctccacgccgccctccgacatgaaccctgccctcgccaccgtgctgaagcggcagtgcccggccaaccccaacttcaccaacgaccccacggtggtgcaggacatcgtcacccccgacaagctggacaaccagtactactggaacgtgctacgtcacaatgtgctgttcaaatccgacgcggccctgctgacgtcgacggagacggcgaggatggtgctcgagaacgccggcatccgaggaaggtttgagaggaagttcgccagcgcgatgctcaagatgtcgctcatcgaggtcaagaccgctgccaccggcgagatcaggaagaactgccacgtcgtcaattag

SEQ ID NO: 16531 - DNA, 249 bp, Zea mays
  Peptide Sequence Number=SeqID_58310
atggaggagcctcaaagctttgatgtggccaaggttgatgaaattctccaaccacttgctggaaagacattatcttacaagatgtttgcacgtgatacacaggcttcacgaagtgtgttgcagcagccacaccacagacaacaactatcagagccgatcgggtttgcaacgtatctgccattctgcctgcctctgcccaatcattttgacccaaagatttgcattagatgctcaggctatagagggtag

SEQ ID NO: 16532 - DNA, 1080 bp, Zea mays
  Peptide Sequence Number=SeqID_58311
atgcgatcacatactttatcattccaagctggattagttgaacctttcagtggaacgatttgcttgtataacagagatagaagagaaaaactgtcagaagacttctactttcacatacttccaatagatatgcaggatggttctttggatcgtcgaggagttttttcattggacacacattcaccatcagtctgccttttgattcaattggaaaaggctgctactgaagaagggggagtaacaccttctgtttattctcataaagaaccttgttgtgctgcctacatcgattgcgtgttctcatattattcctgcacccatgctttcatgacagaactgccacgtgataatgaacacaagattgtaaacatcaataaggtagggcacatgttgacacaacttactatggctgatacttctgatgttcctatagaagatcctcttagcatattaaactcaagaactgatgataatcatgccctagagttgagggataaggagctccttgtgtcagagctgcaaaatacgcttgatcaaaaatcaaaacagttgggtgaaactgaaattaaacttagtgccatgatggatgaggttaattctctgaagaaagaacttgaacaaacccggggtcttcttgacgaatctcagatgaattgtgcgcaccttgaaaactgtttacatgaagcaatagaagaggcccgaacaaacaaatgttcagctgacagaagggctgttgagtatgatgctctgcggtcgtctgctttgaggatacatggtttgttcgaaaggctaaataactgcatcactgcaccaggtgtgactggctttgcagagtcactgcattctttggctgcctccttggcaagctctgtaaagaaggatgaagctgataccactgttcagtttcaacaatgcatcaagatcctggcggacaaagtttatttactgacacgacagagtgctgagctgctagaacgctatttagctatgcaggcagtacatggaggtatcacaaaagagttggatgagaagaaagagctgattaagaatctctacaataaacttcaacaagaaaaatag

SEQ ID NO: 16533 - DNA, 258 bp, Zea mays
  Peptide Sequence Number=SeqID_58312
atgggcgactctgacttctgcgcgcgctgcgcgcgcaataaatgcatcgcagctggcgagttcctgaggccgctcttccttggcgcaccggacactgtccagtgtacaccggacagtccggtgaattatagcgcgagtgcctcggaaattcccgaaggtggcgagttcgagttggagtcctctgccaacaaggaccacgacgtctatgagctgcggtacttcaacattgctgagaacgagggcgaggaagaagattag

SEQ ID NO: 16534 - DNA, 234 bp, Zea mays
  Peptide Sequence Number=SeqID_58313
atgggaataggcgctccactgctttgtccctttgggctttggtttggtgccctgaaactagatgtgcctgatggtacagtaggagtacccgctaatatccgtcccagatgtggctggtggaaatgtgcggacggaattccccaagcaagctacagcagcgcctgcaacctgctcagggatcttgcaggtgccaacggaaatcctagatgccctgggtgtgcttttggggcctag

SEQ ID NO: 16535 - DNA, 879 bp, Zea mays
  Peptide Sequence Number=SeqID_58314
atggagcaccggacgccgcccaaggggaagaagagcgccacggcgacgcccaatgccaagtggcgcaacgacggccacggcctgagcggcgctgccagcaaggcggctagtatgagcagcatggagtcgcggccgggccgaacgaacctggtggagcccatagggcacggcgccgcgctgccgtccggcggccaggcagtgcagccgtggtggacgagctccggggctgtgctcggtgcagtctcgccagccgtcgtggcggtggcgcccgggagcgggacggggattagcctgtcgagcagcccggcaggtggtagtggtggtggcggcgcggctaaaggagccgcgagtgacgagagcagcgaggattcacggagatctggggaaccaaaagatggaagcgctagtcaagaaaagaaccatgccacatcgcagatacccgctctggcgccagagtatttggcaccatactcgcagctggaactgaaccaatcaattgcttctgcagcatatcagtacccagatccttactatgcaggcatggttgctccctatggaagtcatgctgtggctcattttcagctacctggactaactcaatctcgaatgccattacctcttgaagtatccgaggagcctgtttatgtaaatgccaagcagtaccatggtatcttaagacgacggcagtcccgtgctaaggctgaacttgagaaaaaggtggtcaaagccagaaagccataccttcacgagtctcgtcatcagcacgcgatgaggagggcaagaggaaacgggggacgcttcctgaacacaaagaaaagtgacagtggtgctcccaatggtaaggctgaacctgagaaagctagtacaattgttgcataa

SEQ ID NO: 16536 - DNA, 861 bp, Zea mays
  Peptide Sequence Number=SeqID_58315
atgggtgtaattgtgaaagaaaattctgagaagaataggctgcttgttaagaggatactgcccccgctcccgcaccccgcgcgccagccaaacctctgctcccgcacgcccgcgaaaccgccgctcccggaacgcccacacgccagcaacccccgctcccacacgcccgtgcgcgtcgacgacctcgctcccgcaacggcctcccgaacgccccgccgtcctccactacctaaacgacgcatcagccgcgaaatccgtcccggacgtggcgcctcccacatcgtcgtccgcgtcggggcgcttcctgccgccggagagccccatggccacgtagctgaagaagcggctcctcctaagtccctcgtggtcgcgctccctccggatccgccggcgggcggcagcggctgctgcgccgcggccgtcgccgacgacggcatcacgtgcgacttcctgctgaagctgctccgcgcggggagcatggtgggcgcggatacggcgccgctgcgggacctggaggcgcgcgcggcaaggcggctggaccaggcgacgctgggcgccgtggtgataccggcgttcggccacggcggcgagcacgcgccggcgcttctctggacgtgcccctcgtgctgcgcctcgtgcgcgggttcctcaaggaggggcggcggcggcagcaaggccgcacgcgtggccaggctcgtggacgtgtacctggccgagaccgcgctggaggccggcctgcgccccgccgagttcgaggagctcgcgcgcgccgtgcccgcccacgcgcgccccgccgacgacgcgctgtaccgcgccgtcgacacctacctcaaggtgcgcccgcgctccgccctgtcatag

SEQ ID NO: 16537 - DNA, 765 bp, Zea mays
  Peptide Sequence Number=SeqID_58316
atggggagggcgcgacgagtagaacggtcagacctggcaaacctggtcggagcagggagggaaccagggggatggaggagttggacagaggaagatggagggaggggcatcggctggacacaacaacaggaaggggagctggttggacctaagcagggcgacgtcgaccatggaggtttgggcattggagacgctcagcatgggagaagccagggatggcgcttgaggaagagagatgctggtgaagggatctcacgccttgccaaaggcaccataggaagctccgcccgacccagggctcggactcgggctcagccccggaagacggcgaactccgctccgcccgacccagggctcggactcgggctcagccccggaagacggcgaactccgctccgcccgacccagggctcggactcgggctcagccccggaagacggcgaactccgctccgcccgacccagggctcggactcgggctcagccccggaagacggcgaacttcgctccgcccgacccagggctcggactcgggctaagaccccggaagacggcgaactccgcttcgcccgacccaggggctcggactcgggctaagacctggaagacgacgaactccgcttcgcccgaccccagggctcggacaccgccctggcctctgccgacgacctccgcctcgcccgacccaggggctcggactcggcctcggccgtggaagacagactcgacctcggcttcggaggagcctccacgtcgcccgacctag

SEQ ID NO: 16538 - DNA, 702 bp, Zea mays
  Peptide Sequence Number=SeqID_58317
atggccagcccgcctgcactcggcgctcgccacggtccctcactagagtggaagctgccacagcaccacaagattgacggtttaatgattggattttctattgatgatttgacatcgataaaaggattttcgatattgtcggggaccataattaggggtaccctcaagactcctaattctcagctgggagccaggccttgccaaaggcaccataggaagctccgcccgacccagggctcggactcgggctcagccccggaagacggcgaactccgctccgcccgacccagggctcggactcgggctcagccccggaagacggcgaactccgctccgcccgacctagggctcggactcgggctcagccccggaagacggcgaactccgctccgcccaacccagggctcggactcgggctcagccccggaagacggcgaacttcgctccgcccgacccagggctcggactcgggctaagacccggaagacggcgaactccgcttcgcccgacctaggggctcggactcgggctaagacctggaagacgacgaactccgcttcgcccgaccccagggctcggacaccgccctggcctctgccgacgacctccgcctcgcccgacccaggggctcggactcggcctcggccgtggaagacagactcgacctcggcttcggaggagcctccacgtcgcccgacctag

SEQ ID NO: 16539 - DNA, 753 bp, Zea mays
  Peptide Sequence Number=SeqID_58318
atggacctctccgccgtccaggccgccctctccgacaagtcctacaccgccgtcgcctccctctgcgacgagctcctcctacaggtacccttcttgcctctctcccaatcgcaccccacatccgcacaagggttagcgctccgtctcacgcgattgatctcgcaggccgcgtccaagggaaccaataccgacgaatggccctactctgtccacctcctggcccacctctacatcaatgacctgtatgcgatccgccgcccttgccctcgttttttccccatccttttgatgccttggtgttgttgtgacttgggagtgagcaggaacagcgcgcggttcttctggaaatcgctgccgcaggaggtgaaggacacgcggccggagctcgccgcggtctggaggattggtcagtgcctctggaacagagactatgctggtgtcaacacggccgcacaggggttcgagtggggccctgacctcactgaattcatcactgccttcctagagagctacagacaaaggatattcaaactgttgacttctgcatattcgacaattagcgttgctgatgtggctcatttcatggggatgagtgaggaggatgctacaaactatgctgtgcaaatcggttggagtttgggcgcagcgaccaagatgcttactgtcaaaaagccaaaggctcagatcaaccagaagcttgatgcgagcaaactgcagcgcctgactgagtgtgttttccaccttgagcactga

SEQ ID NO: 16540 - DNA, 414 bp, Zea mays
  Peptide Sequence Number=SeqID_58319
atgtcaagtttggtcgacctctacctaaatcttgtgattaatgagctcaactctattggaatgaataagctaggtgatgcggacattatgaggaagatcatctccctactaccacaacaaagatatgtgagcatcatcaccatccttcacaacctcgaggacttgagccaaatgaccccgacaattgtgattggaaaaattgcagcatttgagatgtcacaaaaaataggtcaacaagagcagccaacttcttcaaagccatatgcttttgcatctgatgaacataaaaagatgaaaggcaagaagaaggctccaagttcaagtgaagaagaggaagaagaagaagattatgatgatgatgaagaagatgatcaaccctcaacatcatcttccgaggacaaagaaatagtctga

SEQ ID NO: 16541 - DNA, 261 bp, Zea mays
  Peptide Sequence Number=SeqID_58320
atggctattgtagcttttacagtaggttggtcttcttccatgggcggatcattgtcgactggtggtgtcaggtcttcttccatgggcggtgccctggagcgcctgattgtctcacatcccttttctctgatggatatgctgatattcaaggctgtggaagagcaggtcaagaagagagtagagaataaggcaatgatcttcgagcagaatgccactgatagtcaacggcaagataaaccaattgcgttgtatgagttttag

SEQ ID NO: 16542 - DNA, 162 bp, Zea mays
  Peptide Sequence Number=SeqID_58321
atggtggcggcgctgctcctctgcttcttgttcctggccgtggccgtcgcctcagccaaggtccgtccctgttcaacaagtgttgcgccaagtgcgtgcaggtctcctgggcgtgcacctgatggtgccgccgtgaagccttggctcgcgcagcgcatttag

SEQ ID NO: 16543 - DNA, 1392 bp, Zea mays
  Peptide Sequence Number=SeqID_58322
atggaggcggcaggtggagagcagcacgaaacacgacgacgtgcaggtgcaggcctcgccctcctgggcgtcgtctactcatcgctgctcctgaacgccatcttcgtcgcgcaccacttcctctcgccgtcccggctgctgctccgtgacgacgggtgcgggtgcgggctcacctggtctctgcaggcggccagggaggccgaggcggtggccgccgtggagtgctcgggccacgggcaggtgttcgtcgatggcgtcgccggcgaggacgggcggcccggcgggaacccgttgttcctggagccgtactggcggcgtcacgcggcggccagcgccgtggtgttctccgggtggcaccgcatgagctacaccaccacgggcgggttccagtcggtggagctggagcgccagatccggcgcctgcacggggccgtcggtaacgccgtcgcggacgacaagcacctggtcttcgccagcggctccctgcagctcatcaacgcgctggtgcacgcgctgtcgccggacgccacggccgcctcgccaccgtccagagtggtcgcggccgcgccgtactacccggcgtacagacagcaaacctccatgttcgacggccgcgagtacagatgggccggaaccacggccttgtgggccaactcgtcacgggcgaactccaccgacggcaccttcatcgagttcgtcacgtcgcctaacaacccagacgccctgctccgcgagcccgtcctccgcggctcggcggcggcgatcgtcgaccacgcgtactactggccgcacttcacgcacatcccggcgccggccgacgaggacatcatgatgttcaccgtctccaagccatccggacatgctggaagcagattcggatgggcgctgatcagggacgacgaggtggccaagcgggctttagagtacctgagggacagcaacatgggcgcgtcgcgggacacccagctgcggatgctggggatcttcaagttcatgctggccaacctgcgcggcaaggacgacatcttcgccttcggccacgacgtgatgaggagcaggtggctcaggctgagcgccgccgtgtcgcggacccgccgcatcacgctgcagaagatcgcgccccagtactgcacgtacttcggccgggtcagagagccatccccagcctacgcatgggtcaagtgcgagatggaggaagacgaagactgctacgaggcgctgctgaaggcgaacatcatcacgcgcagcggcgtccagtatgaggcgagcagcaggtacacgaggatcagcctcctcaagtcggacgacgacttcgacgtgctcatggagaggcttgaagatcttgtcgatgccgacaagtacgacgattccaacggttcgagctcaatgtag

SEQ ID NO: 16544 - DNA, 146 bp, Zea mays
  Peptide Sequence Number=SeqID_58323
atgacgcgacctcccccgaacgcccccgctaatctcgccaccagcggattggagaagaggggccccggaatttgtcaccggagtgcagtcttcaccacgggcgcgcctaccatcgtggccgagcgtcaacaatcgggtaatcgaag

SEQ ID NO: 16545 - DNA, 123 bp, Zea mays
  Peptide Sequence Number=SeqID_58324
atgaagggacggcaggaggacgacgaaacagctgacaagcggggccacactgccagtgggagtgagcgtgcgagagagagggcggctgacgggtggggacgtttcgccagtgctggaaaatag

SEQ ID NO: 16546 - DNA, 222 bp, Zea mays
  Peptide Sequence Number=SeqID_58325
atggaggcgtttcaggtggcaaaggtctcgcgcaagggggcctggaatgtcgtcgctgggggctgggttcgtgcacggggggctggggcatcgctcgggtgtccggcctccgcgggggaggaagctggtggtgttgtcggggcgtccgggtgtgtggacctcctcctgggtgcaggtcgcgctgaggagggagcagtggtgcgggcgctggtcgccgtgtga

SEQ ID NO: 16547 - DNA, 701 bp, Zea mays
  Peptide Sequence Number=SeqID_58326
cgcggcacaacctccctccacgtggcggccgaccccgaacggcccctggggcggagctcgcgctgacctccccttacccccggtgcggcgctcgccctcgaccctgcttccccgcggcggcgcgcggctcgtccctgccctcccgcggcagcgcagcacgcccgcccccctgctccctcccccgcgcggccctgccccccccggcggcggttcctggccccggcgcggcccgcccgcccccttgctccctcccccgcggcggtctggcccccggcacggtggtccgtcccccgacgcagcggtccgccctggcgcgcgttcccgcaccggcgcgcggacccggccccggcgcggtgtacccgacccccggcgcggcgttcccggccccctgcgcgccccggcccctgcgcgcgtcccgcccccccggcgtggctcgcgtggcctcgacgtggcctcgcgctcccccgtttacccctaacgccgttcccgcgtgcgcaactccacgcgcgcggctacatagtgatgccctgctgggccacctaggtagtggtcaatggggagtagctctctccgggcagaaagggaatcacggcttgtgggtggcaatgagattgatggttcttggttttgactctggtaatggagaagatgaagccatggaaggagacttccaggagttccaagactacgacgagttttag

SEQ ID NO: 16548 - DNA, 444 bp, Zea mays
  Peptide Sequence Number=SeqID_58327
atgcctcaggaaataggcagtccaacagtaacacgtccatcaacgatcacatttcaaaaacccccgcgggaccacttcgagcgagggcagcgtcttcaccatgtcacattggtcttcagcaccagccgacttagtcgaactggtccctcggagggcaaatgttgggacgaaggcgaacacgccacccttcactcgtcgatttcatcctcaccttgcgcaggcgaaggctggatccacagaacctgccaggacaggccaagggcgctaaccgggcggtggcctgttcgacccccttcgctcacacgagacaagacgaaggcccgccgaagtctatgggtcctcccactccctgaccaccacgtgaggcccatgtgcgattcgacccaggtactcgacggtctaaatgtctttgacagggacaagcggcccctcgactacctataa

SEQ ID NO: 16549 - DNA, 1040 bp, Zea mays
  Peptide Sequence Number=SeqID_58328
atggcggcggtccgtggagccattgccactctgctggtggtggtggtggcgctggcgctcggcacggcttcggcgttggacttttccgtccggaagaccaagccgcagcctccccggatgtcgacgccgggggaccccaagaaggccccgggcaacggcaagttcaccaccgtcatcaacaagtaccacaagaagaactacgagatcacatgcaccaccgactggggcgcctcctgctacgtcaagtgccccgcccgctgccccaacaagtgcctcgcctactgcgcctactgcctcaccttctgcatgtgtgacctgatgccgggcacctcgtgcggcgacccgcgcttcacgggcgccgacggcaacaccttctacttccacggcaagaaggacgagagcttctgcgtcgtgtcggacgaccgcctccacatcaacgcgcgcttcatggggaaccacaacgccgactccggccgcgacttcacctgggtgcaggcgctcggcgtcaccttcggcggcgctcacagtcacaggctctacgtgggcgcccgcagggccgccgagtgggacgaggacgaggaccacgtcgtgatcgcgctcgacggcgaacccgtcgacgtcgaggccgccaaggacgcgcgctgggtgtcgacggccgtgcccgggctgtccgtcacccgctcccacgccgtcaacgccgtcgtcgtggagctcaacggcgagttcagcatctccgccaacgccgtgcccatcaccgacgaggactcccgcgtccacggctacggcaagacggggaaggactccctcgtgcacctcgacgtttcctacaagttccacggcctcaccaaggacgtcgacggcgtgctcggccagacctaccgtccggactacgttaacaagctcgatatcagcgccaagatgcccgtcatgggcggcgccgacaagtaccgctcgtcgggcctcttcgccacggactgcgccgtctcccggttccaccgcgtcggcggtggcgctgacgccggcttcagctccttcgcctc

SEQ ID NO: 16550 - DNA, 144 bp, Zea mays
  Peptide Sequence Number=SeqID_58329
atggcggaaggcattgcgcggtggagttacaccgccgtcacctccgacatgcgcgacataggccggtccacagggcgggtgtcgctcacgcgctccatcgagaacatcgagatggtcggcatgtacaagatatgcttaaggtga

SEQ ID NO: 16551 - DNA, 198 bp, Zea mays
  Peptide Sequence Number=SeqID_58330
atggccaacgaaattataaagaaaaatgaaaaagaaacccatgatgctcgagaagaagctaagcgagctgaagaagctgccgagcgcgcaaggcgtatagaggcgctggatgtgatgagtgctgccaatactattgtcgacaaagtcattgacagactactgaatgaggccgccgagaaaattctcaaagaaggctag

SEQ ID NO: 16552 - DNA, 507 bp, Zea mays
  Peptide Sequence Number=SeqID_58331
atggccccgcgtcccctggcggtggccccgcgcctcccccccgcgaccccgcccctccctgtgcgcgcgctcggcggcggccccgcggtctcgcggtgccgcgccccccggcagccgtgccctcccctgcggtcgcgccgtcccccggtggccgtggccttccccgcagtcgcgcactcccccgacgtctcgcgcccggccccatggccccgcgccccctgcggctcgcgccccttggtggttgtgccctcccccgcggccccgcgcccccctgcggtcatgccctcccccgtggccctgcgcccccgacgactagcgccccccagcggtcgtgcccccccggcggcacccccgcgcccttccccgcggcccctagtggcaccccacgcctccctggcgggccccgcgcctccccagtggcccctgcgtgtccccggcggccctcgcgccctcggcggccctcgcgtgcccccggcgcgcgcagtgctcccccgcgtgcgaccatag

SEQ ID NO: 16553 - DNA, 879 bp, Zea mays
  Peptide Sequence Number=SeqID_58332
atggtgctacagtatgcccaggccttcaacgacctgtgccagtacgctggatatcatgcaaattccaatgagaaaaagagagaccgcttccagaggggactcggcacaaagctccatgagtgccttaacaccgtccgagccaacagctacaatgaattggtcaacctaaccatctctcaggaaggctgcatcttagctcatcgggcagagaagaaaaggaaggcaccaatggcaggatcctcgccccaacctaagaggttccggattgtttctagcaaccaaagcaggggatttcagcaggaggcaggaagtgcatcacatagcttcattagtccaaaattcagttttctgggattagttgaatattaccgtcgattcattccagatttctcaagaatcgtgaaacccatgattgagctattaaagaagggagtaaagtttgagtggggtcagaagtgtgaagaggattttcatatccttagacaacacctgactaccgcaccagtgttagcacaaccgaataatggcaagccattcgaggtgtattgtgatgcttccggtactggattaggttgtgttctaatgcaagacaaccgtgtcatcgcctatgcatctcaagcactacggccacatgagcagaattatcccacacatgatttagaattggcagtcgtagtccacgccttaaaaatcttaaggcattacttgatgggaactcgctgcaacatctataccgatcataagagcctcaagtatatattcacccaggctgacctcaacatgagacaaagaagatggctggaattgatcaaggattatgacttagaggtgcactaccaccctagaaaggccaacgtagtagcggatgccctaagttga

SEQ ID NO: 16554 - DNA, 106 bp, Zea mays
  Peptide Sequence Number=SeqID_58333
atgaaagtggcagaaggagatgaggtgagccgaggagcagctgagccggcgttcgagtacgagaaccaaagagcagacgagaaccgaagtccagctgataatagag

SEQ ID NO: 16555 - DNA, 612 bp, Zea mays
  Peptide Sequence Number=SeqID_58334
atggctgctgctggtgatggtggcggcaagtccgacgggtcgtcgtcaaatgcggcctgcctcgccctccgcatcgccaccgtagctctgtcggtggcgtcggcggtcatgatggcgtccgcctcgcagcgctcctgcaccggctgctctccggcgacggcgagccagcagccggtctcctacagagactacagctcccttagttattccctagtcgccaatgtggtatcggcggcgctacaggcgttggcggcgtggctgacggcgtccggcaaggcggacaagggcaaggtcttcaagtctctgtccgagctcgtcgacaccgccgcgcaggtgctgctctactcgtcctcggcgctgtccttctcggtggacgacttcggcacctgcggccgcagggtggccggcgtctgcaaggccgccggcgagttctgccagcgggcccgcgcgtcgggggccgtctccattgccgcggccgtcgccctggccgcgtccaactacctgaaggacgtgcccgtctccacatggttcagagcaggtgacgatggacccaagggaaagcccgccgggtgtggccgcggcggctgccattgccgccaccaccaccattag

SEQ ID NO: 16556 - DNA, 630 bp, Zea mays
  Peptide Sequence Number=SeqID_58335
atgtgcgaggagaagaagtcagggggcggcagcgccaataagtggcggcaccctgtgagcctcgtcttccgtatcgccggcatcgcgatggccgtggcggcggcagcggtcatggcggcggcgagccagtgcacggtctacgccgactacgactacggcgcgcgcccgagcaccgtcacgtacagcgacttccctgccttcgtgtacctggtggcggcgacctccatcgcggcgccactggaggcggtggcgctgttcctcagcgttagcaagaagggcaagaagggcctcctcagggtgctcatgccgctcctcggcgccgccgcgccggcgctgctctactcgtctgccggcgcggcgttcgccgccggctgggacgtctactactactcggagtcggagcccagcgccggcggcgggcggcgcttcagcgtctgccgcagtagcgccggcgcccgcttctgcgggcaggtgcacgtgtccatgtggctcgcgctcggcgccgccgtggccgtgtccgtcgctgagtgcctcaccacgttgctgtggtccgccagctccgactctgactcggccgactctgactcggacgactctgtttgtgggcatgggtgccattgcaagcattag

SEQ ID NO: 16557 - DNA, 843 bp, Zea mays
  Peptide Sequence Number=SeqID_58336
atggcagcagcagagcgcgaccgcgagcgatggatcctgcccggcgcgacggcgctggtcaccggcgggagcaaggggatcgggcacgcgatcgtggaggagctggcggcgctgggcgcgcgcgtgcacacgtgctcccgcaacgccgcggagctggaggagtgccgccggaggtgggcagagaagggcggcggcctgctgcagcaggtgaccgtctccgtctgcgacgtcgccgtgcgcgccgacagggaggcgctcatggccaccgtcagggatgtcttcggcggcaagctggacatcctcgtgaataacgcggcgcaggtggtcttcaagccggcggtggagtgcaccggggaggagtacacgcggatcatggcgaccaacctggagtcctgcttccacctcagccagctcgcgcacccgctgctccgcgacgcctccctcgccggcggcgggagcgtcgtgcacatctcctccaccgcgggcctcctcggctttcgaggggcggtgctttacagcactgcgaaaggcttcatttgtacccatttctttgttcctttgcttgcgggaggagtgaaccagctcacgaggagcctggctgctgagtgggcctgtgacaagattcgtgtcaactcggtcgcgccaggaatcgtcatgactgacatggttaagaacgcagcaagctcggaggccgtcgagcaagaaacttcacggattccgctgcggcgggccggcgagccggcagaggtggcgtccgtggtgtcgtttctgtgcatgccggcggccgcctacgtcaccggccaagtcatctacgttgacggtggccgaaccataagagcttga

SEQ ID NO: 16558 - DNA, 114 bp, Zea mays
  Peptide Sequence Number=SeqID_58337
atggcgcgggtgcccatggggaggatcggcgagccggaggaggtggcgtccatggtggccttcctctgcatgccggcggcgtcctacatgaccggccaagagtggttaacgtaa

SEQ ID NO: 16559 - DNA, 2709 bp, Zea mays
  Peptide Sequence Number=SeqID_58338
atgaaaggccgcgtggtcaagctccgtgaggcgcacaaggctggctcgccagccctctgttccgcctcctggggccccagcggacaacacgtcgtcaccgcttccgccgcggacactgccgtcctgatccacgacgccgccacggtgctcgccggcggtcggggctcggaggggcagttccagagcaatgtcgcccgattcaccctgcctatccgatcactcgcttttaacaagaaaggcaccctactggcggccgcaggtgaagatgatggcatcaagctgatttcaaccattgacaacacgatatcgaaggtgctcaaaggacacaagggctccgtcactgggctggatttcgacccgagaaacgattacctagcatctgtggacagcttcggtaccgtcatctattgggatctttgcattggtgctgaggcccgtaccttgacacgtattgctcccacgtttcggtcggataactctgtcaggaatgttctgtgctggagccctgatgggcagacccttgctgtgcccgggttgaggaacaatgtggtgctgtatgatagggacacgggtgaggaggtgtgcacgctatatggagatcatgaacaaccagtgagcagcctttgctggtctcccaatgggaggtatctggccagtgctggcttggataggcaggtgctcatctgggatgtgaagtcaaggcaggacattgagaggcagaagtttgatgagcggatatgcagcttggcttggaaaccaaatggaaatgctttacttctgattgatgtcatgggcagggttggcatttgggaatcagtcgtaccttcgactatgaagtcgcctaatgagggcatacctgatctcaactccaatatggttcctctatttgatgacaatgacgatgagccagacacctcagttggcttggaggatgatgttgatgatactttcagcgattcaataactttcaaccacaagagaccaaggaggaagtctacgtttgatggagatagtgagaatgaagatttaatacatcaattggaatataccaaaagaatgaaagataagcaaaataaaaatgaggatgctgggaaggcaagaggtgattctgccacaccagtgacgttggttacatcaacaatgcaagctgctttccagcctggatcaacgccaccacagcctggcatgcgaaatttcctcgcatacaacatgcttggaagtatcactactattcaaaatgaggggtattcacatgtggaggttgacttccatgacacaggaagaggacctagagttccttccatgacagactattttggtttcacaatggctgcaatgaatggatcaggaagtgtgtttgcaaatccgtgtaagggtgacaagaatatgagcactctaatgtaccgcccttttggtagctgggctggtaacagcgagtggtcaatgagatttgaaggtgaagaagtgaaggctctggctcttggtgctggatgggttgctgcagtcacaagcttaaattttttgcgcattttcaccgaaggaggcttgcagatgcatatcctctcagttagtggcccggttgttacagcagcaggttatgaagaccagctagctattgtgtcacatgcttctgattgtttgccctctggagatcaggtgctggatgttaaagtattcaacatatctgaggggacacaatcaatgtccggtcgccttgttttgacaccattgtctcgattatcttggtttggattcagtgagaatggccaacttagttcatatgattccaagcatagaaaatcactctttaatttcagttcggtcaaggcaagaaaatctgaagatgaaagccattgggtggtcggtttggatgcaaataatatattctgcattttatgcaaaacccctcaatcttatccacaggtgatgcccaagcctgtgctaagcatacttgagctgtcatttccacttgcgtcatcagatcttggggctaatagtttggaaaatgagttcttgatgaggaagttacagctatcccagattcaaaataaaatggaagaaatggctgcattgggccttgacaccacttcatatgatgatgaatcgttcaacatggaggcaggacttgaccggtgcattttgaggcttatctctagttgctgcagtggtgataagctcgttcgagcttctgagcttgcaagattattgaaactagagaagtcaatgaagggagctctatcactagtgacacgcctgaaacttcccatgctgcaagagaagttcagctccataattgaggagagggtgttaaatgataaaataatagctggagcaggaggattttgctctaatgctacaatcatgacgaacacaccagtgctgaccactcaggcaactctaccttctatgtttatgcaagatgggaaccgttcgcttgaatcttcattacccaaactcaatattgtcaatcaacaatgcaattcaactgaaccaaagaagccagcaggagaacgagggattgaaattaaggatagaactcaaaaagattcatctgcctctgttccatttgccaagtttagtgtagacttagacgaatgcaacatggtgatcgagaagatcaacatctcaaagtatgacattacaagactcattgaagatctaacaagatcatgcattatgttcgtgccctgcattcatagacaaagttag

SEQ ID NO: 16560 - DNA, 234 bp, Zea mays
  Peptide Sequence Number=SeqID_58339
atgcacgggaggctgatcccccgggtccacctgtcggcgcacgcgagcggtgaagactgggccgcgcgggtggcattcggtttgggccgaattgttggcctgcggccctgcccacagcgagacatcaatgaggagcaactagcatgtcgccccgagcagagttttcgcccccgagtggaccccgggggatatctaccccccacagtgtcggccatccagcccatcagaagctga

SEQ ID NO: 16561 - DNA, 543 bp, Zea mays
  Peptide Sequence Number=SeqID_58340
atggagctgcgcaaaaacaggaaacacccagcgagcgtcgacggtgctgcaacaacacatctccctcgtaggcattacgtcgaacaccctgcgcacagcggaaaggagcaagggaaggggctgttcggggaaggcgacaggggtgctgttcttgggagaggggctcggcctccatggggaagaaggttcccggcgctggttgtgtggggagaacgagaggaggcccggctggttttccatgggggtgtcggggcgcgctggagaggggctggagcaaaggcgttgcgcagggctgctgctggccgtggagcagggggaggacgagccagaggaggggtgtgtgcgtccaggttcccagggagaaaagtagagggcaccgagcagctggaggagggagctcgcggccatgagaggagcttcagcgtgccgaggaagaaggggcagagagcacgcagggaggtggaggcgccatgggaaggggacgagcagagctgctggcttactgtgcgtcggccgtggagaaaggtccctgcgccatggtga

SEQ ID NO: 16562 - DNA, 312 bp, Zea mays
  Peptide Sequence Number=SeqID_58341
atggcaatgggtcgggttcggatcgggtatggtccgtccaactcgctcgctcgctcaatctactgcctcgctgtgcccaagtcggtcatcgccttctggatgctgctcagcgccgccagggacgccgccctgctgatgctggccatcgtggggtcgtgccgcttcccgttcgacgtcgcggatgccagccaccagcaccagcagcccggcgaggtgaagaccaggctccccgccgtggagtacgaccagctcctggccgagcacgagcagcagtccggcgaccacgatgggttgctaatttgctattgctag

SEQ ID NO: 16563 - DNA, 336 bp, Zea mays
  Peptide Sequence Number=SeqID_58342
atggaggtgctcgccatagtggcgcttgatggcgagctccgcacagtacactctaccgaggatggggacaaacgcacggcggcgggcctcaacggaggggacgtggcagtgaaggaggtagaggaggcagagcgcgtcaccaccatggtcaaggatgttaggcaagttggacggcgagggtgggtacacgaggtggaggagacaaatacagagtcagggcatgatggcggcgaggcgaatgtgtgtaggagcaggacctctagagcactctggaaagcagtcacggatagtagctccttgtgctggaacaaaaatccatctgatttaaggttgtaa

SEQ ID NO: 16564 - DNA, 348 bp, Zea mays
  Peptide Sequence Number=SeqID_58343
atggccggtgagacacacaacgctagccgttttcagaacccgatcctcgacgagatcgaggccaacgactacgacaacttcacccggagggcctacgttcctaagacgaagaagctgatggcgctgcccaaggcgtacctgagatcactggtgcctgtgtgggagaagctctccaagttctctggccatgctgctggcggctcctccatagagtccttgatgaagatgtcggagccggctgtgctttcgcacttcaagcccgcggactatgtcagcatactggctcagatacacaaggagctggagtgccgccctcctgacgacaaggcctccctgtacctcctatag

SEQ ID NO: 16565 - DNA, 762 bp, Zea mays
  Peptide Sequence Number=SeqID_58344
atggcacataccacggtgggggtccagatcaggacttcaccttcacttgttcctcttgaatccactcaaatcatcgccatccagggccccaaaatcaccccgaattcacaaggaaacgccgggaatcaaacccccgcgccagccacgggcaacagaggagtaagttgcgtcggctggtatttgggggggagcggggcggcagtcgcggatccgaggacaggcacggtgagcggaggacataccacggtggtgtctccggagcgagcgtggtggagtcctcgttcctcggagttgaggtgggcaaccagacctgcggcggcggagtctgctgaggaggaggggagcgcactggccccagaggacaggcacgaagagcggggcgcgcacgacgcgtgggtagtccgccatggtcgtcgatggaagggcacggtgggggaggatttcggcgtggcgcagcggcgacgaagatgcaaggaggatgcgcggcgcttcggtagcgacatcatcgttggaagggcgtggttagggcgacgaagaccggggcgtgcgcggcgtggtggtggtgggcgaggttttcggcgcggcacggtggaggatttcggggcgggcgagcctggggcggcagccagaatcgggggaggagaggggaggtcgggggcgacggtttccaggcgaggcgagagggtttcggggcgcgatctaggagcgggaccggtgtgcgggatcggggagcgagactcaaacgtaggatcggacgactga

SEQ ID NO: 16566 - DNA, 546 bp, Zea mays
  Peptide Sequence Number=SeqID_58345
atgggacagagaattgactatagtgagatgacagtcaaccaatttcttgcaattgcagagataaatattgaagatcaactgatagtctcgatgacaggatttaaaagatatgtggccacttttgctgagtttgttactgcaaacggtctagattatagtgtgatctttgatggggttgatttatatactgaggagcagtttgaagattatgttcagtattatgagcctgcaaggctaggcatccctaggaggtttggagagactccagggctgagacaccatcctgctgttattaataaaattgtcaggtactctaccctaaacataaggttcaatgttgttgatgatcagcttgatgggatgcactctcagtttgttgatctttgctctcatatccagtatattgttcatgatccaatcatgagcagaatgaacaacacgcaacagatctttcaggataatatgggcactctatacagtctgtttgagactctgtctaccagtgatagcatccatactcttgatgagcggcagcagcaactctaa

SEQ ID NO: 16567 - DNA, 942 bp, Zea mays
  Peptide Sequence Number=SeqID_58346
atgcctaattctcagctggtaacccccatcagcataaagctgcaaaggcctgatggagtgaagtctgacaggcaatcaggccttgccaaaggcgccacggcgaactccgctccgcccgaccccagggctcggactcgggctaagacccggaagacggcgaactccgctccgcccgaccccagggctcggactcgggctaagacccggaagacggcgaactccgctccgcccgaccccagggctcggactcgggctaagacccggaagacggcgaactccgctccgcccgaccccagggctcggactcgggctaagacccggaagacggcgaactccgctccgcccgaccccagggctcggactcgggctaagacccggaagacggcgaactccgctccgcccgaccccagggctcggactcgggctaagacccggaagacggcgaactccgctccgcccgaccccagggctcggactcgggctaagacccgaaagacggcgaactccgctccgcccgaccccagggctcggactcaggctaagacccggaagacggcgaactccgctccgcctgaccccagggctcggactcgggctaagacccggaagacggcgaactccgctccgcccgaccccagggctcggactcgggctaaaacccggaagacgacgaaactccgcctcgcccgaccccagggctcggactccgccctggcctcggccgaacgacttccgcctcgcccgacccctcggctcgggctcggccacggcaacagaaggcagactcaacctcggcttcggaggaacccccacgtcgccctgcttggggcacaggccgccacgtcaacaggaggcgccatcatcatcccaccccgaatcgactcgggtcacggagaacaagaccggcgtctcatccggccagctccgctagaggggcaatga

SEQ ID NO: 16568 - DNA, 2337 bp, Zea mays
  Peptide Sequence Number=SeqID_58347
atgtcgacgtcctcagctggtactttgataacggcggcggaagtctcactggcttgcaagatcattggtttcttcaatgactgggctcttcggttggcgactcttgccagcttggcctgcaccctagtcctcatgctcttggccgacacccgccggcacaacaagtaccccttgcttgtgttgttagtttgggcggcgtaccaggtgcagccacaggtcgggggctacgccctcacccacctcaccatcagcagcgcaacaacaacaacaaccacgacgacctcatcagcgcgcgagcagcagctagtggcgttctgggcgccactcctcctgctccatctggcaggaccggacaacatcgtcgccttcaccctggaggacggcaagctctcctggcgcaagctcctcgacgccatatggaaaataatacaggccctgtatgtcatgctcaagtacatatacctttgcgacagcggggtcctgcgctccgcgtcctccatcatggtcaccctcggtgtagccaggtactccgagagcgtggtcgcccttttgcgaggcaacatggacaacctatggggctccgcctccgccggcgacgacgagcgcaagccgccgcaaagcaccggcgagtacggggctgctgccgccgccgataaaaatgaaaaagaactgaccaccctgctctattcccacactcagttcctggcttgtggccgccgtgccatggccgattcctccgtcgacacggattcgcccaactatgccatcgcccggaacatcttctcccagcaggacccagatggtgtacgcaaggtggccgggatggagtcctccctcatgtacgacgtcctctacaccaaggtcaccgtggtgcacacctggggaggctacctcctccgtctcgtctcgccggtcggcacggcgacggcttcctccttgttctggctctaccccaaggacagcgaggagactcctgacgtcgtcatcacctacatcttgctggcggctgccttcttcctggacgtggtatggctagtgagggccctaggctccacctgggcatactcgttcctgaatgctagggcaaacatgtggcttcaccataaactgctgtgcagcggatgctggctcaggctccgccgcatccttgtcgggctagatctgttgtggctattagggattcggaaggatccgagcagccgcaggatgtggtctggaagagttgggaggtacgacttgctggctgagtgcacccggcgtccatccatggtggagcgcctgtgcacctggctggccagcaacctcagattggaggacatctggaaggaataccagcactcgagagcccagaaggtgctgttcgagcggattcagcagagactgtccggcagtgctgaccgccgctactccatggaggacatcaccacactctggggccaggaggcggtcaagagaagaagaaagcgggacaagctcaaaggcatcaagctgggtattttcggccgtgagttccaagaggacgtcctcttgtggcacatcggcaccaccatcttcctcgcccgcagcgatcgacagctgctcaaggacaaggccaacaagtatctgggagcagtcgaggcgctgtcggactacctcatgtttctgcttgctgtacgcccgagcatgctgccgggactagagctccggaagctgttcgaggtcacctgcaaagctttgaaggactcagggtcaggggttcgtcgaaaggctggtgagaaatgtgtcccctgtcacgcagctagaaaggcgaagcttgctgaactagtgcagaaagagatgtctggccacaaccaagcctcggtcgacgctaatcggcgtcttatctttgtcgcatgtcagcttgccactgagctgttaaaagtgaaaaaggatcagatggaggaactactggatctcatgtttgacgtgtgggtggataagatcttgtatgcggccacccgctgcagcaaggactcccatgccaagcagcttgcccggggtggtgagctcacaaccatcctgtggattgtggccgagcacgctggcccgtttcaaattggggaaaccagcatcagtgatcctccaccatttgacggcgacaacaacaacaacaacaacaacaacaacaacaacaacaacaacaacaacaacaacaacaacaacaacaacaacaacaaccacgacgacgacgacgattgtccatgtgaaaagctcggcaaagaaaaaaagaaaaagaactgcaacgaagatcctgatgtttgcctagacatttgttgtgtgaaagattactgttgtacgaatgaatactattactgctga

SEQ ID NO: 16569 - DNA, 441 bp, Zea mays
  Peptide Sequence Number=SeqID_58348
atgaaggttgtaactcatcggtcgaagccttattttttggagaggacttctgcactgcctgcttcggaaaagacgaagactgttgaatctttcgaagctaccttctcagctttggaggtagtacttgttgcggcagtcgaaactaataccactcaactagagaaatcagaaccagatagctctaggaccgagcaacagcaaaaactacagagtcctccagcaacggtggggttgccaaatatagccaccgttccagcggcgactccaaggaaggggaggagaatggccagcgttctagatgctgtgctgaaacctacaaaaattgctactcatgctcctactaaagtttccaaagataaagctgaagaattagaagaagctgtcgctgcgagcactactccttgttgcgctgagggcactcctgcttgcactcaggcttga

SEQ ID NO: 16570 - DNA, 429 bp, Zea mays
  Peptide Sequence Number=SeqID_58349
atggcgagaatcttggccgccgtctggccgatcgttaaaggctgcatcaccggcggcgtgttcggcatcaccatcgccgactggagcgcctcctacgtcaccttgcacggcgcctccatgcaccccaccttcgacccgcagcaggccgaacgcgctctggtagataagcgctgcctccaccgctaccacttctcccgcggcgacgtcgtcgtcttcaggtcgccgagggaccatcgtgaactggtggtgaagaggctgattgcgctgcctggggattggatccagatcccggagaagcaggagatccagcagatcccgcaggggcgctgctgggttgaaggtgacaatgccgccaccagctttgactcgagatcctatggccctgataaattgcttgtgaattgcaaaatggaagtcctgactgtgtag

SEQ ID NO: 16571 - DNA, 276 bp, Zea mays
  Peptide Sequence Number=SeqID_58350
atgacgaggatgacggcagtggcgacgacagcggtggaggtggcagcggcagtggcggcgacgacggcagcaagggcggtggtgaaggtgacggtggcgacggtggcggcaagggcgatggtggcgacgacggcagcaaaggcggcggtgggcgacggcaacaacagcggcaagggcggcaataaggccagtggcatagtgccgctgtgttttagaggtaactgccgagtgatgcctgaggattttgcttttccgagtggtaacctggcactttag

SEQ ID NO: 16572 - DNA, 258 bp, Zea mays
  Peptide Sequence Number=SeqID_58351
atggccaagaagggcattgctaggagcggctccggaagagagggtgcgagtagggtgatgactagatgggtcgccacgcgggtcaccacgaggcacaactactttgttcttgtacggacacgacatgacatgacagtaattgtgctcagaccaacccgaggcccattgtgggtcgttcttaggcttggagacaaccctaccaagcggcacaagcacaatcagtttactgccgacccatttagtacgctatcaggctga

SEQ ID NO: 16573 - DNA, 357 bp, Zea mays
  Peptide Sequence Number=SeqID_58352
atgggctcggccagctgtggcccggcaggaggcagcctagtgcggaggggcaggcagtgtctattcgacagcccgcgcggaggggcgtggcccacagtttgcaccttgccgtattggacgcagcccaacgaagcatcaggcgacgggccaaggtgtgggttggcttggtggccgggctatccgctggaggatgtggccggcgaaggagagtcccagagttcaggagtatttcctcaacaaataaaacaattagctaacagccagttgagtgtgaagttgcctaaaaggggttatgaggtcaatatcagcgccaagaccttggttatgtcatatctcccatgtctgtacaactgctga

SEQ ID NO: 16574 - DNA, 366 bp, Zea mays
  Peptide Sequence Number=SeqID_58353
atggagcagtccgagcatggagtctgcacgcaccaaggatcaactctgctaccgtcagaaaatacaatatggagaacggggaaccaggacgtcgaggcatttgctctaccattgcggccactattgaggactccctcgccgcgcgagccgcgaggccctctctgtgactctgcactctctctctgctcgattcaacggacacatcgcgtgatggccgtacatccgcgtgaatgtggtgagccatgggcggtgggggttggggatccaacagcgatcttcaccaccggtctcactgtcctcgtcaggtccagcccaggactcagagaaataggagaaatgaatttagaaaatgaatttccaatataa

SEQ ID NO: 16575 - DNA, 384 bp, Zea mays
  Peptide Sequence Number=SeqID_58354
atgtcgctacgggatcagatctgcatcaactctccgtcaagccggcaggtcttacggcctagccgaactgtcctacgcgacaggctccgattcctctacgcaaccaaattgtgtggtatgattttgtttgttagtagaatggatctacctgcccccgcaaggtcaactcaatgccacgctgcaggctacccatgggcgagcttcgtcccagccgacgcatgccacacgagcgagctctgccccggccgtcacttgcgcgcaaacgaggtccgtcgcaagccgcgcatgcaagctttcgccatggcgtcaggcggatgggcaaggctgccatccgcaggccgagtgaacggtctggcatgcggagagaggaagccagatctttga

SEQ ID NO: 16576 - DNA, 333 bp, Zea mays
  Peptide Sequence Number=SeqID_58355
atggtggtgccggccagggaggttcaaatactacctcaagtcatactaccaggcactgttttaaaggtgtcgcctaggagtccagaagatccaaggcgtccccgtcgcctaggtaagaatcagcaagaggacaaagggcagaggggaaggagaagggggtaccgaatcaaggcggcggccaaatcgggggcagcgacagtcggatcagaggaggtggcggcagctcaatcagcggcagcagcgaatcgtgggggagaaggccaccggtggctgaatcatggaggagagaggcaaccgagggcaaccgggcgaaggattatatgggctggctag

SEQ ID NO: 16577 - DNA, 432 bp, Zea mays
  Peptide Sequence Number=SeqID_58356
atggaggacgaggagcacgaggtgtacggacaggagatccctgttgacggcgaggacgtcgacatgtccgccggcgacgacgcgaccaaggagctcgatgagatgaagcgccggctcaaggagatggaggaggaagccgccgcgctccgcgagatgcaggctaaggtcgccaaggatatgcaagataacacgtggataatcactggccacctggttcttgtgccgcccttgagcaaagagtcaaagacgcctaccggcaccctggttatcagcaagagggaggaagccaacccatccatctccgagatggatggcaacggcggtgcggcaacatcttcctcgacgcagccagtggcggatctagcaaaagaaacaggcaagacattttactgcctatgcctctaccagtttctaggttcaagtattctctaa

SEQ ID NO: 16578 - DNA, 570 bp, Zea mays
  Peptide Sequence Number=SeqID_58357
atgggccagtctctgatgaagctcttcttcgacgactcctgccagaaagaagtgaaggttgtgatgcttgggctggacgccgccggcaaaacgacggcactgtaccggctgcacgtcggcgaagctctgtcgacggtgccgacaatcggtttcaacgtggagaaagttgagtacaagaacgtggccttcacggtgtgggacgtcggagggcaggacaagctgcggccgctgtggaggcagtacttgagcaactcggacgccctgatatacgttgttgattcggtggacagggaccggattggggttgccagggaggagttccaggccatcgtcaaggacccgctcatgctcagcagcgttgtcctggtgctcgccaacaagcaggatatgaaaggcgcgatgagcccctccgaagtggggcagcgcctgggcctgtacgacctcaagaacaggacgtcgcgtgccgtgggggcctgcgcgctcaccggcgagggcctgcacgaggggctcggttggctagcggcgaccctcaaggacgcgcgcgcatggggaacctccgtccgcttctag

SEQ ID NO: 16579 - DNA, 1269 bp, Zea mays
  Peptide Sequence Number=SeqID_58358
atgtccaaccccggctcgttgcccgcctccgctcaccacgagcacgagcacacccctctctgccgctcctgcggggcgcccaccacgtcgccgaccccggcaccctggtcagggaccaccgactccccgccgccggcgtaccgccccatccgtctcccagccatcaacgcgcccaccaacacagccgccatagtcctctccccggtcccacagccgctccccgtgcctcccgccgcgccgccccacgccttcctggtccctgccaagcggatcacctcaccggacgatatcgcccgcttccatgcctccgtccacggccttcacttcctcgggttcgtcgccgcgctgtccgcctccgtccacggccgcaagctctcggacccgctaccgtccccgccatcccccgccatagctgcgctgctcgatctcgtctcggctctcgccgctctcgtcgcttccacccctccgcttccacacagctctcggtacggcaaccctgctttccgcctgtggcacgagaagctcaccgactccgccagcgagctgatctcgcggatcacggccaccgcgtcttcccctgcggacctcgcaggcgccgatgtcgagctagcaccgtacctcctcgactccttcggcaacgccacccgcatcgactacgggacggggcacgaaaccaacttcgccgccttcctctactgcctcgcgaggctcggcctcatcaccgagcccgactacccggccgtcgttctgcgcgtcttcacagcttacctcgatctcatgcgcacgctgcaggacacgtaccagctggagcctgcaggctcccatggcgtgtggggacttgatgattaccatttcctgccgttcatatttgggtctgcacagctgattgaccacaagtacatgaagcccaagtcgattcacaacccagatatcttggaaaatttctccaaggagtacatgtatctggcgtgcgttgcatatgtgaagaaggtaaagaaggggccctttatggagcattcaccaatgttggatgatatcagtggagtggccaattggaagaaagttaacagtgggctgctaaagatgtacaaggctgaggtgcttgagaaagtaccgatcatgcagcatttcctctttggctcactaatcaaatggccctcaaacaatctgaggcgccttgctcgcctaggcgtccaggcggtggccaatgtcttgtctcaccataccgccttaagaaccatggttacaggttacaacaagagttgttag

SEQ ID NO: 16580 - DNA, 216 bp, Zea mays
  Peptide Sequence Number=SeqID_58359
atggcgaacatctgggcccttttctcatcattagcggagtgggggaatctttcatcagttggatcgcacttgcattcttcacaagttcgtcagggagggcacattgtggcggctacgagagacccattttcctgtgtggtggtgacaacgacaccgtggagccaagtcaatgtcggcaagctgatttttcagattggaacctatggttctttttaa

SEQ ID NO: 16581 - DNA, 846 bp, Zea mays
  Peptide Sequence Number=SeqID_58360
atgaggaaagttatgaagaaaatatttgtagggacttcaaaaatgattctgaaggacaggcggcacctttggcaggcgaagcaggcgacacttcgcttccgccataatgaccgagtcaaaaaagggactaggaaaggggatatcccgaaagggatccttctccgcgaaggaaacgggccccgagcccccctactgatcagaggttcgaaggctggcccctcggaagagttcaacagccaccttagagcactcgggctccgcgcccactactggtcagaggttcgaaggtcggcccctcgaaagggttcaacggccgcctcagaccactcgggctccgcgcccattactgatcaggggttcgtaggctggcccccgaagggttcgacagccgcctcagacgcagagcgagggatgaccctggcctcggctccggaagacgacgaactccacctcacccggcccaaggctcggactcggcctcggccccggaagacgacgaactccgcctcgcccgaccccagggctcggactcggcctcggcttcggaatacgacgaactccgcctcgcccgaccctagggctcggactcagccttggcctcagatgatggtctccaccccgcccaacccagggctcggactcgacctcgaccttggaagacagactcgacctcgactcggaggagcctccgcctcgcccgacccagggctcgaaccgaccacgtcacaggggggcatcattatcctacccctagctagctcaggctacggggaacaagaccggcgtcccatctggctcgccccgggaccccccggggtcgaaacgccgacactagtgcacgcctag

SEQ ID NO: 16582 - DNA, 168 bp, Zea mays
  Peptide Sequence Number=SeqID_58361
atgcagaccgagttggaggaaaagtcgcggttcgggcggtgcccgtactgccgcgccatgatctaccaggacctcagcgcgaccatcttctactgcagcaggtgccgcacgcccatccgaggcaagaacccgcaacccacggacgagaccgagtacgcgcttaattga

SEQ ID NO: 16583 - DNA, 1686 bp, Zea mays
  Peptide Sequence Number=SeqID_58362
atgggaaaggcagagatgaaacaatttgccaagagtgatatttttgttctcaagcaacattatgaaaagaaattagatgacttggaacaagaaaataaagctcttcagaaagaaatagagaatcttcaccatgcattaaccaatgtatgttcttctatggatgagaatgctcaaaaactgaaagaaaactatcttcagaagctgaatgcacttgaatcccaggtccatgagctcaagaaacaaaaaagtgatgaggcagcaaagcgtttacaagaagatattcagcatataaaatctcagaaggatcagcttcaacaaaaggccaagcaagagtctgaaaaatttatgtcttggaaggctgcccctgaaaaggaagtaatacagctcaagaaggaagggagacgaaatgaatatgacatgcacaagctcttggctttaaatcagaggcaaaaaatggtcttacagaggaaaactgaagaagcagcagctgctacaaaaagattcatggagttgctggaagcaaagaactcatcacttgagacatatggcagtggaaatgcttcggggatgcaggccttaatgcgagctgttgatgatgaactggaagtcactataagagcacatgaattacgctcgtattaccagcgacaaatgcaagagagagcagcaatatccaaggaaatagcaaagctggaggaggaaccaaagcacaagatgagtgattgtcctcaagctatgtctcctagtgctagaagttttaggatatcagcattagagaacatgtcctcatcatcaagcgctatggtgtctatggcttctcaactatcagaagcagaggagcgggagcgggtattcaatggtaaaggtagatggtatcatgtcaggtccctcccagaggcagagaacataatgaaccaccttttccagttagcatcatcttcaaggtgtaaagaaaaagaacacaccattatggaattgaaggaaaaggtggttgtgcttaatagtgaaatcaggcagttagaaacacaagcgacggatctaaggagcacaaataagaggacatatcctgtgcaatcactcattttggtgcaagcgtgcaatcaaactatccagagcatccaatctagatccaacggtttcatatggaaggggttaaaacttttcaatggattgaacaattcaaagaaatctgctaggtcgaatggcactggatttgctccacgtcagatatgtctgaccattcctcgtacatgcatagtgttcgaccttcccagcgttttggttatagcaaggacaacttcaattgggtggacgatatggacatttcagacaactcggtacagtcgaccaggaaaggcagaaacacaccagtcaagagcgtgtagccattcaaatcctaacctggatcgtcaaaatacacacagacgatgcaaagccagagaagccctcagacgaaaaagtgcagtttgcccgaaactattccatcggacggctgttcctgctcaaaagcctcatcatgcaagaccaagaagtgccagtgcagaggctcaggtgcacaatgcggtgcaggctgtggttgttaaaaagtggcgcaattcagcagttcaacccgtccttggatctttacttccctccgagccagagacaccgaagctgcccctcggaacagcgccgacattcccctaa

SEQ ID NO: 16584 - DNA, 1998 bp, Zea mays
  Peptide Sequence Number=SeqID_58363
atggcacacaagcaaatgctcgtcaatggatgtcctgttgtgctaagaggtgtcaacagacatgagcaccatccacgccttggaaagacaaatttagaagcatgcatgatcaaggacctgattttgatgaggcaaaacaatatcaatgctgttagaaatagccattacccacagcacccaaggtggtatgagttatgtgacatttttggtctttatgtcatagatgaagccaacattgagacacatggttttgatgaatctaacactttcaaacatcctacacttgaacctatttgggcaaatgcaatgcttgatcgtgttgttagcatggtggagagagataagaatcatgcatgcattattgtttggtctctaggaaatgaatcttcatatggacctaatcatgcttccatgtctggttggattcgtgaaagggatccaacaagactcctccattatgagggaggtggttccagaacatcatccacagatattgtgtgccccatgtatatgcgtgtctgggatgttgttaagatagcaaaagatccatctgaaacaaggcctctaattctttgcgaatattcacatgctatgggaaacagtaatgggaatattgatgcgtattggatggccatagacaacacttttggactccaaggaggttttatatgggactgggctgatcagggtttactgaaggaggactcagatgggtctaaattttgggcatatggcggcgactttggagatactccaaatgactccaatttttgcctcaatggcattgtgtggcctgatcggacgattcacccagctcttcatgaagtaaaataccttcaccagcctatcaaaatatcatcagcagataatatgcttaagattgaaaatggacacttttttgagacaacagaagctttggacttcagttgggttcttcatggagatggttgtgtcttgggctctggtccattgaatattccaactttggcaccacaaactagtcagctcatcaacatggaatcatcaccttggtttgccctttggagtgcctgtgcagcaaaagaagtgatagcattgtccagtagccctttggtctgtgaacgcattggtgataatgtaaccatctgcaagaataatgcctggaaaattaaagtaaacagtcagttgggaacaatcgacagctggaaggtcaacgacgttgagcttatgagcaaggggatactcccatgcttttggcgcgcaccaactgacaacgacaaaggaggtttcttcaccaagccatatgactcgcgatggagagaagccttcctcgacaatgtctcgttccacagcagccagttctctgtcaaggagttgccggacaacaccgtggagttctccaccctctactacggtgttcccgggcacctacccaagcctgacgacgaagcctccgagtccattctcttccgggtgaagatggtatgccggatccacgggtcaggcgacgtggttctcgactacgaggtaaaccccaggagcgacctccctccccttccccgggtgggcgtcgtgttcagcgccgggaggtccctgagccacgtcacgtggtacgggcgcgggcccttcgagtgctacccggaccgcaaggcggcggcgcacgtcggcgtgtacgagagcagcgtggaggagctgcacgtgccgtacattgcccccgtggagtgcggcgggcgggcggacgtcaggtgggtggcactccgcgacgccggcgggctcggcctgtacgcgtcggcgcacggcggctccccgccgatgcagatgagcgcgagctactacggcgccgcggagctggacagggcaacgcacgtccacaggctggtgaagggggacgacatcgaggtggggaagctttttgtttttgcttttgagctcctggctggcatcggccgagctgctgcgaagtggtcggggaggagtgatggctctcggcttcgtgtttgtttcgcaggtgcatcttga

SEQ ID NO: 16585 - DNA, 321 bp, Zea mays
  Peptide Sequence Number=SeqID_58364
atggctttgttcagccaaagtcagctctgtctgggtgcaccggactgtccggtggtgcaccggacagtgtccggtgaaggcaatcctaggttgaacaacattgtcaacctaatcgttgtgctcaacaccgagctggaccacactcttgacgagctgagtagggattgtgctgagagtgcagagttgtggactgagcgcacggagcgccgtcatcaggagtatggttctcccgcccctactgggactcagcacccgtactgctcaccgccatggggtcccacacttatggcacgcctaactgcaaaaccaaaatatatttag

SEQ ID NO: 16586 - DNA, 849 bp, Zea mays
  Peptide Sequence Number=SeqID_58365
atggcaggaggcacgctgcaggacagatcggaggccgaggacgtgcgcgtgggcgtggaccgtttcccggagcggcagcccatcggcacggcggcggacgacctgggccgcgactacagcgagcccccggcggcgccgctgttcgaggcgtcggagctctcctcgtggtccttctaccgcgccggcatcgccgagttcgtggccacgttcctcttcctctacgtgaccgtgctgacggtgatgggcggcatcgcgtgggcgttcggcggcatgatcttcgcgctcgtgtactgcaccgcgggcgtgtcgggcggccacatcaacccggccgtcacgttcggcctcctcctcgcccggaagctgtcgctgacgcgggcggtctactacgtggtgatgcagtgcctgggcgccgtctgcggcgccggcgtcgtgaaggcgttcggcagcgcgctgtacgagtccgcgggcggcggcgccaacgccgtcagccccgggtacaccaagggcgacggcctcggcgccgaggtcgtgggcacgttcgtgctcgtgtacaccgtcttctccgccaccgacgccaagcgcaccgccagggactcccacgtccccgcgctggccccgctgcccatcggcttcgccgtattcctggtgcacctcgccaccatccccatcaccggcaccggcatcaaccccgccaggagcctcggcgccgccatcatctacgacaacccgcacgggtggcacggccactggatcttatgggtgggcccgttcgcaggagcggcgcttgcggcggtgtaccaccaggtcgtcctcagggccatcccattcaagtccagcgctctctactag

SEQ ID NO: 16587 - DNA, 132 bp, Zea mays
  Peptide Sequence Number=SeqID_58366
atgcctcagtggggattacatgctccaccacctccacctccacctcagaatccaaacccgttacacgacttcgtcaacgagtttttcgcttctggaggtagtggacacaactctaacgaccccgatatgtga

SEQ ID NO: 16588 - DNA, 675 bp, Zea mays
  Peptide Sequence Number=SeqID_58367
atgtggcggactctatgcgttcgctacacatcggccgctggtgaatcccgtgccgacgcggaggtttccctctccattcgtatggcaaccatttcccctgcgccgtcggaccgctcgcggcaagcttcgtcgtcggctcgccggcgcggccgggcacgcacagctacctcaacgacctcgtcgcccgctcgggcgccatcggcgtgtccgtctactaccgcctcgcgcgcggagcacaagctgcccgctgcgtacgatgacgcgtgggcggggctgcggtgggcggtgacgctcggcaaggacccgtggctgctggagcacgccgacctgtcccgcgtgttcctgccgagctgcagcgccggcgccaacatcgcgcacgacacggtcgtgcgagcctccgccgccggcgtggccatccgcgggctcgcctcagtgcccccgtacttcactggtagggaggccgtgggcggcgagacggcgttcagccccgagatccggctgtccatggaccggacttggcgagacggcgttcgtggacgacgcggcgcgcaaggcctccgcgcgtgctgtgggcgagcgggtaacgggtatccactggatagcggatacccaacgggtacgggtatggatacagatctatacccacgaacgtctatgggtacagatataggttga

SEQ ID NO: 16589 - DNA, 243 bp, Zea mays
  Peptide Sequence Number=SeqID_58368
atggaaaaagctcgaaaggttggcgctgctgggtgtcagtgcgagcagttaagaggtggccagcaagatgacaagcggttgcacagacagagatggcggcgcaaggtagaggtgagcgtggccgaggggaaggaggcccccatggccagagaggcggcgacgcgggtggccggcatgaggaccggtgacggcggatctagaccggtggcggcgttctgggtcacggcggtggcgcggatctag

SEQ ID NO: 16590 - DNA, 627 bp, Zea mays
  Peptide Sequence Number=SeqID_58369
atggaggtcgccgccgtgcccagatccgccgcggcctgccgtgcggcgcccctgctcccggccgtccgagccgctgcgtgccacctggccctgccccggcgcgcgttctccgcatccgtcgcggcggcaccggcgccgcgccgcctcgccgctcgtcgcgctgcggatgggttccctcccttcccgagcgtcatggacatcaaccagatccgcgagatcctcccccacaggttcccattccttttggttgatagagtaattgaatacaaggctggagaatatgcagtggggatcaagaatgttacaataaatgataatttcttcccaggacattttcctgaacgccccataatgcccggtgtcctcatggtcgaggctatggcccaggttgggggtctggtgatgctgcaacctgaagttggtggatctcgagacaacttctttttcgccgggattgacaaagttaggttcaggaagccagtgattgctggcgatacactgatcatgaggatgacactgactaagtatcagaagaggtttggactcgccaagatggaaggaaaagcttatgttggtggtgacctagtttgtgaaggggagttcctcctagtcagcgcaaccgagtag

SEQ ID NO: 16591 - DNA, 216 bp, Zea mays
  Peptide Sequence Number=SeqID_58370
atggggaattgtgaacagaaagaggtctcagagatttacaaggatgaagcggtgaaaagacatgttgtatacttcaaagaccaccactgtacctgtagacggtggaaaaggaagactagaaaaattggggttaagccagggaagaagaaacctaaggaccaagagcagaagaaagagcctgaggaggaggaggaggagcaagatactgagcaatag

SEQ ID NO: 16592 - DNA, 615 bp, Zea mays
  Peptide Sequence Number=SeqID_58371
atgacgtgcggggccgagaatatgtgggtcttcatcggtgccgcaaaggacaaaatggacccacatgtcatcgtaaatatcacgacggctcgatactttgccaggtccggctggcgacgtggacctggatatagccggatagagacccacgggtacaccgtacgccagagtggtaaagggacacgcgcgtcatcggcatcacatactctaacgccaaactctatctccaacgcggcgttaggctcacgtgttggtaacataatgatggaccttatgggatggggatgccgaagtttctgcctccacggggatgtaaatgacaaaaaatctcctctgacaggtattggggacgggaaagcattcccatcccgtctctgcggggataaaactaaatggacaactgatcaagccaaggatggaagcaagaagagattcgaggtactgagtgcacgggagaaggtcaaagaggccgaggaacccaaagccaagggggtcatcccaaaagaagacaaactggactgtctggtgcctaggctggccctcggtgaacaggctgctctcgggaagcagttggggcgttgtggctataaattactggactatccggtgtgctag

SEQ ID NO: 16593 - DNA, 1917 bp, Zea mays
  Peptide Sequence Number=SeqID_58372
atgggatcggagggtgagatcaccggcccgctcctcgcgtcgggcgccggcgcgccggcgccggaggcggtgcccccgtggcgggagcaggtgacggctcgggggctggcggtcagcgccgtcctgggggtgctcttctgcctcattacgcacaagctcaacctcaccgtcgggatcatcccctcgctcaacgtcgccgcggggctgctcggctacttcctggtccgcacctggacggcggcgctcgagaggttcggcgtcgtctccaagcccttcaccaagcaggagaacaccgtcattcagacatgcgtcgtcgcctgctacggcctcgccttcagcggggggtttggaagctatatgcttgcaatggaccagagaacctatgaacttatcgggccagattatcctggcaacagggccgtggatgtcaagactccttcactgggctggatgattggattcatgtttgttgttagcttccttgggctgtttagtcttgttgcactacgcaaggttatggtaattgattacaagctgacttatcccagtgggacagccacggctatgttgataaatagtttccacacaactactggagctgagcttgcagacaagcaagtcaggtgtcttgggaagtacttgagcattagttttatatggaactgctttaaatggttcttcagcggtgttggagattcttgtggtttcgataatttcccttctttgggacttgcagcatttaagaataccccaacctatattggatgtggtcttatttgtccgcatattgttaattgttctacacttcttggtgccataatatcgtggggtattctttggccatatatctccacaaaagctggggactggtatccagctgaccttggaagcaatgacttcaaaggactctatggatacaaggtttttatatctgtatctgtgatacttggggatggtctttataacctcatcaagatcatttatgctactatcaaggaaataatgaatgcacgggctaagcaaggaagactgccactagcccaagttcaggatggcgatgaaggttcaaatttatcagctgaggaaaagcatctgaatgagacattcataaaggacagtatccctccctggttggcaggatctggttacattggccttgcagcaatatcgattgcaaccgtcccaatgatctttccgcagatcaagtggtaccttgtcctctcggcatacgttgttgctcccctcctcgctttctgcaactcatatggcactggactaacggactggaatcttgcgtctacatatggaaaagatcggcctcttcatttttgcatcatggccgatctcatgcaggacttcaagaccggttacctcacactctcttcccctaggtccatgttcgtgtcgcagttgatcgggaccgcccttggttgtgtcattgctccactcaccttttggctctactggtcggctttcgatattggtaaccctgacggcgcattcaaagctccatatgctgtaatcttccgtgagatgtcaattcttggcgtggaagggttttctgcactgcctcagcactgcctagcgatctgctcgtttttcttcattgcatctctagtgatcaacctcctcagggacgtcaccccaaagaatgtctccagattcatcccaatcccgatggctatggccattcccttctacatcggtgcgtacttcgccatcgacatgtttgttgggacagttatccttttcgtctgggagagggtgaaccgcaaggagtgtgatgacttcgcaggtgcggttgcctctggcttgatctgtggtgatgggatctggactgttccttctgcgatactgtcaatccttaggattgacccgccaatttgcatgtacttcaagccatcccttagcagctaa

SEQ ID NO: 16594 - DNA, 921 bp, Zea mays
  Peptide Sequence Number=SeqID_58373
atgcctggcataccgagggatgtcgccgagcactcgctggacatccgagctggagcccgacccgtgaagcagcctccgcgccgattcgacgaagaaaagcgcagagccataggcgaggagatccacaagctgatggctgcagggttcatcaaagaggaatgcgggtgcgacgtaccaaaggtgcatgaaccacgtggcgaacacattggtcgaacggtcgaggcttacgtcgatgacatcgtagtcaagacgaggaaagcctccgacctcctttccgaccttgaaacaacattccggtgtctcaaggcgaaaggcgtaaaactcaatcccgagaagtgcgtcttcggagtcccccgaggcatgctcttgggattcatcgtctccgagcggggcatcgaggccaacccggagaaaatcgcggccatcaccaacacggggcccatcaaagacttgaaaggcatacagagggtcatggaatgcctcgcggctctgagccgcttcatctcgcgcctcggcgaaagaggcctacctctgtaccgtctcttaagaaaggccgagtgcttcacttggacccctgaggccgaggaagccctcgggaacttgaaggcgctcctcacgaacgcgcccatcttggtgccccccgctgtcggagaagccctcttgatctacgtcgccgctaccactcaggtggtcagcgccgtgatcgtggttgagagacgagaagaagggcatgcattgctcgtccagaggccggtctacttcatcagtgaggtactgtctgagaccaagatccgctacctgcaaattcagaagctgctgtacgcggtgattctgacgcggcggaagttgcgacactacttcgagtctcatccggtgactgtggtgtcatccttccccctgggggagatcatccagtgttga

SEQ ID NO: 16595 - DNA, 213 bp, Zea mays
  Peptide Sequence Number=SeqID_58374
atggctagccgggagtggagctcgtcggggcgctggccgccggggctggcctcacgccggctgcaccgcacgcaagggagaagaggagggtggcgaggggaccgcgaccaggggcctacaacgcagcacgctgagggagagaacgtcgaagggagggaggggagacttgcgtgcgcgatgaccaataaccgtcgctgcgtgatttggatctga

SEQ ID NO: 16596 - DNA, 528 bp, Zea mays
  Peptide Sequence Number=SeqID_58375
atggacggatcggccgcggagctggaggcggcgaagcgggtggtgatgcagtgggactcgtccttggcgtgcggtggcgcggacgagccgatgttgttcgacggcggcggaaaccgtgccaaggccgaccggttcctccgtgccgtcgacgacctgcaccggctcgcgccgccatcgcccgcagccgtgggcagcctgcgccgcctctcgtcgtcttcgacggcgaggagcggtgccatgctgctcgaggacgagttccgccacgtgctgtcatcgcgcgccgtcgaccacgagatcgaggcgctcacgtaccttagcttgctctccatcaacgccgaccgctccaactcggcctcctccgccgacctccccgccgccgacgaggacgactctgtgttctcctccattggccaccgtagcaccgcctaccgctcgctccggagcatccgcgagatcgacctgctgcccaacgacgtcatcgcggacctccgcgccatcgcgtcctgcttggccgccgccggcacgacc

SEQ ID NO: 16597 - DNA, 312 bp, Zea mays
  Peptide Sequence Number=SeqID_58376
atggagaggggcatcgaccaggacctggacaccacacaggggttgtccgaggctggccaccgcactggctggccgccgggccaccgcacgcataggggcgagcttcccggagctcatgcgcagggggtgcgtgagagaggcgggctgggcagggagtgccatggctggccgggagtggagctcgtcggggcgctggcctcgcgccggctgcaccgcgctgcaggccacgagccgcgctggctgtcgcgcgtaagggagaagaggagggtagcgaggggaccgcggccaggggcctacgacgcagcacgctga

SEQ ID NO: 16598 - DNA, 513 bp, Zea mays
  Peptide Sequence Number=SeqID_58377
atgatgaatcccaatgaagataaagtggatgaggtcaacaacaagataccaacctcgacagtggtgaaaaggaaggatgactcacatagatatctgctgaatggaatgaagaacaacaagaggaccagaaaattgtttgggtacaagattaaaccgcctcaaccgcaagcagaagcgccaaagctcgtgaatacccaaacaggagaatcaaatcaagctcagctattcaacatgcaggcaactgatcaactatcatctgctggcaatcaagcaaagctgactcgtagagaggtcaaagtaagaggtgattgtttctactacaaggaagaagggcacttcatttgccaatgccccaagaagtgtctagaccagctcgcgaagaaggccttcaagcaaaactcaaccagtgataatgcagaagaaattgtcttcacccgctcaaagtacaaagtaattcaaacaactgatgaaggcggcaggttactgaacataagagttgagccgagagagtga

SEQ ID NO: 16599 - DNA, 1471 bp, Zea mays
  Peptide Sequence Number=SeqID_58378
ttccccatctccgccgcctcggtgcccggccacgctcgacacccccttcgctgaggccgtcaagggcgccgcgctgcagctcttaggattcgccgaggccatcaacatcggtcaccgctcccccaagtatctcttcaaagatcatagacctccacgatgtactctcggacctcctaccgacgtctccgacatcttcgccgcctctaaggtcgcggagtgcatatacgtgcaggccgctgagatccagacgcgcctcgccgatgccgtgagagggatattctcagagttcgagaacaccgtgctccgcgacccacccaagaccgcggtgcctggcggtaccgtccacccgctcactcggtatgtgatgaactatagcagcctcatttgcgactacaaggccacgctctccgagctgatcgtatcgcgtccatcagctagcgctcgtcttgctgccgagggcaatgagctcgcgtcgtccttagctgacctcgagctccccgagcttgagaaccagttaccacttgcctctcacattgtctggatcattgttattcttgaacacaacctggagggcaaggcagcactctacaaggatccagctctctcgcatctgttcatgatgaacaatgtgcactacatcgttcacaaggtgaaagattcgtcagatctctggggcatgatagctgatgattacctgaaacgacttactggcaagttcacaatggcggccacaaactaccagcacgcctcgtggttgaagatcctgaattgtttgcgtgatgaggggctccatgaggagatcacatgggtgaagaacctgtacatcagagtgaggctgacagcagccaattccggcctcaggcgccataggaaactccgcttcgcccgaccccagggctcggactcgggctcagccccggaagacaacgaactccgcttcgcccgaccccagggctcggactcgggctcagccccggaagacgacgaactccgcttcgcccgaccccagggctcggactcgggttcagccccggaagacgacgaactccgcttcgcccgaccccagggctcggactcgggctcagccccagaagacgacgaactccgcttcgcccgaccccagggctcggacttgggctcagccccggaagacgacgaactccgcttcgcccgaccccagggctcggactcgggctcagccccagaagacgatgaactccgcttcgcccgaccccagggctcggactcagccctggcctcagccgacggtctccgcctcgtccgacccaggggctcggactcgacctcggccttggaagatagactcgacctcgacctcggaggagcctccacctcgcccaacccagggctcggaccgaccacgtcacaggaggcgccatcattaccctaccccaagctgactcaggctacggggaacaagaccggtgtcccatctggcttgctccgctaa

SEQ ID NO: 16600 - DNA, 1101 bp, Zea mays
  Peptide Sequence Number=SeqID_58379
atgcattgcaggtgggcgatccgtggaaggatcacgactgctgggagaggccggaggacatggacacggaccgcacggtgtacaacgtcagcgcggggcgccccgggctcggacatcgcgggggagacggcggcggcactggcggccgcgtccatggtgttccgagatgacgacccggagtacgccgagacgctgctcacgagcgcaaggaaggcgttcgagttcgcggacacgtacaagggcgcgtacagcgacgacccggacctcagggcagggggctgccccttctactgcgacttcaatggctaccaggacgagctgctgtggggggcagcatggctgaggagagcctccaaggatgacacgttcctccagtacattcagaacaacggcaagaccctgggtgcagaggacagcagcaacgagttcgggtgggacaacaagcatgccggcctcaacgtcctcgtctccaaggagttcatagaaggcgccgcgctgcctttgcagtcgtacaaggagttcgcggacagcttcgtatgcacgctcatcccggagtcgtcttcttccccgcacatcacgtacacccccgggggcatgatctacaagcctggaggcagcaacatgcagcacgtcacctccatctctttcctgctcctgacctacgccaagtacctctccaagtcctctcataccgtcgactgcggagacgtttcagttggccctgaaactcttcagctgcaagccaaaagacaggtcgattacctgctaggagacaacccgatgaagatgtcgtacatgatcgggtacggcgaccggtacccgcagcggatccaccaccgggcctcgtcgttgccctcgatcagggaccatcctcagccgatggcgtgcaaggaaggcacgccgtacttcaactcatccggtgcgaatcctaacccgctggtcggcgcggtggtcggcgggccgggggaggacgacgcttacgaggatgaccgtgcggatttcagaaaatctgagcccaccacctacatcaacgctcccttggtaggggtccttgcgtacttcgttggcaacccgaatcctggtcataacaccagacattga

SEQ ID NO: 16601 - DNA, 384 bp, Zea mays
  Peptide Sequence Number=SeqID_58380
atgggctggccgctggtttactggaccggtgaaacatgtaactctgttgatgtgaggcccacgacgacgaagaagcccgataagcccacctctttgcgaaaacgggccaacaagccggaggtgtggggagcaggcagcagcacgcacacaccacacggcgagccgcaaagcacaatggcaacggaccatgcgacgccagcgtcgctcctctgcgcgcacaccgaccgccgcacggattcattccgccgtgacgtgacgcatgaatcgcggcttgcgccgcgcctctcccctcccctcgctcgtgccgtgcggcgtgcgcggttcgccgcaaccaaaccgaccaacgcccccgtgatccgtcggtggcgactgtgccgtctgtga

SEQ ID NO: 16602 - DNA, 420 bp, Zea mays
  Peptide Sequence Number=SeqID_58381
atggcgggctacggcgacgacggcgtggacctcacggagctgacgctgggaccacccggcgtcaatgcgcgcaaggcgagacgagcgaggaagaacggccagcagccgtcgtcgtccgccatgacgatgcaagcgttcgtgaaggtgagcatggacgggacgccgtacctgaggaaggtggacgtggcggcgtacgacgactacggcgagctcgtggaggcgctcaacgagttgttctgctgctgctccatcgggctgatggacggctacggcgagtgggagcacgccgtggtgtacgaggacggcgacggcgactggatgctcgtcggcgacgtgccgtgggagatgttcgtgtcctcgtgcaagcggatgcgggtgatgcgatcgtgcgaggcgagagggctgagctccaacgcctga

SEQ ID NO: 16603 - DNA, 324 bp, Zea mays
  Peptide Sequence Number=SeqID_58382
atgaggcaacttaatgatcttaagatggacaagaatcagaatttggcctatgcaccttatatcatggcattgattcgggtgaagactagatttgagggcaagtgtgagatgatgagcaggaagctcatgttcatgaggaagctcagtagatgcctccacctcctccacctcagcatggccaatactgtgagcttcgtgatcttatttgttggtcacttgttctcaaatgctgtatatcaagaacaagacaacataattgttagttattatggaccttcgtcttctgaagtattatctcctcatgggcataatgcttcatattag

SEQ ID NO: 16604 - DNA, 201 bp, Zea mays
  Peptide Sequence Number=SeqID_58383
atgtcgtcgtgggcagaggactgccaggtcggattcgtgcaattaaagggacaaattaggatcgccaggtgtgggattggtgttagccaagttagggcactgatcattgcgtattccgcccagtacaagttcaccggagggcttaggaggtttataggaaattctggaaaaatgataaaatcatgggaccaattttactag

SEQ ID NO: 16605 - DNA, 216 bp, Zea mays
  Peptide Sequence Number=SeqID_58384
atggtgagcatgctcaagagaatgaacaaattcgagatgatgagcaagctcaagatgacgacatacattaagggagatgatgttgaagaagaagatcaagaaaaggaggataatcaagaaatacaagcaacaaaggtgccacacccaagagtccatcaagcaatttatagggaccaccccgtcgacttgattcttgatgggttgaagatattgtag

SEQ ID NO: 16606 - DNA, 309 bp, Zea mays
  Peptide Sequence Number=SeqID_58385
atgcgactgaggaaggggttcgacgattcgacaacactggtgaggtcaacgatgagccaaccaaacaaaactccacgacgccaaccgacacacggactagagaacggcggctggcaagctagagcgctgcgatgggacgaggtggagaaggggcgcacacatgaccaagcgaagttcgcgggaaaccacggccgactcaaggaatccggtgagctgcagccatggaagaggggctcagggagcaggacgagcgccaagggaactaagacgaggtcacagttcgacggggacaacctcggattcggctag

SEQ ID NO: 16607 - DNA, 492 bp, Zea mays
  Peptide Sequence Number=SeqID_58386
atggccaggacgactctgaccaccactgatcgccacccgaccatcgacgagttcgccaggacccccccgatctctgtgaccacttcaccggagttagaccgccgcatactgccagatctcggacggacgcccgagatccaacagccgatagccggacatgggtgtggtggcgccgctcgaccccacggcgaagtctcgctggagacgaggtggacggccacggcggggctccaggggcttagggagagggttaggcatgttcagagcgacatggagaacttgaccgtgggtaccacgccggcgcaggggcaccagagaacgcgggacatggcgaggcgggctaacagcgatgcggatcaactccagcaaggaattgcgcaagcacaaggacagtcgatggcggcgggcttcggctacgcaagaagtgctccggtgagcgtggaccaggcaaaacagagagggaaagggcgaaccgagcggtgtcccaagtag

SEQ ID NO: 16608 - DNA, 726 bp, Zea mays
  Peptide Sequence Number=SeqID_58387
atgacaaattcgacgcttgccccctaccccggatcacacagcaaccacgccccagggggtgcagagcgcccacgcgacaaccgtcaaacgctcccaggtggccaccaacggcgtgtaggatggtggtccgcggtggcggtcgtggtcgtggcggtgagcttcgatgggatcctaggcgaactcatggaaatttataggagtttggctggcaagatttctgcccaaggtcgatgccagagttctcggtggcttcagttgcggcgcggcgaccaggaagtcggagacactgggcggatgacagatgagagcagcagtgctcatttttatagtccccaggatgccaagaccgattcctatgacgcacgaccaagaagagatcccaggagagctcgactgttatgggttagacaagcccgcgcgctggagaagtcccgccatggtggcccaccggtcatcggcttgcggcaagcacagcatgggcctacccgacagccagcaatcaaaaaggaaaagacaaggggcgcaaatgggctggccaaggctattttggcccagtcgcagaaggaggaagggcagggtcgagatgggctggactgcattcggcccaggagtttatgtttccacaccgcagatgtcgaagtaaaagtttttctccactggaggattctcagtctacggaacaacttcttcctctactacagattcttcctcgtgttctatacatga

SEQ ID NO: 16609 - DNA, 684 bp, Zea mays
  Peptide Sequence Number=SeqID_58388
atgaatacgtactcgttaacgattcgatatgatgggatctcacgcagccacaacccatctcacccacgaactggtcctgcgcgacgtgcaagggcgagagcagccgtgccgaggcttctcgagccacgctggtcgagcgagggcaccgcgagttatgccgtggccgctcttgggcgagccgtgagcacacaggccacgctgcgcacaaggggggctcggccactatgcacactcgaggagaaccgaccggggaggccgcggctgggtcgcgtgagggcgcgccgggccgccacacaggctggccacgctgggccaaaccgcgcaacaccggggccaagctgcacgcgccgggcaccatgggccgaaggcacttcgcgcggcatgccggggacaccgtgggctggccgcgccgcggacgccgcgagccagcgcgtcgggtctggtcggggcgggctgccgcgccgggccgccacgccggggttcccgcgctggagccgcatgcccgcgccgtgcccgcaccggggccgcgcccgcgacgaggcctcgcccacgccggggtcggttcgagcgagaggtgaggtggggagaggagaatggcgagctccttgcgatgtgggcacccgaggaaaaagagaagtaaatccaagaaaggagagggtaacacctgaatttggtggatattag

SEQ ID NO: 16610 - DNA, 498 bp, Zea mays
  Peptide Sequence Number=SeqID_58389
atggagctcgccgtgcccctgcccccaactccatcatcgcgtgaatccagcccccgcccccttctcctgcatccttgcattgacagcaccgagattgcagcagaccaggctgcagagatgcatgccccttctcctgcatccttgcatcgacgacgtcaagattgcagcagtccagactccagagatgcacgcccccttccaaccaccatgcctcctttcatcgacggagcgcctctgccccaaaacatcgccaccacggaactagccccctgggaggatctgcttggtcatagtaaaaaggaagatgacatgagcagagttgctgggttagataaccaaggaattgttggccttgagaggcaaattatgaaagatattggtttattgtgctgcaaagaggctgaagacgactatgaaagtggcctaactgtgaagcctgaacttcaactaacagattcaagagaggatgcagcatgtttgatgattgccgtgaattaa

SEQ ID NO: 16611 - DNA, 573 bp, Zea mays
  Peptide Sequence Number=SeqID_58390
atgaccatcagtaaagatcagatttgcaggcacattacccatcatcaatcctcgggtgatggcgcttcgggtgattgtccttcacaagctagcgagagtgatgctgttggaggtaatcccaatattcttaagcatgatggtgttagttccaagagaaagcaggttaggaagcgacgttctagagcaaagcctaagggtgatctcgttccttcatccttggaacgccaggattgcatggaggcccatgatgcagtagttgccccaatacaccatgtaccgccttgcatcttggggtggatccacccaatgatgagagcggaggatgatcttcaaaatgcgattatggtgacagtgacaattattagtgactgggctttgtatcaaagagatgcaaatggaaaagcaaggaaccttgtcaaatcgagagaaatcggatcgaagaagtttggctcaggcgactcaaacttgcacggtgtccaggctggcgcgcccgatgaacaggctgctctagggaaaaactcatcgctctgcggttataattcaccgaactgtccgggtcttagtgatccttga

SEQ ID NO: 16612 - DNA, 369 bp, Zea mays
  Peptide Sequence Number=SeqID_58391
atggcattggaggcggggagcagcggctgcggcgggaggggatggggcggcgggttccagagcctgatgcggcggaagcaggactcaggtgggagacttcaaaagcatgtactgctgaagcgtgacaatggagatgtcgagacatttaaccggtatttaaaacttagattgcagatacttaacgatgctacaatcgaccattcttgtaacttagaagagatgctacaatatgcaaacatggttctgaaaaggaagcctgaaaagattgaaaatgatattttgtttaatgttgtgaggagggatactcttcttgggtctactagcggaattgagtctcaaggatatcctggggagccagatagatgttaa

SEQ ID NO: 16613 - DNA, 384 bp, Zea mays
  Peptide Sequence Number=SeqID_58392
atgggcatgaatttggcttatgaacacacagagcggacggaccgcatccacggcggaactctagcactgcggtcccagctcggccgatttgagcaccgaacccttcaaattaaaggcacagggggcacgagcgagacacgggcagcacgatgctcacaagaattgccctcggaccaactgaaccttgagtgggtcattaccagggtagttcacgcggtgtcaagctcgtgttccgaccaaactaagaccgtaaagaccaaacggacccctgggcagggaaaagatcaaaggggctggattcttgaacttgcagcaaggatagctatgaacactagatgcagtcgtggctcccacaggaagatccacgccggtgttgcagggtga

SEQ ID NO: 16614 - DNA, 312 bp, Zea mays
  Peptide Sequence Number=SeqID_58393
atggcacaacccccaactaaagatgaggaacatgtacctcaagatgattgcatggatcaagggaggcgcatgaacaagaagacaaggaagaagaagaagaagtaccacatgcacctccagctccaattagcgccaccgtacaaagagaccatccagtggaccaaatccttgacggcatgctcagtccacgatacatgggttgtgcagttactcacacgttaccatatcgagggcaatgactcaccattactcccgcattaccaggaaaagggttactacctatcaatgctgcatggactgccgccatcatga

SEQ ID NO: 16615 - DNA, 1146 bp, Zea mays
  Peptide Sequence Number=SeqID_58394
atggagggggagaggaatgacatcaacgtgcagaggtcagacgagatcctcatgccgggtttccggttccatcccaccgacgaagagctggtgagtttctacctcaggaggaagatccagcagaagcctatctccatcgagcttatcaggcagctggacatctacaagtatgacccatgggatctcccaaagcttgcgagcaccggtgagaaagagtggtacttctactgcccaagggatcggaagtaccgcaacagcgtgaggccgaaccgagtcacagcggccgggttctggaaggccacagggacggacaggccaatctactcgtccgagggcaccaagtgcgtgggcctcaagaagtccctcgtgttctacagagggagagcggcgagagggatgaaaactgactggatgatgcacgagttcaggctcccctcgctcaccgaccccaagcgtccggtcgacaagaccattccactcaacgactcctggactatctgtaggatcttcaagaagaccagttccatggcgcagcgagcgctgtcgcatacctgggggcctccactgcctggtgcaacagcagaggcagacatgttcgccgcgctgcagtcagtgcaggcttcagagttagctctcgagagatcgctgtcactgcaagcagcgccgcctgcacccgccgcaggccagttcacgagcacgcatggcctgcatagtcagcaccaccaccagcagcagaagggtgtcaacaacccatctctggacggcgcctcttgcaggctcatcaacttcaccagcagcccctccgaggagcccgagaatttcccaatcaccttccctttcgaagtgcaggcaccgcacagggctgcagcgccagtcttcttcggcgcgcaccctgacaatcgcctcggtggattcgtggtcgattcttctgccgacgtcagtggctgcatcggcggcaggagccaggactcgtccaccgggaagcctagcagtggcttcagcgccaacagcagcgactgggaaactgcggggaggatcaacttcccttttgatctgggtgcggattcttcggaggagtggagatgcagcataccctgggagtccttcctcagcccagctgctgtccaggctgagctgccacgctag

SEQ ID NO: 16616 - DNA, 342 bp, Zea mays
  Peptide Sequence Number=SeqID_58395
atgtacctcaccacactggtcctcgatgatagagatgtcaacgtatctgtgcaagtactctcaaaaccggaagatagcgcccacgctggggctagagtacctccctgtcggtgggccccggcgattctcgtacgtgaagctgaagcagatgaccaaggacttctccgacgtggtgggggcgcggcatgtataggacaggcgtgctgcagagagaacgattcgtcttctgagcagcaactcgtggtgaagaacctatggcctgcaatccgaagacatggaaggagacaccacgcgctccaaatcgagatggggtttgccctcccaaagcaacaaggcaattaa

SEQ ID NO: 16617 - DNA, 522 bp, Zea mays
  Peptide Sequence Number=SeqID_58396
atggtgagcaacgacgaccacctatgcctgcgtacgccgacgagcaattcctgccatccgatgcatcacccagttctagatggtaagggattggacccgagtgatcctgcacatgcccccatcacaaattggcctctaatcaccggcgccagtaagctccacgtgcggcgccacccttctttctctattcccagctcaacgcagtcgctcactccctcggttctttctctgctcaggatcaaagtggacaccgagataggcatggcggaacgaccgaaacagccaccgcaaccaagctttatacccagaggcctccagcggattcgtgcgcagcacaaccgaattttgttcacggcatgcgcgatctgcgggggagatagagttgaccagtatgacccacgtggcggtgttagcactacagcgcacggatgccagatgagcgaccgaccatgcggccccacctgccagtacccgacgctcgcgcctgcgatttgggccgagcgcgtgctaggcggcacgtag

SEQ ID NO: 16618 - DNA, 408 bp, Zea mays
  Peptide Sequence Number=SeqID_58397
atgacgtattttctccggccgggggttgggcccgcccatgcctgcccgacgtccccggtggatcggctcaagcgctcctgctcccacgtcgatcctggcctgcaccccgcggatttgctcgagctgtgggtcatgcccaccctccgcgcgcagccgcgacgccggcgcccaccctccgcgcgcagccgcgacgccccgggcgcccgctccctccgcgcgcagcgcgccgccgccccgctcgctccagctgcatcccacgcgccacccgctccctcccgcagcgccgctcgctccctcctgcagcgccgcctgctcaccgctccctcccgcgcgccggccgccgctccagcgccgctcaccccgcccgctccctccagtgctgcccgctctgcccgctctctcccctga

SEQ ID NO: 16619 - DNA, 831 bp, Zea mays
  Peptide Sequence Number=SeqID_58398
atggccagttcgccagagctggcctggcgcaccggacactatccggtgcaccaccggacactgtcggtgcaccaccagacagtccggcagcacgcaattggaagacagatcatcggagtcgacgagcacgtcgtggacacaacatggattgacgacgaggagcaagattcctgggacttgacgagctgggctgagcaaagagccaaccccacgttgcatcgacgacagcgcgactcaagcgagactctgtgtctgtacaggtcgacagcatggacgagcagacacgacacaaaggggcgcggcgactgttcttcagtggtgagaagactggagttggatgctggtagtccggacagaagagcgcggctgcgcatggggagcacggttgggcgctcacacgagggagataggcgcgagcaggaagaaaacaccaggagagaaagagcggcgcagggaaggggcctccgctgggcgtcgagcacaggggcgccagagagcgagcttgagggcgagcaccatgggaatcatgggagctcggcgctgcaaaattcgagcagaggccagggcggttgggcaagacgaagcaccaacggcgcagacaaatctgagggagagagaagcaaggagggagccgagggaggtcgactgtttacagcgagcagaggaagggcgcgacacattgaagaagaggagcggtcggcgctgctgccaggtgccggaagcgagattcgcagccaaagtcttggggagattcagcgtccaacaagcaagcaggagcaggaaccaacaagctacggtggtttgggggaagaagcctgcgcgcggagataa

SEQ ID NO: 16620 - DNA, 165 bp, Zea mays
  Peptide Sequence Number=SeqID_58399
atggcgccaaaatatcctaggcacactctagcaaagtttgacatgattttgcttgactttggtctcgggttccagctgggcgacagacccaacttcacctcctcgtatctcgccaacccgagatcaaatccgctcgagcactgcatgggaaacaaagggtattaa

SEQ ID NO: 16621 - DNA, 738 bp, Zea mays
  Peptide Sequence Number=SeqID_58400
atgacgcaaagagaaacgaccgcaactccacggcagcttcacggacgcggcgcggacgcagggcgttgcgactgttcttcggtgacgagaatactagaattggatgctaatggtccggacagaagagcatggctgcgcgcggggagcacggttgggcgctcacacgagggagataggcacgagcaggaagaaaacgctgggagagaaagagcggcgcagggaaggggcctcggctgggcgtcgagcacaggggcgccagagagcgagcttgagggcgaacaccatgggaagcaggggagctcggcgctgcaaaattcgagcagaggccagggcggctgggcaagacgaagcaccagcggcgcagacaaatccgagggagagagagagaagcagggagggagccgagggaggtcgaggagcaggaatggagcaccaggtgttgagaacgacggtggagagctcgggtgtttacagcgagcagaggaagggcgtgacacactgaagaagaggagcggtcggcgctgctgccaggagccggaagcgagatccgtagccaaagccttggggagattcagcgtccaacaagcaagcaggagctggaaccaacaagctacggtggtttggggaagaagcctgcgcgcggaaataaggcagtggggaggaaaatatcgaagagaagagcggccgggagtaggcctgggcaaaaagaaccggaaccgaggaaccgaaccgaaataa

SEQ ID NO: 16622 - DNA, 636 bp, Zea mays
  Peptide Sequence Number=SeqID_58401
atggtagtcgccaagcaacctcagccggaagacctgttagcagccattgccatgagccaacgatataccgtgctgtttgaagtgagacttcagaatggccttgaatgcacatgtgcctacattaagtacatacgccctcacgatgctggatgggatgtcaaggagtttgataatgagactccatacactattatgtttggtctagataagtgtggatcaacgaacaaggttcatttcatccttaagcacaagaatcctaagactggaaagtatgttgagcatcatctcaaattcccaccatttgtcccatatgataagctctctcatgtctacacggctatcttgaagccagacaatgaggtcagaattttggtagatggggaagaaaagaagaaggcgaacttcctttctgctgatgattttgagccaccacttatcccatccaagaccattcctgaccctgatgacaagaagctggaggactgggatgagagagctaaaattcctgatccagatgcagtaaagcctgatgactgggatgagagagctaaaattccagaacaccattttgtcacgatccagacaaacactaatcttagttactttatgaaatacaaattttggcttagccaatga

SEQ ID NO: 16623 - DNA, 933 bp, Zea mays
  Peptide Sequence Number=SeqID_58402
atggcgctgaacctatcgctggtgagcccgtacctggacaagggagccgacttcgccagcggcgccaacttcgcggtggccggggccacggcgctggaccgggccgtgttgctgcagagcggcatcatggctccaccggcgagcgtgccgctcagctcccagctcgactggttcaaggcgcacctcaacgccaccgcctgcccctcgctacaaggtgctgcggtgttgctcatcgatatggagctattagcagattgcgccaagaagctcgccggagcgctgttcttggtcggcgagatcggagggaacgactacaactacggcttcttacagggattcaggtcgatcgaggccatgaaggcctacgtgccacaggtcataaacgccataatggacgtcgccaaggaagtgatcgagctaggcgcgacccagatcgtgatcccggggaacttcccgatcgggtgctccccgagctacctctccctcttcgccgcgtccggcgacctcgacgaccggggctgcctcaggagctacaacgccttcgcccagcaccacaacgagcagctccaggcggccatcgacgggctgaggaaggccaacaccgacgtcaccgtcgtgtacgcggactactacggcgccttcatgcacctgctggaccatgcttcgctcctcgaactcaagcacagcttagttccagggttcgagcagggcgcgctcctgcaggcgtgctgcggggcgggcggcgcgtacaacttcaacatgaactcgatgtgcggcgcgccgggcacgacgacgtgcgcggacccggcgcgcaacgtcagctgggacggcatccacctcacgcagcaggcgtacagggccatcgcgctgtcccttctcatggaggggttcgcgcagccggatgacgccgtgcaagagatctggagctgctga

SEQ ID NO: 16624 - DNA, 1323 bp, Zea mays
  Peptide Sequence Number=SeqID_58403
atgggcattgtggtgaggaagtcctcgccggtggtcgtcaggccgtcggagcctgtggagaccacaagcaccatgccactctcgtctttcgacgaggggctagagagggtgccagccacgctgctgctcatgttcgagcatccgattcacgaccccgccgacaccgtaaagagggcgctgtcccgagcactggtgtactaccaccctttcgccggtcgcatcgctgccggagccggagccgatgccgacggcggcaagctccacatccggtgcaacggcgagggcgccacgttcgtgtctgcgcacgcaagctgcggggtggcggaagtcatagggctggaccgatcggcagcagcgaggacgttgctggacgacctcgccgtctactacccagacaactgctgccgcgctggtgaccccttgctgctggtgcaggtgacggagttctcgtgcggcggtttcgtcctcggggcaaccgtgaaccacgctgtcgccgacgccgctggcctggcccagttcttgaacgccatcggcgagctcgcccgcggcatggcgtcgccgtccgtcgctccggtccggtgggatggctcgctcccgagccgccctccgcccgttgtttcgactagggagctggtaacagaccttggtctactggatgactacgcctgctttgacatcaccgtcccgtcgagatccatcaatcgcatcaaggcgcagtacgctaggcgcttcgatggcgcccggccgtgtacctcgttcgaggtcgccagtgccgtgctatggaggtgccgcacccgtgcagtcatgtctgaccccgagaccccggctctgttcatgtttgggggcaatgtccgcaagtacgtgggtgccatggaaggctactatggcaactgtgcgaccagtcaactggtctttgcaaccagtggtgttgtggcgaatggagacatcgtggacctggtgaagatgatcaagcagtccaaggagaagatacctgaccagttcgagaagaaccaaggcaccaacaactacccaccaaaacccatgcatcaccagcttcttagatacaacatgttggttgtgtcttctctgcgaaacctgggcttcgaggaggttgatttcggcagcggtacggcagcgaggttggccaactacgcgcaagaaaaggtgccgtttccagcttgcttgatgagtcctcacaaagggaaagatggcgtcaacatgttaacgaccatggtcaagaaggagcacgttgacagcttcattgcagaattagccaggttcacggaatattatgagtattactctacccattctaaattgtaa

SEQ ID NO: 16625 - DNA, 258 bp, Zea mays
  Peptide Sequence Number=SeqID_58404
atggtccacaggaatgaattttgcatctccccacaggctgctggtcagtttgctccttgcacaatgtgccctgttgcggaccatcacatgattttcccactgagtggtaggctgatcaataccatgatgaccaaggtgaaccataccggcaaagtgtaccacatgagggccaagcgacaaatggctcaaagcctcggccagatcgcaaagttcaaacgtcgatacgagcaggaagcagtggaaagcaaggacaagtag

SEQ ID NO: 16626 - DNA, 451 bp, Zea mays
  Peptide Sequence Number=SeqID_58405
atggcccgctttgccgaccccgccgtcgtctatcaccatcgcgagccgaccatacccgccgctcccaacgttctgacggcccgctccgagccgtcagtgtaccacccggtcgtcatccaccgcgaccccaggcacgtccacccgatggtgacatggtgcgccgctggcgttcttcgcctcgtcgaccggctgatcctggtagttgatacgatctacactccaccgggacgcatccctggtgccaaaggttcaaacttagccaataaaaagaccaagaaatgggttcaacaaagagagcaagggataactgaaggctgccctgaggcgcttcgctataattcaccggactgtcttgtgcaccaccagacagtgtccggtgctctaggggagagcgactctgaactcgccagcttcggatttccgctccgctataattcaccggacatgtccg

SEQ ID NO: 16627 - DNA, 525 bp, Zea mays
  Peptide Sequence Number=SeqID_58406
atggatgagagggagagcaggaagaagcagcagctgtcgtcatggatgagcagctgcggcttcactgcttggccaccgcgatcctacccctgcagcttctgcaggagggagttcaggtcggcgcaggcgctcggaggacacatgaatgtccacaggagggacagggcaaggctcacgcatggctcacctcctcctcctccaccaccaccaccaccgtccagggcaccgccggcgatgattcccaacctcaactacccgccacccagcagcagcagtagcaccaataagaagctccttgacgctccgtcgtccatagagatggagctagagttggagctgggggttggagtggcgtgcagcagcgactgcaacacagctggtgcagccacttgttgtactactacaagtacaaccccggcagcggcaggtggtggcccggaggatgaccgtgccctcgaccttgagctcaggctgggtagtgtctcttctccatccttccatcacacacgcgcatacgacccatga

SEQ ID NO: 16628 - DNA, 477 bp, Zea mays
  Peptide Sequence Number=SeqID_58407
atgggaacaaatgggcatctcgacctcgacatgggagggccgtacgacttcaaacttgccaccttcgggtttcagaagagccgctccgctataattcaccggactgtccagtgtgccactggactgtccgagtcagagcagccaccagaaggcgcaccagacagtgaacagtacctgtccgagttttggcggtgcaccgtggaagcatatttgggactcgaccgcgactgtggggatcttgtgctaccggaattcctcactagagcggggaagcaccgccgtctgcctcacgccatggatgggaaccctcgtgacattcgcactggtaagactacccccgtcgagttctccgtttcccgtactacgtgtacctcccttcaggttggtctgggacgccggatcgtggctggggaaaaatcaccggcacgactaagattagagaggaaaggaagtttgggggcttccattgatttctag

SEQ ID NO: 16629 - DNA, 900 bp, Zea mays
  Peptide Sequence Number=SeqID_58408
atggtgacccgggcaggcgaaggctgcttgaaggggaaagatgtagttgtggcaacgagaaagagaaaagttgaggtcatgactttgcccgacctccggcaatcatcttcacgaatgttgaaggtgatcgaggtggtgcctatggcggtagccaggagggtgccctctccttcgcgggctgacgaggtggtaggggtgaagggggccgagactggagaggccgacgaggagttgtctgtggatgactacatgattgaagatgttggcatgttcgacactaagatgggactgcgcctggcgaaaagggatgggtctgggaaaatggtggctgctgtcttcgccgaacaagtggcgtcctgggtgctggtgaacgttgcaacctcgcagttgcgattcaagaggaagcgtcttgaggacaagatagagcgccttcggatgctgcatactgaggccgtcagggataagtcgcgaccgagaacaagagctcaagccgcccagaagcgatctactgagctggagctggaagtgaagaatatgcgcgcctaccacgagagggtggatgccatcatgagggttggcgtggataggttgcatactctttttgttgatgcctatcaagatctgggcacagagatggcccccttcgacaagtcgggaggggaggtcgaagatgatgtactaaagcgctcggttggggcgctatatgatcggatgtggggtccccacggtcgtggagtcatctgggagagggctagtcgggcgctggcgcaggcaatgagggtcgaggtgatcgaggaccttgctggcctagagagttcgatggctacacaagatgctggcatggaggcgggtataaaagagcaatcgtcgccacgcgagggttggtggtaccgaccctag

SEQ ID NO: 16630 - DNA, 231 bp, Zea mays
  Peptide Sequence Number=SeqID_58409
atggtggccctggcgaagtttgtgtgggtagtgacttcatacgacagggagcttttggtggaggtcttcgccaaaaattactgtctccattggcagaaaaaggtgattggtggcaaggttgcacaatttggtacttgcaccttcacgccgaggactggaaagacttcgggtgaagtagtggagacaactgttcggtgccgcaagaggacagaagactttgagagcacctag

SEQ ID NO: 16631 - DNA, 537 bp, Zea mays
  Peptide Sequence Number=SeqID_58410
atggcggggctcatgcagcgccccgctggctattatggcccatttggtgggcagtgggctggagagactggacaggaagccaggaaggcgtccagattgccaggggacaaatctggatatggtggtgtctggtgtgggatcgccgagaagttcctgaaacatgttaaacaactgatgatgagtaaggaggagttcccaggcaaccaccatacaccatccactagccgttggttccagtcaacaactgagctgagcgagtcaagcgagtgggctccagccaatgacgagatcaaggtcattgtggttttaaaagatatcgccatccactgtggcgaggatatcacagaacgtggctcgcgatgtttcggtcggaaggtcgatagtgaagacgacgaggagtatacgagatatgccggaagtgaagcaccatttacgcgtggagaaggacaatggctctttacggagttacctatccaaggtgcttggccctcgctaagggtgggcgttcaggttacccaaaaatttctggtcgagtaa

SEQ ID NO: 16632 - DNA, 1398 bp, Zea mays
  Peptide Sequence Number=SeqID_58411
atgaaggaggttgaaagcatccaactggaaataccgatgcctgggcatcctgtttcttccagcaaaatggcaagtgtgcttgatgactgcaagcatctgcaaaccttagtggctgccaatgatgcaatcttcttgttaactgacacatgggagagcaggtggcttccaactcttctctgttcaagtgaaaacaagccaatttcttatgaaacactacctggacttacctcagttgcatctggcaaagcagtggagctctttgctaggatgttacatcatcctgacgagatacgggccccaggcgatactgctggtacagaaacagaacatcaacttggtctattgccacatcagctacgaggatcactccccaagtgtgatttatttgtggagctcaacaattcctcagtcaactgtactgcatgttctgttgctgctatcaactatccagcatatctgaaagattttacaggcatttctgattcgaaaagaccagatacttgtcctaaaataccgcccaacatctctgtaaattcagacaagatttctgatgtccgatgtctactattgggtgctggaactcttggatgtgatgtcgctcgcattcttatggactgtggtgtacggaagataacagtagttgatagtggtcatgtagttgtgtcaaatttagcgagacaatcactctatacttctgatgaccgtggtgctccaaaagcaactgcaatacttaggcatctagtggagagatgtccttcagtggatgcacaaggcattaaaatggaaatacctatgcctgggcatcctgtgtctcctggtgaagcagcggcattagggtatgatagttaccttgtcatgcgacatggggctggccctggcataagctgtgaagcttccagtgtggtcactgccatagacaagatgtccacggaggatgcccttgggcgtcaaaggctggggtgttatttctgcaatgacgtcattgctcctgtcgacctcgtctacttccacggccgcggggtctgcctcggcacaatccacgcgtgctgcctgtgcgtcgccaccgagctccccgcggtcgtgctctctgccgactaccgtcttgcccccaagcaccgcctaccagaagccatcgacgacaaatcggcgccgccggactgtgcccgcgtgttcgtgtccggcgccaacgtggcgcaccacgtcgcgatgcggtgcggctccgaccgctaccagccagccctcgcgcccacgcttcatgtcgccgggcgcgtcctgctgacgccgttcttcggtggagctgagcgcacgacgaccgagtccgagccaccggccggcgtgctcccgaccagttctggcgtccgtcgctgccggtgggcgcgtgctacgacccggcggtga

SEQ ID NO: 16633 - DNA, 258 bp, Zea mays
  Peptide Sequence Number=SeqID_58412
atggccgtgatgggttcaacatcggaaaagatgtacctctaccaagtaccaaactttgggattgtaaatgataaaggaacctttaactggtcacatgcctcgtcatgggtaagctttgtctcgggcagaccaataccagaaaggccaacacgcaatgggagtggagagatggcgagagtagcatgtaccctccgtggcaagatgttggacggtagtgtatctgtgctctcggttggcgtgaaccctgtctggtcttga

SEQ ID NO: 16634 - DNA, 578 bp, Zea mays
  Peptide Sequence Number=SeqID_58413
atgaaggaggaatccgctgccgccgggagggagaaatccgccgccgatctgcgagcagttggtccgcgcctcgtgcctctaggaatctgcgagcagctaccccatgcctccaggaatccacgagcagctggcccgtgcctcgagttagggtttagggttcggtcgaacatcctcctcgcctccagttggtcccacgctctcctgcgccgcacatcctcggcggtggcctgcttcttcgacggcgcgatcgccctcccccgcgtgcgccgcaccctcctctgccccgtcgcgagccgaggcggcggcttgaccgcgccgcgtctggccccggccccgcgccccctgcgtcctccctggccccggcgagctcggcggcccgcgccatgccctcccctcctcgtcccgccgccccggcgagctcggccgcccgcggccctcccctccccgcgcgctcgcgcccccggcgagcactccccgcgccgcggctcgtccctccccggcctcggcgagccctgcccccggcgagcgccctgccccccctgcgagcctctccccggcgtcccgcaccccctccccag

SEQ ID NO: 16635 - DNA, 699 bp, Zea mays
  Peptide Sequence Number=SeqID_58414
atggaggagacggcttggggcatgccgagcctgctcttgcttgcgtggaggctggaggcgaaggaaggctgcacgttggagaaccgtcacttcgccgctccactgaccggcctgacagaaggagagcgccgcctgcgccgctccgactgctgtgccgctcgacagagtgaggctgacaggcagtcagacccgacctcaggcaccataggaaactccgctccgcccgacccagggctcggacttgggctcagccccggaagacggcgaactccgcttcgcccgacccagggctcggactcgggcccagccccggaagacgacgaactccgcaccgcccgacccagggctcggacttgggctcagccccggaagacgacgaactccgctccgcccgacccagggctcggacttgggctcagccccagaagacggcgaactccgcttcgcccgacccagggctcggactcgggctcagccccggaagacgacgaactccgcttcgcccgacccagggctcggacttgggctcagccccagaagacgatgaactccgcttcgcccgaccccagggctcggactcagccctggcctcagccgacggtctccgcctcgcccgacccaggggctcggactcaaccacggccacggaagacagactcgacctcgacctcggaggagcctccacatcgcccaacctag

SEQ ID NO: 16636 - DNA, 258 bp, Zea mays
  Peptide Sequence Number=SeqID_58415
atggctgggccttttcaccgatggcgactaggaaggaacttggccacacagctaggtagggagcagggcgcgcgcgcagcaccagagctggagcaggcgagcttgaaggagacgagcgcgctggaggagggagtcgcggtccgaacgccggcgagctcgaagtcggctatggacgagctcgggcagaggggccaggggcacgacgcaaaaaggagcgcgcggcagggagagggcagagggagcaggggtgctcgctag

SEQ ID NO: 16637 - DNA, 249 bp, Zea mays
  Peptide Sequence Number=SeqID_58416
atggctgggccttttcaccgatggcgactaggaaggaacttggccacacagctaggtagggagcagggcgcgcgcgcagcaccagagctggagcaggcgagcttgaaggagacgagcgcgctggaggagggagtcgcggggaagaagaagctccgctgctggagaccagaggcggccgagcgcctgggagggagaagtggaaggagcagagacaggggtgagctcagagaggagttcggctggggataa

SEQ ID NO: 16638 - DNA, 252 bp, Zea mays
  Peptide Sequence Number=SeqID_58417
atggcgagagtagcatgtaccctccgtggcaagaggctggacggtggtgtatctgtgctctcggttggcgtgaacccggtctggttacgagtcactttgattgtgattggtgttaaccgtcggtgggcaccttcttataagtctaatttgtattttctgttgggagtttatagacctactgatacaataattgacatattatcaaaatatgttgtaggaagaggagctggaagcaaggatcagattgcttga

SEQ ID NO: 16639 - DNA, 426 bp, Zea mays
  Peptide Sequence Number=SeqID_58418
atgaaccttagccaccgagttgcgaggatcggtgatttcctcgccggtgttcccggggatgggtggagccgctgcgtactgtcacggtggctcagcggggtgcgcaatacgccgagccgccggctaagcgagaggcaagaagaggaacaggagcgcgctctcggtgccctccgggtcgtcgtgtttcgcggctccttccctccatcttggattaaggatttcgttaaagttcaggggatgaggctcaaattcagtaccaagctccatgctaatctcgttgggatcttctctgagatgtcacagtgtatggacaagggtcaagttcagccaaagtcagcaatggtagctgatgtcgtgtcccttggtgattcatggcttagatatgctatctctaagggattgcttgagcctgtcaggaatgcttaa

SEQ ID NO: 16640 - DNA, 1343 bp, Zea mays
  Peptide Sequence Number=SeqID_58419
atgcggaagacgagcaaagtcgaccccaagcgcgggctactccgcatggaccgtgtcgatgtgggcctgatgatcgaggaccttttaactggtcacatgcctcatcatgggcgcgcctccgctcatccttcttgcttcttgcaccatccttctcgcctgctgtcgccattcttcctgcttgatctccttttcccttcccatggagcaaagttgcaattggggagacctgaagccggccatctcttcttcgtggttgtagaattagcgcaggtggatagcacagggaggcatggctctgtcagaggaggaaacgtcctcgcccgctccatcaccaccatggaagcgacgaaggcggcggagagctcggagttgttattaaacaaaagcagttgtctcgataccaaaaccgcgtatctcaccccgcctccttttcttcgcgtcccccgcctcgatccgatcggggacgggtcgaggggcaggggaatgtcgtcgtcgtctgcgtcatcttcggcggcggcgcaccaccagcagcattaccggcggcagacaggagggagcggtctcgtgccgctcgccgcgctcatcaaggaggaggcccgcacggagcgccaatccatagccggcggcgaaagcaggatctccgcgcgcgacgatgacgcggcaggagtaggaagctccggcgtaggaggggaggcggcggaggcggcggtggagtcgcggctggagcgcccgctgctgcgctatgggtgcgccgctcagtgcaaaaagggcgaggacttctttttgctcagaacggactgtcttcgtcccgccatctccgtctcctcctcggcctccccgcaccccatcttcgccgtattcgctggtggggctgtttctttgcttactgtggatcacagactagaagaaaatgttgaggagagggagcgcgttacagcaagtggaggtgaagttggaagactcagtgttgttggtggagcagagttgtcaaatgctggaggaagacttattattgcttcagatggcatttgggatgcattatcctcagaagccgctgctaagtcttgcagaggtttgcctgctgagcttgccgcaaagcaagttgttaaggaggcactcaggacaagagggctaaaggatgatacaacttgcattgttgttgacataatcccacctggtcaaacaatacggcctctgtctcctcctaaaaagacgagcaagctgaagtcttttatttttagaaagaaagcgaaggacccttctcagaagttgactaaacagcattcagctgttggtatcgttgaagagatatttgaagaaggttcagcgatgctatcagaaag

SEQ ID NO: 16641 - DNA, 438 bp, Zea mays
  Peptide Sequence Number=SeqID_58420
atgtcctcatcaactgagagggtggtgttcgtcgttgctgagggcgccaagcagcggataacagtcaagcggcaagctgaagactgggagagggagcagggcgcgcgcgcagcaccagagctggagcaggcaatcttgagggagatgagcgcgctagaggagggagccacggtccaaacgctggcgagctcgaagccggctatggacgagctcgggcagaggggccaggggcgcgacgcagaaaggagcgcgcgacagggagagggaagagggagcaggggcgcttgccagggagatccgcgcgagagagatgggcgcggcatgcaggggaagaagaagctccgctgctggagaccagaggcggccgagcgcctaggagggagaagtggaaggagcagaggccgaggtgagcgcggagaggagttcggctggggataa

SEQ ID NO: 16642 - DNA, 258 bp, Zea mays
  Peptide Sequence Number=SeqID_58421
atggctgggccttttcaccgatggcgactaggaaggaacttggccacacagctaggtagggagcagggcgcgcgcgcagcaccagagctggagcaggcgagcttgaaggagacgagcgcgctggaggagggagtcgcggtccgaacaccggcgagctcgaagtcggctatggacgagctcgggcagaggggccaggggcacgacgcaaaaaggagcgcgcggcagggagagggcagagggagcaggggtgctcgctag

SEQ ID NO: 16643 - DNA, 429 bp, Zea mays
  Peptide Sequence Number=SeqID_58422
atgggcaagagcaagaaaggtggtggctcttcgcatcactcgggcgacaagcgcaagcgcgagccgactcctccctcggaggacttcggtgactcggagtactcggaggaggagttctccgagtctgagggctctccagctcctgcctctcccccgacgtcgtctgatgattcagacgactcccaggggatcgccgtggaggtatggacttacatccgggccgtcgagcgcgccgggctcgagggctcggatgagtcggagtactcctcggacgaggagaattcctccgactcggacgaggagggtggtggcggcggcggcggcgatggcgacgacgacggtgacggcggcggcgacagcgacaagggcggtgacggcagcggcggcagcaagggcagcagcaagggcagcaacaaggctagtggctag

SEQ ID NO: 16644 - DNA, 1305 bp, Zea mays
  Peptide Sequence Number=SeqID_58423
atgcctccgtccgccgccgccaccgccgccgccttcctcttcccggccgtcgcgatcccctgccgcgtgttccctcaacggcgggcgaggagcctcgccgtccgtgccgtcgcctcccctccagccttcgcggtcaagcccgccccgctgccctccaagtggaagataccctacattagacttaagaatgttagaatgatataccttgacaaaaagactggaaagtgggagtggaaattcgagaacaagccggtaaacatatactatgaggaacatgagcaggaggttgctgagaatatgaagaacattctcatgatccctacgatctctgatgtgagcactgtggaggagtggagggtggttgccaaagatattgttgggcggaaaggagaacttggctaccgtgttacaattgtcgattggcctggtcttggttattcagataggccatcactgaactacaatgctgatgtgatggagagctttctggttgaactaatgaattcaccaaacagtccagtcgcaaatgcagatgatgaactgatcattgttggaggtggtcatgcagcaaccatagctgttcgtgcagctgaaaatgcctacaaagatcctcttgactctttaaattgtgactgtggtaactgttatgaccggaccggtggtccgaccacgaataactggaaccaggaccctgaccagttcggtccacttaaaagaccagtaaaaagtgggtacaaagagctgctaagaaaccggtggagaggtggagttcacatgcgtggaccagaactgttcacgtgtagggagggaaatagagaaaaaagggctggtatgaggtatgggcttctacgaggaaccctcagggctccagccctgggctggatgatgtacaatgttctggtgagcaatgaaaagtcgatccagtctcagtacaagtcccacgtctacgccaaccctgacaacgtgacgccagctatcatcgagagccgatacgagttaaccaaaagaaaaggcgcacggttcgtccccgcggccttcctgacaggcctccttgatcctgtccaatcgagggaggagtttctgcagttgttcgccaagttagacggagacgtaccagttctggtagtgtcaacggtcaatgctcccaagagatccaaggccgagatggaggctctaaggggctctaaaggggtgacgaagtttgtggaggtcgcaggcgctcttctaccgcaggaagaataccccttggcagtcgcggaggaactctacagcttcctgcaggaatcattcgcagcaagaaggtga

SEQ ID NO: 16645 - DNA, 594 bp, Zea mays
  Peptide Sequence Number=SeqID_58424
atgacggctgctacgaggcacgacgtagaggttgcacgggcacgagacggttgcacggcgcagcgcacgatgaggtactacgcacggcagcacagacggcacgacgagactatgcagtggggcacatacgcaggagcaggactaagcagcatgacaccgagaaaaacggaaatgaagaacagagaagggaaggaactcaccggagacgacgggctcgccggagaagggctcgccggcgtcgacgtctgcggcgtggcgaggctccggtgcagtgcggctttggccaggcgacgatgcgcatgccgcgggtgccgagacagcaagggagctgcacaagagatgagacgtgcaggggagcggatcagagaaattgttgcctcctttctcgcttcgtggaagcacgcacgagtgcatcgtgggagggcggttcctaagaccagatttcttggggcctgcagctaccgcgtgggcccagggggagggcgtggttatggtctgcgtacgcggatggtggtctttccttacaaaggggaaactactctaagggcatcaaaaggaaaggggaataagaagacatgtaggataggggcatga

SEQ ID NO: 16646 - DNA, 3279 bp, Zea mays
  Peptide Sequence Number=SeqID_58425
atggacgccggaggccgtgcgggcgtgagcggccccgccgcggcgaacggctcgttcggactcgtccgcaccgtggtggggtactccacctcgcccctcttcttctggctcctcaccgtcgcgctcgtcgccgccatccacatcgtctccggctcgtcctccaagcctgccaggaacaatgagacggaggagaggaagaaggcgcgccgcgataggttcctcccggccgccgaggaacgggaggcgtcgggcaggggagatgaccgggttctggagatgatgcgcagtttcagcttcatgcaggcgaccgaggaggatttcatggagggcatgaccgcatacgagcacaacggcgttggcgacggcacagcgcacgggcctgtcgcgccggagccgcctgcgctgacggcgactagcctcagcttcaggtttcagcaccagatgcccgaagttccaacggagacggcgctggtttcgagagaattcactgcggcaagacaagagacggcggtagtttcgagagaactgacagcagcgagagacgatgatggacgacaacgagaggaagagaaggaaccacactttcctttggaaccattcgctccgttgcagacggcggcagacatgcaagaacaccggcacgacgaagcagaggaaacagagttcctggcggaggagccggcagaagagcggagcggagaggttgcgcaggaggaggcagcgccacccaagaccgtcgcggccacgcacaactatcagttcctgactgagcgcgacttccgggggttcgtcagggagccggaggccgtgacggtgcgcgtccaggaatctttcgtgccgtcgccgcctccggcgcaccagcccgaggagcgacgggtggtcgacgtctcctcccgcagcggccggttcctcacggcgagggacttccggccggcgaacgagcccgacgtgtgcgagagcgtggcgtcgtccgggaagtggacgccgccgcctccgaggccgaggccgaagccgaagccgaagcctgcgagctccccgtccgctgcttccatgggcggcggcggcggcttcacgtcggagttctccggtttcggcgactcggactccgagtccagcgccagcgacggctactcggtgaaggatctcgtcgtcgactccgacagcgattggttcctctcagagaaggagttcccggcgtctgcacttggctccggcaacctcaaaacttacaaggccaaggtgctcagggcgatcgaagccatggaggcggcgtccaacctggagccgtcttaccaggaggactcagcgacgacagtgtcgccgagctcggtccggcagcgctcaccggacaccgttcccgatgagaaggggatcatcactctaaatgatcattcaggaggtcaagctgcttctgatgctcaaagaagtccagaggcagtctctgccagacaattagctgccgtaccatcagatcaagttgctggcccagtcaagagaagtccggagccaccggagcaggaatttgttggtatggttgatcattcactcgagcacagttcttacgaccggaaacaaactgccagcgaaagcgatcagtcatatgaaatagtatttgatgacaaaagaaggccgcagcgtgcagagacaggatttcttggtacgagcagcccctcacatgaactcgtttctgaagtttgggaagagatcgtcaccagaaacgatcaaccgcccctagggccccatgctgatgagcaaggcctggatacagcagaggaagagtatgtgggcacaggtgatcagccacatggtgcagtttctgatgagaagagcggtgcagagactccggagcaagaattcagccttaccgaccaccgaaacgtagcagttcctgacgccaggaacatctcggagaccagagaagatgaggaacaagccagtgcagatgatcattcggacaatgcagtcaccgggaaggcaaaggtatatgacgaagacggggaggaccgggaagcgaggtggaaggatctgacagacgaggaggaggacgagctggagtcgctgtgggagcaccaggatctggtagagcagctgaagctcgagctgaaaaaggttcggtcgtcggtcgggctgcccacgatcctcgaggagtcggacacaccaaaggctccggtggaggacctcaagccatggagtatggatgctaagttccttcgcgaggaccccatggacgagctgaacaagttctacaagagctacagggagaggatgaggaagttggacattttgtgctaccagaagatgtacgcaatagatttcctacagctcagagggtcccagcagtccaacaacaacaacaacaactctgtaaagtccttgtcgcctacggtggcgtccatcctgtcgcataacttccggtcatcgcgccggagatctcccgaggacccgtcggaacggttcctcagggagctccgctacgacctggagacggtgtacgtcgggcagatgtgcctgtcgtgggagttcctccggtggcagtacgagcaggcgcgcgacctcccggagtccgactcctaccacagccaccagtacaaccaggtggccggcgagttccagcagttccaggtcgtggtgcagaggttcgtggaggacgagtcgttcaaaggccctaggctgtcgaactacatcaacaaccggtgcgtcctccgcaacctgctgcaggtgcccgtgatcaaagacgcgctgaccgtagcaatgcatgcacttccgggctgttgtgtagaggacagcctgaaggacaggatggaggaccagcgcaaggggaactacgtgataaccagcgaggagctggaggacgtcatggaagaggcgatgcacgtcctgtgggagttcatcaaggccgacagggccgagacgacgacgacggcggcggcggcatcggtgctcaagggcctgtcgagcagcaacgtcgagctccaggaccctctggatcatggcctcatggcgcacatccattccgcgttacagaagaaagagaagaggctcaaggacctgctcaggacgggcaactgcatcgcgaagaagtttaagaagcccaaggaggacaggtccaaccagaacctcttcttctcgcaggtggacatgaagctggtggcgcgggtgctgaggatgcccaggatcaccagcgagcagctgcagtggtgcagggccaagctcgacaagatcgtactggtagataggaagatccacagggaggcttcatttttgttgtttccctgctga

SEQ ID NO: 16647 - DNA, 369 bp, Zea mays
  Peptide Sequence Number=SeqID_58426
atgaggtactgcgcacggcagcacagacggcacgacgagactacgcagcggggcacatacgcaggagcaggactaagcagcatgacactgagaaaaacggaaatgaagaacagagaagggaaggaactcaccggagacgacgggctcgctggagaagggctcgccggcgtcgacgtttgcggcgtggcgaggctccggtgcagtgcggctttggccaggcgacgatgtgcatgccgcgggtgccgagacagcaagggcgctgcacaagagatgagacgtgcaggggagcggatcagagaaactgatgcctcctttctcgcttcgtggaagcacgagtgcatcgcgggagggcggttcctgagaggctga

SEQ ID NO: 16648 - DNA, 267 bp, Zea mays
  Peptide Sequence Number=SeqID_58427
atggggaggagcgagaaccagggtaccagtggcagcgcctcctacgatggaactgaacatgacttcgcccccacaagcgaccggaacgacgtgaggtttcgtcatggcggcgacggcggccgaaaagccatgagaatccgatcgggagaagcgcgcaccgaagggactgtcctcaggttcgatgcggtagctgctgacacctggttgaagcaccgaaatcatggtctgttcacaagaccaaaggaaagtagtgacatcgatgtttga

SEQ ID NO: 16649 - DNA, 336 bp, Zea mays
  Peptide Sequence Number=SeqID_58428
atgtcgcaagctagaggtggaggtcatcacacacatcctcgtgccggatccatgccaccagagaggcacctcggcctttcaagcttcctaccagaaccttctcctccaccatcttctgtcaaagacagcaccaatagatctactgtagggacacaggggtcttcatctttagcagcaaagggtgttgctgatggcagtggcagtgcaccagtaccaacacaacaactgcagcctgatggtaatgacataacaacaccgaaccaaggagcagcacctggtggtattacaactcttgatgatgatgatgacgacgatgacgatgatgatgatagatag

SEQ ID NO: 16650 - DNA, 1812 bp, Zea mays
  Peptide Sequence Number=SeqID_58429
atgccacgccgggacggcggttcctggaacgccatcatctcggcctcgtcccgcgccgggcaccctgcagaggcgttctccctcttcgctgacatgaactctcttggcattcgccccaaggatgtcacgctggcatcagtgcttgcctgctgtgctgagtgccttgacctgcgtggtgcacagcagctacatggtcttatcgcaaagagggactttcagtccaatgtgattctaggcacggcactggtcgacgtgtacgggaagtgcctctcgcttacggatgtaaggcgagcatttgatgacatcctgcaacccaatgacgtttcatggaacataatcatccggagatatcgtcttgctggtatgggcgacatggcacttcatatgtttttcatgatggtacgggctggcgttaggccgctggtatatactgtcgcacatgcaatgcttgcttgccgggataactgtgcacttaaagaagggaagtgcatacatagttttgtgctccgccgaggatatgaccaccacatacatgcgcggagctctgttgtagacatgtatgctaagtgtggcgacattgatgcagcacaaaggctcttcaacttggcaccaaagaaggatgtggtgatgtccacttcagttgtgtcagggttggctgcttgtgggaggatcgctgatgcaaaaatggtgtttgatggcatggaacaacacaatttggtatcctggaatgctatgttgaccggttatgtcaagtccatggatctgactggtgctttagatttgttccagcagatgaggcacgagacaaaggagcttgatgtagttacacttgcttctgtactcaatgcttgtacaggcctgcttgaccttgggaaaggtgaggagctccatgcactcgctctcaagtgtggtttgttcagttgccccttttttaggaacgcacttgtgaggttgtattccaaatgtggatgcctgaggactgcaaaacgtcttcttctatttgaaatgggatcagagagagatagatacgcctggaactcaatcatctcaggttacgaacgccactccatgagtgaagacgctctgcatgccctacgtgagatgcaatccgaggcaaaacctagccagtcaacgttcagctctgcccttgcagcctgtgcgaacatatttctacttaagcatgggaagcagattcatgcatacatgatcagaaacaggtatgatattgacgatatactgcgaagtgcactggttgatatgtattccaagtgtaggctgtttgattattccacccggatctttgagttaggatcatctgatgatgtcatcctgtggaattctatgatctttgcatgcgcttaccatagtaaaggtgactatgggcttggattgttggatgaaatgcggaagcagggggttagaccagactctgtcacttttcttggtgctctggtttcatgtatctgtgagggccatgtcgggttgggaaggagttatttcactctgatgattgatgagtatagcatcgttccacgaatcgaacactatgaatgcatgatcgagctgttgggaaagcatggatacatggttgagctagaggatttcgtggaccacatgccctttgagccaacaaccgcgatgtggctcaggatctttgactgctgcagggaatatgggaacagaaaattagggcagagggctgcacagcgtatcaatgatagcaaacccctgactcccgttatatttgttgagtccgctccggtctacgaatgcagtgactgtgacgatgcagagcccatgtcattctgctga

SEQ ID NO: 16651 - DNA, 723 bp, Zea mays
  Peptide Sequence Number=SeqID_58430
atggtgcctcctgttgacgtggtcggtccgtgccctaggttgagcgaggtggaggctcctccgaggtcgaggtcgagtctgtcttccaaggccgaggtcgagtccgagcccctgggtcgggcgaggcggagaccgtcggctgatgccagggctgagtccgagccctggggtcgggcgaagcggagttcgtcgtccttcggggctgagcccgagtccgagccctggggtcgggcgaagcggagttcatcgtcttccggggctgagcccgagtccgagccctggggtcgggcgaagcggagttcgtcgtcttctggggctgagcccgagtccgagccctggggtcgggcgaagcagagttcattgtcttctggggctgagcccgagtccgagccctggggtcgggcgaagcggagttcgtcgtccttcggggctgagcccgagtccgagccctggggtcaagcgaagcggagttcgtcgtcttccggggctgagcccgagtccgagccctggggtcgggcgaagcagagttcgttgtcttccggggctgagcccaacagtcggagcggcgcaggcggcgctgtcctcttgtcagactggtcagtggagcggcgaagtgactacggtcacttcggctctatcaactggaggcctcgcgtcaggataaagcttcgtgctgatgggggttaccagctgagatttaggagccttgaggggtacccctaa

SEQ ID NO: 16652 - DNA, 1179 bp, Zea mays
  Peptide Sequence Number=SeqID_58431
atggggagcacggggcgcgagccggaggtgacccgcgccgacttccccgacggcttcgtcttcggcgtcgctacctccgcgtaccagcttagtttggagggtgtggagttgattcagctcggtttggatggactaaggtttataatcgacaaattttcaccttacaatttttcacactattcagctcggtttggacggactaaggtttaccgggcaaacactggacgacaggtgaacggggatgcacagttaggagaacatgtcttagacagaagcaatggagaaattgcagttgatcactaccatcgatacaaggaagacattgagctcatggcaagtctaggttttagcgcatacagattttctatatcttgggcgcgtatatttcctgatggcttggggggaaatgtcaatgatcaaggagtcgccttctataatgacctcatcaattttatgatttcgaaaggtattgagccttacgcaactctatatcattgggatcttccaaacaatcttcagaagactctggggggctggatttctgacaagattgtggagtactttgcattgtatgcagaagcttgctttgcaaattttggagacagggtaaagcattggataacgatcaatgaacctctccaaactgcaatcaatggttatgggattggaatttttgcacctggaggatgccaaggtgaaactgctagatgttacttggctgcccatcaccaaatcttggctcatgctgctgctgttgatgtttatagaagaaaattcaaggttgcacaaggtggtgaagtagggttggttgttgattgtgaatgggcagagccattttctgaaaatgtggaagaccaaattgctgcacagcggaggcttgactttcaacttggatggtacctagatccaatatattttggtgattacccagaaagcatgcgtcagcgactgggcagtgatcttccaaccttttcagagaaagataaagagttcatgaggaacaaaattgattttgttggagtaaatcattatacttcaagactcattgctcatctccaaaatccaaatgatgtttatttctaccaagtgcaacaaatggagcgaataggtatgataccagaggtgttcaagagcgtttcctcaggggtggggtcagagaagaggagggccatttggtga

SEQ ID NO: 16653 - DNA, 594 bp, Zea mays
  Peptide Sequence Number=SeqID_58432
atgcccccctgtgacgtggtcggcccgagccgtaggtcgggcgaggcggaggctcctccgaggtcgagtccgtcttccgaggtcgaggctgagtccgagccctggggtcgggcgaggcggagtccgtcatccagcgtcgaggttgagcccgagccctggggtcgggcgaggcggagaccgtcttccgaggccgaggctgtgtccgagccctggggtcgggcgaggcggagtccgtcgtccagcgtcgaggttgagcccgagccctgggggtcgggcgaggcggagaccgtctttccgaggccgaggctgtgtctgagccctagggtcgggcgaggcagagtccgtcgtccagcgtcgaggttgagcccaagccctggggtcgggcgaggcggagcttcctatggcgccccgaggctggacttagctgctgtcagcctcactctgtcgagtggcacagcagtcggagcgacgcaggcgacgttgttttcttgtcagctttgtgctgatgggggttaccagctgagattaggagtcttgggggtacccctaattatggtccccgacagtagccccaagcctcgaagggagtgttga

SEQ ID NO: 16654 - DNA, 103 bp, Zea mays
  Peptide Sequence Number=SeqID_58433
cagcaacgacggagccagagcctgggcatgtgctcgggctccaccattggccaccgctacacgtcgcctccacacatgttgagtctggacgccacatcaatag

SEQ ID NO: 16655 - DNA, 1710 bp, Zea mays
  Peptide Sequence Number=SeqID_58434
atgatgtggcgttcgcgagctcgtgcgctgctcctactccgctcgaccattacccggccaccgccaccacctccacaaccatatcccactcgaaccctaacccgagtcccacctccccgcttcctgtcctcctccccggatcccatccccgattcctcctccgccgccgccgcggatcccttccctgaagccttctcctccccgaccaaggcttctcaagatgccgctgaggccggagaggacaacctgagctcgatgtgggaggaagctggccacgccgacgacatctttgcctcccctggcagcgccgacgccgtagccgacgatgaggaggtcgcccgcgtctgcgccgccgtggagtccacccccgaggacgagatcgcgtccaccctcgctgacatgaccgtggacttcaacgagccactcctagccgcagtcctccttgctgctgaacaatgctcctgtaagaagctgatttccctgttcaactatgccgcgaagaataaccccgcttccaagagcctctcgaatcttgagggttctcgatcagtgagtacaccgttgttgaatgaaatgattgccatattttggaaggttgagaagtcgaaagcagcgttggaggtgttctccaagttcgatgagtttggttgcactccggacagtgacagctattatcttgtgattgaagcagcacgaaagaagtccttgttccgctctgcttgtgaagtctgtgagaagatgattggctctgcctgcttccctaatggtgagaaggttggcaggattttgatttacctttgtgaggggaagaaggtgaagatggcacactcattatatcttgcagtgaaggaaaaaaagattccagtcccaaaactagccttggatttccttgttggtgctttggcaaggaatgatgagaccattggtactgctctggagctgctggaagagtaccaaggggagtcgcttaagcatgcaggcaagtcctttgccacagttgtacatgctttgtgtaggctaaacaaaatggaggatgcaaataatttgttgatgaggatggtgcagcttgaagagtacaaaggggaatctcttaagaatgcaggcaagacatttgccacagttatacatggtttgtgtaggaaaaagaaattggaggatgcaaaagcattgttgatgaggatggtaaatgttgggccagctcctggtaatgcagtgtttaattttgtcatcacagcattgtcaaaacagggagaaatggaggatgcaaaaggtttgatgagaatgatggagagccaagggatcagccctgatatctatacttacagtgtgctcatgagtggctacgcgaaaggaggcatgattgatgaagcccatgatctacttcgtgaagctaagaaaattcatccgaagctaaacagggttgcttatcacatacttatccgtggatactgcaagatggaggacttcgagaaggccaatgagtgcctaaaggagatgaagaaagatgggttgcagccaaatgtggatgagtatgacaaactgattcagtcattgtgtctcaaggctatggactggagaagagctgagaaactcctggaggaaatggaggatagtggtttatgcctaaggggtataagtcgcagcctcataactgcagttaaggagttggaaggggaggaaatgcagtcaaaggcgagccaagaagcatag

SEQ ID NO: 16656 - DNA, 751 bp, Zea mays
  Peptide Sequence Number=SeqID_58435
atggtgaccatggtcagcgctcataagtccctctccctactaatgggcacgatgtgtggccataacggcgagtgggacctaactaaccggatccactccaccccggaatatggcgccaccgctaaccacgacgtccccttctactgcattagtggccactcccacttcgtccaagacatcgtcctccacttcgatggggaaagtcctctggcaactgggcccatcggtcagctggaagagatggacaacgtcaaacctggaagaacctgcccctactcaaacccagtggctccgagcccgaggagccttgacttccccttcaacagtgaaggtgaagcgattagggccccggaagcccgacccccgccaaagagtttcaacgcgaccgcgagggccagcgtcttcgcatcctacatggagctctctgcatcatatgacgcggaaacgtcttcatactacggtggctctagtagcggctttggcgctttcttgcctcaactgtgccatgccccagctgtaattgctgccattgtggcccatggccacctccccacctccgacgtcctggagtttgtagggatggctgacggtggtggggacatcatctttgacgcactctgcatggactcaaactcgaatctgagtccctctgggaacgacaatgaagaactcaccggtgacgaggaggacgaaggcctctcggttgccgcggccctgtcaacgaccccgacagggtggggctccacgcatg

SEQ ID NO: 16657 - DNA, 441 bp, Zea mays
  Peptide Sequence Number=SeqID_58436
atggcatcctgcggccaacggtggaacggaccgttccgcgagcaattgcggtgctccccgtggagattcgtcactggagcagtcaccattagagtcacagggaaccaagcgaaccccacagctctcacctttcgaagcagcgcgcggcaacccgcgagtgccaccgacggcggcgcaatccacccggttctacggtcttatgtgccatcggttgctggcatgaactacccaaaaatagagctctctatgaaatcggtctggtgtgctgctggtgtctatgcggattggttcgacacgccaatccttaaaaacccagatagagacgagttgcgagaagcgagatgcgtggttgagagggagacaagtcaaagagatgaggctcttaaatccttttccatctcacaggatctatctcagggacaatcaaaaagggcatcctag

SEQ ID NO: 16658 - DNA, 645 bp, Zea mays
  Peptide Sequence Number=SeqID_58437
atgacaaagttttatacaaaattagaagaaaagcgcaaggctttggaagaggagaaactccaagcagaggccagaaagtggtgtttcaagattccgcggactcaggattgtgtcatcatatatgggagttggaggaccactgttggggaatggagagatccgcggacgcagacacagcgggggaagggagagagcctgctgggcgtgggggcggagcacgggatctgcggcggctcaggagtgtccgagatccccgcctggcgtgatctgcgagatccccgcccggtggaatccgaggctggccgctgggagtggggtcggctgctggacgcgatccgcggctgcgcgctgggagttgggcgcgatccgcggcggcgtgctggtcgtgggcgcggctgcgcgctgggagttggacgagatcgacgcttctcgtgctggtcgtgggcgcggctgcaagctgggagtggggttgacacccatgagttgctactgacagcgagcgggattttggccgctggtggctgccgagctgccgctgagggagcagctctgcgccgagtgctcggtcgacaggacaagagaaagaagagaaaacatatcttgagaggatatttgtcgctgctaatggcatgttctgtgagatga

SEQ ID NO: 16659 - DNA, 921 bp, Zea mays
  Peptide Sequence Number=SeqID_58438
atggagaactacaactacggccaaccttcacaagcccctggagactatgtgccatgcacatacacagaaggcatagatttaacagaaatcgatgacgaaggcaacatgaactttgcctttactaagagcatgaacatggaagacagccagcactcaactccaactgcaactgaccctaagctcaagaaagtaacaacttggaggcttggaaactacactcaggccgaggatgagatactggtatctgcctacgtgaacgtgtccaaagatcctgcaattggaacgaatcagtcaggaaaggcttattggcgtcgcatcagcgactactacaatgaacacaagaagacagctaatgctaggacacagcactccttggagcacaggtggagcgacattcaaagggacactacgaagttttgtgctgcgtacgacaaagtgataaggttgaagcaaagtggcaaaagcgaagacgaccaggtaaaagatgcactacagatgtttgaaggcatgcacaagaaacagtttaggtttatgcattgttggtacatgcttcgccgagaggcgaagcagggggaagacaaatttggttcaccgtctaatacctttgtgcgaccaatgggtagggaccgtgcaaagaaggctcgtagtaccagcactttgagcaattcaactgcctgcatggcgctgctggagaagttccaagaggatagagcaaagttcgaagaaaaggctacaaagtatgaagatcaggccacagcatctacagaagaggatcgaagggatatgaagatgtacagggacagaaagatccagctttctgagaacatgttcaaactccaccaactagagcgagatgatcgcataatgaatatggacttggacaaggttgctccttatgcaagagacgacgaatctcagatc

SEQ ID NO: 16660 - DNA, 411 bp, Zea mays
  Peptide Sequence Number=SeqID_58439
atggtaaaggcgtgtagttatggcattagttccatctcttcttgctcggccaacaagttcttgtccactgggatgtggctcaagtttctctgtgctggtttcctcatggtccatggtttggcgatggtaaggtcgcaggggcttggtattttatgcgtcgggacacttgatgggaatttgaaggatccccccacccacatcacatttcggttgaggattcatctcaatctaagaagaagcagttggcattggtggcccacacgccaacgacacatgcatggtgagcgcatgaccctttgtgaggtcgaccggcagacccacacatcaatgtcggcatgcgtgaaggatccctacctgggcgtggtcttggggctagtgcaggtggccgaaccgtcggcgttcgctaggtag

SEQ ID NO: 16661 - DNA, 282 bp, Zea mays
  Peptide Sequence Number=SeqID_58440
atggcaacgagcactacgtggcagattagtgttgacttgatcagcggacaccattgttctgcagccgtcactgcctgttctgtgtacacacacatcacggcgaccctcctcggcgcgacgctgctgctgctcgcctcccccgccgtcgtcgtgcgcgcgcagcaacgagggggcaacccgtgcccgacgagcgcggtggcggacctcaaggtgtgcgcggacgtgctggtcctgctcaagctcaggatcaacgtgccgcagggcaaagagaggagaccctga

SEQ ID NO: 16662 - DNA, 375 bp, Zea mays
  Peptide Sequence Number=SeqID_58441
atggagagcttaaggaacagatctacattgactagcctagtggttttatatcaaatgttgataaatgtgtccattaccagtttgacaggggcgaagatttatgccacaagtagacttgtgtgcttccttggaggtgtgattgtttcatggaagtcttcgacatcttcagtatgtgaaaacccaattcttcaaccctataggatccaacaggcaatcacagcaagcatcttacctttatcacccttgttcctccaacaaccgccagccctgttacaacaattacctttggtgcatttgttggaacaaagcatcaaggcacaacaactacaacaacctgtgctgacaaaccttgttgcctactctcagcaacaatag

SEQ ID NO: 16663 - DNA, 144 bp, Zea mays
  Peptide Sequence Number=SeqID_58442
atgtcgtgcgcgttcgacgactactatatcaagtccaatgggtgcaacatggacatgggtgatatcaaagtagtaatcgagatgatcatcacctcaacaaagacattagaagactcattgagggaagggcagcgtactgaatag

SEQ ID NO: 16664 - DNA, 303 bp, Zea mays
  Peptide Sequence Number=SeqID_58443
atggccgcgccggctgcgatggccacctccatcttagcactcctcttgacacccgcgacccacactattgttcccagtgacctgccccgtcgccgcgcacttcgctgtgtcgccctgccccttcttgaggttgttcagacacgcaccaacacccacgaatccaccgtgatccactgggcgtgcggccgcaccgccgccaccagcagcaactctctcccccacagcgtgcaagacacagaggcgatgggaagtagttcggtgatggggtcaagggagaggatacacggagatgacgggaaatag

SEQ ID NO: 16665 - DNA, 219 bp, Zea mays
  Peptide Sequence Number=SeqID_58444
atgctggttcgcactctcacgccgagcgctgctgacggggcagcgctgctggtgccgctgtgggggagagagttgctgctggtggcggcggtgcggccgcacgcccagtggatcacggtggattcgtgggtgttggaactaaatgtgctctacttgatggacatcttaaggactgcagcgatgcttcagagaattgtagattcatataaaataggtgag

SEQ ID NO: 16666 - DNA, 459 bp, Zea mays
  Peptide Sequence Number=SeqID_58445
ggctcggactccacctcgacctcggacgatggtctccgcctcgcccgacccccgggctcggactcaacctcgacctctggacgacggtctccgcctcgcccgacccccgggctcggactcaacctcgacctccgtacgacggtctccgcctcgcccgactcccgggctcggactcaacctcgacctcggaggagtcaccacctcgctccggccgaccacgccacaagggggggcaccattaccctacccttagctagcctaggctacagggaacaagaccggcgtcccatctggcttgccccggtaaaacaagtaatgatggcaccccgcgtgctccatgacgacggcggttctcagccccttacggaagcaaggagacatcagcaaggatccgacaaccccgacagctgtgcttctacagggctcaagcgctcctctgacggccacgacgccacatga

SEQ ID NO: 16667 - DNA, 2250 bp, Zea mays
  Peptide Sequence Number=SeqID_58446
atgacgcgacttttgtgccttactgccctgacgatcttccccattatcctttgcctcacaacatccgccgccgtcaccgcgtctgacacactggacagcggcagcaacatcaccgacggtgcaacgctggtctcggccggcgggtccttcacccttggtttcttctccccgaccggggtgccaaccaagagatacctcggcatctggttcacagcatcgccggaggccatctgttgggtggccaaccgtgaaacgttcctcagcaacacctcaggaggtgtactggtcatcggcagcaccgggagcctccgccttctcgacggctctggccgcaccgcgtggtcttccgtcgactcgacgagttcttctgctccgcctgtcgtggcgcaggcgcagctgctcgagtccggcaacctagtggtgcgcgaccagagcggccgcgacgtgctttggcagtcattcgaccacccgtcgaacaccttgctcgccggcatgagattcggtaaggacccgcggactggcgccgagtggttcctcacgtcgtggcgtgcgtcgaacgacccgacgccggggggctaccgtcgtgtgctggacaccaggggcggcctcctggactccgtctcgtggaagggcagcgtcaagaagtaccgaacggggccctggaacgggctgtggttcagtggcatccccgagacggcgtcgtacaaggacatgtactccacccagctcgtcgtccgccccgatgagatcgcgtacgtcttcaacaccgcggccggcgcgcccttctgccgcctcgtgctgaacgaggtcggcatggtgcagcagctggggtgggacccggttagccgggtgtggaacgtcttcacgcaggcgccgagggacgtctgcgacaactacgccaagtgcggcgcgttcggcctgtgcgacgtgaagtcggggtccacgctgttctgcagctgcgccgtggggttcagccccgtgaacccctcgcagtggtccatgagggagacccgtggcgggtgccggaggaacgtgccgctggagtgcggcaacgggacgacgacggacgggttcaagatggtgcgggcagtgaagctccccgacacggacaacgcgacggtggacatgggcgcgacgctggagcagtgcagggcgaggtgccttgccaactgctcgtgcgtggcctacgccgccgctgacatccgaggaggaggcggtggccatggctgcgtcatgtggacggacgcaatcgtggatgttcgttacgtaggcaaaggccaggatatctacctgaggttggcaaagtctgaattaggtgagcacagccgcagagatacatacatatcccgcatgcatatttctgcagttgagaagaagaggaatgtggtaataataatcttgccactagttacggcatgtctgcttgcgctcatggggatgctccttgtttggatatggcgcaagcacaagcttagaggcaaacgtcgaagcatggatgatatccagcacaagaccatagtaagacacttggacgagacaaatacccttggcgacgaaaatctcgacctgccgtttttcagctttggagatattgtttctgcaacaaataattttgctgaagagaatatgctcggggaaggaggctttgggaaagtttataagggtattctgggcgaagatagagtggttgcaatcaaaaggctcagccagggctctggacaaggcatagacgaattcagaaatgaagtagttctgattgcgaaattgcagcacaggaaccttgtcaggctccttggttgctgcatccatggagatgagaagctgctcgtttacgaatatttaccaaacaaaagcttggattccttcatcttcgatgctgcgaggaagaacgcccttgattggccgacaaggttcaggataatcaaagggatatcaaggggagtcctttacctgcaccaggattcgagactgacaatcgtgcaccgagatctcaagacaagcaacatattgttggacgcggatatgaacccaaagatatcagattttggtatcgcgagaatcttcggagggaaccaacaggaagcaaacactacccgagttgttgggacgtatggttacatgtctcctgaatacgcaatggatggagctttttcagtcatgtctgatacatacagcctcggtgtcatactgttggagatcgcatggagcctatggaatggtggcagagcaatggattggacgaatctctag

SEQ ID NO: 16668 - DNA, 1071 bp, Zea mays
  Peptide Sequence Number=SeqID_58447
atgacggcagccccagtggtggccagcagcgaagtcgatgcgcacctgaaagaagcggtgtcgagaggcttcttggcgcgggtctatggtctgaagctggcttatgtcaaggttcagcgggcacatgtgtcgtatgattctgaaagggtcaaaggaaaaaaattctatatgtcgatggcgtggatcagaaaaatgaacttcctgcagcgcattcatgtgggcaagtggatgctgatggggatcaatggtatgaaattaaagcagcattcaagcttgaaaagcagccatccaaagttactgcatatgttcaaggccctcctgcagatgttagagttcttccaattcatgacgcttgtaattgtcagtcttgttgtggataaaaaccaatgggtcaattgtgggcaagtggatgctgatggggatcaatggtatgaaatcaaagcagcattcaagcttgaaaagcagccatccaaagttactgcatatgttcaaggccctcctgcaggtgttgatcttagagtcatggacttttatatatatgctgtcagagaaaacagacaagggtggtctgatatgggcatagggctactctgtgggatcgaaaagtttgatgcctcaagaggatttaggatgtccacctatgtgtattggtgcattcatcagcttccatacgaagacatgacaccttttcaagcagcggttgccattgttcaaaagattgactggatctatatgggattgactctgctcgtgctgaaggagaaagagcgtgcttggcttgcgggcccagtccatggcccaagtcgagatgctgatacaaaaggacattcagaacacgagaggggcatcaaagagaatatccagaacagttttccagtcgtcttcctcgtggagaagcggccaggcgagtttgtcggagtctcacgtcccgttcctcgtcgacggtggccacgggacgtgacaagtggtatcagaggcttcgggtcctcggcggtgcggtgtggtcacgctctctcgacagcggtcctgttcggcggccacgattttgcgatgctagagttccttatctga

SEQ ID NO: 16669 - DNA, 1947 bp, Zea mays
  Peptide Sequence Number=SeqID_58448
atgaagctgcagatgataaagatgtggatgatgacgatgcttgatgaaagtgatgcagagattgaagatcctgataaaatagctatgtcagaatcagaagaggaacaagatgaagaggatgatgataaggatgctcagaagcttgaaatcctcttccatgtgatttctgcgcagtttgatgttaaccctagtctacttgggcatatgccagtcaatgtgtggaagaagtgtgtcaataatatgcttcttgtgcttgatatactccagcagtatcctaacattgtagtagacacctcatttgagcctgatgagaatgaaactcaaaagggtgcagactacaatggaacaatacatgttgtcggtgacctggttgcattccttgagagactggactctgaatttttgaagaccttacagtgcacagatccatacacaaaagattatgttcagaggctcagagaggaacccctgtttctggttgtcgcacagaacgtccaagattatcttgaaagggttggaaacttcaaagctgctgccaaggttgcactgcgccgtgttgaactagtttactacaagccccaagaagtgtacgatgcaatgagaaaactcgcagagcagcctgaggactgtgtggatgatgatgatgcagaggctggtgatgaacataaagcagtagatgacaatagaggaccatcaccatttgttgtgattccagaggctgtgcacaggaagcctacttttccagaaagcggtagaactttgatggatggattgatgttcttaatttacaagtatggggatgaaaggaccaaagcccgtgcaatgctattttattcaacagagtcatggccccagttagggctgtgtgctttcagggctggtttgataaatgaagcccatggttgcttgactgagctctattctactgggagggtgaaagaattgcttgcacaaggtgtgcaacaaagccgataccatgaaaaaactcccgaacaggaaagacttgagaggagaaggcaaatgccttaccatatgcatataaacctggagcttttggaagccacacacttgatctgtgcgatgctgattgaagtccccaatatggctgccagcacctatgacaagcggagacctatgagcaaaacattccgaaggcttcttgaagtgagtgaaaggcagacatttgttgggccgcccgagaatgtgagggaccatgtaatggctgccacaagagccctcaacaagggtgatcaccaaaaggctttcagtgtcataaattcgttggagatttggaagcttttgaggaacagagagcatgttcttgagatgttggagcttaagatcaaggaggaagctcttagaacctatctcttttcatactcgtcttcgtacgagtccttaagccttaaccagctcactaccatgtttgatctcagcgagcagcatgcccacagcattgttagcaagatgatgatgcatgaagagcttcatgctagctgggaccagccaacaaagtgcatcgtattccatagtgtggaccaaactaggcttcaggggctactcttccagatggcagataagctctcggtcctggtggagatcaatgagagggcatacgaggcaagaactggtggtactctcgagggggtacctcccaggcgcaggggcgagggtcaggataatatgggaaagtggcaggataactttgtctcgtcacaggggcggcagggtggtggcaacaggtttggatactccggcagaggtgcaatatctggtcaaagtggtggtggacaccagagggacaggggcaatcagggttaccgcgggggctatggtggcgtttcaaggtttcaggatgcaaggggtcgcaaccagtctattccatcaggcagaggtggtgatggtggtgcacgcatggtgaacctgaacaggatgggtagagtttag

SEQ ID NO: 16670 - DNA, 1488 bp, Zea mays
  Peptide Sequence Number=SeqID_58449
atgagcatcacggtggaggactgcgcggcgaggtgcctcgccaactgctcgtgcttggcctacgccgccgcagatatccgcggcggcgacgtccgtagcggctgcgtgatgtggacggatgacatcgtcgacctccgatacgtggacaaagggcaagatctctacctgaggctggccaggtccgagctgccggcggcggcggggccctcgccgcaacggccgtttcgtaccgcaccagttgttggtgcttccgcagctgccgtcgccgtggttcttattgttctgtcggtcgtgcttgtgattaggcggcgccggcgaccaataatcccagctgctcagagtgcctctccgagtgtcccttctactgaactgcgcagacctccgtcagtcccttctgttgacctgtctagtttgaggagggctacaaatgatttctctgcagacaatgtcattgggcgtggaggattcagcaccgtatttgagggcaatttagctgatggtaccaaggttgccgtgaagaggctcacacaatcttaccttaccgatggaggtggtgagactttcatgagagaagtggaagtgatgtcagagctcaagcacgagaacctcgctcgtctccttgcttactgcaaggacggaaatgagcggatactggtctacgagtacatggagaacaggagcttgaacctatgcatattcgcaagagacgccaaccaacgcgctgtgttgaactgggagcggaggctggagatcatcgtaggagtcgccagaggcgttgcttatctgcacggactaagcaaggtggtgatacacagggatctgaaaccgtccaacgtgctcttggacggaaactggagagcaaaaattgcagattttggcaccgccaaagtgttcgtcgatggccagacgaatccgacactggtacagacagagggatacagggctccagagtacacggcgcgagggccgagcctgacgctgaagtgcgacgtgtatagctttggagtcgtcctgatcgagatcgtcagtggccaaaggaacagcagcaaccagacgctcgtttccgatgcacgggagtcttggagccagaataagatcaaggagaaccttctggatccagccgtgggccagccggggccagagatcctccttcggctggagagatacacgaggtctagaaccgctgaagccatattaattaggtttagtgacagtggcttaggtagcaacatagatgacatgaaaagtactagtggcttagtattctttgttggtatgaatttggtcacatgggtgtcacagaagcaaagggtagttgccctttcatcatgtgagcctgagtacattgcaagtgcaaatgcagcttgtcagggaatttggcttaggcacctattgagtgaactgcttggtattaagcctcaaaaagtcaatctcctagttgacaacaagtctgccatagcactaagtaaaaaatccagttcatcatga

SEQ ID NO: 16671 - DNA, 1101 bp, Zea mays
  Peptide Sequence Number=SeqID_58450
atgagtttaattagggggacgtacaatcaggacatcactatattaacaatcatcggtgatgcgcctggaggcgtgcaagggctaaacccagaatccccaatcatcatggatacaatattcgtccaccttctcctcctctcgtttatgatacttcgtcccatagccatcgccgccgacgtacctgagtccgacacgctcggcaagggccgcaacatcaccgacggcgagacgctcgtctcagccgacgggacgttcaccttgggattcttctctcccggggcgtcgaccaagagatacctcggcatctggttctcggcgtccagtgtcgccgtctgctgggtggcgaacggtggccgccctgtgaatggcaactccggcgtgctggtcgtcagagacacgggaagccttctgcttctagacggctctggccagaccatatggtcgtcgaactccaccagctcatcgtcatcagcggaggcgcagctcctcaactccggcaacctcgtcgtccgcgacggaggcagcagcagcagcagcgacgccatcctgtggcaatcgttcgatcacccgtcgaacaccctgctgtccggcatgaagctgggcaagaacaagtggaccggcgccgagtggtacctcacgtcgtggcgctcggccgacgacccgtcgccgggggcctaccgccgcgcgctggacaccagcgggctgcccgagcttgtggtgtgggagggcaacgtcaggacctaccgcaccggcccgtggaacggccggtggttcagcggcgtcccggaggtgtcggcgtacaggaacttgatctggtaccaggtgacgacaagcccagcggaggtatcctacggctacacctccaaccccggtgccgcattgacccgtgtcgtgctgaccgacgccggcgtggccaagcgcctggtgtgggacgcgggcgcccggacgtggcagaccttcttccagggccccagggacgtctgcgacgcctacggcaagtgcggggcgttcgggctgtgcgacgccggcgcggcgtcgacgtggttctgcacctgcctcacggggttcagccccggcgtcgccgcccgcgtggtcccttga

SEQ ID NO: 16672 - DNA, 742 bp, Zea mays
  Peptide Sequence Number=SeqID_58451
atggcatcccgtttctggggacagggggacagtgagtctgaggaggaggaggtggaagaagttgagtcagaacagggcagtgatagtgatgatgatggaggtcgaggtggtgcgggacgcggtgcccaaaaccgatacttgaagaatcaagaagatgacagcgatgagtctgatacaggtcaccgtgtgatccgctccctgagggacaagcgcaacgaggagatgagatctattgttgatcagatgcgtaatgcaatgaagatcaatgactgggtgagcttgcaggagagttttgagaagcttaacaaacatcttgagaaggttgttcgtgtcaatgaatctactgaggtaccaaaaatgtatatcaaagctcttgtgttgctggaggacttccttgctgaagcccttgcaaacaaggaggccaagaagaagatgagcagcagcaattcgaaggcattcaatgcgatgaggcaaaaactcaagaagaacaacaagcagtatgaagagcagatccagaagtgcagggagcatccagagagttttgaagatgaagctgcagatgataaagatacggatgatgacgatgttgatgaaagtgatgcagagattgaagatcctgataaaatagctatgtcagaatcagaagaggaacaagatgaagaggatgatgacaaggatggttgggaacagaaaaggagtaagaaggataagctgatggataagcagttcttgaaagatccaa

SEQ ID NO: 16673 - DNA, 1341 bp, Zea mays
  Peptide Sequence Number=SeqID_58452
atggctgccagcacctatgacaagcggagacctatgagcaaaacattccgaaggcttcttgaagtgagtgaaaggcagacatttgttgggccgcccgagaatgtgagggaccatgtaatggctgccacaagagccctcaacaagggtgatcaccaaaaggctttcagtgtcataaattcgttggagatttggaagcttttgaggaacagagagcatgtccttgagatgttgaagcttaagatcaaggaggaagctcttagaacctatctcttttcatactcgtcttcgtacgagtccttaagccttaaccagctcactaccatgtttgatctcagcgagcagcatgcccacagcattgttagcaagatgatgatgcatgaagagcttcatgctagctgggaccagccaacaaagtgcatcgtattccatagtgtggaccaaactaggcttcaggggctactcttccagatggcagataagctctcggtcctggtggagatcaatgagagggcatacgaggcaagaactggtggtgctctcgagggggtaccgcccaggcgcaggggcgagggtcaggataatatgggaaagtggcaggataactttgtctcgtcacaggggcggcagggtggtggcaacaggtttggatactccagcagaggtgcagtatctggtcaaagtggtggtggacaccagagggacaggggcaatcagggttaccgcgggggctatggtggcgtttcaaggtttcaggatgcaaggggtcgcaaccagtctaatccatcaggcagaggtggtgatggtggtgcacgcatgcgtttgataaaatacactaacacgaacctcaaatacggtgctgaatcctccacggccaatgacattgtctctacagagaaatcatttgtagccctcatcaaagtagacagttcaacagaagcaactgatggagcttcacgttccgcttgcatccgcctgaggcaggtgcagaaggacgtcgacgccgcgccggcgtcgcagacgtccctggggccctggaagaagtcgttcgaccacccgtcgaacaccttgctcgccggcatgagactcggcaaggacccgaagactggcgcggagtggtcgctcacgtcgtggcgcgcgccgaacgacccgacgaccggggactgccggcgtgtgatggacacgaggggcctcccggactgcgtctcctggcaaggcaacaccaagaagtaccggacggggccctggaacgggctgtggttcagcggcgtcccggagatggcgtcctactcgactctgttctccaaccaggtcgtcgttgtgatgacccgtggccgcggctag

SEQ ID NO: 16674 - DNA, 147 bp, Zea mays
  Peptide Sequence Number=SeqID_58453
atgggcatcgtggcgtgggagcgccgatggactgggccgctcgaaaggaagaggtccttcctggcccacctaatcggtgtcgttcaaagacttcagaagttcagcgctagtgttggaggtaaatcatctaaatttctggcatggtaa

SEQ ID NO: 16675 - DNA, 2061 bp, Zea mays
  Peptide Sequence Number=SeqID_58454
atggatatgaccagccttaccatttccatcctcctgctcctcctgatgatccgtgtctgcaaatccgatgaccagctggcaagcgcaaggccactttcacccggcgacctgctcatctccaaaggcggcgtctttgccctcggtttcttctccccgtccggctccaacaccagcacgagcctgtacgttgcgatctggttccacggcatccccgagcgcagccgcaccgtcgtgtgggtcgccaaccgcgacagcccagccaccacatcgtcgtccccgacgctcgccatcagcaacagctttgacctcgtgctttcggactcccagggccgcactctctggaggacgcagaacgccgccgccgcggccgtccacgacagcggcactcccctggccgtgctgctcgacacgggcaacctgcaactccagctgcccaacggtacggtcatatggcagagcttcgaccacccgactgacaccattctcccaggcatgcggttcctgatgatccacggggctcgccccgccgcgcgcctggtctcttggagaggccccgccgacccgtccaccggagccttctcgttcggcctcgaccccgtctccaacctccagctgatggtctggcacggggccgagccgtactgccgcatcagcgtgtggaacggcgtgtcggtgtcaggcggcatgtacaccggctcacctagctccatcgtgtaccagaccatcgtcaacaccggcgacgagttctacctcacgtacaccgtctccgacggctcgccgtacttccgtatcatgctcgaccacaccggcacgatgaagctcctgagctgggacaccaactcgtcgtcctggacgctcatctccgagcgccccaccggtggctacggcctctatggctcctgtggccccaacgcctactgcgacttcaccggggctgccccggcgtgccagtgcctcgagggcttcgagcccgtcgccgccgatctcaactcttcagaaggatgccggagaacggagcctctgcagtgcagcaaggcaagtcacttcgtggccttgcccgggatgagagttcctgacaagttcgtgctcctccggaacagaagctttgagcagtgcgcggctgagtgcagcaagaactgctcctgcaccgcctatgcttacgccaacttgagcagcagcggtgccatggaagaccagtcaaggtgcttggtttggaccggggagcttgtcgacacctggaaaagcatcaactatggcgagaagctgtacctccggcttgccagccctgggaaatggcaaaagaagggaattcagaagaaagtgatgttaggatacttgagcacctccaatagactcggagacaaaaatgatgaatttccatttgttagcttcaatgacattgttgccgcaaccgataatttctctgactgcaatatgcttggaagaggaggctttggcaaagtttacaagaaggatgcaatcatgcagggaatattggaagatggcaaggaagttgctgtcaaaaggcttagtcaaggttctgggcaagatacttcaagaacacgtgtacttgattggccaacacggttcaacataattaaaggcatagccaggggcattaaatatctccaccaagattcaagattaacaataattcatagagatcttaaagcaagtaacatcttgttagacacagaaatgagtcccaaaatatcagatttcggtatggcaagaatcttcgggggaaaccagcaactagcaaacactacacgtgttgttgggacatacggttatatgtctcctgaatatgtgacaagtggtgccttttctgtcaagtcagacacatatagctttggtgttcttctcttggagattgtaagtggtttgaagattatctcaactcaatttataatggacttcccaaaccttatagcttataaaaaagatttacatttttccagacatggaagttatgggaagagggaaatgcaacgaaattggtggactcattggttgctgaaagttgtccactccatgaagcttttaggtgtattcatgtag

SEQ ID NO: 16676 - DNA, 1608 bp, Zea mays
  Peptide Sequence Number=SeqID_58455
atgtgcggcgcgttcggcctgtgcaacgtgaacacggcgtccacgctgttctgcagctgcgtcgtggggttcagccccgtgaaccccacgcagtggtccatgagggagtccggaggcgggtgccggaggaacgtgccgctggagtgcggcaacgggacgacgacggacgggttcaaggtggtgcagggagtgaagctccccgacacggacaacacgacggtggacatgggcgcgacgctggagcagtgcagggagaggtgcctcgccaactgctcgtgcgtggcctatgccgccgccgacatccgaggaggcggtgatggcagtggctgtgtcatgtggacgaataacattgttgacgtccggtacgtagacaaggggcaaaatctctatctgaggttggcaaagtctgaattagctagcaggaagagaatggttgcgacaaaaatcgtgcttccggttatcgcatctctgcttgcacttgtggctgctgccgtgtatctcgtttggaaattcaggctgagagcccaacgtcgaaaaaaggatatccagaagaaagccatggttggatacttgaccacgtcacacgaacttggtgatgaaaatctagagcttccatttgttagctttgaagatattgttactgcaacagacaacttctctgaagacaacatgcttggtcaaggtggatttgggaaggtttacaagggtatgctgggcgagaagaaagaagttgcaatcaaaaggctcggtcagggttctgggcaaggtgcagaggagttcagaaatgaagtagttctgattgccaaattgcagcacagaaacctcgtcagacttcttggttgctgcatttgtggggatgagaaattgctgatttacgaatatttgccaaacaaaagcttggattcattcatttttgatgctgctagaaaaaagctccttgattggccaacaaggttcaagataatcaagggaatatctagagggctcctttacctacacgaggattcaaggttgacgatagttcacagagatctcaaaccaagcaacatattgttggatgcggatatgaaccctaagatatcagatttcggtatggcaagaatctttggaggaaaccagcacgaggcaaatactaatcgagttgttgggacatacggttacatgtctcctgaatatgctatggatggcgccttttctgtcaagtctgacacatacagcttcggtgtcatactcttagagattataagtggtttcaagattagtttaaaccacatcacggatttcccaaatctattagcttatgcatggagcttatggaatgaaggaaaggcaatgaatttagtggactcatcccttgtcaagagttgtttaccaaatgaagctttaaggtgtatccacataggactcctatgtgtacaggacaatccaaatagcaggccgctcatgtcatcagtggtcttcatgttggagaatgaaaccacaacactttcagttccaaaacagcctgtatttttttcacaaaggtattctgaagcccaggaaacaggagaaaacactagtagctctatgaataacatgagcatgacaatgttatcagaggggcggtag

SEQ ID NO: 16677 - DNA, 309 bp, Zea mays
  Peptide Sequence Number=SeqID_58456
atgaacaacaatagaggagttagtagagaggggccagtcgtgctgatgtgcggtggagttaatgttgaaagatgcgagctaacaccttccactaatgctgcagaggaggctctgcccgagccaacgactgcacatgatgggcgcaacccaaccgtgcggccccgaggcacaaccgtcgggcctcggtgtcatgtggcttactgtgcgggccatgcgagcgactgctatgacacgaatgcctgcctcagtaatgcgcgagtggtcattcaggtcagcatgacaaaagcctgcccatgccctgagccctaa

SEQ ID NO: 16678 - DNA, 540 bp, Zea mays
  Peptide Sequence Number=SeqID_58457
atgggcaacagcctgcggtgctgcctggcgtgcgtgctgccgtgcggcgcgctggacctggtgcggatcgtgcacctcagcggccgcgtcgacgagtacggccgcgccgtgtcggccggggaggtgctggcggcgcaccccaaccacgtgctcagcaggccctgctcgtcgccgcagggggtcgtgcgcaggatcctcatcgtgtcgccggactcggagctcgagcgcggggagatctacttcctcatcccggccgcgtccgtgccggacgccaagaagggcggcggcggggctagcacgccaggccgccacgtgcgcagcaagtccgaaggcagcgtcgtcgccgccgccgtgaccgaccggcagctggggctcggcgccgagtcgccggaggaggcggcggccgcgcccgcggccaagaagaagaatcagcagcagcacaagagggccgccgcgcagcagcaccggcggcgcatgagcaccggcagccacgccgcgccctggcagccgcacctcgcctgcatcgcggaggacctctga

SEQ ID NO: 16679 - DNA, 846 bp, Zea mays
  Peptide Sequence Number=SeqID_58458
atgggcgtggatgcgagtgggatggcgcgaaagcgggagggcgtgggagcgggagcgcaggagagcgtgctggcgggagaatggcgagttggagctgctcggcaaagatggccagcgacgggaacgcgatgccgagtgagatggagaagcgagctcgatggcgagactgttggatctagtttttcacggtcttttctcttttttggcgaggaaataatgtttaacgagtctgttgcagttgctcttagccggagtgggctatccagcatggtgttcgcacgaaccaccgtcgtcaacggctgggtgccaaactgccaaggaacgctcgccggccgcatggacccgcacagcggagaggcgagcgtcaattactgtggtggcctccacctcgtactcgtactcgtcatcggcggcctgatcgggcgcagcagtcctggggacgaggcaaggtcccggagggcgacgcaggcgagcaccgcggggatcccgccctgtaggcaattgctagagaggtcgagcatgcggaggcggcgcagcgtccagattattcgtgggcgggaacggtctgggaggaggagggcgagcacgtggaggctgcagtttgcaggaccagatcgctggcacgtgggacaggagggcgagcagccgggcacgcggtgctcgtgctcccgcggcgccgtggcggccggggctagcgcggccggacgagttggtgcgtggggaagagatggggaagcgccgagcgcggaacgtgcgggtcgtgcaagcggacgaaagagaaacaagtcgaaggccaaagaaaaccgtcgttggcagaggaagcagtcactgtgcttcgtacagtag

SEQ ID NO: 16680 - DNA, 1179 bp, Zea mays
  Peptide Sequence Number=SeqID_58459
atgttcaggccgccgcgaccctgtcgaatagagagtggagaaaaagggatgggtatcggatctgcagagagtcaatcccagtttcttctaggaagggtggaagaagaggcatatcatctggagggagagtccgctgactccactatcagatccatgcgccaccaggtggttcccctcacagccaacgatcggatcccagaagatgtgccaagtggtagccaattcgacggtaccatggattctaggtattacacaaatctcctggttaatggtattgaagaatctcaagcaactcgtagtgatgtaagaatccaacatggtcgtgcaacagccaagagttctcagggtagaagcaaaaattttagagatgaggaggacattcttcttgtgtcagcttggctgaatgtgggcatggatcctattcaaggagttgatcaaacacatggcacactatggagaaggatacatgaatatttcaatgcaaacaagaagtttgactcaaatcgttctgaagtatctttaatgaatcgttggtctggtatacaacatgatgtgaatctgttttgtggatgtctgtctagggttgaagctaggaatcacagtggttggtcaattgatgacaaggtcgcaaatgcatgtgtaatgttcaaggccgaagacccaaaggataagaagttttcatacctgcattgctggaaaatcttgaaggacaagcccaagtggatggataggcggaaggaaattggaagtgcaaaaaaatcagccactaagaaacagaagacaacgacaaattcttctccagcatcagttgcaaatgcaattgccgtagatgcccctcttgggggtgctgatcatgatgaaccatcatgtaggcccgacggtaagaagaaggagaaacaaaagctacgacaacgttcgtccatggaagttgtagactatctaattgcaaagaagaaagattctgaccttgaaaaggacttgaagaaagaggagaggtgcaataaagcctttgctctacaggaagaaaggatcaaattggacaaagaaaagtttgcgttccaaagacagctcgaagaggacagaataattggtttggaccttagcaccatgaactataaacaacagcagtattatgaagatcgtcagaacgagattcttgcaagacgtttcaatatctag

SEQ ID NO: 16681 - DNA, 672 bp, Zea mays
  Peptide Sequence Number=SeqID_58460
atggtggattactcacttccatcagaatttctcatgcctttgtcagacaatcctattaaagaaaatacagaaaataataaacaacatacagagagggccagtccagccgatggcatcgacaagaacggcaagccgcataaggtcaggctctactccattgccagcagcgcgatcggcaacttcggcgactccaagacagtctcgctgtgtgtcaagaggctcatctacaccaacgatgccgaagacatcgtaaaaggagtctgctccaacttcttatcgaaatgcatgggcttgaaggagttcaaaatggggtatgaatcatctcagtttgacttttgttttaaatccattttatgttctgttgtaggagatcttaccattcattttgttggttatgcaggtgggcctgtagtgaatcttggcaagattgtacaggtcattttggctaatgagataggtcttggcaagactgtacagttaataactagtcactgcaacatactagccttaggtgttgtcagcgtattctttttttcctggatgcatgcaggcattgttctcattggtgaaattagaggtatggctgaggagaatgttgcaacattcatccagagaaaattaaattacagttgtaagtggtatcaatggatggaatacaaactaaagctttag

SEQ ID NO: 16682 - DNA, 1071 bp, Zea mays
  Peptide Sequence Number=SeqID_58461
atggatcacgctgctattcgataccagtccatagaactccagtgcctctctgggtgttaccaggggcggatttacgatcggggctgcctgggctgcatccccggtcgcggcccaataacgcgaggagcaggtattcagccgcagcccagcttcgctagtcgctacgggctacggcgctaccctagtccagtgtccagccgccgcactgacgccgagcacatccagacgccagagccgcagacccgcagttgccgacttgccgaccgccgcacgccgcgcggtgcgcgtctgcgcgcgcgactgcgccgccgccaccgctcaggctgccagcgccaggcgcgtcttccaccggcgcccaggccgccaggcgcgaccgcgcgactgcgcgtctgcgcgagtcttctgggttctggccaccgcggcaccgcccaggccgccaggcccgaccgctggcgagcaggcgagcaggcgagcaggcaagcaggcagagcaaagcagagcggtgagcaggcgagcagagcagagcagagcagcgagcaggcgagtagagcagagcagagcaacgagcagccgtgtacagaaagatgtattgcttgccttgatccaagggattcttttgccaactttgatttagagaagttaattgagctatcaaagatttatgatgctgattttagtgattatgaacgtatatgccttatggatcaacttctcttattcattgatgaggttagaaatgatgatggatttagagattgtaatgatcttggacaccttgctacaaagatggttaaaacagatagacacatatgtttcagtttagtgtatcgtcttgttgagcttgcattaatcttgccagtgacaactgcaactgttgagagagctttttctgctatgaacattatcaagactgaaagaagaaataaaatgggtgatgaatggatgaataacagcatgctatgctatattgagcgggatatgtttgtagaaattgaagatgaaaagattttgaagcattttcaaggcttaagaactcggaagataattttacctcgcagcatcaactcatga

SEQ ID NO: 16683 - DNA, 450 bp, Zea mays
  Peptide Sequence Number=SeqID_58462
atgagtccgcacgccctgctacccgtcggatcaaggatccacgacccacagtatgatcgcacgcggatcccatcagagccccaggatgttgatctaacggttactaacttcgaatcccgcccaaagcacccgaccattcgatcttatatcaacggtccaaatctaccagcccccagatctaatcttaaccgcacctttaccatccaagggccaagcgccctcttccccctcctccagccattgccagcggcaatgtccaggaccgcggtcgagcttggccggagctggcccaatccgacccccaggcgcgcccaaacaccgattcgacgaatgcttcgcaaggcagtaatgacggcgaacatggccaagggcatcttactggcaaagacgtcgcagaggagtcgggctacggcgcgagcaggttctacgacggggcagcaggtgcggtga

SEQ ID NO: 16684 - DNA, 459 bp, Zea mays
  Peptide Sequence Number=SeqID_58463
atgggcaagaacaacaagcgcaagcgtgagccaactcctccatcggaggagtttggtgactcggagtactcagaggaggagttctcctctgagtctgaggggtctccggctcccgtccccctgcgtgagtcgtctgatgactcagacgactcccaggagctcgcggcagaggtctggacgtacatccgggccgtcgagcgctccgggctcgagggctcggatgagtcggagtactcctcggatgaggaggactcggacagcggcggcaaggacgaggacgacgacgacgacgacggcgacgacgatggcgacggtgacggccgcgacaacggcatgggcagcggcggcggcggcaaggacggtgatggcggcggtagcaggggcagcaaccgggacggcagcagcaggggcagcaccaggggtggcagcggcggcggcagcaacagggccagtggctag

SEQ ID NO: 16685 - DNA, 564 bp, Zea mays
  Peptide Sequence Number=SeqID_58464
atgaccaaagaacatgaggacaaaggcgctctcatgatcatttggtccaacgataatacactgtcatgttctaatccttgttgttccaagaaaagccaatcctcgattgaaaaaaagattgcagggaagattaataggaacaagaggataatgcggagaagacgccttgatcaaccaactcaagatatccacggacacatggtgaagaagcttgagaagggagaaaccgcagcatgcgtcaaactccacaaaaatgagttcttaaggcaacacgagaagcaaacaacaaggacaaggacaaaggtgaaaattcaagtattaatgttgtttgcacttgtaatctttctatgtcctccaagagcaaagagaagaggaaaaaggagatattttaaatgcaaggaattgggtcactttattgcctcatgcccacacatggacattgaggatgaagttaggagatgcttcacatacaacaagaaggatcacatgatcccttcatacccgtctcatgaagaatcaaggttgtgctttccccatgatgactctcaccaagaagaagaatga

SEQ ID NO: 16686 - DNA, 124 bp, Zea mays
  Peptide Sequence Number=SeqID_58465
atggcccaagggcacatttcccctttcaccgtgtaccccgaagttcgcctcctgcccttcacaaggctggtgatcatccctttctttcgaaatgctgggaggaagaagcgggtcaccagctcag

SEQ ID NO: 16687 - DNA, 443 bp, Zea mays
  Peptide Sequence Number=SeqID_58466
acgaggacgaagacgccgaggtggaggtggaagacgaggaggtcgcgtgctggacgaggccggccgtgtccatggctgctgctgtgactgtgaccctgacccctgccggtatgccctgcgacgttggagttcacacgcggagaagccgtggtgacgaacaacggaacaaggcgccgggccggcggttgggcggctggccgcggcaaaggaaacagctggtgccagtagattctttgggagcccagctcgctgcttcacaaacagacagagtggtgtgcactgcagctgcagtgaagtggaggaagacaggaagtgctgtcagactggccgcaacggacgcggcgcgacgccccctccccttgccctgtagctcgcatggcggctacagggcgcctcccaacgccgcagcggtggacgctagccagcgctctacgaaaaggtaa

SEQ ID NO: 16688 - DNA, 699 bp, Zea mays
  Peptide Sequence Number=SeqID_58467
atgtgcccaatcaagagggagacgacgagcgccgagtccggctcgccgtgcagtagctccacctccacctcgtcgtcgtcggaacaccaccagaccgcgtgggcgtcgccgccgaagaagcggccggcggggcgcaccaagttccgggagacgcggcacccggtgttccgcggcgtgcggcgccggggccgcgccgggcggtgggtctgcgaggtgcgcgtgcccgggaggcgcggctgcaggctctggctcggcaccttcgacaccgccgaggccgcggcccgcgcgcacgacgccgcgatgctcgccgtcgccgccggcgccgcgcgcctcaacttcgcggactcggcgtggctgctcgccgtgccgacggcctcgtacgccagcctcgccgacgtccgccgcgccgtggcggaggccgtggagagcttcctgcgccgccgcgaggaggaggagggggacgcgctctcggccgcgtcctcgacgtcgcccaacgacaaggacggcgacgagtcctcctcggccaccaccaccgacgacgactcgccgttcgagctggacatgttcggtggcatgagctgggacctgtactacgcgaacttggcgcaggcgatgctcgtggagccaccgcccattgtccccgcgttatgcgacgacgggcgtggcttccgaattgccgctctggagctactaggctag

SEQ ID NO: 16689 - DNA, 633 bp, Zea mays
  Peptide Sequence Number=SeqID_58468
gattggcccaaaacgccgcgaccgcacgagctcatcgggatggtcctgcagcctgcctgctttgagctgttcgcgtcgcgcgcgtgccccagcagcccgcagcccgacgagctgtcgccggaggcgggggaaagtcaagtgtccgcgaaggaggagtaccgagtacctgacctgtcgcccgcacgtgggggagacacgtgcgtgcgcgcggaagcggaaccagcaatgatgatggggaaagctgcaacggtacggagtagtagcactggcgcagacaagacggcgatgcggttctcccaccacattttctctatatcttctattatattttattacatcgcccaaaagtatattctccacgtcgggacagcgctgctgaccaacctacccgtcgagcaacccggcgaggcgaggctgcaaaccaacctgcctgcagagaaactctgcgaggcggggctgccgaccaacccagcaagacgacagccagctcttgaacaggctaggaagagccgacctaggaccatcgagcctcatcggcatgataggacatcaacgagccatgtccagactgtggaagtggtaccaaagggtctttatcaaacacgacgcaggatgtgtatccccgcggactag

SEQ ID NO: 16690 - DNA, 621 bp, Zea mays
  Peptide Sequence Number=SeqID_58469
atgcccctcacggacacggcgaatgcgcaggccaccaggcccagcgcggcgcccagggccgagcccgacgcgcgcgacgaggcgcgcgcgctccggcctccgggcgcccagctcgtgcccgacacgcgtggaaacggcgcagccgagcgaatgcgggaagatgtatatcagcgaggtggtctgtatgagcacgcccatggccgccaccgccgccttggggtcgatgagcacgccacagaggagcaccatgatctcgtaccaccaccactccaggcagaccgacatgcagctgtgcacgcacagcctcacaaggctccaccactccccctcggctggtgtcggcggcgccacggacgcgcccttcttggcgccgccgtcgtcatgggcgccgtacattccgcggaagtagacgtacgccacgaggaaaagcaagaagttgaggttggtccagacccctccgagcgcgacgccacggacgccgaggccgaggccgctcacgaggaggaagttgatgggcacgtggaggagcagcgcggcggcggcgccgtaggtgagcggcagcgtgacggactgcgcgcggaggtagatgcggatcgggtggaggaaggacgaatcttctag

SEQ ID NO: 16691 - DNA, 234 bp, Zea mays
  Peptide Sequence Number=SeqID_58470
atgggcgcgttccctgtgttcgtggtggacggcgagccgtcgccgctcaagtcgcaggcgagggcggcccgcttcttccgaggctccgggatggacctggccgcgttgccggtcactgaggcagagtccagtgcggccgcggcaccggtcaaaaagaggaatgctgcattcacgcgagccgttgaggagtgcgtgacagtgatgctttcctctatggggctaagaccgtcgtaa

SEQ ID NO: 16692 - DNA, 468 bp, Zea mays
  Peptide Sequence Number=SeqID_58471
atgctcgccctgcagggccgcggcgcggggcacctcaacttcccagaatccacgcggctgctcgccgtgccgcccccgtccgcgctcccgggcctggacgacgcccgccgggcggcgctcgaggccgtcgcggagttccagcgccgctccggggccgccgacgaagcgacctcgggcgcgtctcctccctcctcgtcgccgtcgctgccggacgtttctgctgctggctcgccggcggcggcgcttgagcacgtgcctgtgaaggccgacgaagcagtggcgttggacttggacggcgatgtgtttgagcccgactggttcggggacatggacctggagttggatgcgtactacgccagcctcgcggaagggttgctcgtggagccgccgccgccagcggccgcctgggatcatgaagactgctgtgactccggagccgctgacgtcgcgctctggagctactactag

SEQ ID NO: 16693 - DNA, 273 bp, Zea mays
  Peptide Sequence Number=SeqID_58472
atggccgataccgtgacgttggagcccaataactttttcaaacgtgggctgatcgtcggcgtcgggtggttgatgcacaggctcttcggcagtcccacttcatcagtcgtcaccgttgacattctaccaaagtcttctccgttgacatctaaacccccgtacatctctcactctcacgcagcagagtcccatggtcgcaacacaggcctgaccgagaagattctgactttttttattcttcttctggcagacagtattaataatttacgttga

SEQ ID NO: 16694 - DNA, 492 bp, Zea mays
  Peptide Sequence Number=SeqID_58473
atggcgcctcctgttgacgtggtcggtccgtgccctaggttgggcgaggtggaggctcctccgaggtcgaggtcgagtctgtcttccaaggtcgaggtcgagtccgagcccccgggtcggacaaggcggagaccgtcggctgaggccagggctgagtctaagccctggggtcaggcgaagcggagttcgtcgtccttcggggctgagcccgagttcgagcctttggggtcgggcggagcggaagttcgttgtcttccggggctgagcccaagttcgagccctggggtcgggcggagcggagttcgtcgtcttccggggctgagcccgagtccgagccctggggttgggcagagcggacctcactctgtcgagtggctcagcagtcggagcggcgcaggcggcgctgtcctcttgtcagaccggttagtggagtggcgaagtgactgcggtcacttcggctctgtcgactggagggtgcgcgtcaggataaag

SEQ ID NO: 16695 - DNA, 1617 bp, Zea mays
  Peptide Sequence Number=SeqID_58474
atgcggcggctggcgaaatccctcctcctcgcctccctctccaggaccctccgccaccgcccccagctcccgctgcttcacccttggcctccccagccccgtcgcccggagccccgcctcctccccttctccactcaaaccctagccccgggccctgctcccccgcctgcgcttgttgcggcgtcgacgggcgagcccacaggcctcgcgcttctagagtccgcggagctgcacgagtccgagggggaccaccaggaggccctcggcctcgccctcaaggcgctcgcgccgctgcaggcgtcccacggcgggtggtcgctccccgtcgcgcgcgcgctccgtctcgccggcgccgcggccacccgcgccggcagcctcagcgacgggctcgagtccctcggcgctgccgcggatatcgtcgactacctggcacccgcgcggcgcaagggggtgcctgcggaggtggcggtggtcggcgctgccgtgtacgagcagctggcgcgcgccaaaatggccatcgggcgccggtgggacgcggtgggcgacctccagcgtgcactggacctgaagactctgttcctggaggccgggagtgctgagcttgggaacgcctacagggacgtcgccgaggcctatgcgggtgtgctggacttcgacaaggcgctgccattgtgttctaaggcattggggattgcggagagacggtttggtgaggactcggcagaagtggctaagctacggcggcttctcatgtctgtctatactggtttgggtcgccatgaggaggctctggctcaaattgagcttgctaaggtggtatatgagcgattgggattgaatgttgaactttctcaggctgaaattgatggggctaatatccgtatcttgttggggagatcggaggaggcgctgaataacattaagagggtaatgcagcgggcagacaaggagagcgaggagcgtgcactagcatatgtcacaatggcaaagatattgatgtccgaggatacggttttggactcaaagcggtgcttggagatcgctcaggggatcatagatgcaaaggattccatcgaccctggtcggtttgctgaggcatatgctgagatatcaatgttgtatgagtcgttggcaaattttgaaacgtcttcgggctcgtttgaaatggcttcgaacttgatgaagaaaacactggcaattcttgagagcgccaaggagatgcatcacatcgaaggcagcatctcagcaaggctagggtggctcctcctgtatattaaaaatgttgatgagtctgtccaatatctggagagagcggttgataaattgaagaattgctttggaccacgacactttgggttaggttttgcttataggaatctggggcaggcctatcttgaaatgaaccaacatcaatcagctgtggagttcttcaaacttgcgcttgatattattgaagctacatttggaccgctacatgatgataccattgacacaaaacagtgcattgcaaatgcatacggactgatgaaaagacatgcaatcttaacactcaactattgcctgctgcgcccagcagatcgtgcatatggtggtgcaaaacactgttttgcactgtag

SEQ ID NO: 16696 - DNA, 306 bp, Zea mays
  Peptide Sequence Number=SeqID_58475
atggacacacctatgccacaggcttcttgtgggaaaggttctgagaagaaatcatacttcatgaatgtaacagctattgtggtgtttccacaattctggaagcttgcacgttgcaagcgcgtccagcggtccagccaagcattcgagtctgaaattccaatcggcgaacgcgatcatcagaatcagatagacagactacacggatttttctccaggaaggtacgacgacagagaacagcgttctgctgttcctttgatgcacctagttcttctcagaacctttcccacaagaagcctgtggcatag

SEQ ID NO: 16697 - DNA, 1335 bp, Zea mays
  Peptide Sequence Number=SeqID_58476
atggagaccggcgacaagcccactacaagccaagggagcacttcatcggaagagtcccacaccaaaaggagggagaagaggaaggtctcctccaaagggaaggagaaaagatcttcttcgcaccacgaagaaaagaagaaggactcctccaaaggaaaggagaaagtatcttcttcacatcacaaagagaagaaagaaaagtcctcttcccacaagccgcatcggagtggcgacaagaagaagaggatgaggaaggtggtctactacgagaccgattcttcatcaacatccacctccggctccgacgcggcatccgtcacttctaagcgccaagagcgtaagaagtatagggatgaagactatgatatggatgaagtggcccaaatcgagcacttcaactcccaagccacaaccattctcctcgcctctctaagcaaggaggaatacaacaaagtgcaagggttgaagaatgcaaaggagatttgggacctactcaagaccgcgcacgagggtgatgaactcaccaagatcaccaagcgggaaacgatcgagggggagctcggtcgctttcgtcttcgcccaggggaggagccacaagatatgtacaaccggctcaaaaccttggtgaaccaagtgcgcaacctcgggagcaagaaatgggatgaccacgaggtggttaaggttattttgagatcacttattttccttaaccccactcaagttcaattaattcgtggtaatcctagatatactcaaatgacccccgaggaagttatcgggaattttgtgagctttgaatgtatgatcaagggctcaaggaagatcaacgagcttgacgaaccctccacgtccgaggcgcaaccggtggcatttaaggcgatggaggagaagaaggaggagtctacaccaagtagacaaccaattgacccctccaagctcgacaatgaggagatggctttaatcatcaaaagctttcgccaaatcctcaagcaacggaaggggaaggactacaaacctcgctccaagaaagtgtgctacaaatgtggtaagcccggtcattttattgcaaaatgtcctatgtctagtgatagtgacaggggcgacgacaagaagggaaagaggagagaaaagaagaagtactacaagaagaagggcggcgatgcccatgtttgccgggaatgggactccgacgagagctccaccgagtcttcctccgacgaggacgccgccaacatcgccgtcaccaaagggcttctcttccccaacgtcgaccacaagtgcctcatggcaaaggatggcaaaagaaggaaaaatctcatacccaagagaccttaa

SEQ ID NO: 16698 - DNA, 654 bp, Zea mays
  Peptide Sequence Number=SeqID_58477
atgggcctcctcggactgtctccgttggtgcctgccgccagctgcggcgagttcgccggctcccaagtggcgttactcagtgtcggagtcggacccagcatccgcgatgaagaacatcaattccaagaatgtgaaggcgaccacaacgccgttcgattctcgtccaacgactacagccatatttcagccagcgtacagatacggatgccttttcggctcctccaagcgacgggagagttctggaggttgcgacgaggagcctccgtcacactcgacgaaagccaaagcaagtgtagccgcaaggatgcgctgatgcgccgtctgctgctgctggtggctggttccaccctggcgtcgcggctgcgggcgtcttccaagtgcgccacaagttccccgccggagttgaagggggcgccggtgccaacaccaacgcccttcgtgcccacgacggccgccgccacagctgtcgacctcccgctcggcggcctcgacctccccactaacacaaggtgtttggatggatgcatgatgcatccctctttcttgccaccctcctacatgtcggtccactgtttttcagagttcactcttttgaaaaaagaatttagggcaccaacaaaacattctgttccaacagtaaagtctcaagtctag

SEQ ID NO: 16699 - DNA, 297 bp, Zea mays
  Peptide Sequence Number=SeqID_58478
atgggcctcgccagcgatgggtcccgcttgcgggcagctcttcgtcgacggcgtgtggcgcccgcccgcgcagggccgccgccctcccccgtcgtcaaccccaccaccgaggctcacatcggcgagatccctgcgggcacagcggaggacgtggacgccgcggtaggcggcggcgcgggcggcgctcagaggagcgtagcgcgactgggcgcgcgccccgggggagccgtccgggccaagtacctccgcgctatcgccgccaaggtgattgagaggtacctgagctggctaagctag

SEQ ID NO: 16700 - DNA, 258 bp, Zea mays
  Peptide Sequence Number=SeqID_58479
atgtctccagacacacacgatgtccccggaactctgtcgggtgatggcttccacagggcgacggcctccacggaaaaccggcgagtcctctctaagcgctcgatctcagatcagtatgtgatggttataccaatttggagagggaaggggttccgatggataaaactgcagcatctgcaccacttctcaatgctatcttggatggagattgacgcaaatgatacaggacttgaaaactcaatgcttggagcactttaa

SEQ ID NO: 16701 - DNA, 732 bp, Zea mays
  Peptide Sequence Number=SeqID_58480
atggattatgctatacttccatcattgatcattcgttctaaatataaaacagctgtcgagtggactctgtttgggtgcttttggaccaatggtcagatttgcagcgcaacatctcgtcttcttatccatacaaaaattgctaaaaaatttaatgagaggatggttgcatgggccaaaaatattaaggtttcggatccacttgaagagggttgcaggcttgggccagttgttagtgaaggacagtatgagaagattaagaagttcatatcgaatgccaaaagccaaggtgctactattctgactggaggtgttagacctgcgcatcttgagaaggggttctttattgaaccaactattattactgatatcaccacatcaatggaaatctggagggaggaagtctttggtccagtcctgtgcgttaaagaatttagcactgaagatgaagccatcgaacttgccaacgatacacagtatggtttggctggtgctgtaatttctggtgatcgggagcgctgccagaggttatctgaggagattgacgctggatgcatctgggtaaactgctcgcaaccctgcttctgccaagctccctggggcgggaacaagcgcagtggatttggacgtgagcttggagaagggggcattgataactacctgagcgtcaagcaagtcacggagtacatctctgatgagccgtggggatggtaccaatccccctccaagctgtaa

SEQ ID NO: 16702 - DNA, 849 bp, Zea mays
  Peptide Sequence Number=SeqID_58481
atggccgctctgccgcggcggaggctcctcctctttctcgcgctgctccgtgttctaatctgcggagcggcgccgttccgggcgagggacctgctgccgctgctgccgcggcggatggcgtggcagctcatgggcgccacggcccacagcgccgtcgacctgctcccgtcgttcgtcggcgccgtggcgccgggcgggcccgcggccgcctggcgcggcgcgtgcttcgacgaaaaccaggccgtgctcgacctcacccccggccgcaacgggaccgccgggggcctcggtggcgccgtcctccgcctcaagactgcttcgcctcagagctggacatgcatggacctgtacgtgttcgcaacgccctacagggtagcctgggactactacatgaggtcgaacgagaaccacaccttcgagatcaaagcgtgggaggacgcggcagagatggaatacgtaaagcagcacgggatcgccgtcttcctgatgccatctgggatgcttgggacgctgctgtccttggccgacgtggcgcctttgttctccaacaccggctggggccaggacgccaacttggcgttccttgggaagcacatgggggcgtcgttcgagaggcgtcgttccgcgaacacaattataaggagggaggacgtgcggtcgggcgacttcttggcgctctccaagatccggggccggtggggcgggttccagacgctggagaagtgggtcaccggcgccttcgccggccacaccgcggttgtcctcaaagatggtgacgccaacctctgggtcgcagaatcaggctacgaaaataacaaggcagttcttgctggttcagttttttcatag

SEQ ID NO: 16703 - DNA, 744 bp, Zea mays
  Peptide Sequence Number=SeqID_58482
atgtcttcctgggacgctgacgactcggcggcggcgtccgcggccgaggcggccaccacggacgtcgagctgctcaagcgggcgtggcgcaacgagaaggccgcgccggagatcctccgcttcgactcgcccctcgtctctcgcgtccgcgagcagacccagctcctcgtacgtcctccttctcgccgccctcctcctccctcttgctacttctccggctctgatgcggattcgctcccgcggtgccgccaggaggagacgctggacgacttcgccgacagtggcgtcgacgacctggtggtctcgctctaccagatggacctcgaccgcacgctcttcctcctccgctcctacctccgcctccgcctgcagaagatcgagaagtacacgatgcacatctcccgctccgaagacctcctcagccggctgtcccagcaggagcgccggtttgccaagagttgcgcggagatcatggagaagcatctggagcagtcggtgctgtcgaagctcccgtacgggtatgactcggtttccaggcagtcgctgtcgagcactgaggatgacatggtgccggagcctcagcttgacaccttcgtcttctgtaagaccaagggcgacgtaggtgcattccagctagatgacattggagaggaggttgtggacctggttgctgatgacttgtatgttcttcggtacaagtccgtcaagggactcatagagggtggccggatcgaccttatctga

SEQ ID NO: 16704 - DNA, 483 bp, Zea mays
  Peptide Sequence Number=SeqID_58483
atggctgtttctcaggtacataatatgcgtgtcaatgattctggatacctggagtgttacttggaatatattgactatgatggggaggatctggattgggttgccgtcttccaagagaacccagcaagctcaagtcaaaattctaaaggaagtactgaagttatgataaggccttctttccctcaatggtattatgggcatgaacctgatcagctcccagttagtgatgtcacagcagttgttgatgaggcctggaaaataggcgatatggttgattggctcaaggacggttgctattggtctgggacaattactaagttactcaaaaaagatatggttaagtatgtccttggttctgatggggtccctactggagttggcagcacactgtcgttcttagtggaggtgcatgttccggtgtggcctgacacgatggagggttcgctcataccctccatttccaccgacccccataccccatga

SEQ ID NO: 16705 - DNA, 927 bp, Zea mays
  Peptide Sequence Number=SeqID_58484
atgttcttcgatgggtcactgatgaagacaggagcaggcgcgggcctgctcttcatctcgcccctcggaaagcacctacgcgacgtgctacgcctccatttcccggcgtccaacaatgtggctgagtacgaggctctggtcaacgggttgcagatcgccatcgagctaggggtccgacgcctcgatgctcgcggtgactcgcagctcgtcatcgaccaagtcatgaagaactcccactgccgcgaccagaagatggaggcctactgcgatgaggttcggcgcctggaagacaagttctacgggctcgagctcaaccacatcgcccggcgctacaacgagactgcggacgagctggctaaaatagcctcggggcgaacaacggttcccccggacgtcttcccccgagacctgcatcaaccctccgtcaagatcgacgacacgcccgagcccgaggcaccctcggccgagcccgaggagagctacccctcgaccaagccgaagctcggcggaactcctacgagagatacactcgggggttgcggccatcacgcggcacctcgagcccttgtcggaaacgccttccggcaaggtttctattggccaacggcggtggccgacgccactagaatcgtccgcacctacgaagggtgtcagttctacgcgaggcagacccacctgcccgctcaggctctgcagacgatacccatcacctggccttttgctgtgtggggtctggacctcgtcggccccttgcagaaggcacccgggggctacacgcacctgttggtcgccgtcgacaaattctccaagtggatcgaggtccgacccctaaacagcatcaggtccgaacaggcggtggcgttcttcaccaacatcatccatcgtttcggggtcccaaactccatcatcaccgacaacggcacctag

SEQ ID NO: 16706 - DNA, 276 bp, Zea mays
  Peptide Sequence Number=SeqID_58485
atgtatgcagattcagacaagagcacctcagtcgcaggaaacactagtcttgcgcatagagatgaaactggtaagtgcaaaagaggatcatcggttaaaggcagcgtctccgaactgggtagcagcacagcggaagaaaggtgtgatacggtagaagtagttatacgtactctacttgcgtttttgcgtaccaatagcaggaacacgtccatccgacaacagcaacaacatcttcatggtatcgaggatgaaacccctacgacgtcgatgcgctag

SEQ ID NO: 16707 - DNA, 294 bp, Zea mays
  Peptide Sequence Number=SeqID_58486
atgggggttgctcggcttctccctgcgaccgtgggcacgttccgggtgtgtgaccactcggggggcacaaactccggtcgcgccgctctcaattcctcgtcggagctcgcgcctggtccctgttccgcccatcgccgtggccacgctcctgtgcctcattccgtcgctcggtccaatttgggtttggtgctcggggatggccaattggatctcggccgtgcctccgcccgtgtagccatggcggcggcgccgctgcctggggtaggtggagaagaaaagaacatgcggcgttga

SEQ ID NO: 16708 - DNA, 453 bp, Zea mays
  Peptide Sequence Number=SeqID_58487
atgtctgctcgtgctatttctggacattgcaaattgcaaaagtgcactcatgttatacacccagtaaagagcaagacatttgaaagctcatgggccacctgtgttgctattgatgcaagcgaaagttggctggtgctactcccaaattgtgtgttccgtctccggggaaaccacgaatcctttaatatggtttcgagaaggagtgtcgacactgtttccaacatggaagccaccacggaggccgagctgcgagagaacgatttctggagcacgcaccacaccaagctcatctgcaccatgggtcgttggccggcgcctcgccaccatggaggtataatactagcatgtgttgatggacttgactgtgctataaagagtctgcagtcaatttgtcagcttattgagacatccaacttgcatgagttgatcaacaagcccatccctggttcctga

SEQ ID NO: 16709 - DNA, 3511 bp, Zea mays
  Peptide Sequence Number=SeqID_58488
atgaaagcggacggcacagagtggtggattacagtggtctacgggccccaatccgatgcagacaagctcctgtttcttcaggaattgagggcccttgcctcccagggacacgagaggtggctggtccttggggattttaatctcatttaccaggcttcagacaagaacaatctaaacctaaacaggcgcctcatgggttcattcaaatccaccatagatgacatccaccttaaggaacttcgtctgaatggccgccaattcacctggaccaatgggcaggctgaaccaaccatgacaagaattgacagattcttctgcacgcccgattgggagcttctcttcccaacctgctacatccactccctaccctccctcatgtcggaccacacccctctgctcttgcaaggagagataatgcgcaaaacaaacagttccttccgcttcgagaacttctggacacgcattgacggattcaaagaagcggtatattcggcctggaataagacgttaccctctgtccagcaaccactcttgcgcctgcacatcaaactggcacgaacggccaaggccatcaaagcttggaggagagtgaaagtaggagacacgaaacttcagctggccatagtcaaggaagtgattcttcgcttagaaactgctcaggaagcgcgcactctatctcttgtcgaactgaacctcctcagaagattgaaagctaaatccttggggctagcactcgttgagaaatcacgaatcagacaaaggtcccgcttgaccgccgtccgccttggggacgccaactcaagattttttcatctcagggcatgctctagggcaaggaagaacttcatccaagccttgcaaactgagactggcttggtcgtcacacaggaaggaaaggagaaggtcatcactgaccacttcatgcagcatttgggcacaacggcccctagagcaaggacgttcgactggaattcgctaggctaccaccacattgatctttcctccctggaagctcctttctcccaggaagaaattaaagagactatcctctcaatgcctcgcgacaaggcgccaggcccggacgggttcacaggtaccttctacagggcatgctgggacatcattaaggacgatttaacagcagcgtttaaccagctccacaatttaaatgggcaaggattcaaacttctgaatgcaggcaacattgttctcatcccaaaaaaaaaggatgctttgcgggtgagcgacttccgccccatcagcctcatacacagtgttgccaaaattttctcaaaattattggccaacaggcttgcgccccacctagacgatcttgtttcaaagtgtcaaagtgccttcattcggaagagatgcatccaggataacttcttatacgtgcaaaatattgtcaggcaattccaaaagaacaaaacaccagcactattcctaaagctagacatccagaaagcgttcaacacgataaattggagctaccttttagaatatctacaagctcgcggatttggtcaccgttggcgcgaatggattaccatcctttttagcacggcgagttccagagccctgataaatggtgttcaaggagaaagcttcgaccacaggcggggggtgagacaaggggaccccctctctcccatgctgttcatccttgcctttgacccactgcaaaggattttagaccttgcttcagagcatggtgtcctgacacctctccctcttgctgcagctaagctcagaacctccctctatgctgatgacgcggctatcttcatcaatccaacccgtaatgacctgcaagcggtcaaacagatcctcaatgcgttcggagctgcaacgggtctaacaacaaattttgagaaaagctccatccaccccatccgttgtgaaaatgaagatttgtccaacatcctccagccgttcccgggatgctgcaaaaccttcccttgccaatacctcggccttcaactccacacccgcccactacaaaaaattcatgtccaaccactagtggagaagatcggacagcgtcttgccggatggaaaggtccactgcttaaccgcgcaggacgcatcacccttgtatcttcagtgctctcctccatgccgatctaccacctaaccatattcccccttgcgaaatgggccacaaagcaaattgataagattcgacgctctttcctatggaaaggcgaggataacgcgcacggggggcactgccttgttaattggaaaacggtggctagaccaaaggacctaggaggtctaggggtgctagatcttgagaaattcagtcgtgccctccggctccgttggctttggcaagaatggacagacagctcaaaaccttgggaggggctccaggtcccttgcaacaagcttgatcgcctgctgtttcaggcatccaccacagtggtgattgggaatggcatcaaagcgaagttctggcaccatggctggctggatggggaggctccacgcaacctggcacctcacctctacaagctgatcagaaggaagaataaatctgtggcccaagaactaactaacagtgcttggattcagtctctgagaaggaaaatcacaaccaccacgcaacttgaggaatttgtctacctctggactaggatccgtcaggatcgcaaaagggagttcaatggcctggtcatctacactatgtggaacctttggaaggagcgcaaccgaagaatctttgagcattgctcgctgccaccgctccagatcgcagagagagtaagagaaagcgacatgaaggccgaaaacacactgagctgggagaaactgtttgacgtagcgactggcacggccagaggactcgagtatctccaccggggatgcaacactccaatcgtgcatttcgacatcaagccgcacaacatcctgttagaccaggatttctgccctaagatctctgactttggattggccaagctatgcccgaacaaagcgagtagtgctgtctccattgttggcgcgagagggacagtaggttacatcgccccggaggtttactcaaagcaattcggagtagtaagtagcaagtccgacgtctatagctatggaatgatggtgcttgagatggttggggcaagggacaagagtacaagtgcagatagtgagcgtagtagccagtatttccctcagtggatctatgaacatttggacgactactgtgtcagtgcttctgaggttgatggtgggactacagagctcgtgaggaagatgatagttgtaggcacggcacggctaactgggctggcacggcctcggcacggcccatttgccagcgtgcgtggcccaggcgcggagccgcaccgccccaccgcccgcgggcgattcggcggtgaccggcgaactctcctctccctcgttccctccgcctccgctaagcgctccgcctccggtgtgatctgcgcttctgcggagatcccggtgctccggcttactccgttgaggaaccgggactcccagtccg

SEQ ID NO: 16710 - DNA, 2019 bp, Zea mays
  Peptide Sequence Number=SeqID_58489
atggatgaccaaggtattcttgcaggcacgctgtcgtcccttctattcttgtgtctagtcattctcacattcttctctgcttacaaatacgggatgctgccattcaaatcgaaggacgaaccaaggatcgagtcctttctacagaagaacgggaacctgcatccaaaaagatacacctacgcagatgtgaaaagaatgacaagatccttcaccgagaagctaggccaaggtgggttcggagccgtgtacagaggcagcctccacgatggccgccaggtagcagtcaagatgctaaaggacaccaaaggcgatggcgaggaattcatgaacgaggtggccagtatcagcaggacttgtcatgtcaacatcgtgacactgacggggttctgcttgcaaggatccaagagggcgcttgtttacgagtacatgccgaatggttcgcttgaaagccgacccccccacctcaacccagctccccacctctctcctccaccgcagatcgatagatcaacccgctacctccctcccaagccctgtctcgcctcggccgacgcgctctcctaccgcgcccccgccctgtctacctccgcctccgccgccggcaggatcacagaggagatctcgcccagcctcagttattgtggttccagaggcttgcactgctgtctcctgccaaccggccacccccgctcccaccaaacatgcactggatggctggacaacggtccggcgcaagcgctcgcatggtgcccgcgagcattcaagacgtccaaccaccaggccgtcgctgccttcaaattcggccagagacaaattgctggccccggccacaaagctcggctctgtcccaaggccaagacctcccagaatacgactgcccagcaaccgcctcccagactccacagcgacgacttccctccgctcgttcaagccaccatgcctcgtccaggcgagccagggacgcgccccagtgaaaccttcgccgtcgctgcttccaccggcgacatggaggcagagctagagaggctctcgacccacgccgtcgtcgcctggctggggcgggaccggcctgagcaccacagggagacggctttggagcgcagggaattcctcttcggcaacctcgacatccgcgttcggcggtggcttccgatgacccaagcagaccctgtggacctcaggtatcacgtccggctatgcctggaggggattccccttcacgcttggaacgagagcattgccaagagtgtggtggcgagggcctgcgatctggactatgtcgagcttcagtcgctgaggaaggaggacacgcgcgccctctgtctctgggcctggacagaggacccgtcccgcattcctaaggtaacttggctaactatctcccgcagatcgtcgttggttcgagatggagctactccaccagctcgtcgctctggctcccacttccgagtcatcgtccacctcgacctcgtcgaggatccaccggaaagtgacggccgctgctccacccgcgagttcaggtgggcgttgggcgttgttgacggggagcgcacacctcgggatcgccacgacccggctccggtcgccattgttggtcgccgtgacgaggatgatgacgacgaagagcgtcgcggtcgccgcagccgtaaagaggactcatggagctcccgtctcttcaggagcctttcacgcgctccccatagggagcgagaccgctcggagccacgcagggatcgccatggcgacagaagatcgaccaccggcggccgccggcaccttacttgctctgtggatgacagcttgctgcagcggaacgggagcaagcatgtcagcctggacgtcttccccgaccgcgtcgcgccacgccagcctgtgtgcatagatggctctgcaacaagtggaggcggccgagagcagcggcatcgccaaccgagaacggatgcctcgtcgacgccctgggaggcgcgcgcggtccgtacctcgacgtcaacacgggaccggtctggactctaccgctga

SEQ ID NO: 16711 - DNA, 939 bp, Zea mays
  Peptide Sequence Number=SeqID_58490
atggcggctttccgctcgctacggcgccgtctgccgctggcgcttctcctcgccgtctgtgttgccgcttcgcgtagcgacccttccggcgacgatttctacaaccgctccatatgcaagctgcaaccatacagatgcggcgaagtgaatatcacctacccgttctacctttccgacgacacggcggacgtcctgggcaactcctcctcctactgcgggtaccctgggctggccatcgactgcgtggacgacgagtaccccaccatacagctcggcggcaacagcagcaacacaggctactcctacaacgtgacggacatcgactatcccacctccaccatctacctcgccgacccggacgtcctcgacgacgcgagctgcccgcgggtcgaccacaacgtcaccgtctcgccatcgccgaccttgtggctcaacctgtcggactacaccgtccgttacctgctcttcttcgccaactgctccatcaacgttctccacgttcccaaccagtctgacatcaacccgatcgcgtgcgcaagcggctctgacggcgactactctttcgtgatcccttcggagatgccccaccagcttctgctgcagatgtgcagccaacaagtgatcctagtgccggtgctccagaacgcctcgctgacgccggtcgatccgcagtggagcaccagcgggtaccgcgacgctctcaagcagggcttccagctgcagtgggactcggacaggaagaccgagcggtgtgccgagtgcgagggatccaatggacggtgtggctacaacagatctggggaattcgtgacttgcctgtgcgccgacggccacgtgagcgaccatgaatgcaccaaagattccagttcaaagtggcgtcatgacctatctgatcacaggctcacagcaagcctgcagctgtacgtgggatgcaaataa

SEQ ID NO: 16712 - DNA, 945 bp, Zea mays
  Peptide Sequence Number=SeqID_58491
atggctcccctgctcctgctcctccccgtcgtccagctcctcctggccgtagccgacgccgtccccgattcctgcgccaaagccacatgcgccggccatgagatacactaccctttccggctggactcctctatgcccgacgactgcgtggtgtaccccgtccccgggatcggcctcatctgccaggacaactccacgctgatcctcccctttgagtcgcacaggtacacagtgctgagcatcaactacaaggcgcacaccatcctagtctccgacgccgacatcggcgacgagtacgcggcggcggcggcgggcgccggctgcccgcgcctccacgtgaacctgaccatggacgccttctggctgcggctgtctccctccgactccaacatcaccttcctctacaactgcaagaggaacgtcaccctgccatccgccgtggagctgagcgggtgccaagatggcaacgacgacgacgacgacgacagcaggtcgccgtcgccgtcgtactcgtacgcgctgcgggacggcggggtcacgggcgctgaggcgcacgagctcgagtgccaggaggtggtggtggcgccggtgctggacgtgcacaagagggcgatcgtgggcgcgcccggcggcccgcctccgcctccgggggacgggtcgtcgccgttccgcgaggtgctgcagggcggcttcgagctgagctacgacacccactcccggcagtgcgaccggtgcgagcgctccggcggatggtgcgggtaccagcgcgctggagcgacgacgcccgccgccggcgcgagcgcgacgatgaccttcacctgtttctgcgagagcggcccggcctcggatcggtgcgataaaagtggtgtgttcagactcacagaaatcggggttcagaaccaggacttcctttcctgcgatttccccttttcagaactagtttag

SEQ ID NO: 16713 - DNA, 207 bp, Zea mays
  Peptide Sequence Number=SeqID_58492
atgaagaccgagcggtgtgatgactgcgagagatccagtggaaagtgcgcctacaacacatccggggagttcgtggcctgcctgtgcgccgacggccacgtgaccgaccatggctgcaccaacggtagccgttggcgcgaagtagccgttgctccgaggatgcaccggacagtccggtgcacaccggacatgtccggtgaattatag

SEQ ID NO: 16714 - DNA, 1095 bp, Zea mays
  Peptide Sequence Number=SeqID_58493
atggcggctctctgctcgccacgccgccgcctgccgctgccgctgctgctgccgcttctcctcgccgtcttggttgccgcttcccgcggcgacgacccttccggcgacgagtacttcaaccgctccatatgcaagctgcaaccatacagatgcggcgaagtgaatatcacctacccgttctacctttccgacgacacggcggacgtcctggggaactcctcctcctactgcgggtaccctgggctggccatcgactgcgtggacgacgagtaccccaccatccagctcggcggcggcagcagcacaggctactcctacaacgtgacggacatcgactatcccacctccaccatctacctcgccgacccggacgtcctcgacgacgcgagctgcccgcgggtcgaccacaacgtcaccgtctcgccatcgccgaccttgtggctcaacctgtcggactacaccgtccgttacctgctcttcttcaccaactgctccgtccacgttctccacgttcccaaccagtctgacatcagcccgatcgcgtgcgcgagcggctctgacggggacgactactctttcgtggttccttcggagatgccccaccagcttctgtcgcagcagtgcggtcaagtaaccctggtgccggtgcttcagaacgccacgctgacgccggtcgatcccctgtggagcaccagcgggtaccgcgacgctctcaagcagggcttccagctgcagtgggactcggacatgaagaccgagcggtgtgatgactgcgagagatccagtggaaagtgcgcctacaacacatccggggagttcgtggcctgcctgtgcgccgacggccacgtgaccgaccatggctgcaccaacgaactagccattctgaccagttcttgtcctaatctggacgcgatgtgtgctgctgtggaacgctctctgtccaccagaacgtcaacagctcggaccgcgcgcgctcatttctccacggctgccgtcggcgggaatgagacagaacttgaccagggccagggccttcggcttctccgcgtactccagtctgcccatcgcagtcgcaggcacacaccttccttctag

SEQ ID NO: 16715 - DNA, 2439 bp, Zea mays
  Peptide Sequence Number=SeqID_58494
atggccggcggcgacggcgatcggcatcgcgcgccgaagcggcacaagtcctcgacgccgtcgaaagcggccctggtggacgagagcgccgagttcgactacgctgatgactttgatgacgacgcccacgatgctgatacggaggttaagaagagggattttacgaagctcgagttgaaggtggaccacgcgagccgtccgctctgggcgtgcgccgacggccgcatcttcctcgagaccttctcgccgctctacaagcaggcttacgattttctcatcgccatcgccgagcctgattcccttggggcaccttcatttactgttagcaagacatctggccaaatagctagtggacatgaagacctgttaaatggaatggaaattgctgctgcaactgaagacaaggaaacacattcttttgagattgatccttctcaggttgagaatgtcaagcaacggtgcttaccaaatgcattgaactatcccatgctggaggagtatgatttcagaaatgacactgtaaacccagatttggatatggagctaaagccgcaagcacggcctaggccatatcaagaaaagagtctcagtaaaatgtttgggaacggacgagcaaggtctggaattattgtgctaccttgtggtgctggcaagtccttggttggtgtatctgcagcctgtcgtattaagaagagctgtttatgtttggccacaaatgctgtctccgtagatcaatgggcatttcagttcaagctttggtcgaccataaaagatgagaacattagtcgttttacatctgataacaaggagaagtttacagggatggctggtgtggttgttactacatataacatggttgcattcggtggtaaaaggtctgaagattcggagaagatcattgaagaaatccgaaacagagagtggggcttgcttctaatggatgaggtccatgttgtccctgcacatatgttcagaaaagtcatcagcattactaaatctcactgcaagctgggtcttactgaagtatggtgtcctatgaccaaagagttctttgctgagtatttgaaaaaggaaaattcaaagaagaagcaggtcggtgataactcgattgatatcccagaagctaatgttatcatacaaatatcatctcacgctggttcgagacgtcaagaagctcagcgtctgggccgtattctcagagcaaaggaaatgtactactcaacaaaaaggcagcagtttcttattgaccagggatatagcttcaaggttatcactagtttgccgccggctgaagaaggacctaatctgagctattacacacttgatgaacaacttgagctcttgagcatggcgctgaatgcaggggatgacatgattggtgttgagcgcttagaagaagattctgatggcaaggctcttattagagcacgacgctctgccggatcaatgagtgccttctctggagctggtggaatggtctacatggagtacagccgcaagcacgaggctgtgagcgagacagccaaggtgctcatcgactccagccagccgcccaaagccagccgcccaaaaagccaggcgcaaatcacaacctcgcctcctgtcccctccccggctcctcgttcccctctcgccgctcgcctccccgccgagatcgaggaggcgccaatagcgagagggtttcctcttccctccacggctccaacgagcccccggcccctccgcctcaaatcccacgcgcccggttggccgccgccccccgccatggatgtggatctgtggatctccaaggtcaaggagggccagcacctcgccgagcacgagcttcagtcgctctgcgaatacgtgaaggagatcctcatcgaagagtcgaacgttcaaccggtgaatagccctgtgacggtttgcggtgacatccatgggcagttccatgacctgatgaagctcttcgcgacggggggccacgtcccagagacgaactatattttcatgggtgattttgtggaccgtggcttcaacagtctggaggttttcaccatcctgttgctactaaaagcgaggaagtatggcaacgccaatgcatggcggtattgcactgatgtttttgattaccttacgctatcagcaatcattaatggtcaagtcctctgtgttcatggcggtctttctcctgatatacgaacaattgatcgcaattgtgaaattccccatgaaggtcctttctgcgaccttatgtggagtgaccctgaggagatagagacatgggctgttagtccccgtggagcaggttggctgtttggatcgcgcgtcacagcagagttcaactttgttaacggtatcgagctagtttgccgggctcaccagctggtccaggaaggcttaaagtgtggtctgcacctaattattgctacagatgtggcaatgtcgcttctatcttaa

SEQ ID NO: 16716 - DNA, 264 bp, Zea mays
  Peptide Sequence Number=SeqID_58495
atggcggagtgcgcggcggcgtgctgcgtgctctgcgcgtgcctccccgtggccgtgctctgctgcgtggcgcgcgccccgctccgcgtcgcgcggcggtgctgcggcaggtggacgcggcggcggctcgcgccgggggtctcgtcgtcgttctcggacgccgaggtcggggagttcctgcagggcggtgccggcgggcgggcaatgggggcagcagccctcggcgcggtcggaggaggtagcgccaagttagccagttactga

SEQ ID NO: 16717 - DNA, 264 bp, Zea mays
  Peptide Sequence Number=SeqID_58496
atgcccctggctgctcgcgttctccccttgcggcttgcttcgcttccgattaagagattaaggaagcagcccgcggattccctaggagatggagcactccggaagcgccttctcaagagtctccaccgcaccgcaaggatggcgttcttgaacgtctgtgccctgtccctgtcctccgcggtcttgaacttgaagcacggctcccacgatgggaagaaccgcaaacaaattatacacgtcgatgctaaaatgccgagatcgtaa

SEQ ID NO: 16718 - DNA, 1704 bp, Zea mays
  Peptide Sequence Number=SeqID_58497
atgagtctcacggggtccgccctggaggcggcgctacaggcggtggggcgcggcctcgacgcagctggagaccaccggctgctctactgcaagggaggtggaaggctcgtcgcgctcgaggaggaccgtgcgcgggacctcccgctccccgacggcggcgtcctcccgagcgtgccccccgatgtcgaggtcgagcagtgccgcagagaccccgagcgcatccgccccttcccctctggcccaagctctgccgcagcggatgggccctttgtctgcagcttcgataagatggctgagtatttcaacaggaagtcatgcttgtccgagacagtaccgctgggttccttcaactctctgttcagcttcaccggttcatggaagaatgatgctgcggctacgaaggcccttgcgattgatggctattctctgcctctgtttcgagtgaaaattaggagttctgaactgacgctgcttgagagcgttaagcacgcgatcccaaatgtttgggatccatcagcattggctagctttattgagaattacggtacccatattattatttctgttacggttggtggtaaggacgaagtatacattaagcagcattcatcgtcccaattgtcagggttagagttcaaaaattatgtgagggaaattgggagggaaagattctcagatgtggaaaacaagtcaaatgcaactcctatcaattacagcgagaagaagtgtgtggtcttctctggactaaggcaggatattacagtaatattcagaaggaggggtggttgtgatcttgttcaaagttttagtgattggaaaggaactgttgcctcagcaccagatgtcataggcatgacctttctttcaattgtctctcttgttgacgatgtaccaggaaagaagcaccttgctcgtgcagttgagctatacttgacctacaaacctccaattgaagaattacagtatttcttagattttcaagtcccactagtttgggctccagctccaccaggtattgctagtcaccataggaaggaacctgtctgcccatcgcttcagtttagcttaatgggcccaaagctcttcattagcacagaacagatctctgttgggcgccgaccagttgttggcctcaaactgctcttggaaggagctaaacagaatcgtttggctattcacttgcagcaccttgtctcattaccaaaaatattcctacctcattgggactctcatattaccattggacctccaaaatggcaaggccctgaagaacaagacagccgatggttcgagccaatcaagtggaagaactttgctcatgttagcacagcacccatagagtacactgaaacaaatattacggacctatctggtgtttatattgttacaggtgcacagttgggagtgtgggattttggtgcaaagagtgttctccacctcaaacttttgttctccagggttcctgggtgcacaattagaagatcagtgtgggaccacagcccatcaagttcttcaattcataaagcagatgaatcttcatcgtcctcgagtgataatgctaaacttctgaagattattgacatgacagaaacattgaagggcccacaagatgcacctggccactggctgatcacaggtgctaagttgggtgtcgagaaaggcaggattgtagtgcgtgcgaagtactccttattgaattattaa

SEQ ID NO: 16719 - DNA, 1434 bp, Zea mays
  Peptide Sequence Number=SeqID_58498
atgccgtcgtcgacgatccgaagcatctccatcaccgtctccgacgacgacggtgctgcggcggcaccgtcacggcggccgcgcgctggaagacggaaggcggtggcgcgtagcttggggcagcgggcggtgcggctggtggcgcggtggtggcccgttctcctgctcctcccggccgtcgcgctcctcctcttcgaggcgtcgcggctccgcgcctcatccccgggcccctccccaccggtctccagcctcggacggctcgacccgaccacacgtctcgtccatggcgtgcgcgagccttgcttgaagctccttagccccaaaagtttggcaaatgtggtgttcccggagggtacaagactcgattctgtggtgagcagaatcacgtacaaaactgatgacgatgactatgacacataccactccgaagcaaactctacatatttactgcaacatgcggaagcaacaaggttcgacctgtttacaggatttcagacacttgctgaaagagaagatagcttcaaggtcgtgaatgagactgttagtgtgcactgtggtttctacagcgacaatggtggcttcaaaatttctgaggaggacaggagatacatgagagcctgtaaagttgttgtgtctacctgtgcatttggtggtggggatgatctatatcaacctattggaatggccaattcttctattggcagggtattgcattctccattattttcagaattgaatgtcagagtttgctatgttgctttctgggatgaagtgacactagcagctcaggaagctgaaggaaaggtaattggtgatgatagcatgataggaaggtggcggatcattgttgtcaggagcctcccttttgtagatcaacgattaaatgggaagataccaaagatgttgactcatcgccttttcacagaggcaaggtactctatatgggttgactctaaataccaattacgaagagatcctataggaatgcttgaagctcttctttggaggacaaactctacatttgctatctctgaacatggagcacggagtaacatatatgatgaggggaaagctattgttcaaaagcacaaggctacccctgaagaggtagaggtacaattgactcggtatcgtcaagatggaatgccggacacaaaaagattgcacggactgaaagctctagccgaagcctctgttattgtgagggaactcacccctgcaacgaaccatttcatgtgtgcttggtttaatgaagtggttcgcttcacatctcgtgatcagctcagttttccatacgttttgtggcggctaaacatgcatggattgagcatgtttcctgtatgcactcgcagggatcttgtgaatagtttgggtcacacaaggaaagtaaaacctcttacacagacaaattcagggtcttctactacttcgtaa

SEQ ID NO: 16720 - DNA, 1644 bp, Zea mays
  Peptide Sequence Number=SeqID_58499
atggccagcttgtctctggccgtgaacctcatgatgtacttcctgggcgtcatgcacttgaaccttgaagacgcttcaaacctgctgaccaactatatgggtgccagctacatgatctccgtgctcatctccgtcttcgccgacgtcttcgtcggccgatacatgactgtgatcctatcatcactggttgagctcgtggggctcctgctgctgatgctgcaggcgcgctccgaccggctgaagcctcccccgtgcaaggaccccagggacccgacgacgtgcccgcgggtgcacggcagcaacgaggtgcacctctacctggcgctgtacctcatcgcgctcggctcgggaggcatcaaggcggccctgccggcgcactgcgctgaccagttcgacgccaagcaccccagggagaagctgcagatgtccagctgcttcaactacctgctgcttagcctctgcaccggcggcgccttcagcgtcaccgtgttcgtgtggatccaggagaataagggatgggcgaaggggttcgccgccgccacgggcgtcatggggctcgccgtcatcgtcttcatcgctggcctgccgaggtaccgcatcgccacggtccagggaagcagtgcgctgaaggagatcttccaggtgtacgtcgccgcagtcaggaacaggaaacagcagctcccggagaacccagacgagctgtacgagatcagcaagaacaaagcttcgcctgacacggagttcgtggcacacagggataggccgttcagattcctggacagagcggccatagttcagacagcgaaggacgcggcggcggacccgtggcgtcagtgccgggtgacgcaggtggagcacgccaagacggtgctggccatggtgcccatcttctgcagcgccatcatcatgggcacctgcctcgcgcagctgcagaccttctccatggtgcaaggcagcacgatggacacggcgctgggacggcatttccagatgccggtggcctcgatgcccatcatcccgctcgtcttcctcatcttcgccgtccccatctacgagcagctgttcgtgcccttcgcgcgccgcctgacgggcatccccacggggatcacgtacctgcagcgcgtgggcgtcggcctcgtgctctccatcgtctccatggtcatggccgccgtcgtggaggtgcagcgcaagaaggtggccgagaggcacggcatgctggacatgatccccgggttccagcacctgcccatgtcctgcttctggctggcgccgcagttcgccgtgttcggcatcgcagacatgttcacctacgtcggcctcatggagttcttctactcgcaggcgccgcaggcgctcaagtccatgtcgtcctcgttcctctggtgctccctgtcgctgggctacttcatgagcaccgtcatcgtgaaggccgtcaacaaggccaccaagaagaaaacggcgagcggcggatggctcgccggagagaacatcaaccgcaaccacctcgacctcttcttctggctgctcgccgtgcttagcaccgtcaaccttttcaactatcttttctgggcaagttggtacaagtacaagcctcaggagaagacgctcgccaccgagaacgagaagcagcaagagcaagtgtga

SEQ ID NO: 16721 - DNA, 480 bp, Zea mays
  Peptide Sequence Number=SeqID_58500
atggaagaggagaccatgctgcttcgcaaacaagtggaggagactgaagaattccccagaatagaggaggtaggactcagggaggaagagaggagagttctggtcgacaagagagagatgggaacagttgcagcagcatataccgaagatgcctttcccaaaatggtggagaagttaaggttggaggttgaagagtgtgacctagtaaggatacaggtggctagtggtgatgtgatggtgagcaatcagaggatgaaggaagtgaagtggtggactggagggcatatctttacttttcccatgagagtattggatattgggggaaatgaggtttgggcttttgtgttgctggaacaggtggtgcctgagaaagaagaggagaacaaaccattggctttcttgagtaaagaactagggatgaagaataaacaactctctagttatgagaaggaatttgtggccttgattctagcagtgtaa

SEQ ID NO: 16722 - DNA, 186 bp, Zea mays
  Peptide Sequence Number=SeqID_58501
atgctgaatgcccaggcctacatgccattggtgctggcaagccttggtattgtccgtggatttcaagaggaggaattaccatcaatatttaattgcatgaaggctgctattcagttatcaaaggcaggcaatgctgcaatcattgttgatccatcaagcatgcaaatagttgcaaaggcccactga

SEQ ID NO: 16723 - DNA, 762 bp, Zea mays
  Peptide Sequence Number=SeqID_58502
atggcccagagagggaggggagaggataggtacggggaggctgccaggcgaggtccaccagtcgggctcgccatcaacctcggccacgcacatgtgccattgccggtgatcaccggcggctactcatcggagaagggaggacgggggagagagagaaagaactccagcggggaaattcacctcgggggaagcgcggacggtggtggatcacggtcaggaatggtggacgggccttgccgtgggggtttcggggcgcagacgactcgacagcggaggagcttcggcgagcttgaaagcgggcgcgcgcagctcgggtgggggcgccgagacaaggagagtgaggcggggagggaagtgggcacgggcagcggcttcaaaagggatcggggcggcgaattcacacagaggcgcgacgtgggcacgaccgcctcgatgtgcatgagcgcggctcgtgcgggcgagcggttgaaggaggggagggggctgctagagagcgagggcaagcgggttggcgccgacaagccggtcccaccggtcagagggggggcagagctgggccaactgggccaaaaaggctgggaggggagggagaggataggtgaaggcaatcaggggcgtggcaccactgggtcgtgcttgggcatgcgtgcaacaacgagcgagcaggacgaaggcaggagcagcgagcgagtaggggcacaggaggactcgatggtgggcgggcagacgagcgtgcaacgacgtgggggctcgatgacgtag

SEQ ID NO: 16724 - DNA, 333 bp, Zea mays
  Peptide Sequence Number=SeqID_58503
atgggtagaggcaggaagggtcgtggctggcctcgtcgtggcgacaacaagcgcaagcgtgcctcgagtcccccctcggaggacttggactcggagtactcagaggagtggagctgcggcgacagtgacgacgagggcgacgacagtggcgacgactgcggtgagggtgacgacgacgatgacggcagcagtgaaggcgacgacgacaacggtattggtgataacgacaacgatggtgacggtggcagcaagggcgacggtggtgacggtggcagcaagggcgacaacgacaatggcaatggcaaggccagtggcatagcgccattggtctaa

SEQ ID NO: 16725 - DNA, 1326 bp, Zea mays
  Peptide Sequence Number=SeqID_58504
atggcgagcggcggcggtgctgcggcgcggatggacccggaggtagcaacagagctggtgcggaagggtgccaccctcctcctcctcgatgtcccccagcgcaccctcttcggaatcgatacccagatgttctctgttggacccaagttcaaagggatgaagatggtgccaccgggagcccatttcgtctactactgctccccaaacagagaggttattgcacctattattctttatagaattaaagtgcatgctattcttttagttattgacagttcatcacctgtgattgttcgaaagtgggatgtgcaagaggaacgattaatcaaattatcagaagaagaggatatcagatactcagaagctgtaagacattttgaatttgatgatcaacttggaccatacaatttagattcttatggagattggaaacaactttcggactacttgtcaccgaatgtcattgagcgtcttgaaccaattggaggagaaatcacaattgcgtgggagtcatcatggatggataaagctccccaaagtgacatggagagacgtttggtggaacaactaagagaaggaaagtttgcaaagaatgctcctgtacagtctgggcggagaggatgctactacacaagtatccctgcttcagttaagcataaggacatctctgggggtgacttgacagccctaaacttggacaaaacaagtttgctggagactattttggccaaaaattatgaaggtcaagaagatctattcttgggggagcttcagtttgctttcatagcttttatgatgggtcaatcactagaggcttttatgcagtggaaagcactagtcagccttcttttgagctgcagtgatgctccccttcatacaaggactaacatgtttataaagtttataaggacattatactatcaactcaagcatggttttcaacatacccaagattccaaaagtggggatatgggcaattctctgtgtttggatgaaacatggttttcaagagacatattcctgtaccgtctttcaaaggatttctttacagttgtatttgaagccccagtcgtggatggagaccttctgtcatgggttggcattcctgaaccgatatgtctcacatttccttcccatatgcaggctaggaaactaaaatcgcttctggagactacgtttgggtgggatcttgaggacgacgcagtgaaccttattgatgaagatgacgaggtacagtggtgcgctgacttgtatgaagttttactgcttgtgctgacattgaatatacgtgctaattatcgacttggtttccacttgactgtttaa

SEQ ID NO: 16726 - DNA, 747 bp, Zea mays
  Peptide Sequence Number=SeqID_58505
atgggtcgcgcgtccgacgattattttaatcgtttctcgtcaacgagcttagggaaggtgtttttcggatcttcggcatcccaaagcttagaagatttttcacggatcaagctcgttacgaaaaacgatctagcgccgcaaaggggctactgttgggggtctattcttcatcaggtgatatgttttccaaatctagaatgtttgatcacacagcccgtaccgggcccaagtgaatatgctgtaactggaaatgatgctggccgaggaacactaatagctgctttagctgaagctgcatttctcattggattagaaaggaatagcgacgtggttgagatggcaagttgtgctccactctttgtaaacggcaatgaccaaaggtggaacccagatgctatagtctttaactcatggcagcactatggatgtccaaattactggatgcgggtcttcttcaaagattcaagcggcgctacacttcatccgtccactattcaactaccgaactacgaccaactggtcacatctgctatcacttggaataacccacatgatgggaacacttacatgaaaataaaggatgtaaattttggaagcaaagttgttagtctgaatatatctgtaactaggttggaaactgatattcagacatttggatctataaagacagttctcacgtcgggttggctgcgggatgagaactccttccaacagcccgacaaggtggtgccggctgcagtccaataa

SEQ ID NO: 16727 - DNA, 354 bp, Zea mays
  Peptide Sequence Number=SeqID_58506
atggccggcccggctccgctccaactggcaactgctccgcgtgcggtcgtctcgactgcatgcacgtctggcactctgccggaccggccggctgctcgctcccacaggccacagtgcagtgaacaggagtcaagaggtcgtcattactggagcgcactcattattaccatcggagctgctagggccacaacatttgttgcaaactacactcactatacatctcagcgggtcaccatcgatccatatgttgcttccacaacacaaaagacaatcattgatagacgacttgtgaagaagggaaacaccgcagactacaatgtgctcaagaagcgatttcctgtccctcaagcttaa

SEQ ID NO: 16728 - DNA, 243 bp, Zea mays
  Peptide Sequence Number=SeqID_58507
atgtacatcctcgacctcgacctaaccctacaagtagatcgcgggaggaccggaggagcaagcgcagccgcgcaggacggcacaaagcgtgccgtcgcagcgcttgcgattttccctctcgctttggtgattgcggttgcgggttgggatttcgggcattcttgtgcttttctcactctctcgtggatggagacgaagaaagtggagtctgtccctggtcataatcacgcggggagtggatga

SEQ ID NO: 16729 - DNA, 336 bp, Zea mays
  Peptide Sequence Number=SeqID_58508
atgaggcagaggcaccaattcaaagcccatagggtagctggagacgagaacgaaagcggggaagagggggactcatggaaggtgatgttgaggacgaggagtgagtatgtgtcgtggatcggcggtggtccgaatcgaccgaagtgtgacatctcgccggagtcggaggcggcgtgggatgggggtcgagttgcggcaggtatatataacttactgttggtggtgaccaggcagtcagacttcatcattggtgggcgtgatcctggacacaacaccatccacctccgtggcctgttggtggatgtcaggcgcgacgacgacctcctcttctcctag

SEQ ID NO: 16730 - DNA, 336 bp, Zea mays
  Peptide Sequence Number=SeqID_58509
atgagctgtggtcggtggccgccgagaatgtgggctcaactgcggttgtcaccagtgttctcatcccatgttgtggtcaccaactgcggatattcagatgtcgttctccaccatggaaaggagccaatagagtcatcgattgatcacaagtctgacagtaaggatgagcaggcgaggattgaggcgctgggagtgggatgcaaggtcatccaatggaacggctatcaggtttgtgaagttgtgtccatgatagctaccctgaggggtgcatggggtgtaggccctaattacctgaagttcccatctattcttttgctctctgtttctactttgtaa

SEQ ID NO: 16731 - DNA, 564 bp, Zea mays
  Peptide Sequence Number=SeqID_58510
atgaaccatgggaccacggcagaggcatcctccatctcagtgagacagccgctcgtggatgcgcagcccccataccgaccgtggtccatgaggttgatgctcctcttgccgtccgcggcgccggcagtagcaagctccagcttctcgaaggaggcggcggcggaggcacggctcgttcgcggatgtgaagccagggggagagaagctcagctgcccagctatagagaggagaggcagaacacgcctaataggtgtgcagcggcggcagcagcatggaaaggaaaaaggcggtggcatgggaaggaagacgacgacggtgtggtgaggagcaggcggggccaggccgagggatctggcacggtgggggaggcttggattgcggcgaccgccatggatggaaaggtgcggtggggaggcgcggattgcgactctggcatggtcggggagcaattgagagcggctgtggcgtggtgggagcgcatccgtgcgatgaggagcggagggagaggattgtgcgacagaacatggcgcacgattgtgaacgcctacattgaagccttatag

SEQ ID NO: 16732 - DNA, 543 bp, Zea mays
  Peptide Sequence Number=SeqID_58511
atgaccgttgcttcggaggcgcaccggacagtccggtgcacaccggacagtccgagtcgaccgttgcgtgcagatagccgttgctctgctggtgcaccggacagtccggtgaattatagcggaggtgcgcctggaaaacccaaaggtgaagagttcgagttgattcaccctggtgcaccggacattgtccgcaataactatgttgcacattacacatcctattgtgttttgattgaaatggtaataactgaagagctaggaatgaaccttgagaatgttgagcctcacatgctgggttcatgcaaaaagctaattttattccaaccacatgttttgaaaagaaatccatttaatgatcatttactgttaacaaatgttgatgaggaaggacatctatatggggtttctggaggttctgggggctatgcagaaacaatctttctggtaataactgaagagctaggaatgaaccttgagaatgttgagtctcacatgctgggttcatgcaaaaaggggtcattggaaaagaaacatctgctgtaa

SEQ ID NO: 16733 - DNA, 408 bp, Zea mays
  Peptide Sequence Number=SeqID_58512
atggctagtttggtcttgagtctcttgacaagccagactaatgtcgcgaaggatccaaatgtccatgttgaagatgggagcataggccatacaaccagaaagttgatgtctacagtttttgccattgtcctgtgggagttagtgactgggaatgtcccctttgcaaacatgagcgcagtgcaagctgcatttgctgtggttaacaagggcgtgcgaccagccataccccacgactgcctccctgcccttgcggagatcatgaccatgtgctgggacacaaaccctgaagtccgtcccccattcgctgagattgtgaggatgctggagcaggtggaggtggaggttctgaccactgtccgtaaggctcgcttccgctgttgcatcgcccaaccgatgacgctggactga

SEQ ID NO: 16734 - DNA, 237 bp, Zea mays
  Peptide Sequence Number=SeqID_58513
atgacgcacgcccatgatgcgggtgtagctgcagtccgaccgattgaggtggggtgggggtggcgaggtcggtttcatgttcctgtctggggctttcgatttgcttctggaaagatggcaccaattcaccccaaatcaccagtcactgaccagtgggaccaggtaatcaatcgccagacttttgggagctctgttgggggggaccggggggaagagccaagttactgcagaggctaa

SEQ ID NO: 16735 - DNA, 180 bp, Zea mays
  Peptide Sequence Number=SeqID_58514
atggcgcggggaagacgtccatgggctcagtgggtagctccggcgtcggaagaacaaggaattgctcaacggagcacctgctccgccgcgggtccgtctggtgccatggaccactccctggtcgccgtctctgactacgagccccctgggcttctggaaaatggtgtccgcagtccataa

SEQ ID NO: 16736 - DNA, 330 bp, Zea mays
  Peptide Sequence Number=SeqID_58515
atggcggaatcggcggcagccgatgccagagcgcacgacgagggagcttcgcagttcgacgaggctatagccgggcgaattctattgctggactgcttcgcggccaggacggttgccgcgacgcgcacgacgtcgccacaccacaccaccgccacgaccagagaacaggaggagcggccaagcggagctcgcagctgcgcgcacggacgaccaggggagcgcgcggcatgggcaggggcgagcagggcgctggagctgggcgccgagcgccggccaagggagagggagctatgctgccaggacgagcagatcggcgtgacgtggctatga

SEQ ID NO: 16737 - DNA, 249 bp, Zea mays
  Peptide Sequence Number=SeqID_58516
atgctgctcaaagagttctgtggtctcacagttgtacctatcggcagcaggtgcacgacacgacgtacaggcaccttcccctacgtcctcgtggagaaagcaagacaagtgttgttccaggttatgaacgccatcgccgagtggttggggaacgtcaagccgtgcgggtgcagttggtgtcgccgtcgtcgctgctcaccttcaccggcgccccggggggaccagaaggtggtggatgaacttcactag

SEQ ID NO: 16738 - DNA, 225 bp, Zea mays
  Peptide Sequence Number=SeqID_58517
atggatgggagagcgcagagacgtcgcgccatggttgaggacgcgtggagcagcaagctcgcaggggccgacggctatggaagacgtaggggcagggagaagctctgcgcctggggagaagggcacctgctctcgctgctggactccgaggggagcaagaagtcggccagggagcagaggaggagaaggggtataaatagaggggagttctacaacttttattaa

SEQ ID NO: 16739 - DNA, 291 bp, Zea mays
  Peptide Sequence Number=SeqID_58518
atggcgcggggaagacgtccatgggctcagtgggtagctccggcgtcggaagaacaaggaattgctcaacggagcacctgctccgccgcgggtccgtctggtgccatggaccactccctggtcgccgtctctgactacggtgagtacctagtccgtttcgccgttgttctaattgtgcgtggggaccttcgattgacgtcgggggagccttgctcggctggaccgcgtggctccggcggggtcgccaccatggacatcgggcggcgccgctgtctagctgggaaggggtag

SEQ ID NO: 16740 - DNA, 132 bp, Zea mays
  Peptide Sequence Number=SeqID_58519
atggctaggggaagcggggccggattttatactgaggtagagtccgcgttcagggaggccatggccgagaatctcgccggcgccgttgcccgagatccctggcagcacaaccgggattcaaactatgtttaa

SEQ ID NO: 16741 - DNA, 462 bp, Zea mays
  Peptide Sequence Number=SeqID_58520
atggccttctacaacgccagcaaagcagcgcagctgaggttctacgagacactgagaaccgaggtgggctccgaggtcggcatcaccatactcacgcctggctacgtcgagtccgagataaccaagggaaaggggatgcagaaaagcggcgaggtcgccgtcgacgaggaggccagagatgcgcagatcggcgtgttcccggtgggccgagtggaggcgctctgcgaggtggctctggacggcatccggaacggtgactggtacgtgacatggccgtccatgtaccggccgctgcagctgatcgcttgcctcgcccccgaggtcctggactggatgtccgacgccatgtacaaggagaccacccaagggaggcggccgctcgggcagaggatcatggaggccaccggagccaaaaggctgtacccgccgtcgcttctgcaaccgcggatcaaggcggactag

SEQ ID NO: 16742 - DNA, 909 bp, Zea mays
  Peptide Sequence Number=SeqID_58521
atgtcgagcggtgcagagagcttgaggccgagctatgggtgcgaccgaacaaggccgacgaagcgcgtccgttgtggcagtcagcgtgggccatcatggcttgccgcgactaagcagcagcacgtagtcgtcacgttttgccgcggcttcgcagcacgcttgtgggcgcctcggccgacatcctggaggaggatgaaaggtgagcatgaggagggggaggggcccataacatggggaaaagagggacacaccatcgccaacgaagaagacaccgcccctccatataatctccttttgattgtgcgtccgtgctctctggaagtctcccgtagcctcaggctgcctgttgaggcgatctgtctgagggtggaacgttcatcgcaaccatttggaaacgatccgacggctagagaattaagggatgacgtggataggcccatatgcgccgtttcgaaccgtctttgttatatatgcaaaacctacggccacttgagggccggtaagcttaaaaaaggatccattaaaaatgcatttgtaatgttggttgataaaattaagcgccagaaaactataaaaagtgctgtgaataaagatattttatgtaacggcggtggatatatatacgtactgatatgcaacgtgcatggacggatcggaggacaggagcttgcctaccagtacgcgaaggaaggggcgtgccttgcgctggtggcgcggagggtgcaggcgctcaaggccgtggcggccgccgccctggagcgcggcgctccggacgtcctcgtcttcccggccgatgtctccgaccccgagcagtcgaggcgcgccgtcgaggagaccgtcgctcacttcggcaaacgtacgtgcgcatgcatgcagctcctgtctctcctgatgaataatgcagaatga

SEQ ID NO: 16743 - DNA, 753 bp, Zea mays
  Peptide Sequence Number=SeqID_58522
atgttgttgagccgtccgggcttgcaccgacccggccttgtgctgatttgtctcactgttcgttcctccctggcccacgagggggatgaccttacgaattatggggcctttggacctttcgtgagtgcgggcctcctcttcatctcacccctcgggaagcacctccgctacgtgctgtgcctccatttcccggcgtcaaacaacgtggccgagtacgaggctctggttaatgggttgcgcatcgccatcgagctaggggttcggtgcctcgacgctcgtggcgactcgcagcttgtcattgatcaagtcatgaagaactctcactgccgcgaccggaagatggaggcctactgcgacgagaaggcacccgggggcttctcgcacctgctggtcgccatcgacaaattctccaagtggatcgaggtccgacccctaacaagcatcaggtccgagcaggtggtggcgttcttcaccaacatcatccatcgctttggggtcccaaactccatcatcaccgacaatggcacccagttcactgggaagaagttcctggacttctgcgaggaccaccacatcagtgtggactgggccgccgtggctcaccccatgacgaatgggcaggtggagcgtgccaacggtatgcttctgcagggacttaaaccgaggatctacaacgacctcaacaagtccggcaagcgaaggatgaaggaactaccctcggtggtctggagtctgaggacgacgcaaagatga

SEQ ID NO: 16744 - DNA, 204 bp, Zea mays
  Peptide Sequence Number=SeqID_58523
atggccgcctttgggcagggcctgactgcctgtcagcctccactctgtcaagtggcactgcagtcggagtggcgcaggcggcgctgtcattctgtcagaccgctttatgctgatgggggttaccagctgagaattaggcgtcttgagggtacccctaattatggtccccgacacttctgctactatgaatggtccttcccatag

SEQ ID NO: 16745 - DNA, 408 bp, Zea mays
  Peptide Sequence Number=SeqID_58524
atggccaagactgcattacgttacgcgtcgcaagaatctccgaaagattccagtccatgcctaacagtttcaggcagtggtagaacggaggctggatcttgcctgccactgccaccaaccactactgaaccacaacgcttcatgagcggcagtgggccgtggcatcctcggcgaatctcagccgcagctgtatcatatcgatcctcgcctctcgccggcagccggccgggagctcacggcggggcagacgggtccggtctgctatggctccggtcactggtcaggcgcgctgcccagcgcatcctcctcgccctcgccctcggctgccgcaaccggccgtcgctgccggagtcgccgccacttcctccagctgctgcggatgtaacgtcactgaactccaactcgtag

SEQ ID NO: 16746 - DNA, 1914 bp, Zea mays
  Peptide Sequence Number=SeqID_58525
atggggcccatcaaagacttgaaaggcgtacagagggtcatgggatgccttgcggctctgagccgcttcatctcgcgcctcggcgaaagaggcctacctctgtaccgcctcttgagaaaggccgagtgcttcacttggacccccaaggccgaggaagccctcgggaacctgaaggcgctcctcacgaatgcacccatcttggtgcctcccgctgccggagaagccctcttgatctacgtcgccgctaccactcaggtggtcagtgccgcgatcgtggttgagagacgagaagaagggcatgcattgcccgtccagaggccggtctacttcatcagtgaggtactgtccgagaccaagatccgctacccacaaattcagaagctactgtacgcggtgattctgacgcggcggaagttgcgacactacttcgagtctcattcggtgattgtggtgtcatccttccccctaggggagatcatccagtgccgagaggcctcgggtaggattaagaagtgggcggtggaaatcatgggcgagacaatctcgttcgcccttcggaaggccatcaagtcccaagtcttggcggactttgtggctgaatgggtcgacacccagcttctggcagctccgatccaaccggaactctggaccatgtttttcgacgggtcgctgatgaaaacaggggcaggcgcaggcctgctcttcatctcgcccctcgggaagcacctccgctacgtgttgcgcctccatttcccggcgtccaacaatgtggctgagtacgaggctctggtcaacgggttgcgcatcgccatcgagctaggggtccgacgcctcgacgctcgcggcgactcgcagcttgtcatcgaccaagtcatgaagaactcccactgccgcgacccgaagatggaagcctattgcgacgaggttcgacgcctggaggacaagttctacgggatcgagctcaaccacatcgcccgacgatacaacgagactgcggatgagctggctaagatagcctcggggcggacaacggttcccccggacgtcttctcccgagacctacatcaaccctcagtcaagaccgacgacacgcccgaacccgagaaggcctcggcccagcccgaggcaccttcggctcagcctgaggcaccctcggcccccgaagcccctcgggcatcctccagcgatgcatatccattgccgaaggccaggagctcttacaagaaatacactcgggggcttgtggtcaccacgcagcgcctcgagcccttgttggaaacgctttccgacaagaaggcacctgggggctacacgcacctgctggtcgccatcgacaaattctccaagtggatcgaagtccgacccctaaacagcatcaggtccgaacaggcagtggtgtttttcaccaacatcatccatcgctttggggtcccgaactccatcatcaccgacaacggcacccagttcaccggcagaaagttcctggacttctgcgaggatcaccacatccgggtggtctgggccgccgtggctcaccccatgacgaatgggcaagtagagcgtgccaacggcatgattctgcaaggactcaagccgaggatctacaacgacctcaacaagttcggcaagcgatggatgaaggagctcccctcggtggtctggagtctgaggacaacgccgagtcgagccacgggcttcacaccgttctttctagtctatggggccgaggccatcttgcccatagacttagaatacgattccccgagggcgagggcctacgacgaccaaagcaatcgaacaaaccgagaagactcactggaccagctggaagaggctcgtgacatggccttactacactcggcgcggtatcagcagttcctgcgacgctaccacgcccgaggggttcggtcctga

SEQ ID NO: 16747 - DNA, 255 bp, Zea mays
  Peptide Sequence Number=SeqID_58526
atgactaccagccttgtggtggggagaagcaagccgggctgcggcctccctcctgccctcagcttcaaggatgttcatcatccttgcttgggtgggaggcgagccgagtcagggtcctgccttccgcatgggccggtgacccgcttcttcctccagcattcgggggagaaggcgttcaccggccttgcggagaaggcgaacttcggctacgcggggccggccggctgcaagcgctgtcagctgccgcgtgcctga

SEQ ID NO: 16748 - DNA, 312 bp, Zea mays
  Peptide Sequence Number=SeqID_58527
atgaacatcgtgcggggagtcgccgaccttctccgcaaggcgccgccacctccccccgcaccggacgctggtgcggcgcctaccgcctccttctccgccggtgacttcgacgacgcgcccaccccgcgcgtcgtcttcagtggtagtctggaggagggagctctgaatgcactctggaagaattacgagaatgcgcttgataaggttaatccaaacattacagagcctgatactggatttctacaaaatggtcgccaaagtgggagactcttggatgcattgcttagcatgctggttgattgcaaagtataa

SEQ ID NO: 16749 - DNA, 144 bp, Zea mays
  Peptide Sequence Number=SeqID_58528
atggagaagggtggcggcgctagagaagggctcacgcgcgagcgcgactgtgcactgcgtaatgcgtgtaccgtattgtggcacaacaatcaagtgaagcacaactcaagaggaggccaaggcatgcacaatactgctcagtaa

SEQ ID NO: 16750 - DNA, 180 bp, Zea mays
  Peptide Sequence Number=SeqID_58529
atggcggtcggtgtcgggtggaagaaagacgagagcgagagagtgagggcaagtgagagtggaggaaatgagcgctgtttgttagcactacacacaatagtggaaaccggccgtctaaccatgtcaaaacatggcaaacggattcaaaagtttaccaactttttacagagcatgccctaa

SEQ ID NO: 16751 - DNA, 255 bp, Zea mays
  Peptide Sequence Number=SeqID_58530
atggcgaccatccgcccgttatggggttactcgaagcattcaaagctgaaggatgttgtggcttggggtcctagggttggacatattatgggatgtatggggaagcttcgtcatacaagaagtcctcaagattgtatgcttcatgacggaggtcttcatgattgtggccctgatgccaaagagccgaagaatcttatccttgcgcttctcgacatgttggtgaatagcttcgaggttgttgatctcccaatctag

SEQ ID NO: 16752 - DNA, 615 bp, Zea mays
  Peptide Sequence Number=SeqID_58531
atgtcgactttcctcctcttttcgtgctggacaagccttctgagtcctcttctgtgtttcatatacaaagcctttcggcaccaaaactatctgcgtcggtgcacaacttcgcaacgctcgtacacaagtgaagctctgaagcttttcccttctgagacaaagaagaggaagcaaaagtatgtgaaagtgacttccaaacaccgcaagatctctccttcaaagagcaagcctgaaatgatgaaggatgatcttgaacagaaggctgccattatagagccaaggcagctattcttgtttttgaatattaattctgaagatgacgacgttgttgaactacatatccttgaagaagctcctttggccaagattgttgttgagctaaaggaggttccaactctgacattttctccgagtgctttgcaaaaagacgagcgcataattcccatcatgagtgcattcattttttatgacaaagaggatgttggcgaagatgtggcagaggcgaagggctcaaagaggactactgtcatgacaactgtggtgatgaaggatagtggggtgccttccatagctgtaggagcaccaaccactacagaaatccctaaaatgttttga

SEQ ID NO: 16753 - DNA, 481 bp, Zea mays
  Peptide Sequence Number=SeqID_58532
atggatgggaaggccggctggaggttgaagaaagcagggagagggaaagggcgaggggccgcgcccgagccgccatgcccgcgccgcgtgccagggacgcgtctgagcccgcgctacggggacgcgcccgcgtcgtcggggttcactgcgcccgctgcagggggggccacgccagcaacctcgcagccacgcgcctgctcgcgcggcgacggcaagcctagccggcggctgcgggagggagagggcccgagcgcggccagggctggcgcggccggggtctgcaagggtgtggcctggggcagcgcggctgggggtggcacgaccgcatcgaggcggcgcgggcgaggccgggtcaagccgggggacgagagaggggagggccaggggtggccggcggctgggaagggagccgcgccgggagggagggatgagcctccgggggtggcggctggacctgggcagctggctggcggctgtaggg

SEQ ID NO: 16754 - DNA, 348 bp, Zea mays
  Peptide Sequence Number=SeqID_58533
atggcgctcagcgctacagcgcctcacccttcgaccttctcctgtcgccggcgccgttcacaccccttgccaggaaaacaacgccgcccgccccgcttctgctgctgtgccaatcgtccgggcgaaactgacaacggtcaagataagcctcgagcgcaacaggaagctccgcctcgcccgaccccggggctcggcctcgacctcggcctcggaaggagatcttcgcctcgcccgaccccggggctcggcctcgacctcggcctcgggaggagatctccgcctcgcccgaccccagggctcggcctcgacttcggcctcgggaagagtcacatcctcgcccgaacctag

SEQ ID NO: 16755 - DNA, 996 bp, Zea mays
  Peptide Sequence Number=SeqID_58534
atggcgtcgacggagatggagatgggcgtcgtaggcggcggcgtcaatagcagtggaggaggcagctgcggcgggctggtggtgacggagctgagccacatcaaggagctggtgaggcagctggaggtgcacctcggcgggtccccggacctgtgcaagcacctggcctcgcagatcttctccctcaccgagcgctccatcggcctcatcacatcctccaacctcgacggtgcccggcggcagaagcggcccgcgggcgacgccggcctcgcctcgccgctctcggcgacgcccaccagcgacgtcaccgacgggcctttccagagcaccaagaagaagaggaaggtgatggaacagcggaggcagagggtgagctctgccggcggcgagaacccggtcgaggacggccatagctggaggaagtacggccagaaggagatcctcggagccaagcacccaaggggctactaccgctgcacgcaccgccactcgcaggggtgcccggcgacgaagcaggtgcagcgcaccgacgaggacccgacggtgtacgacgtgatctaccacggcgggcacacctgcgtccacagggcggcggcgggccaggcccaggccacggcgccgccggagcacagaccggacgcgcacggccacctgcggagcctgggcgccggcctcaccgtgaagacggaaacggaggagggcctgcccgcggccgcgcccttgtgcctctccgcctccacgccgccggtgagcggcggcgggtgcccgtgcccgtgcctggcgccgtccacgccggagaactggggcgtgtcgcccgcgagctccaactccaaccacgccgcctcctacctgccgttcgaggacgccgagtggcgggggcacgccgggctccaggaagtggtgtccgccagcgcgccgcctccgcccgccgtggacagcctcgacgacctcctcctcctcgtcgacatagacgacatcgccagcttgttcgactga

SEQ ID NO: 16756 - DNA, 681 bp, Zea mays
  Peptide Sequence Number=SeqID_58535
atggccgctcccttgccctcagcttcaaggatgttcatcatccgtgctgggggcaagggcaagccaagctggggccctgccttccgcacgggctggcgacccacttcttccttcagcatttgggggagaagggtgttcaccagcctggcggaggaggcgaactaccaactgctgcttggtaagggtgcggtagtccgtccaccgcacgggcgacggtcgcaccatgcgcaggtcccccatgtccacagctcgtcctgcgccgccggccacaccgggggagcgtacaagacgtcgtacgccacggggggcggtgtccgcgtccctggacggtcctgtcctcactcccgtggtgaggacgggagtgaggacctgccggtgcgctttggggcagccgccattcgccggtgcggcgttggggcgcaggtggccgccgtcatcggtgctgaggtggtggctgcctctgccgacgagaccgtcagtgctacctacgggcggacctccggctctttggctttaatggcttgtcctcgcccccggacgggggacggggacgagagccttttcacagtagcgtttgccctaaggcaatcactgctgctgtctagccgcccgaggcggaggtcgttgtcgctgctggtgcagtggtcgccggcgagccgcttggagctcgttgtcttgtag

SEQ ID NO: 16757 - DNA, 441 bp, Zea mays
  Peptide Sequence Number=SeqID_58536
atggaggtggttcacaggtgcaattatgcccagatccatattgttgttgcctttgtcacagcaagaatggtggaaaacagcactgttcaccctgttccgactgctgtgccgaccaccagggaaagactaacaatagtcgcggccactcccgggttcagcctcgggtgcaacaaggagctccgcctcgcccgaccccaggcctcgacctcagcctcggcctcgggaggaggtctccgcctcgcccaacctcagcctcagcctcgggaggagtcgccgcctcgcccgacctcggcctcggatcaactatgctactggggatccatcattaccctacccctagctagccgcttcaggctacgaaggaacaagaccgggcacttctccgacggccacgttggtacatgtatagggctcaaggcacttcaccgccagccacgttag

SEQ ID NO: 16758 - DNA, 219 bp, Zea mays
  Peptide Sequence Number=SeqID_58537
atggcgcccgcacgcaactctggcttggtagtggctgccagcccacaacaccagagaggcggtgagggacaactcctttacgcatgcacagtgtactacacaccacgtgtgggagagaggagcatggaggcgcatggttcagcggacatcgacaaaatcaacccacggctggatctaatcgtagcacccactgtcgatccaatggctgatacttgttga

SEQ ID NO: 16759 - DNA, 297 bp, Zea mays
  Peptide Sequence Number=SeqID_58538
atggacggcggagcagtggctccggcgagcctgtacctgccaagatacgcaatgaccggtgctccggtgtggatggcattaaattctactcctaatgaccatttcccctccatcaattgcactaatccaggtcagaatctttctgtccacgatgacggcggaaaccgagaacaattcgacatgttcttggcgatccagggcagtctagctcaattaaacaggcttaccggtgacgagccagattcaaggcacgtggcacccgatcggtgggcagcctactctggtgagcttatctga

SEQ ID NO: 16760 - DNA, 348 bp, Zea mays
  Peptide Sequence Number=SeqID_58539
atgtcgcatggcgcactggacagtccgccgttactccgttggcgcatcggacagtccggtgttacaccggtcagtccggtgaattatagcggagtggctcctagaattcccgaaggtggcaagttcggagtcgggttccctggtgcaccggacattgtccggtggcacaccggacagtccggtaccttcggactcgggttaaaaccgtacatgatgcaaaaagcaaggatgaagacgaaggctgatgttgctccgaagctacgcacaaaggagcttcggcttgatggcagaaaaaggaaccgacttaaaggggaaaaggctatctactcctcgttgggttgtccataa

SEQ ID NO: 16761 - DNA, 417 bp, Zea mays
  Peptide Sequence Number=SeqID_58540
atgaagaagaagcatagaacattgcaatcatttttctctccagctctgacacccgtcgtgtgtaatgtgcagccaagatcgaaccccaattctcaaccaacagtgggaaccggaatcagtaacaatcaagcccaagaaatttcaaccgaggaggctactgttgaggcagtactaaatccaacttcagatgaacaagagcaagaaattccaccttctgagcagagtttatggttgtttcggcccgggtcttggttaatttctgggtccgccactgtctctatggcatgcagaccatccgcgtataggtggcagaccacctatgaggcgcgcagagggcttcgtggatctcctgcagaactagatctcaacccccgtaagggactccatcagggaagaaagattctagagttgtcttag

SEQ ID NO: 16762 - DNA, 1800 bp, Zea mays
  Peptide Sequence Number=SeqID_58541
atgaagttcaatgatatttacccaccaataccactgattacacagaaaacgattcgttctgattttctccgcctatccaacttcttctccggcaagtcactatcgtttgtgaacggtgaacctgcaggatgcggctttggcgcgtcgcccaaaatacagccgttgcgacagccgctgcagccctgccgagtgacggtctctcgtgtcgtgccattggattccactccacaggacccactgttgagcaccatcaacgtttcgtgggacccaaggttcagcatcatcgacgttttcgtgccggggggctcccacttcttcctcctcgacagtcctcagtcctccgtgcgaaatctgttcgcactcgcagtcgcagtcaccactgttctccagggatggcgccgtgttgcctgctccagatcggttggtgtctcgagcgcccccgtggctttcgcctcgccgcggcgctgtgcgcggctgtggtcgcgctggcgctggcgcccgccttggatgccacgtcggcgtcgcttctgggcatcaactacggccgcgtggggaacaacctcccgccgcctcagtccgtcatgccgctgctcgagggcctcggtattggccgcgtgcggatgtacgacgccgaccccaccgtgctgcgcgcgttcgccccggaccggggtcgagctcatcgtcggcgtgcccgacgagtgcctggccgccgtggccgacccgagcggcgcggcacagtggctcaaggagaacgtcgcgcctttcctgccggacacgaagatctccgtgctcgccgtcggcaacgaggtgctcaccggcgccaacagctccacgctgtcgcgcaccctcctcccggcgatgcagtccctgcacggcgcggtggccgcgctcggcctcgacaagcagatcaccgtcacctcggcgcacaacctcggcgtgctcgggacgtcgtacccgccctcggcgggggccttccgcaaggacctgctcccgtacctctgccccatcctggactaccatgccaggaccggctcgccgttcctcgtgaacgcgtatccctacttcgcctactccagcgaccccaggggggctgcactacccccaacctcctcgtggcgcaggtggacgcggtgtaccacgccatcgcggcggccaataccgcggcgtcgcgggtggtggaggtgcgggtctcggagaccggctggccctccgcgggggcccgccaacgagacggccgcgacgccgcagaacgcggcgcgctacaacagcaacgcgatgcgcctggtggcggagggcaagggcacgccgctcaagcccggggcgccgctccgcgcctacgtgttcgcgctcttcaacgagaacctcaagcccgggttggcgtctgagcgctactacggcctcttcaagcccgacggcacgccggcgtacgagctctccttcaagctaccgcgcgacaactccacgtttggtcacggagataccggcaagggcggtggcggaatcggcggtaacggcaatggcaatggcagcagctggaacaatagcggcggcggaaacagcggctactatgacatctcggcttcagcacgtgacactacggatcaggaatggagcggagttgccgtcctggggcagcggcctgatttggtgctcctccgctggatcaggtttgcctgcctgcttgaaatgaaaccctttccaaatactggtagcaccctgatggatccgaagaatcgcaaccctaactgggaccggtgggggccgaaggatgcttccgcagggttcccagtcgtggggtaa

SEQ ID NO: 16763 - DNA, 468 bp, Zea mays
  Peptide Sequence Number=SeqID_58542
atgacaaagccgacggaggcatccggtatcatagcgcaccgtttacccatcgctgctgtagggaaaaaggagccaaagaaacggtattcgcagtcgaccgtgtcctcggagcacacaatagattcaaggatgaaggttgttgctgcctacctgcttgctgtcctcgctgggaatgccagcccctccgctgaggatttgactggcattctggagtcagttggctgtgaagttgacaatgaaaggatggaactgctgctgtcccaactgagcggtaaggacatcaccgagctcattgccgcgggcagagagaagtttgcttcagtcccatgtggcggcggcggtgtggctgttgcggcaggtgcacctgctgctggcggagctgctcctgcagctgaggcaaagaaagaagagaaggtggaagagaaggaagaaagcgatgatgatatgggcttcagcctcttcgactag

SEQ ID NO: 16764 - DNA, 1248 bp, Zea mays
  Peptide Sequence Number=SeqID_58543
atggcggtgccagcatatgagctaatgtttgggaaagtctccctgcacaatctgtttgaggactactttgatcaagctgggaatatgacctcaaggatcatgttgaagccgcttgaagatcctcacgttgatttgattgctactgtatcctgtcaaacattacttatcatttctgctgcgtcttctgttccttcatcctttcaatatcatgtcttctctggatgttgcatagtgccacaagctgaggtcttcacatatatatttgttgatattacatataaccttgtgccagactttgaaatgttgacttcgtttagagagctggatgacccccatacctttgtggaccttcttgtgtcaacttcaaatcccttgctgcagctgagattatgtgcatatcatcctaagtatcgtattggtgcctttggaacattacctttgctaatggggaacagggtgcgttcagaagactatggggtcatgggttacccagtgaggtaccctttggtgcatggttggttgggagaaaagggagcttatctgcaggagtacaatacaagccacttagtgagtgttaccaggctaaatggtggcagcaaatatcctatgccatttacagaattggagaactggaattatgcaatcagttatggtgttggctcaactagcccgctcagcccttcattcattttctccctggaacttgccagaagcacacagctaaccgcatcattctatcagcacctggttgttcaaagaagggtaaaaaatccttttgaagatgatcaggttgttggcattacaaactacatcgattttggacttgagttggctgccaaggttgataaagataaagtgagtggggatggcaactcgtttcagttggctgcaagttggcaagctaacaaaaactttctgctgaagggaaagcttggtccttccacgtcctctgtagctctggcattcaaatcatggtggagaccatcctttacatttagtgtaacagctgtgaatgatcattcaaagggcacaacatcgtatggatttggcctccgtgtcgaggaccttagacgagcgagttaccagcgagctgatccaaactacgtcatgctgacgccaagcaaggagcacttggcaccaggtgttctgcgcgagtacgggaagcggcccatgttccagacacaaatcgattcgggcaactacgaccatctgcctacagagctgaagcctcttggcaggattttctaa

SEQ ID NO: 16765 - DNA, 1116 bp, Zea mays
  Peptide Sequence Number=SeqID_58544
atgaaggaggaaggcggcggcggggacgcggggttcgtgcgggcggacccagatcgacctcaagagcctggacgagcagctggagcgccatctcacccgcgcctggaccatggagaagcgcaaggaggaggcctccgccggcgctggcgccggcgcccaggcagcaccagcagtcccggcgcccgcggagggaggactgggagatcgaccccgcccaagcttgtcgtcaagggcgtcatcgccccgcggcacctttggcaccgtcccaccgcggcatctacgacgctcacgacgtcgcaggatgggcatagatcagaacaagacattgcagcactaagagcagctttttcacaagaggtctctgtttggcataagcttgaccatccaaatgtaaccaagtttattggagctataatgggtgcaagggatctgaatattcaaacggaaaacggccacattggcatgccaactaatatctgctgtgtcgttgtggagtaccttcctggtggtgcactaaaatcatttctgataaagaacaggagaaagaagctagcttttaaggtcgttgttcaaatcgctcttgaccttgccaggggattaagctatctccattccaagaagattgtgcaccgtgatgtgaagactgaaaatatgcttcttgacaaaacgagaaccgtgaagatcgctgattttggtgttgctcgccttgaagcttcaaatcccagtgacatgacgggcgaaactggaacgcttggttacatggcacctgaggttctcaatggaaatccctacaacaggaaatgcgatgtttacagcttcgggatctgtttgtgggagatatactgctgtgatatgccatatcctgacttgagcttttctgaggtcacgtctgcggttgtccgtcagaacctgaggccggagataccacgctgctgcccgagctctctatcgaacgtgatgaagcgctgctgggacgccaaccccgacaagcgacctgagatggccgaggcggtgtccatgctggaggcgatcgacacgtcgaagggtggaggcatgatccctgtggaccagcggccaggatgccttgcgtgcttccggcagtacagaggtccatga

SEQ ID NO: 16766 - DNA, 492 bp, Zea mays
  Peptide Sequence Number=SeqID_58545
atgaagttgtataagtttcgatcatggggaacatacatcctctaccaagtgagaaatttgccattatggaaggtcgtcggtgcggcttcgacgaattggaggcttagccgaggtattcactgttatgaaaaagcagggaatagcccacactccaaaacggacaagatcactccattaccagaagctgttgatgctgctcgtgctgcggctgttgctgctgcggaggccaaatgtgcggcgtcggttgctgagaaggaggcgcgtgcagcagttcaatctgcgactattgccgccgataaggttcaacttgccgtcgatgctgtgaagtatcgaagatttgttgaagataactccatagtggattccttggtgactgattttactttctctattactttgccatttgaaggaagtgtgcaagagtctcgagaagacttcaattgtgtgtgcaagagtctccaaactgtgtcgtacccaatagtgacattgtga

SEQ ID NO: 16767 - DNA, 1530 bp, Zea mays
  Peptide Sequence Number=SeqID_58546
atggcgggcggcaccttcaccgagaagggcaagcaatatccggggaagatgacggtgttcgtcttcctcacctgcctcgtcgcctcctccggcggcctcatcttcggatacgacattggcatctcaggcggcgtgacgtccatggacccgttcttgaagcgcttcttcccgtcggtgtacgccaaagagcaggaggtggtggagaccaaccagtactgcaagttcgacagcgtgctactgacgctcttcacctcctcgctctaccttgccgcgctcgtcgcctccctcttcgccggctacgtcaccaagaagtgcggccgcaggatgtccatgctcggcggcggcgccatcttcctcgtaggcgccgtcctgaacggcttcgcgcagaacgtggccatgctcatcgtcggcaggatcttcctcggcatcggcgtcggattcagcaatcagtccgtgccactgtacctgtcggagatggcgccggcgaggatgcgcggcatgctcaacatcagcttccagctcatgaccacggtcggcatcctcgtcgccaacctcatcaactacttcacggccaagatccccggcggctggggctggcgcatcgggctcggcctggccgccgtcccggccgtcatcatggtcggcggctccatcttcctccccgacacgcccaactccctggtatcccggggcaaggtggagagcgcccgcgccatgctccgccgcatccgcggcaccgacgacgtctcgctggagttcgacgacatggtggcggccagcgaggccaccaaggccatccagaacccgtgggggaccctgctgcagcgccggtaccggccgcagctggtgatggcggttctcatcccgacgctgcagcagctgacggggatcaacgtcgtcatgttctacgcccccgtgctgttcaagaccatcgggttcggaggcaccgcctcgctcatgtcggccgtcatcacgggcctcgtcaacatgttctccaccttcgtctccatcgccaccgtcgaccgtctcggccgccgcaaacttctccttgagggcggcatccagatgatccttgcccagttcgtgcttgggacgctgatcgcggtcaagttcgggacggcgggcgtggcggccatctcgcggccgtacgcgatcggggtggtattctgcatctgcgtcttcgtggcggcgttcgcctggtcctggggcccgctggggtggctggtgcccagcgagatcttcccgctggagatccgatcggcggggcagagcgtggtggtcgtcttcaacatgatcttcacctttatcatcgcgcagatcttcctcatgctgctctgccgcctcaagttcggcctcttctacttcttcggcgcctgggagatcgccatgacgctcttcgtctacttctttctccccgagaccaagggtatccccatcgaggagatggaccagatctgggccaaccactggtactggaagcggttcgtcgacggcggccgcaaggtcgagctcatgtccaccgccgtataa

SEQ ID NO: 16768 - DNA, 258 bp, Zea mays
  Peptide Sequence Number=SeqID_58547
atgtggtcaccggggagaagcccggatcttcggggaaaaaagcatgaagacaagactccgtcaaatgaggccaagatatctagcgataagcacaaggaggataaggaagaatacgccatctccatcaaatcgcacaagaagaagggcgacaagaagaaaaagaagatgaagaaggtggtctacgagactgactcatctatgccctcaacctccgatgctgagtcaacatttttaaaacgccatgaccgtaaaagtata

SEQ ID NO: 16769 - DNA, 141 bp, Zea mays
  Peptide Sequence Number=SeqID_58548
atggccatgatgggttcaaaatcagaaaagatgtacctcttccaggtgaggaagcaaccaacttttgttgcttctgttccaaggtggtaccaaaggaagagcaccaggagtgaagctgcgggaggaaaggatcctccataa

SEQ ID NO: 16770 - DNA, 618 bp, Zea mays
  Peptide Sequence Number=SeqID_58549
atggaggccatcaccgtattctctagggatgaggcggaggcgggggatgctgcgtcgggtgcagcgtcgcccacggtctctgacctcctatgcgccatccctgacacccctgaagttgcgccgagcttggggacgtggcgcgccgaggaagccggtccctcggatacacccgagatggtgctcggcggggggctgctcggcgacgagatcatcattgagccttttctctcagggggtagcggtgacctcatccacgccgcgccggacccctcgatatggggagggccgactgtggtgtggatgtccaccgagggtggtccgtacttcatcctcgacgacctcaaggagcgggagctattggccgagatgagggtggcgacccaggagcgaatgacgaggtcgatgtccaagtccatcttcgttcaccgtgaacgggacgtctgggccacgctgcagcgccattggcttgctctgctccgttccaatgagcagttggcatggaggagcgccgaagtggcagacttgatgtcccggtgcaaggggatgaaggaagagggtgtggctgatcgcgagagcatccgtcggttgagggacgaagtcagcgacctaaaggcgtag

SEQ ID NO: 16771 - DNA, 1965 bp, Zea mays
  Peptide Sequence Number=SeqID_58550
atggccacctcgctctacaccccgtcccagctccgcccctcccactcccaggcccgccgcctcggctcgcacccgcgcgtctgctccgcgcgctgccccgcccgccgccgccgcgccgccgccatctccgtgcgcgcttccaccgatggcgacgccgccgtcacggtgcgccgcttcccggccgcgccgaccaaggccgggggcctctcgggcgtaaagaagatcatgatcctcggcgcggggcccatcgtcatcgggcaggcgtgcgagttcgactactccggcacgcaggcgtgcaaggcgctggtggaggagggctacgaggtggtgctcgtcaactccaacccggccaccatcatgaccgacccggggctcgcccaccgcacctacatagggcccatgacgccgacgctcgtcgagcgcatcatcgacgccgagcgccccgacgcgctgctccccaccatgggcggccagaccgcgctcaacctagcggtctcgcttgccgactcgggcgcgctcgaccgcctcggggtgcgccttatcggggcctccctccccgccatccgcgccgccgaggacaggcagctcttcaagcaggccatggaccgcatcggcctccagacgccgccctccggcatcggcaccacgctggaggagtgcctcaccatcgctgaggacatcggggagttcccgctcattgttcgtccggccttcactctcggtggcacgggcggaggcatcgcctacaacagggccgagtttgaggacatatgcagggccggccttaccgcgtcgcacactcagcaggtgctcgtcgagaagtcgctgctcggctggaaggagtacgagctggaagtcatgcgcgacatggctgacaatgtcgtcatcatctgctccatcgagaacattgatcccatgggcgtgcacacgggggactccatcaccgtcgcgcctgcgcagacactcacggacaaggagtaccagaggcttagggactactcggtggccatcatccgtgagattggtgtggagtgtggtggttccaatgtgcaattcgcggtcaatcctgcagatggggaggtgatggtcatcgagatgaatcccagggtgtccaggtcgtccgcacttgcctcaaaggcgacagggtttcccatagccaagatggctgcaaagctgtcagtaggctacactctggaccagattcccaatgatattaccaagaagactcctgctagcttcgagccttccattgattatgtggtcacaaagataccacgctttgcttttgagaaattccctggctctgagccaatattaaccacacagatgaagtctgttggtgaggcgatggcactggggcgtaccttccaggagtccttccagaaagctgtccgctcactggagactggttttgcgggatggggttgtggccctatcaaggaacttgactgggactgggaacagataaaatatagcttgcgggtacctaatccagatcgtatccatgctatctatgcagctttcaagaaaggcatgagggtcgaagatatccacgaaattagcttcattgacaaatggtttcttacagagctcagggaactagtggatgttgagcagttccttttatcaagaagcctagatcaattgtcaaaggatgacttttatcaagtgaagaggaggggattcagtgacaagcagattgcatttgcaacttcctcatcagaaagtgatgtgagatcaagacgtttggcattaggcgtcactccgtcatataaacgtgttgatacttgcgctgctgagtttgaagccaacacgccctacatgtattcttcctatgagtacgaatgtgaatcagctccaaccaataagaagaaggtgctgatattgggtggtgggccaaatcgcataggccagggcattgagtttgattactgctgttgccatgcatcatttgcacttcgagag

SEQ ID NO: 16772 - DNA, 345 bp, Zea mays
  Peptide Sequence Number=SeqID_58551
atggcgcttgaacttggggaaatcgttgctagcacatgtggttcagctgtgcaagtcttgttgcggtcaatggcgcttgaactcgaggaaatcattgtcgcctctagatccggcggcggcctcagatctgaggattcgcgaggggaagacccacctgaggaggcacttgaggacgccaacggtggcgcatggcatggcgagggctacgcgtggtcccgaatgggcgatgctagcgccgggtggaacaacaagtccggccggcacggtggcaagggggcgggcggcaggagcgagtcgcccccgctgacaccgacgtcgtgtctgcggtcctccacagcaccgtag

SEQ ID NO: 16773 - DNA, 375 bp, Zea mays
  Peptide Sequence Number=SeqID_58552
atgctccgcccagacgagcagcccccaccagagcgaggggacgacgacgacaacgaccacatcggctgcctacgcggcgtcaacgacgtggacaaggcaccacaacgagctgctcggcacggccgaggtcggcctcaggtccaaggcatcccccgggccaccatcgtcttcgccgacttctacaccccgatccgtagaatcctggaaaaccccaaccagttcggggtggtggtcagtgacgtcccgaaggcgcgcccctgcgcccgcatcccacaatccccgccatcgttatcctccagcccggaatctcctccatccgacaccacctccacccatcccgcctccccctgcaccaaacacacctcatcgagttag

SEQ ID NO: 16774 - DNA, 495 bp, Zea mays
  Peptide Sequence Number=SeqID_58553
atgcaggcagcatgcaaccgcaccaagggggcgcaccctttcgacttcgacgcgtccagcatggaggcccatgcccacacgtcatgtaaccggcgcgccggttactgcgtacaagaaactgcaccgccactcgcgccactaccgtgcctcctcgactgcggaaccagtaccgcgactcgagggactgggaaaggggataccccgaaagggatccttctccgcgaaggaaacgggccccgagcccccctactgattagaggttcgaaggctggcccctcagaagggttcaacagccgcctcaaagcactcgggctccgcgcccactactggtcagaggttcgaaggccgacccctcaaaagggttcaacggccgcctcaggccactcgggctccgcgcccactactgatcaggggttcgtaggctggcccccgaagggttcgacaaccgcctcagatgcagagcgagggatgaccctggatacgttcgatacataa

SEQ ID NO: 16775 - DNA, 786 bp, Zea mays
  Peptide Sequence Number=SeqID_58554
atggtgtcgcagcacggcatcctcctcgcagttaacatcatctccgaccatttcggtcctatcgtatccgtaagcccgcttccatcccctccttctcccctccccgccgttcctcgcacgctctccctaacactcgccagcccaatcctttcttccacagaaagggctggcgataggacagtgacgctctacctggccatcttcgacaatgttctgcaccggctgcgcttctcaaagttcctttccgtcgtccgtgtggatattcctgagtcagaagttcttctcgaaggattacttcagaatggtaggctaacatttgagcaacttgtggagcgaacaatatttaaagtatcagaagacagccccttaccaacaagggaagaagtacgaatgaacttcaacaaacttgtctatgcgcattatgtggaacgttgcccaaaaccagaacctttttttgatcctcttgcggttgaacaacctacatccacaaggaaacgggctcctaaaactgttgaggcggttctttcacttgagcagaaagttgtctgtactgcagctctatctgacgctgaaagattttctgagataccatacttcatggacgggtcatcgagtgcaaaagatggccatcatgctgttgctggtaataagcgaaaacatgaaaccttagaagttgatgaagatgattcgataattgcagaaagtgaagtactttggcggataaattttgagagattcatattttgtttaaagaagaagatgggacttcttgaagcaggatcctag

SEQ ID NO: 16776 - DNA, 207 bp, Zea mays
  Peptide Sequence Number=SeqID_58555
atgagggtttgccagagggcacaaatgagagaggagaggtgggcgagcaaggcgcgggggctcaaaaggggcgcgtgggcgcggacgtggctggagaacgcgcggtcgtgggcacgtccacgacggggagatcgtgggcaggaggttgaggacgagctgacagggttttcaattcaaattcaaatcaagtttcgaaattcaaactaa

SEQ ID NO: 16777 - DNA, 333 bp, Zea mays
  Peptide Sequence Number=SeqID_58556
atgggagccctcttccacggcgtgaagacgacgcgcccgtgttctgttcctcgaacggcttgcgcacgcggccgccccgcgaaccgcccgtcccgtcgcattaactcctcggtagggcaagcgacgccttggcagttgaagcgggcgttgtttcacctccaccatgatgaccacgtcaaaaaagggaccgggaaaggggatattccgaaagggatccttctccgcgaaggaagcgagccccgagccctcctactgatcaggggttcgaaggctggcccctcggaagggttcgacagccgccctagagcactcggacttcaagctcattactga

SEQ ID NO: 16778 - DNA, 1503 bp, Zea mays
  Peptide Sequence Number=SeqID_58557
atggcgtccccgtcccatactggcatcaggcggcgcttcgctctgctagcttctgcaacgcttgccatcctggtcctctgcggcacctgcagctgcctgcagttcagctaccccaccttcggcgccgccaatgaggccgatttcagcttcacccccggcgccggcatcgaagatggagccctgcagatcacgccgagcaccggagacctgcgccaccggtcggggcgagtctgctacgcgcgggaaaccctcaagctgtggaaccgcaggcggacggcgctgacgtcgttcaggacggagttcgtgctcaacatcgtcccgcggaacgggaccggagaaggtatggcattcatcctcacaaacaacccggagttgccccgcaacagcagcgggcagtggctgggactagtgaacggccagacggacgggtcgccggcgaaccggatcgtggccgtggagttcgacacgaggaagagtggcaagcacgaccacgacgacaaccatgtcggcctcgacgtcaacggcatcgagtctgccagtgcgtatcctgtcggcaatctctccatcgtgctgtcgagcggggctgatgtttgggtcaccatacagtacgacggtgcgacgctgagcatagtcgcggtacagacgtacagcttcatgtacgcctgggccggtgacctgtcgcagtatctcacggacgacatcaccgtcggctttgcagcttcaaccggcgacttcaccgagctgaatcagatcaagtcttggaatttcacaacactaggcgacgatgcagacggcagatggcgacacaggaagaagatgagattgcttctcgcctacctgatcccgttcgccatagccggatcgttcctggcgttctgcgtgtggagaaggctgacgcgtccgagaaggctagcctaccgcaacctcgagaagatgatcgacgcgcaaggcccggtcaaatttaagttcagggagctaagaaatgctacggccaacttcagctctgaccgtaagctcggcagaggcggcttcggcaccgtgtaccttggctacctgaagaggatgggcgtgaacgtggccgtgaagcgggtgatgacgagtggcaactccaatcgcggggagcaggagttcgtggcggaggtgaactcgatcagcaagctgtcgcaccgtaacctcgtgaagctcatgggatggtgccacgaaagaggcgagctgctgcttgtctacgagtacttccccatgggcagcctggacaggcacctgtacgccgatgccggagcaataagtaatgcgccggcgtcggcgtcggaggcgacgcctgagctgacatgggagcggcggtacaggatcgtctgcggtgtggcgtcggcgctggactacctgcaccacgggagcagcaagcggatcctccaccgggacgtgaaggcccagcaacgtgatggtggacggcgagtacgaggcgcggctgggcgacttcggcctggcccgcgtcatacagcgtga

SEQ ID NO: 16779 - DNA, 2409 bp, Zea mays
  Peptide Sequence Number=SeqID_58558
atggacatcgcccatcctaatgtcatcacccacaacgtcatgctgaatgggtacgccaagctcggccgactgagcgatgccgtggagctgttcggtagaatgcccgcgcgagacgtggcttcgtggaacacgctcatgtccggatactttcagagccgacagtacttggtttctttggaaacctttctgtccatgcaccgaagtggtgattcgtggccaaatgcattcacattagcttgtgccatgaagtcttgtggcgcccttggatggcacagtttggcgctgcagctgcttgcgatggttcagaagttcgattctcaggatgatagtgaggtagcagctgcccttgtcgacatgtttgtgagatgtggagctgtggatttagcttcaaggttgtttgttcgcattaaagaacccactatgttctgtcggaacagtatgctagcgggatatgtcaagacatatggtgtcgatcatgctcttgagctttttgatagcatgcctgaacgtgatgttgtttcgtggaacatgatggtatcagcattgtctcagagtggccgagtcagagaagcccttgatatggttgtagacatgcaaagcaaaggggtgcgtcttgattcaacaacatacactagttcgcttactgcatgtgctagattatcttctttaagatggggtaagcaacttcatgctcaggtgattcggaacctaccgcacattgatccatatgttgcaagtgctcttgttgaactgtatgcaaaatctggctgtttcaaggaagctaagggggtcttcaactctttacatgaccgtaacaatgtggcttggacagttctcatctcaggattcttgcagtatgggtgtttcactgaatctgttgaattgttcaaccagatgagagctgagttgatgacacttgatcagttcgctttggctactcttataagtggctgctgcagcaggatggatttgtgccttgggaggcaactacattcactttgtctgaaaagtgggcagattcaagctgtagtcgtctccaattctctcatctccatgtatgcaaagtgcgacaatctccagagtgctgaagctatattcagatttatgaatgaaaaggacattgtatcatggacaagcatgataactgcatattctcaagtaggaaacgttgcaaaagctcgtgagttctttgatggcatgtcagaaaagaatgtcattacatggaatgctatgttgggagcatatatacagcatggagctgaggaagatggcctcaggatgtataaggtcatgctaagtgaggagtatgttagacctgactgggttacctatgtcacattgttcaaaggctgtgcagacttaggtgcaaacaaacttggagatcagattattggtcgcactgtaaaggttggtctcattatagacacctctgttgcgaatgcagtcataacaatgtattccaagtgcggaaggattttagaagctcgaaaggtatttgacttcctgaacgtgaaggatattgtatcttggaatgccatgatcactggttattcacagcacggaatgggaaaacaagccatagagatctttgatgacatacttaaaagaggtgcaaagccagactacataagctatgttgcagttctgtcaggctgcagccactctggactcgtgcaggaggggaaattttattttgatatgatgaagagggcccataacatatctccaggtttggagcatttctcatgcatggtagaccttcttggccgtgccgggcatctgacggaagccaaggatctcattgacgatatgcccatgaaaccaaccgctgaggtttggggagctcttcttagcgcctgcaagatacatggcaacaatgagctcgcggaacttgcagcgaaacatgtgtttgagctggactcacctgattctgggagctacatgcttatggcgaagatttatgccgatgccgggaaatcagatgactctgcgcagataaggaagctgatgagggacaagggaataaaaaagaacccgggctatagctggatggaggttgacaacaaggtccacgtcttcaaagcggatgacgtgagccatccccaagttctcgcgattcggaagaagctagatgagctcatggagaagatcgcgcgcctagggtacgtgaggacagactccacgcgctccgagattcaccacagcgagaagctagctgtagcattcgggctcatgaccttgcccacctggatgccgatccacatcatgaagaatctgcgcatttgcggcgactgtcacactgtgatcaagctgatatccacagtgactggccgagaattcgtgattcgagatgccgtgcgattccaccacttcaatggtggttcctgctcttgcggggattactggtga

SEQ ID NO: 16780 - DNA, 249 bp, Zea mays
  Peptide Sequence Number=SeqID_58559
atgggcgaaagcctgacggagcaatgtcgcgtggaggtggaaggcctacgggtcgtcaacttcttttctcggagaagaaacaatgacgctggaaatgcagtcaatcaggtctctctacgccaggaaatggtcctcgagtgcaagggcagaagggatccagaacttctatcttctgttccaaccaaggaagctcttctattcaaccagttcgtatcgccaggcccctcagggggtatggcttttccttag

SEQ ID NO: 16781 - DNA, 135 bp, Zea mays
  Peptide Sequence Number=SeqID_58560
atgaaggaggggatgggcaagcagaagcagaagcaggcatcagacaaggggtgcagtcgagcagcgccagcagctgaaggccaacagctgtcgtatctttctagagctggcacagcagccgcccagcgaggctag

SEQ ID NO: 16782 - DNA, 1416 bp, Zea mays
  Peptide Sequence Number=SeqID_58561
atggcactggggtcggctcggtttctgcctgctttgctgcttgcaaccagcgaagcgatgcagaagagagaaggatttgaaggttgcggattgggtgttggagaagaaaggcaagttgtccagggcgtcgtgcatcacggacgggctacagctcctatgctgcagtctgcagcaggagagggtcgtaaagatttgattctcttcgtccttccttttctttttgcgtcgcatgcaatgcaacgcaacgtgtgcaggcgggacagcttcatcacgcaccgcgccttctgcgacgcgctcaccgaggagagcgccaaggccatcggcggcgtcaacgccatggcagcgccggtgcaccaccaccaccacccgatgctcttctcgccgccgcccgcgcacgtcatgcagcagcaggacgtcctcctcctccaggagcatcaacaccaccagcaccagcagcagcagcaggaggacgatgtcatgcagcagccgccgccgcagcagtgcaactacgccatgaagacggagatgccgccgtggccggcgatggcctacgaccacccgctgctgcagccgctctgcaacgccgccgccgcagcggcggcgcagggctcggcggccacgtccgcgccgcagctgcccgcggcctccgcgcacctgtcggccacggcgctgctgcagaaggcggcgcagatgggcgccaccatcggcggcgcgggctacacccagatggcgggtcccgcgacgagcgccaccgccgccttcggcctcggcctcccgggcctgcagaatgcccagcaccaccacccgcagcagcaagatggcggcggcggggtcatggcggccgggctcgcgaggacagccagctcccacggccgcggcggcgacgaaggcggcggaggcggatcaggcgacggcatgaccagggactttctcggcctgcgcgccttctcccaccgcgacatcctcggcctcgctgggcctggactcctcgtgcatgggcgccatcaccgccagcgccagcatgggctgctacgagccacagcaacaacatacacagcctcaggcgccgcagcagcagcaaagcagcaacgaaccatggcacggcatggggcagccatagctagcttaggtcgtcgctacccattctggcaccaaagctactttctgtgcgtcttcctctcatcagccgtactacatcgccgtcgctgcttcaattctgattatcgctgccgccgcgcgcggtgcagaggcaaaactagctacggccggccgcccagagtgcaacgcgtggcttttgagtcgggtaatctcatcgtctcccgcccctcacttcggtcatcttttgctcctgttcatgctgtcatcccgtctgaacttttaaccacgcaatgcaagcaagcctgcaagctaggatga

SEQ ID NO: 16783 - DNA, 2064 bp, Zea mays
  Peptide Sequence Number=SeqID_58562
atgagtaagaagcatgcaatacagtgcaagtactgtgacaaggtgatccatggtggaattactagagttaagtatcatcttgcaaacattggaggtttcaatgttacaaagtgcaagaaagttccagcacatgttaagcaagagatggaggccttgcttacaaagaagactggtgaaaaagaacagagaaagaaggaaaagcaaagagaaagggatgaaattgatctagataaatcagatggatccgatgaagaagagaaagagcatgagaatgatattattgtgctgaaatcaacaagggaaagtaataattgcagcaactctagacccccaacaagtggtggcagtggcactattgacaacttctacaagccacaatctgttgaagagtctgtccacaagaacaaaattcaaacaaagttgtcaacccaaaaaagagaagagagaagagatagagcctgtgagtatatatgccaatttttttatgaagctggcattgcacataatacagtaaccctcccaagctttggccatatgcttgaggcaattggagcttttggtagaggtctgagaggtcctagtgcttatgagatgagtggaccattcttgaagagagcaaagcaaaaggtattggatagattcaagaatcaccatgaatcatggcagctcacaggttgctcggtgatgacagatgcatggacagacaggaagggtaggggagtgatgaacttggttgtccatagtgcacatggggtctgtttcttagatttagtggattgctcagcagtaaagaaagatagaaaatatgtgtttgaccttgtggacagatgcatccaagagataggggaagaaaatgttgtccaagtggtgactgacaatgcaagtgtcaacaccgcagcagcaagtctaatggcggcaaagagaccctccatattttggacaggatgtgcagcccattgcttagatctcatgcttgaagatattgggaagcttggacctatagaacaaacaattgctagtgctagacaggtgaccacattcttgtatgctcatacacgagtgttggatctaatgaggaaatttcttgggaatgacttggttcattccggggttactcgatttgccacagcatatttgaatctaaaaagtttacaggacaacaagaaggatatagcaagactctttagatcggatgaactcaatgagttgggttacttaaagaaggcaaagggaaagaaagcaaacaaagtggtggcattagaaggattttggaaaaatgttgatatggctatcaatttttttgagccattggctaatgtgcttaggagaatggacagtgatgtacctgccatgggttttttccatggatgtatgcttgaggcaaagaaagaaattgctacaaggtttgataataatgaaagtaaatacagagctgcttgggacataattgataaaagatgggataacaagttgaagactccattgcacttggctgggtattacttgaacccatacttttattacccaaacaagtctagcattgagcttgatggttcctttagagctgcagtaatttcttgcattacaaagatgtttgatgatgaagacactcaggatagcataattgaagagctcaacatataccaagaccaacaaggagcatttgggcatgacattgcagttagacagaggagaaacaagaccttcaatccagcaaagtggtggatgaaccatggcacaaccacaccacacctgaggatattagcaacacggattctcaatttgacttgtagctcctcaggttgtgagagggcctggtcagtctttgagcagatccacacaaagaagcgaaacaaattactgcatgatagaatgagggatcttgtctttgtgaaatttaattctaaactaagggagaagagagacaacaagagcaaagatccaatagagaaggaattgaacgatattcttgaggatgatggcaatgagtttattaccggtgttgttctagatgaaaatgttgatcaagatgaagaccaagagggtgcacatgacgaaccataa

SEQ ID NO: 16784 - DNA, 435 bp, Zea mays
  Peptide Sequence Number=SeqID_58563
atggccggttctaaagatcacatcgagatctcccaagacaatatccttaggccggttgtttcaagcccgtcgaccgatgagcaaaaacaatatgaagacctcatgagtcaagtgagggagaacgcacatcgccatctcgccaaggttgagcaggaagcgacaaagaaattcttatcatacttcatcgtggatcatcactataagattaccaagcatggagagatcgagattgcatccctcctaccttcgctacaaatctcgaatccccagtcattgtatggtatgccgatgaattcatatccagggcaaattccacctccgtcgtccctgcttgacatatcgtcgacactggatatgactggaccgttcacatctaatcgcagaccgtccatccctaacattgacagtttggctctcccctaccggacagtctag

SEQ ID NO: 16785 - DNA, 282 bp, Zea mays
  Peptide Sequence Number=SeqID_58564
atgacgggggagaagaagatgttctcttcctacgtcaagaacaaagactcccaagactcaatcatattcggtgacgggaatcaaggcaagggttatgatgacgagaatgcagatatttcccatattgggagcataatagttgtgaaggattggttttccaaacttgacaaagataatgatggggtcttcttctccgtgaagaaccctagaacttgccttcgggtagatcctatcaaggaggagagttctaggggtctaagagggatgattgtggaagactaa

SEQ ID NO: 16786 - DNA, 312 bp, Zea mays
  Peptide Sequence Number=SeqID_58565
atggcgggtggggtatatacgagtgataaagaagcaggggagagacggaagattgagaggatgataaggcaactcgagaagcaacaacgttcaaatggtgatggtgtcaacaataatctgtcaaaattgcgagaagatcttgaatatgttagattcttccctaagaatgagaaatatgtctcgttgttcactggagggaatagtcaagatattgttcaagagaggaataaatggcgcaaacagatcaaggagaatctcatggctgctgcagcaaacggaaaagatttagaaggtgtttgtttgcgttactga

SEQ ID NO: 16787 - DNA, 582 bp, Zea mays
  Peptide Sequence Number=SeqID_58566
atggactgtcaagggaagcatggtgtgaagcccccgacgcctatgctcgcggggtcggatgccgcctacgtctgcaaggcgttggtcgtgtcgaacaagggcagtagatcgatctggagcagcaacgaggccgcgggcgggggacaagggcaggggcgccgttgcaaggctggagcagcagcggggccacgggcggggacaagggtagggggcgccgttgcaaggctggagcagcggcagggccacgggcggggacaaggcatggtttataagttgctaccgcaatctttggctgagcgatatggcagtcgcgcggcggctctcctcgagcgcgtgcgcagcggctctcctccccacaggcagtcgtgcggcggcctcatccccgccggcgagcctccactcccctccgccggtacgcctctatcgccggtggcctccccctcggcagacagcctcgcctcgcttgcttctattgctgtgctccaccacggagccctaggtggagctacgaaccccgtgatccccgacagtgtggcaccggagctcggcggcgacagcgggcacatccccctcatgccctag

SEQ ID NO: 16788 - DNA, 318 bp, Zea mays
  Peptide Sequence Number=SeqID_58567
atggcgaccagcgacgggcgctcaacgccaccgcgccgcctgcgaacccatgattcgacgattgagaatacatcaaagaataaaaatgtggaactcggattttcagatgaagagcgtgaccaagaatttcctgattttccatcatttattccattcttacctcctctgagtgcagctaacctaaaggtctactatgccacacgtttcaccatcatagttgggataatggtgttcggtggttttcttgcaccaatcattgctttgaatgcttaccaagttgatgtgctctcatgcggctggaagttaaacttggtctag

SEQ ID NO: 16789 - DNA, 437 bp, Zea mays
  Peptide Sequence Number=SeqID_58568
atggaccaggaacgcccattcacggtcacaaactaccaacagcgaagaacagacagaaaaaacaaacagccaaatcaggagcaagaacagatgggcctgcagtcaaagcacccaccaccaccaccaccacgcgacgcccgcctgcccgcgcgcaccacccgcccgccgatccctcccccctcctttaacgccacagacatgtgggtctacaacctcacgggtcccacctgtcaaccaggcgatcttggcaccattcacgtgcagacaaagcgccggatcccttggggtttggttgggccacgccttttgaccggtccaatccgcggggcccgctgcccggactgcgtcgggaggcctatggtactggtaccgctcgcctctctgccctacacgctgtcgagtggacccgagcgtgagtgggacccatgccgcagagg

SEQ ID NO: 16790 - DNA, 210 bp, Zea mays
  Peptide Sequence Number=SeqID_58569
atgggcgtgcttggtttagatctgggctcttgttttgaagtcgaggcgagaacggtaatcgggaggtgggtggcagccagagccaggacggaggaccaccggcacaggcacccgcgagagactgttgaccggaaccgatgtttaatttttgtggatacgggtgacccgatgggtgacccgtacatgggtatgggtacaagggtgccatag

SEQ ID NO: 16791 - DNA, 828 bp, Zea mays
  Peptide Sequence Number=SeqID_58570
atgaagtttatggaagcatacagcggcccagttgcatcagctacaaatagtgtgactcctaaaggaaatgctgagaagaggcccctgactcgtgataagtcagatgatgaagatgaggccccagatcctaatgctgttcccacggacttcactagccgagaggctaaggtctgggaggctaaagctaaggctacagaaaggaactggaagaagaggaaggaggaagaaatgatttgtaaaatatgtggagacccaggccattttactcagggttgcccctccacacttggggcaaataagagaaatgcagacttttttgaaagagttccagcaagagataagcaagtcagagatcttttcaatgagagggtaataagccagattgagaaagatgtggggtgtaaaatcagaatggatgagaagttcctgtttgtcagtggaaaggatagattaatattatccaaaggtgtttctgctgtgcataaaattattcaagaggctcaagctcatgccaactttggagcaaaaggccgtccagcccaatcaaaatctccacgccatacctcttatcttgatgaattacctagaacacatggcgagaataaccaatttgctgcatcacgagtgcccaatgattggggaattgagaggcatggagcagatgccagttcaagtcttaggtttgacatgccatcccaccaacagaccttggaagaacttgagatggagtttaaaaaagaagctacacaattagctagagctcgtgaccaagaggaggatgaagagaactataggcatcgagaggtcaaaatatttggggtctgctaa

SEQ ID NO: 16792 - DNA, 276 bp, Zea mays
  Peptide Sequence Number=SeqID_58571
atggaggcttctgccccatgcgctagggaggaggggctggagcttggagatggcgccctggctgctgccgtgtgggagagaagacagggagatggagagcgcagggatgatttaatgaggcatcgctggaattccattggccgaaggcgcggtcgcttggcactggttgaaaggagcggctgcaggccattggctgctctgcggattggacacagagattttaagccgaattggagaaaatttattagaggacaacacattggagattccgcttga

SEQ ID NO: 16793 - DNA, 1473 bp, Zea mays
  Peptide Sequence Number=SeqID_58572
atgtctctgaaatcaggaaaggaaatctgggattacctcaaggctgagtatgaaggagatgagaggattcgtggaatgaaagtcctgaatctaatcagggatttcgagttgcagaagatgaaggagtctgagtcagtgaaagaatattctgacagacttctcagcattgccaataaggtgagattgcttggttctgagttgaacgactctagaatcgtagaaaagctgctggtcactgttccagagaagtttgaagccaccattactactctggagaacaccaaggacctgtcaaagatctctcttgcagagctcttgaatgctttacaagcacaagagcaaagaagatccatgaggcaaaagggagtgatagaaggggcattacctatcaagcatcaagacaacaacagagaatcaagtgagagctggttgattgatagtgggtgcacaaatcacatgacctatgacaaggagctcttcgaggaattgagaaacactgaagtcaaaagagtgaggattggaaatggtgagtacttggaagtcaagggaaaaggcacaatagctattacaagttatgaagataaaggctataaagtgctatttgagaataagcagtgcttgatcagagatgctaatggcagagacttgttcaatgtcaaaatgaagggaaacatttttgctcttaatccaatggaaaatgagcaaatggcttttaaatctagagttagtgctactgagacttggcacaagagacttgaggctggaattgagcatcagttgacgacgccatacactccacaacaaaatagagtcagtgaaaggaggaacagattcataatagagatgactcgatgtatgctttatgagaagagtcttccaaaaagcttttggggagaagctgcaaacactgctgtgttcttgcaaaatcagatttcaacaaaagctgtgaaggatcaaacgccatttgaagcttggtatggttacaaaccttttttaaagtttcttagagtgtttggctgtctgtgtttcacttacattccacaggtcaagcgtgataagcttgacaaaaaggcagaagctagcatttttgttgggtatagcactgtatctaaagcttacagagtctttcaaccacacactggacgtgttattgtgagcagagatgcttattttgttgaaaatgagcaatggaattgggaagactcgaccaagatgaaccaaacttctagtgcaccaaatcattttaccattggcagcacgttagaagagcctgaagatgaaaggcaaaatgtcttggctaatgatgcacctgtcagaggtacaaggctgctctccgacatttatcaaatatgtaacatgactatttgtgagcctacagggtatcatgatgcaaaaaaacagtcaacattggatggctgcaatgaaggaggagcttgcgatgatcgagaaaaacaaaacttgggagttggttga

SEQ ID NO: 16794 - DNA, 243 bp, Zea mays
  Peptide Sequence Number=SeqID_58573
atggccgcaggtaacaacatcaggctccttgaagatgatttcagtgagaacataattgttgagaagaggtactactcgtacaggcctgatattcagtgtaggagctgcaagcagtttggtcacattgaaaaggtggcagcggagaaaggaggccatgcactgggggtgccaggcgtggtgagcggggcatgcctgaatgctgattggggcggtcttctcatgcctagaaggaccaaattgtaa

SEQ ID NO: 16795 - DNA, 1203 bp, Zea mays
  Peptide Sequence Number=SeqID_58574
atgagtctggaatcacgttactcttataggacccgcctaagagctagagttatggacgctgaactcaatgaaataatggaaaggatggagagaacccaaagagagttacaggagcaattgcccaagtcgcaacaagaggcgagagatttgatggtgagatctcgagaggaatcgctcaagcaaaaggatcaaatggccaaaatgatagaaatgatgacggccttagttaaaggaaagggacctatgcagaggcctaatatcatagagccgcctcagtcaagagctaatcaagatccactttatcccccaggattcactctacctcatgtccacgcaatgcaaagaggatacccccaaagggaacctacagtcttggaacaacatcatgctccatctgctcatttagggctaggaatgtttgtatcaaaccctggggctaatccctcagatccaattgttccagacctggatgatcctgtagaaatagcaaggctaaaaattgatgacaataatactcaggataagtatagaatcctggaagagaggatcaatgcagtagaaggtgttgaagttttctctgctttgagtgcgaaagagctcagtttggtacctgatctggtcttaccccgaaaattcaaggcgccagattttgagaagtatgatggaacaagatgtccaaaggcgcatcttatcatgttttgccgaaagatgactggttacatgaacaatgataaattattggtacactgctttcaagatagtttggtcagctcagcccttcgatggtataatcagctcagcagagagaacccgatcatggagttggtagggagtgtcacaaaagactttgcagacattgtaatatccggggagcttatagaaaccgccatcaagagtgggagaatggaatgtcccgagagtttaaagagggcagtgcccataaagaaaaaggagccaaaagcccatatggttggaaccgagagccactgtacccccaatccatacccagcccaatcacgacctcgttatcgcccacctacaaacttctactttcctttccaaagtccttactatcaaacacctccctcttaccccgtctataccatgaataatcaaagaccattctccatgttcccaccaagtaccatgcctacacaaacccaacccaaaaatgaacaaagaccagcaaggcccaaattctga

SEQ ID NO: 16796 - DNA, 810 bp, Zea mays
  Peptide Sequence Number=SeqID_58575
atgacggaacctctagccctcgacattaagacattaaataatcaatttggtaccgattttgggcgtcacgagggtgctaacccttcctcgtgcgtaactgactcccgatcctgttttcctaaatttcgtagaccaaaatatgttttaagatgcagtgcaactggaagtgtcatcgagattgatcttagtggccatagtctaaatgggagtataacacctcaaataggtgcactttccaaactcaagtgcctcaacctatgctcaaataatcttagagtgcttgatgcttcttataatgaaattcattccattcccttggaaattgagaagatggagaatcttgtttctctaaatttgacgaggaatctcattgttgatatgccttcagctataggtcttttgaccaatcttactcacttgattatgaactctaatccattacggagcatcatccctccctatatatcgaacctgaaaaagctaatgactctccatctcggaaactgccagctctatggttccattccaccaaatattggaaagctgaagagtttggttaatctccgtctctcgaacaacatgcttgttggtccaatcccatcttctatcagcaatgtaaccaatctagagtcattgctccttcagtacaaccaacttaatggatccattccacaagaaatcgagctggttgattgcaattcagaagagcaaattgctgatatctttacaaaggcacttaatatgtcaaagtttgttaaattaagaaggcaattaggtgtcactagcatggaaactaaggaggagtgttga

SEQ ID NO: 16797 - DNA, 1362 bp, Zea mays
  Peptide Sequence Number=SeqID_58576
atggcattctctttttacacttgttttgctattttacttttttcactctctatagcagtgaggagtagtgagattactagagcaacaaataatgattcagaatctcttgtagctgaggaaaaagcattgatggaaactgggtggtggagtaactacagcgacataggtgttcaccattgtacatggcctggtgtcagatgcagtgcaactggaagtgtcatcgagattgatcttagtggccatggtcgaaatgggagtataacacctcaaataggtgcacttttcaaactcaagtgcctcaacctgtcctcaaataatcttagagctataggtcttttgaccaatctcactcacttgattatgaactctaatccattacgaagcatcatccctccccatatatggaacctgaaaaagctaatgactctccatcttggaaactgccagctctatggttccattcgaccaaatattggaaagctgaagagttcggttaatctccgtctctcgaacaacatgcttgttggtccaatcccatcttctatcagcaatgtaaccaatctagagtcgttgcttcttcaggacaaccaacttaatggatccattccacaggaaattgggaggctaacgaatttgattacactgtatctatggtctaatatgcttgttggtccaatcccatcttctatcagcaatgtaaccaatctagagtcgttgctccttcaggacaaccagcttaatggatccattccacaggaaattgggaggctaacgaatttgattacactgactctatcgtctaatatgcttgttggtcccatcccttcctcttcgggtaatttatccagcctggaatcgttctttctttacaaaaataaaataaatggtcccatcccttcctctttgggtaatttatccagactggaatcgttctctctttacaaaaataaaataaatggttccaccccattagaaataaaaaatcttaagaggttgactgacttggatcttggtgccaataacttgagtggtcaaatcccttcatttctaggtcttttaccaagcttgagtagtttgtaccttgactcaaatctgcttgaaggtttcatcccattagatattggaaaattaaagaatctaactgtattgtatctctctaataataaactcactggctcaatccctttatctctacttcatttacctaatttatggcatctatccatggcttcgaatcttttggaaggtcccatactgttgagcatggactgcaatgcaacggaaggccatgaagcagaccagcagctgcagcagaccagcattcgagaaggaccaggagcacctatggctttccttcattaa

SEQ ID NO: 16798 - DNA, 204 bp, Zea mays
  Peptide Sequence Number=SeqID_58577
atggtggctaaagacaaggctcaatcagcacctgcaagccatgatgaagttgatcctgatgagctgttggatgtgagaagcaaaaaaccaccaccaaacttgaccgttggtggaggttgtctgttcgatggcgcaccggacagttcggtgcacaccggacatgtccggtgccgcagccacgtcaccaatgccgttggattctga

SEQ ID NO: 16799 - DNA, 2241 bp, Zea mays
  Peptide Sequence Number=SeqID_58578
atgggttcttctccttccaaagccactggagaggatgccctggttctgtgcaaggatcggatgcgccacatcagacaagctattgactcgagagatgcactgtcagcagcgcacttatcttacacacaatctctccgtagtgtgggtactgcactgcggcagtatgctgagtctgagatctcaccggaatcatcgctctccatttcagaagtggataagtcaccatcacattcctctatggcatctccttcgccttcgcgtgcagtagagagtgttgcctctctggggcatcgagcaagtccatctattactccaccctcaacacgaatccattgcatgaaagcagcagcaaccactcctttgacctttgtgatagatcaatctactgctgaatttgtggggcgcgaatccccagtatcagcttttgtcccacccccaccaccattgcctccagaattatgtaccacgtgggacttctttgatcccattgatgctgctggtacctcttcctccaacaatgagaatgaggtaaccctgaacttcagtagattgagggatctaagagagtcaagggtagctgaagtagttccattgaaagaagttgaagaggaaatcatgtccagaaggcatacagaaatttctgatgataatacaccacctgagcaggaaagagagccaaagcaaggtgggaccggaaaaccaagtcagttggtggatacttcaaccaaagctacatctgagcaggttgctgcaaagttggaggaaagtgaaatggaaaaagaattatgtgcagaggcagaggacccttcagagttcatcactcatcgagccaaagattttgtgtcgagcatgaaggacattgaaacccggtttatgcgtgcagctgaagcaggaaatgaggtttccagaatgcttgaaaccaagaagatccgacttgacatatgtgctaaaataccaggttctccagtcaagctaccttctgcccgatttgtgtcagcacttcgagtgtgctgcaatcgtgatgttattctcaaccagggtaaccggggtcttttcattattctcttcccaatcataatgtttcctgaagtactaattttaagtgtctttgtagaaactgcgcagcatgtttcaaaggttgtcacatggaagcgttctgtctcatctctttcatcatcatctaagagtgcacttatgacatcgataatgaaagatgatgtggatgacagtaatagtgattttgttgaggaattcgccatggtatccggaagccattcttctacgttggacaggctacacgcatgggagagaaaactatatgatgaaatcaaggcaagtgaaaatgttaggaaggcctatgatgagaaatgtaacctactccgacgccaatttgcacgaggcctaaatgcgcaggtgattgataagactagagctgttgtgaaggatctccattccagggtatctgttgtgattcaagctgttgatgcaatctccaaaagaattgagaagataagggatgaagaactgcagccacagcttgtcgagctaattcaagggctaatcagaatgtggaaactgatgctggaatgtcaccacaaacagttcatcacgatcacattagcataccacgtgaaagactcgacctcggcgcgtcaaggtgagcaccaccatcaccgccaggcggcgatgcatctgtggaatgagatggacagcttctcctccagcttcagaaactgggtcaccgctcacaaatcgtacgtcgaggccctcaacgcgtggctccagaagtgcgtcctgcagccgccccaggaccggcgcaggcgcaaacgcaaggtctccttccctcctcggcaggctgtctcccctcccatattcatcctctgcggggactggctcgccaggacagaacctctccctgctgacgagctatgcagatccctcaaagacgtgatgcagctcctccgcggctcgttcgagcaccgcgacgagcagaacaggcccagaagcggcgagtcgcaggagtgcgggatgctggagaacagtagcgagcaggaggcggcggctaagagtgggagttgtgcagcatcagctgaagggctgcagtcgagactgacggcggttcttgaccgcctgacaaagttctcggaggcatcactgaagtgctacgaggagctcaagcagaactacgagatggcctgtgctgattataggagagttggaccaaatgctcagcttgcttag

SEQ ID NO: 16800 - DNA, 2055 bp, Zea mays
  Peptide Sequence Number=SeqID_58579
atggcaaccggatccgccgcgggagaggagtcatcggcggcggcgcgccgcctccgccgcctctccctgcacctcctccagcccgccccggccccggccgaccgccaccagcagccgctggccctcgcggcgtgcgcgcgccgcgtcgagggcggcgcggacgtggcggcggcgctcgcggcgtacctccgcggccggcaccgcgccgcgcagatgcggctgttcgacttcttccgggcgcgccccgacctgcagacgcccgtcgagctgcccacggccgcgcaccgcgagctctgctaccgccagctgcgcgcgctcgtgcgcgaggccggggtgcgcccgctcacgctcatggccaccgaccccgccgagtacttcgccgtcatggaggccgccggcggggccgacatctccctcggcgtcaagctcggcgtccagtacagagtagtttgcatgcttcaattgataggcgatgattccagactccgcgtgtttcatgtcggaaccaaaaagcacagagataagtactttgatggaattgacaatttggattatccaggctgtttcgcaatgacagaactacatcatggatcgaatgtccaagccctacagactaccgctacatttgatcctgtcactgatgagttcattattaacactccaaatgatggagctattaagtggtggatcggcaatgctgcgcttcatggaaaatttgctactgtctttgcaaggttaattttaccccttcaaggaaaaggaggggaggctgctgatatgggcatccacgcgtttatcgtccccatacgggaccttgaaactcacgctgttcttcctggaatcgagatcaatgactgtgggcacaagatcggcctaaatggtgtagacaatggtgcgctgaggttccgctcagttaggatacccagagacaatcttcttaatcggttcggtgatgtgtcacgggatgggaaatacacgagcagtctgcccacaattaacaaaagatttgcagcaacccttggggagcttgtcggtggacgagttggcattgcttactgttctgtgggtgttctcaaagtcgcagtaacgatcgctgtgaggtatgctctgctgcgccaccaattcggtccacctaagcagcccgagatcagtgtgttggattatcagtctcaccagcacaaactgatgcccatgttagcgtcgtcgtatgcgtttcacttcgccacggtgcagttagtggataagtactcggaaatgaagaaaaccaacgatgaggaccttattgctgacgtgcatgttctttcgtctgggttgaaagcctacataacttcatatacagccaagtctataagcgtatgtagagaagcctgtggtggccatggctatgctgctgtaaatcgttttggagctctgcgcaatgaccatgatatattccaaacgtttgagggggacaatactgttcttctgcagcaggtcgctggagatctcctgaagcagtaccaggagaagtttaagggagggacactttcagtcacctggaattacttaagggactccatgggtacctacctgtcccagcctaatcctgtcactgcccgatgggagggcgaagatcatcttcgggatcctaatttccagctggatgcattcagaaaacacagcaagacgcttggaggtttcggtgcgtggaatagatgtctgaaccatctgcttacgcttgcggaatcacacatcgagtccgtcatccttgcaaagttcattgaatcggtgaaaagctgccctgacgaaaaatcacgggaagtattgaagctggtatgcgacctttatgcgctcgacaggatttggcaagatatcggaacgtatcggaatgtagactacgttgccccaaacaaagctaaggctattcataagctgacagactacctcagttaccaagtgaggcttgtggcgcgagaactcgtcgacgcatttgaccttccagatcttatcatccgtgccccaattggcatgcaatcggaggcctatgcacagtacacccagtatgttggcttctag

SEQ ID NO: 16801 - DNA, 1242 bp, Zea mays
  Peptide Sequence Number=SeqID_58580
atgacctcctccgtatccccagccgcggccgcctcccagtcccaactgcatattaccaccaccggtacgggcaccgggtccactgcaatcatatcgccctcctcaaaccaaagcaccagcaacgccaacgcgcgctcctcctcctcctcctcctcctccccgcattccgcgagcagcccccctcgagctcgcggccccagcaccactggaggcactggcagcagcggcggaagcggaagtggaagcgggtgcacgaaccaggcgtgcgcggcgtgcaagtaccaacggcgcaagtgcaacacggactgcccactcgcgccctacttccctgcggaccagcaggagcgcttcctcaacgcgcaccgtctcttcggcgtcagaaagatcctcaagacgctggagaacatcagtccggagctctccgccgatgccatggcgaccctcattttccagtcggacatgcgcgcacaggaccccgtcggcggctgctaccacctcatcctcagcctggagcgccagctccagatcgagacggccgagctctccgccatgctccaaacactggcgctcttcggccaggctactactactaccacgatgccaccggatcaaggcggcggcggcacggctggcctcgactacaccgcgtcatccaacctcctccacaacgctcagcaagaggtgctttacgcactctacaagaacaaacacgaagaagctgacatcgtacattccgacaacgaggtcgtccgccaccacggtggtggaggccacggccccaacaaggatgatcacggccggcaacagcatcaggtccttaactatttttattgcaacaacgcaaccgcaagcgacgatgtcgacaacatgcaacagttccattttaacgatagctgtgccgccgccgacaaagtggatctgactcctccggcgggggctgacgaaatgagacatcatcatcagcacctcgacgagaactgccagattgaccacaaggattatttcgagattaaagcagcggccgcactcgtcgacgacgcgtttcacatgcgacaggaggtggtggacgtgagcgccgaggttgacatggaggacatcaagacggtggatgtgaataatgccggcattggcggcgtcgatatcaaggcgatggccatgaacgccaacgtcgtcgatgtcacaccacaaatggcagctgagtcatcgcactgcagactagggctaggcttttcatcgttctga

SEQ ID NO: 16802 - DNA, 111 bp, Zea mays
  Peptide Sequence Number=SeqID_58581
atggcggttgcacgaggcgcggtaggcttcgacaacgacggtggtggccaccaccgagcgcctggtgcacgcagaaaactgattttgtacgtagcgtaccgtattgcataa

SEQ ID NO: 16803 - DNA, 696 bp, Zea mays
  Peptide Sequence Number=SeqID_58582
atggatgagactcctacgtgcctctgctccagcgatggatgccggggcgcccttctctggcccatggccgccacggtgcgcagagcagagaagcacctctgttcctccttccttcctccaatgtcgaccgacgccatggaaccaaacccaagatctccatctctaatacagcgcgcagggcatttctcagggtccgagctcgagcagccccacctggccgccatcctccccagaccgacgcccccttccactcctcccatgttcagcgcctggagcgaacccctgccgcgcctgagatccaggcagccatggagggcagccgaaccccttctccatggcttgagccagcgccctctccctgctggttccttggtcgtcccttccctggtgggtactcagtcaccctcccctatctctattctagcagctagcacacgaaatcctcctcggtgcctagtgcccatgccgacaccacgccttctcccatggctgagcgtgggcgctcttttccccatgccatggatgcacctccacctgctcctgttgcatggacgcaagccccagctcgtcgtggtcaacacgtccaatgtgcccctcctagagacgctcgacctccttgttgtgctgcctcaccctcacttccatcttcctcgctgttctctacaacgcccattgactgttcgacgaaacgtctga

SEQ ID NO: 16804 - DNA, 387 bp, Zea mays
  Peptide Sequence Number=SeqID_58583
atgcatcccgaccaggttgggaggatcatcatccagtgcatgagtgcgctgtatcgcctgcaggccctgcaaagtgatgctatgacacatttaactgggctcgctcatactacaaagactacccttgatgaaagggaagtcttcatggttgatctgtcttcggagttggtggagaaggatctccagattgagcaaatgggcaatcgcacccaagagttggagcagcaagtggagatacggtacaagaccattgaagtcctagaaaatcaactccacgatgtgcaagaggagctggatgaggccaacgttcatctagatatgcgccatcaagatatgaaccaagcaatggaggcagacggaaatagcgaggatgaggaggatccttag

SEQ ID NO: 16805 - DNA, 282 bp, Zea mays
  Peptide Sequence Number=SeqID_58584
atgccgtccgcgctcctcctttgggccatggttcagcttggggatagcttaagcgcgcagcaccaatggaacagcgggaaggttgggatctggtggcggccgtcccgagcaatcctcgcccgcaccatcgattcatccactaagccagccctggaagttcctcttcaccgtcggggatgcgtctgtgggcgtggcgtggaagaacaaccatgccggcatccccaattgctcgccagacgtctctggatcgccccgtcgccgtacacccccatggccggatga

SEQ ID NO: 16806 - DNA, 198 bp, Zea mays
  Peptide Sequence Number=SeqID_58585
atggaagggaatagggaaggtttattgcctgttctagtacctcgagttggaatggagttcggtacaatagaagaggcttggatgttttgggttggttatggaggtctaaagggctttgaggttaggaaaatgtacacaaacaaaagaaagtcagatgggaagagtggagtcagtaacgatcttgatgctgaattctaa

SEQ ID NO: 16807 - DNA, 825 bp, Zea mays
  Peptide Sequence Number=SeqID_58586
atggctgcccctcgagaggaaggcgccaccgagctcaaccaggagagccgatggccggtgtggtcttctctgctgctgtaccggcagatcctcgacgagatcgaggccaacgactacgacaacttcacccggaaggcctatgttccgaagatgaagaagctgatggcgttgcccaaggcgtacctgagatcactggtgaatgaactaatctcagattcaattgcttcaaagaagccaaaaataaggaagagagaaaataacaattctgtttcaagttctgctcccagcattcctaatactcaagatgttatcactaccttctgtgaggtggtggaggatttctgtggaaaaaccaaaattcctgacgatggagatggcggtgactggttgtcaatcccacttggtgatgttaaggttctcgtgaatgaaattacatctgttcgatccaaaaggatattgcatgaggttcctatggatacagttacaaggttattggatgtgattgaccgtcagattcgatattctcaaggtttgtcgatagatgtgaaagaaaattctgatgtcgttgatgctgaacctctggttttctctgctttggagtccagtcatgctgcgttggcaattatgacccaccatgatatgccaaagcaactgtaccgagaagaaattcgatattctcaaggtttgtcgatagatgtgaaagaaaatctgtttacgtgcatctgttccttccacatcgtgatccgggtcaaggagattctgaaggtcagggaaatcggcggcgagcgcagcctcattgataacttcttctgctaccacgtgtag

SEQ ID NO: 16808 - DNA, 456 bp, Zea mays
  Peptide Sequence Number=SeqID_58587
atggctcgagcacctggcggcgcccgccggcggggcggaggcagcggcaggaggggccaggcggacgggggccaggcggtgcgcaagggccactggacggcggaggaggacgcggtgctgctgaggcacgtgctcgtgcacggcccccgggactggagctccattcgatccaaaggcttcctgccgcgcacgggcaagtcctgccgcctccgctgggaggagcgggtggtgctggagctgcaggcgcagttcgggaacaaatgggcgaggatctccacctacttgccgggcaggacggacaacgacgtgaagaacttctggagcacccgccagaagcggatcgccaggctgctgggaacgcctccccgcggccggtccagcaggagccggagccgcagcgccaagggcaaggcgcctgttgttgcctcctctctcgagtcacgacccgccaccgtg

SEQ ID NO: 16809 - DNA, 279 bp, Zea mays
  Peptide Sequence Number=SeqID_58588
atggccttcggcggcttcgaacgccggcaagagcccggccaccgtgcatgccggctcggagctccggaaggggggcgtaccctaggggctccagagcagcctccaagctgtccaggaagtcccatatgcggagagcctggaccgagtggtccgcccgaacctcggtcctcggccaaggcccggcggcggagtccagctccggattcccttcaactcagtgagccttatccaggctcgggcctccgcctcctcggccctttgatcctggcatctacctag

SEQ ID NO: 16810 - DNA, 336 bp, Zea mays
  Peptide Sequence Number=SeqID_58589
atgacccatcttatatctgggcttgacgcaaataaacgggagctaaacaaggttggttatcttgagaactacgttatcaggtatcaccaggaaactcaccaagggaaaacgagtacaacgactgtcattaggatagatttcggtcttctggatctagattccatcgaatcctacacaagggttgaatttagaaacaatgtccccttgatccttgcaaaactgtatcaatatgacaaaacatcttcttctgaaagtatctgcacatcgagacttaacaaacggattgcatatccttgcaaggattatttcaggaacttcacctcaagtcacttctag

SEQ ID NO: 16811 - DNA, 366 bp, Zea mays
  Peptide Sequence Number=SeqID_58590
atggcgcgggcgacggtaccaaatgttcaccataagccaataaaaagatcaagagaaagggttcaaacaaaggagcaaagggacaaccgaaggcaccctggtctggcgcaccggactgtccgttccggttgcaaaccgggacatgttcgggtggcgccagccacgtcacccgggcatttagggtctcggaccggtgggaagctctggacttctggggccggccttgaaggtctgggggcggccccggacattgaaactgttggaggggccgtagtgggcaagcaatggggggttgctggacttttgggggcggcctgggggggcattttaatgcgcgctggaggtagagggttgggggcgaagtga

SEQ ID NO: 16812 - DNA, 531 bp, Zea mays
  Peptide Sequence Number=SeqID_58591
atggcgtgtctggttcgaggcatacaaagtagtatcttgtgttcgagtgatattgtaggcactgagaatgcgtcaatggcgctgatgcagactagggctataaataggagtgataaagttcgcccccaaaacgctgtgcctaaaggttatcagggcgatttagaatcaacggtctctttgttggatgacatgtatcttaccatgtcgtcctatacaagactgtggtacataggtatggctgtcaagaacattggctgtgctcggttcggtgacttgtttacgcacggcaccctctgcgccacggcagaggcaccatctaggcacattgccgtgtatgatgagtatgagcatgaccaatgtgatgggtttctgaatgctgaccgtcacagggtactatgtgattacggtcacatggttgtaattgtcgagagaacaattggaaacagaccaagctttcctacgtccgatagggttaagcttgacgttgcagcatgtagccgtgctactgatgtcgacatggcaaagcagtga

SEQ ID NO: 16813 - DNA, 861 bp, Zea mays
  Peptide Sequence Number=SeqID_58592
gcgcccggggaggtgttggccaagtcctcgcacagcacgctgtaccgcgccgggctcagcgccggcgaggccgtcgcgctgctccggttcgtgcgcccggcctgcgccgcgggcgccgacgaggcccgcgcggccgcgcgggcgctcggcgccgcgcgccaccccaacctcgtgccgatccgcgcgctctacatcggcccccgcggggagaagctgctcgtccacccgttctacgccgccggctcgctgcgccgattgctgcaagagggaatcaatgattcacagaggtgggagataatctgcaagctgtcgatcgggatcgccaaaggactggaccacctccacacagcgtcgcacaaggcaaacgttcacggcaacctcaaaacaaacaacgtcatgctggacgccgatttccagcccaggatctcagacttcgggctctacctcctgctgaactccgccgcggcgcaggagatgctcgagacgtctgcggcgcagggctacaaggccccggagctgatgaagatgagggacgccacaagggagagcgacgtgtacagcctgggagtgatcatggtcgagatgctcgctcagaaggaggtcgcagacggccgtaataagccgccgccgaacgcgcgcgacatccacctgcccgcctccttcagagacctggtcctggagaggaagatctcagaagctttcggctccgagcttcttctgaagcggagcaaggactccgggatggagggccgcctggacgcctacttcgaactggcgacggcctgctgtaatccgtcgccgtcgttgagaccggatacgaagaaaatactgaaaaggcttgaggacatagcaagacaataa

SEQ ID NO: 16814 - DNA, 801 bp, Zea mays
  Peptide Sequence Number=SeqID_58593
atggcctccggcgccgtaccaccgcagcgggtcgccctgctggcgctcgccgccgccctctccgtcgtctcattcccgcacctgtccctcctcgcctcgtcccatccgctcccgcaggaagctgctgctgctgctgcgggtgcggcggcgggaggcgaggcgtccgagcctcacggcaccgccgccgatggtgccgccgtggcgcggcgcgcgtgcacgtacacggtgcagatcaagacgagctgcgcgtccccgcggagctccgcggacgcggtgagcctcgcgttcggggacgcgtaccgcaacgaggtgtacgcggcgacggtgacgccgcggcgcgggttcgagcgctgcgccacggacacgttccgcgtcgccgggccctgcggctacggcgtctgctacctctacctgcgccggtcggggccgcgcggccgggtggacgcccgagtgggtcagggtgtacgagccggcgtccggcgcgccctccaccttctactacggcgacccgctccccgacggcgtctgatcctcgcctcgacggcgactgcggcaaggcgtaccttgccattcgaccggcgcaacgcaatgccgccgacagagatacaacgtcgtcgactcccacgcggcagagttcaccagttgctgttcaggtatcaagatctcagagcacccaagtcccaatcagctcataaactggtcacgtttgatagggaaaaaactagcaaaaaagacccatgtcgaacatgggaagaatttgagcagttccgtgtggagttcttcggggatccaacagtgtag

SEQ ID NO: 16815 - DNA, 264 bp, Zea mays
  Peptide Sequence Number=SeqID_58594
atgttctatgcgatagggtgctgggatttggcaggattatgtctcatctatattatggctcgcatgattcatatatttgccgctctgattcttcccatagagatcaggacatctactgttgacataaacgacgaatcacgagggcgtccattccaaaaggccaagattgagataatcttgggaaagagtgacagattcaatgagttgatggctgctgctgccgaagagaggggagaagttgaagaaggcgaagagcaggcttga

SEQ ID NO: 16816 - DNA, 714 bp, Zea mays
  Peptide Sequence Number=SeqID_58595
atgacgaccacgcgcgaccgtggcgccggcggcggatcggcgtcgagggtcggtgacggggacgtcgacctgggcgagggctgggactggggcgccatcccgcggctcctctcctccgcctgcctcttcctctgctccgggtgggtccgcttcgctcatgttcctctcccctcttcctccctcgctagcttcccacatctggtcaatcgagtgcgacctgcgccgcctgtgacagaaccaaccgtaggaggggttgaactgccgcgaccgcgggtgaagccagctgcttatgccggaaacttgatcacccaggaccaaattaccattggagagccattttggagcacaaccaccatcgaggttgaaccagcagatctcagtggtgttacttcagtcaatacatctaacttggcctctggaactggtagcagtcataaccttcctggacttggtaataatggacttgttctgtgggaacatacaaggcaggagtggactgaaactagaagtctgcggctgaaggtgaagcaggtgatatcagctgtattggctttgatggtttcagtttctactgaatcttccaattgtgtgctttggaatgcagcatatgagagtctgcttggatcaaataagccatttcctcaacccattcctcttcatgagatggtcgatttccttgtggacatctgggagcaggaggggctgtatgactag

SEQ ID NO: 16817 - DNA, 1278 bp, Zea mays
  Peptide Sequence Number=SeqID_58596
atgttcttcgacgggtcgctgatgaagacaggagccggcgcaggcttactcttcatctcgcccctcgggaagcacctgcgctacgtgctacgcctccacttcccggcgtccaacaatgtagctgagtacgaggctctggtcaacgggttgcggattgccgtcgagctaggggtccgacgcctcgacgctcgcggtgactcgcagctcgtcatcgaccaagtcatgaagaactcccactaccgcgacccgaagatggaggcctactgcgatgaggttcggcgcctggaagacaagttctacgggctcgagctcaaccacatcgctcagcgctacaacgagactgcggacgagctggctaaaatagcctcggggcgaacgacggttcccacggacgtcttctcccgagatctgcatcaaccctccgtcaagatcgacgacgtgcccgagcctgaggcaccctcggcccagcccgaggtaccctcggcacagtccgaggcaccctcggctccgcccgaggcaccctcggctcggcccgaggtgccctcggcccccgagggcgagacgctgcacgtcgagggggagcaaagcggggtcacgcctggtttctactggccaacggcggtggccgacgccactagaattgtccgcgcctgcgaagggtgtcagttctacgcaaggcagacccacctgcccgctcaggctctgcagacgatacccatcacatggccttttgctgtgtggggtctggacctcgtcggccccttgcagaaggcacccgggggctacacgcacctgttggtcgccattgacaaattttccaagtggatcgaggtccgacccctgaacagcatcaggtccgagcaggcagtggcgttcttcaccaacatcatccatcgtttcggggtcccgaactccatcatcactgacaacggcacccagttcaccgacaaaaagttcctggacttctgcgaggatcaccacatccgggtggactgggccgccgtggctcatcccatgacgaatgggcaagtagagcgtgccaacggcatgattctacaaggactcaagcctcggatttacaacgacctcaacaagttcggcaagcgatggatgaaggaactcccctcggtggtctggagcctgaggacgacaccgagccgagccacggggcttcacgccgttctttctagtctatggggccaaggccatcttgcccacagacctggaatacggttccccgaggacgagggcctatgccaaccaaagcaaccaagctag

SEQ ID NO: 16818 - DNA, 123 bp, Zea mays
  Peptide Sequence Number=SeqID_58597
atgaatgatgacacaagagagatgtcagccgatggcaagcgatgtcagtgccgaagggagcttcggctgatgatggaagtcttcttctccgtcgaaggtcttcaagacgaaggtatagcttga

SEQ ID NO: 16819 - DNA, 516 bp, Zea mays
  Peptide Sequence Number=SeqID_58598
atgggcgagcagggaccagggagcagcgcaggcccaagcaggggctggccgcaacgcgcgctgcgctggctgaacatcgtcgggccaccgcactggctgcgcaggctgactgccgcgccggtggccaggtctggcggcgcgccggagcagcgcaggcaggctgcggcaagcggctgcaaccataggcggcggcgcaacagcggcgagacggggctgggaagtgccgccagccatcaggcgggtgtagcggccctcgccggagtgatgcgcacgaccatgcctgtgggggcggggcacggcggccactgcgcacgtaggaaggggagggcgcaccgttacgcgccatggctggctacaggcgaaggaaacacagaaacaaagaacgggaaagtagaatggatgaaaaatgctcactcgctcgtcggagaaggactcgtccacgtcgtggagcaacgcgccggcatgatggtggtgggggtcaacgacgtagatgaagaaccagtacagaatttatga

SEQ ID NO: 16820 - DNA, 966 bp, Zea mays
  Peptide Sequence Number=SeqID_58599
atgctcaaggagccgtgcccctatcaccaggggcccgtcaagcacacccttgaggaatgcgtcatgcttcggcgccactttcacaaggtcgggccacctgcggagggtggcagggcccacaacaacgacaagaaggaggatcaaaaggcagaggagttccccgaggtccacgactgcttcatgatctacggtgggctagtggcgaacgcctcggctcggcaccgcaagcaagagcgtcaggaggtctgctcggtaaaggtggcggcgctagtctacctagactggtccgacatgcccatcaccttcgaccagggcgaccaccccgaccgcgtgccgagcccagggaaatatccgctcgttgtcgacctcgtcatcggcaacgtcaggctcaccaaggtcctcttgggcagaggcagcagcctcaacatcatctacgccgagaccctcgggctcctgcagatcgatctgtcctcgatccgggcaggcgcggtgccttttcacgggatcatccccagaaaacgcgtccaacccctcggacaactcgatctgcccgtctgcttcgggactccctccaacttcctaagggaaaccctcacgttcgaggtggtcgggttccgaggaaccaaccacgcagtactggggaggccaagctacgccaagttcatggccgtccccaactacacctacctcaagctcaagatgccgggccccaacggggtcatcaccgtcggccccacgtaccaacacgcgtacgaatgcgacgtggagtgcgtggagtacgccgaggccctcgccgaatccgaggccctcatcgccgacctggagagcctctccaaggaggcgccagacgtgaagcgccacaccgacaacttcgagccagcagagacgattaagcctgtccttctcgaccccagcaacgacacctccaagcagacacggatcggctccgagctcgaccccaaatag

SEQ ID NO: 16821 - DNA, 909 bp, Zea mays
  Peptide Sequence Number=SeqID_58600
atgcctggcataccgaggaatgtcgccgagcacttgctggatatccgagctggagcccgacccgtgaagcagcctctgcaccgattcgacgaagaaaagcgcagagccataggcgaggagatccacaagctgatggctgcagggttcatcaaagaggtattccatcccgaatggctagccaaccctgtgcttgtgaaaaagaaaggcgtgacataccaaaggtgcatgaaccacgtgttcggagagcacattggccgaacggtcgaggcttacgtcgatgacatcgtagtcaagacgaggaaagcctccgacctcctatctgaccttgaaacgacattcaagtgtctcaaggcgaaaggcgtaaaactcaatcccgagaagtgtgtctttggagtgccccgaggcatgctcctagggttcatcatctccgagcggggcatcgaggccaacccggagaaaatcgcggccatcaccaacatggggcctatcaaggacttgaaaggagtacatagggtcatgggatgccttgcggctctgagccgcttcatctcgtgcctcggcgaaagaggcctacccctgtaccgcctcttaaggaagaccgagcacttcacttggacccccgaggccgaggaagccctcgggaacttaaaggcgctccttacaagcgcgcccatcttggtgcccccccgctgccggagaagccctcttgatctacgtagccgcaaccactcaggtggagcgggtgcgggcctactcttcatctcacccctcgggaagcacctccgctacgtgctgcgcctccatttcccggcgtcaaacaacgtggccgagtacgaggctctggttaacgggttgcgcatcgccatcgagctaggggttcggtgcctcgacgctcgtggcgactcgtag

SEQ ID NO: 16822 - DNA, 429 bp, Zea mays
  Peptide Sequence Number=SeqID_58601
atgggcgacgtagggggctccagcgaggttgcagtaggacaatgccgagtcacggtgcgctggcgagtggcgcttggtgagggctctgccgtggcgacacgacgttgcagcgagggtgctaggatcttcgacgtcgggcatgaatgtcgaccgatatatggaagcagagagcgaagcggagttgctgctcaccgacgagcaaggactatggtcctcggcacggctcaacgagaagacgggggcgtcacggctccagatgatggcatgacacactggcgagatgtcggcaagcagcagtgcgtggcaagggagcaacagcgagccgagcagcagaggggaggaggagagagctcgttcgagggcgaggaacgaggatggcgaggtgcagtcagcatgttatataggtcggggagaatagttattcattaa

SEQ ID NO: 16823 - DNA, 1269 bp, Zea mays
  Peptide Sequence Number=SeqID_58602
atggcgccaggcgctccgcgagagtatgccctcgaggggggcgaagcggcgcaggacgaagcgcccgagtcaccgcaggaacgggaagaagcgagtcagagagaagaggatggcggcgtcgaggaggccgacgacgacgaggaagctcccactcacctcccgttcgcgccatcttccgagctgcttgatgacacgacaacagttgatcccagctacactatctcccttatacggcagctactaccccagggttccaatgtggagaaagagttcagcaaacgagatgactccatgatactaaacagtgtgaagcaatgtgccccggacgagaaggatgcaaattctggtaatggggaatcagcgcaacctgattataaggatccatgggaagagtgtggttgcattctgtgggaccttgcagctagtaaaccacaagcagaactgatgatgaacaatcttgtgcttgaagtgcttttggcaaatctccatgtgactcaatcctctagagtaaaggtgaagtttttggctgctgttttacgtaccagtgtgtctgtttcttgggctgaagctcttttacctgatgaaattctttcacgtgttctgtggatagttggaaacactctgaactctacattgcttgagaaggttatagactttctgtcaactatcatcgataatcaagatgtgaccgccattcttcttcagccattgataaaagtgggtttgatcaaccatactatcagtttgttagcaagtgagattgagaagctatcaaatgagggtaaattagacaggtcagattcccttgatttgatccttaatttcgttgaagaattatctgccatagacagttgttcaggagttatgtcagaaagtgatcagctgattcaagtgcttgaaagcatagttaagttacctgataaatttgagtctggtttgatgctcttgcgtcttgcatctttggtaattgcattatttcaatatttacccttcatggagggcctctttgacattcttgcactggtctctgatgataaccaagcccggaacgctctctggtgtatcttaccatgtttgctggcacaagcacaacagatggatatgaactcttcatctctcgagcagtttgtatctctattgcttggcaggttcacacacattaaagatgaccttgaaagccacagagttgacaaaaaagaggagttgacagctgaggacgcttacttgaagcatggggtatccgcatctgtatccttcctttcccattga

SEQ ID NO: 16824 - DNA, 630 bp, Zea mays
  Peptide Sequence Number=SeqID_58603
atggcccaaactaatctgaaccaacctttcacaatccctcctccgcctcagctagtttcttcatattctttggaaacaacaggttgtgcattcagccttgggtttgactctttcactacgatgtcccttggaccaaatatttgtgccaacatgacgcccatggaaagatctatatctgccaaagaacctgagaattcagaggatttgcctacagtagttagaagcagtgatgaaatggacactagaaacagtggcgacgttcgtcgtgacacagttgacactcttcctgagtcgaagcagagccatgaaagttgcgcttctgttagtaacaagttcgactctggagagtaccaagtcattttgcgcaaggagttgactaagagtgacgttgcaaattccgggcgaattgtgcttcccaagaaggatgctgaggctggtcttccaccattggtgcaaggagatcctctgatactacagatggatgacatggtgcttccgattatatggaaatttaagtataggtatgctctcagattaccttatggcatctttgaaatgaaacatcagaaaaaggaaacgattttggccaaacaacaaaagcagaatgtatattctggaagctgcaggtga

SEQ ID NO: 16825 - DNA, 963 bp, Zea mays
  Peptide Sequence Number=SeqID_58604
atgaaaaaccctaatcttcatcaccccgaggtctccagcgcccccgccgcttgccagccgccacctgatctgcggcctcccgcgtcccggccgccgcttggcagcttccacctcaaccgccgccctgcctcccgtccccatccccatcccccatccgcacgagccgtcgccggcccctcaccgctcgtgcctcccccaaccattcctccatccgcagcgcgtggcgccgcagccgcccccggcacgccgcacgtagacgagagcggtggaaccctacaaccccgactgtgcctctcgccctctcctgcccccgccatcgcggtcgttatcctgcgcgatccagtcgcgccgccctttctccccctcccatcccctcccaatggcacatctggttcctgcagacggggcagtctctctctcttcccatcgctcagccgcatccggaacctcgcctcgggtgtctcgtccacgctggagttcgcgtggggcgggacgaccgtgcgcgtgcgcggcaacgccggcgggtgccgcgactgcaccatcgacggcgtctccgtgtcggaggaggaggacctcgaggggttctaccgccagaggaggagacggtggagatacgggcgctgtgatcagcgaggcagcgcgctagagcgacgagagcgtgacgacgtggagatcacgggagtcctgcgcagcgtcgcggctgagcgaggcgcccgtcagacaaccattttttctagatttgatctaatctttatcgtcaaggatatcagactgtatgctcaagataaggcgtccacagtagtgcaccatggttctgccgatcgtcctccccacccgccccgccatcagcgccccattttgctcgatctacaacgcgccgccaccgatcgacgcccgcgcatcccgcagcccccgtgtccctacgcgccctccgctccccgaaaacctcccactgcgtcgtag

SEQ ID NO: 16826 - DNA, 1590 bp, Zea mays
  Peptide Sequence Number=SeqID_58605
atggatccgacgccgcagtcacacccgatccttgcctacgtgctctcccgcctcccctcgctgcccgcggtgaggacgccgaggtccccgcgcgagcgggacctcgagcagccgtccccgcgcacgccgtcgggtgccgcggagatcgacttggtggggcgcatgccaggcctgcgccacccgtccgtgctgtctgccatgacccgcgccgtcgccgacgtctcctcggcgcgcgacgcgatccgcctcctggggccccggcccgaccacgagcaagtcgacgcctcccgcgaacttctccgcttggccgatgctgggaagaaggcagacgccaacgcggacgtgaagacgaaggatctcgacgaggagaagctggccaagtgccgggaggtggtgcggctggaggaggaccacgaggcgtacggcgccctgctgcgcgacgcggaggggaagctggagcacgtgtaccagatggcgatgcacgggagggacatcaagaaggtgggcggcggtgatggcaaaggggaagagggttccggggcggtggacgaggaggtggtgcgggtgctcaaggacgcgggggaagggaaggtggtggagcgggtgaacctcgccgatcggcagatgcgcctactgccggagcccattggccggatccgcggcctcctcgcgctcgacgtctcccgcaaccagctcaagttcagttcacgggcgaattccctgtttggcgccttcaacagtgatgttccttgcttgaattcgcaggtgattcccgacgcgattggtgggctcgaacacctagaagaactccgcctcgcttccaacgacttggtttctcttccagactccattggccttctctccaacctcaagatcctcgacgtctccggcaacaggctgagggttctgcccgacaccatctcgaaatgcagatcgctggtggagctggacgcgagctacaacgccctggcttacctcccgacaggcatcgggcacgagctggtggacctgcagatactgcgcgtgcacctcaacaagctgcgctccctaccgtcgtcggtctgcgagatgcgatcgctgcgcctcctggacgcacacttcaacgagctccacggcctaccggccgccatcggacagctgtccgcgctggagacgctggacctgagcagcaacttcagcgacatgcgggacctgccgccatcgttcggcgacctagctggcctgcgcgagctggacctgagcaacaaccagatccgtgcgctgccggactgtttcggccggcttgccaagctggagagactccgcctggaccagaacccgctcgctgtgccaccccccgaggtggtcgccgacggcgtcgtcgcggtgaatgagtacatggcgaggcggtgggccgaggccgttgccgaagaggagcggcggcgtgcgaacgcggccgccgtggcggagagccccagggcgtccacgcccagggagtggctgacgcggagcgtgtcgtcgctgagcacctgggtgtcggacgtgacggtgaaggttgtcgggcaggagaaggtggacgatgaggacgagttcctgcagcaacagttctga

SEQ ID NO: 16827 - DNA, 378 bp, Zea mays
  Peptide Sequence Number=SeqID_58606
atgccagcaccagatccagcaagacctaactcagaggaagcagcgatcaagcgtagccgtcagatagacaatgacaaggacgagtccatgtcttcgcctactcccccgctggacgtaggtgctggcgcgctgtgggtggaggtgctacaggagtgcctgagttcaataattccaataaggatctcaagacctacagttagggaatgctatttgacaatgtgtccatcctgcgacctctggtttggtctgggatggagcacccatatgtatttgatagattcaactatgaacaatgcacccccagtacctagtccactcttgagcagtatacgacagatacgtccagtacccccagatgatggacaaggtacaccatga

SEQ ID NO: 16828 - DNA, 579 bp, Zea mays
  Peptide Sequence Number=SeqID_58607
atggccgctaggtcatttccgatgcaggataataataacaattggattcttcatcgagaactaggagctgacaggaacgacaaagaatatgctcctaaaggttcagttacccaccacgcctggagggtggggagtgggagagctccttcagagccagaagcactacctatccttgacgctggagcagggctccatggactcgagcttggcggcgacgcggccgacgcacccatcggtcaccttgttgagcgaacaagcgagaacagcgataggaaacgtacgggttcgccgcagaaaatccttcgagatttcgaggagtggcggttctcgtcggagttggagctttggaagaagccgctggagatggcggctgcctggctggtggctggctttatgcacgcaaggttgctgtcgcagaggaacagctcggggcgcctggtccaaggtggaccgtgtcactgcagaatcactctattaaaaaatcagttcttagagctagagaatcatgaagcggagctctaccaaacgagccctaagggtgaagccgtggtagcatatgtgcccacattagattcttaa

SEQ ID NO: 16829 - DNA, 463 bp, Zea mays
  Peptide Sequence Number=SeqID_58608
atggagcggcgcggcgtgcagctgccggcggtgcggccgcggcccaagtgggcggcggtgtcggcctactgccggcgccacggagtggagcgcgggcccatgcagtgccggaagcggtggggcaacctgtcgtgggacctgaagaagatcgtcgcgtgggaggggaaggccatcgccggcgccggcgccggcgccgcgcagcacgagtcgttctgggacatgcgcggcgaccagcggcgcgccaggcagctgccgtcgtccttcgaccgcgaggtgtacgacgcgctcgtctgcggcgcgtccgccggcgaggacgccgccgccgcggccgtgctgccgccggacttcggcgacggggagccggaaggggtgtaccggcagccgcccatcatggtcatgcctatatcagtgaggaagtacgagccccctcctgccacttctgaacacgaatgctctggtccag

SEQ ID NO: 16830 - DNA, 1341 bp, Zea mays
  Peptide Sequence Number=SeqID_58609
atggtaggggtggcggcggctatgggaagtagccccgtgcccacgacggcgacgactgcggggaggagggccgcgccggagaggtccgccatggtcctagaggttgtgccagaggttgtgccagggaggtctgtcatggtgccggcgactggacaagtgaggagagtcagcgggcatgtggagaggagagatagggcaacagagggggtgtcggtggtcgggatgaggagggggtgggcccgcggcgaagggggagggaagtcctacggttggggtggggttgtagatgactgggtgcagaagggagtgcaaggccatgttgttttcaaatttaagttgaagcggcttgagggtcagccatcattgacaacctctgaggtgcgatttactcgtgcagaagctccgacaactatttccgaattacccgggctggtttgtgatgacatctctggagggcaagaaaatattcctattcctgctactaacttggttgatgatccacctgttcctccatctggtttcaagtacttgaaatctctacaaattccaaaggacatcaagattccgtctagtattattggctgtgattgtgaaggaggttgtgctagcaacaaaaaatgtttgtgtgctcagcgcaatggttctgatctgccttatgtatcatataagaacattggcaggttggtggagccgaaagcagttgtatttgaatgtggggctaactgcagctgcaaccatgattgtgtaaacagaacatctcaacaaggtttgcagtaccgcttagaggttggtattcctctttccaagagtgttgaggtatttaagacagcttcaaaaggatggggagtcaggacttgggacactatcctccctggggctcccatctgtgagtacacaggggtgttgaggaggaccgaagatttggatggttcacagaacaactattgttttgacattgactgtcttcaaaccatgaagggtttggatggaagggagaaaagggctggatccgaaatgcacctgcctaatcttcatcctgagaatgattcagatgcacaacctgcacctgagtactgcatagacgctcactctattggcaactttgcaagatttataaatcacagctgccaacctaaccttttcgtccagtgcgtcttgagctcacacaatgatgttaaactggcgaaagtgatgcttttcgctgctgacaccatacttcctcttcaggagctatcctatgactacggttatcgattggacagtgttgttgggcctgatggaaaaattgtgaagctggcctgccactgtggtgctcctgattgccggaagcgcctctactaa

SEQ ID NO: 16831 - DNA, 522 bp, Zea mays
  Peptide Sequence Number=SeqID_58610
atgtggaccgacgttgtcgcgtctccgtcggcttctccgccagcaccttccgcgctcgtcgcggccatcgccaccatccaggcagtcgtcaccgcctcccaagaacgacaacgcgccgcgtccctgaccctagagcaagagtgtgccacgggcaccgccctgaccacccagatggccaccgctcagcgcctcctcggtcgcctgtcaattgcccaggaggaccccccccagtggcccccgatgctccacatgcctccgggctcaacgccgacacatcgtcgccctccatgctcaggccgccaggatccacaacaatcgatggacaacgtcgtcctctcatggctcaatggcaccatcatcgtcgagctacaagacatcgtccgcgaccaggcgaacacaacacctcagggggatctctccgtgggggagtactgtcaccagatgaagggcatggcggactctctccgcgacttcagcgagcccatcgccaacccgtaccttggtgatgaaccttctgtgtag

SEQ ID NO: 16832 - DNA, 360 bp, Zea mays
  Peptide Sequence Number=SeqID_58611
atgaccagcttcctaattgaccctcaagtgtttattcgaccagagatggataatgaacatggtggagctcatcgctgctctaggtccaaggtccacctcaccgttggtcttgatgattggaagggagggtttgtcattgccattgacatagatggagttctaggccgcaacgacatatgtatgttcttacaacgagtgagaaattatttgcaaggcgatctttgtctccaagttcttagtgttggaagacaaccctttggactttggatctttgagctgtggctcgcgctaccgacacctctgttgctcgatgctcgtagtaggtgttacaagaaggtgaaagtcgcctacagggggtga

SEQ ID NO: 16833 - DNA, 474 bp, Zea mays
  Peptide Sequence Number=SeqID_58612
atggacatggagctggagcacggagggaatgaagacgacagggggagtgagtcctcctcctcctcctccaagcggagcttcggcgcctcgtcggacgcaaccgtcagcagcacgccaagcaagctacaggctctgaggtttgcggaagatctctccctcccatcgactcttaaacatgtgcaggtggtggtgatgagcgccaacatgggttgctcgcactgccggcagcgggtcgccgacgtcgtctccaagatgaacgggctgctggactacatggtggacttcgggaagaaggaggtgacggtgcgcgggaaggtggcgcacaccaagaacaagaggaagcacaggaaggcactgctgggtgctccagcaggttgggacgacgccagatcggcggcggccgcgtcgtcgtcttcgcccggcggccatgccaggacgacgctgtcatggtttttgggatgctacggctcatga

SEQ ID NO: 16834 - DNA, 678 bp, Zea mays
  Peptide Sequence Number=SeqID_58613
atgactgagctccgagctcttcctcaaaagggtgctcacactcctgacgtgtttaaattggcaggagatgcagcaaaggatgtactgaaagatgccttgcagaatctgatgattatgtgccagcatgtcagagggacaatggacaccgcggtggcgtccatattttttgttctgccatcgtgcggtctgcctccctccccgtgcccacagtccccaccgccgagcacagccgccgcgcccgcagtcctgcggtccccgccgccgagcacagccgccgcagtctcgccgcgcccgcagtgcgacggcggtgccggtgagggggagccgtggttctacttctgcccgtggcaggagcgggaggcgcggggcgggcggcccagccggacgacgctgttggggtactggaaggccgctggtacgctcggggccgtctactccgccgaccgccgcgccatcggggtgaagaagaccatggtgttctattacggccgcgcgccgtcagggaccaagaccaagtggaagatgaacgagtacatggcgttccagttcgaaacccccggccctggccacgacctcgccgccgctagagtcgcagctgacaggtcgtcgtcttcgagcgcccaccacgtcgccgatggacccgcaccaccaccaaacgttggcccgcaggtgaggtga

SEQ ID NO: 16835 - DNA, 294 bp, Zea mays
  Peptide Sequence Number=SeqID_58614
atgtcagccggccgttgggttctgaccgttggagctctgactggtggggcctctgggctgtccggtggtgcaccggacagatcaaacgccacaaatgattcgctttctgaaacagcggctgcaatatctcatcccctaactcatggcatcactgcaggttccttcgacgcagactgcacaatcatagaagtgtcagtcctaaaaacgagaatacaaccaaatgatgaagctcaacaggaagtgcagactcggtctattcctgatccaaggtacattcttggcattgaaatgtga

SEQ ID NO: 16836 - DNA, 429 bp, Zea mays
  Peptide Sequence Number=SeqID_58615
atggactgcgggttggtttcaccaaaatccaggggctcttttgaaaatgagcgcaacgaaaggacgaggctaggtcggaagcagggaaaggaaccgcggtggtctggccggaaagcacgccgagaccaaatcaacggcggagcggtgttgccagcggaggttgtccgcggcggtgcacggattggggcaaacagggaggagaaggacggcggcgcagcacaccagggaaaaagggaacgggtcattgcgcatgatttgcttggaggtattggagcgaggggaggaacacgccaatttataccccgcagtagcgcgcggagtccgaccccaagagcccaggccgaggaggcccatgtctggcagcggcaatcgcgcggtggtcgttgcgggagcagcgctgagaccggatgccgttggggaagagtgtga

SEQ ID NO: 16837 - DNA, 1020 bp, Zea mays
  Peptide Sequence Number=SeqID_58616
atgcaggcggcatgcaactgcaccaagggggcgcaccctttcgacttcgacgcgcccagcatggaggcccaggcccacacgtcatgcgacacctttggcaggcgaagcgggcgacgcttcaccttcgccataataaccgcgtcaaaaaaggtgtgccacgtcgttcgatttcgtgtccttttcctcttcctctttctctctcttgctacaaggacccggaaaggggatgctccgaaagggatccttctccgcgaaggaagcgggccccaagccctcctactgatcagaggttcgaaggctggcccctcggaagggttcgacagctgcctcagagcactcgggctccgcgccctcctactgatcagaggttcgaaggctggcccctcggaagggttcgacagccgcctcagagcactcgggcttcgcgcccactactggtcagaggttcgaagggtggcccctcggaggggttcgacagccgcctcagaccactcgggctccgcgcccactactgatcaggggttcgtaggctggcccccgaagggttcgacaaccgcctcagagcacgcagagcgagggatgactctgggtacgtctgatacatggccgaggctcgggctatgctcccgaggtaccctaggacatttcccagaccagaaggagcgattctgtaatggaatcccatcagagggaggcatcgagccctcggaccctatcaaacgggaccgggaagctccgcctcgctcgaccccagggctcgggctcaacctcgacgctggacgacaaactccgcctcgcccgaccccagggctcggactcagcctcgacctcggaagacagactccgcctcgcccgaccccagggttcggactcatcctcgacctcggaagacggactccgcctcgcccgacccccgggctcggactcaacctcgacctcggaggagtcaccgcctcgcccgacctcgagctcggaccgaccacgtcacaggggggccatcattaccctacccctagctag

SEQ ID NO: 16838 - DNA, 615 bp, Zea mays
  Peptide Sequence Number=SeqID_58617
atggacctgcccccaaaccccgagagcccgggaggcggtggtgatggcggcggaggaggcggagccggtggatcgagcggcggggcgtcttcgtcggcgccgggcggcggcacgccgcagacgccgagccggtacgaggcgcagaagcggcgggactggaacacgttcgggcagtacctgcggaaccaccggccgccgctgagcctggcgcagtgcagcggcgcgcacgtgctggagttcctgcggtacctggaccagttcggcaagaccaaggtccacacggcggcgtgccccttcttcggccacccgagcccgcccgcgccgtgcccctgcccgctgcgccaggcgtggggcagcctcgacgcgctggtgggccgcctccgcgccgccttcgaggagaacggaggccgcccggagtccaaccccttcgcggcgcgcgccgtccgcctctacctccgcgaggtccgcgagcaccaggcccgcgcgcgcggcgtcagctacgagaagaagaagcgcaagaagccgcagccagctgatcacgccagcgggagcggaggacaaggccctcaccacccgccgcctccggcaccgccgcccgccggcgcggcgtgctga

SEQ ID NO: 16839 - DNA, 351 bp, Zea mays
  Peptide Sequence Number=SeqID_58618
atggcggaaggccccgtcctggcctccgtttgtataggacaaactgtggcggtgtccttgctgcccccgtcaaaggccgtcgtccgatgcgcggtggccgtcccccggtcccgccggagaagaagagtccaaggcagggaggggcagggggacgcggggtgctcttcgctccatgatgaccgcactacaggacatatatccaaggcgcgcccagcatccaatggactactacctgtaaagaggtgggggccgcacgtgcccgtacgaatggtgactgtacggccccacccgcagggacaggccctcggagcccgtaatgaatgcggctcccttacttgtgtgtccctgtga

SEQ ID NO: 16840 - DNA, 648 bp, Zea mays
  Peptide Sequence Number=SeqID_58619
atggtgtcggagaccaatggagcctcaacgggcccaggatatgagcctttacaggggaatggaggcggtggcggcgacgaccctcctcctccacctccatggagacaagacccacctccacttctacaaggcggaggaaacgacggcggccagttctctaaccctggccttaatctaggccaagatacagatgatctttgctcctcctactgtggagtagctgtagctctgagctgtgatccgacaatagtctcgagctcccacgatttcaatcctgacgacctgagactacgaggccgggcactgctatctgctcgccgtcttcatggttgctccgtcttcatggctgctgctgctgcacgcagctgctgggacccgggtgcctgggacgatgatgacgccaggacctgtgctgtttccggcgcgcacctgcactgctggtggacctcattcggacgaacacttcgtgtggggttgcttttgtttgagctaagtatgcctgaatcaatcccgatgaagcgaatggagatgcctcaggagaccggccggagcatgcaggccccccagcctaactgtcgcgacggcgccggtaccgtctggggcctggtcgcggtgcgggtactgtcggcaacgcctgttgcggcctga

SEQ ID NO: 16841 - DNA, 180 bp, Zea mays
  Peptide Sequence Number=SeqID_58620
atgaagaaggtgtgctctaacgatgatgggttgacaaaggttgaagccaagtttgaccgcaaaaggcagaaggtcactgactttgaggcgtaccagtatagcgtcggagttgacatacatcatactatgcagtgcctcattaacaccacgctaggacttggaccttccacaactgcatag

SEQ ID NO: 16842 - DNA, 474 bp, Zea mays
  Peptide Sequence Number=SeqID_58621
atggcgggacaagaatccaaagggaaggggaaggtggtcaacggacatgacgagaaggagaagatccccatcgactatgagaccaaaggcgagaagcccgtcgactcaggatcgagcaagaagaaggaagacaagaaaaagaagtgcatcaagaagatcgtctactgcaagagcgacacatctacatcctcgacgacttcacaaaaggatgactcttcttctttcaagcaaaaaacgtataacaaggtaagtggattagaaaatgtaaaggaaatttgggacatgttgaggatagagaacgaacgtaacttaatgaccaaaatcaccaagatggaggccattgaaggtgaactggggaggttcaccatgaagaggggtgaagggccagatgagatgtacaacaggctcaagttcctggtgaaccaagttcgcaactacggaagcaagagatggacagatcatgaagtcgtctga

SEQ ID NO: 16843 - DNA, 1560 bp, Zea mays
  Peptide Sequence Number=SeqID_58622
atggagctgttgtggcaaaacggtcaagttgttatgcagagccaaaaccaaagatctatcaagaagtcaccgccgttcaaattccaaggcgccgacccatctgctaccaaagagatctggtcttcctcatctcaccatcatcatcaacaacagcagcagcagcagcagcaatcgcttaccgatcatcacctctttatgcaagaagacgaaatggcttcatggcttcactatcctctcagcgacgccagcttcgaccacgatttctgtgctgatctcctctatccttcctccgccgccccttgccttacctccaccaccgccacaacctccgctcctcctccactcgggaaagttactcaagtttcagcttcagctgtggcgtcagcttctaggcccccgataccgccgtcgaggaggaatgagttggagtcgacgaggattcagaacttcgttcacttctccaggcataaagcggtgagggtggaacaatttaaacagtctaattctaagagcgtagttagggaattgacggtcgttgattccagcgatactccggctatggctcccgaatcaggagcctctcaggccatgccctgcaacactgaggcagcttctggagaaaacgacaatattaactgcgccaacatgagcgtcgctgcaggagccaacacgcaatcagctggtgtcagcgggagtgcctgcaaagacaatttagccgcgtacgaggtcacggtaacatcgtcacctggtggctccggtgccagtgccgaacccacggctcaaaaggcagcagccgctgaggaccggaagcgtaaaggaagagaactggaggacaccgaatatcacagcgaggatgttgagtccgaatctgctgacacaaagaaacaaacacgaggatccacgtcaacaaaaaggtctcgtgctgcagaggtccataacctctcagaaaggagacgcagagataggattaatgaaaagatgagggctttgcaagaacttatacctcgttgcaacaagtcagacaaagcctcaatgctggatgaagcaattgagtatttgaagtcacttcagttgcaagttcagatgatgtccatggggtgtggcatggtcccaatgatgtttcctggtgttcaacaatacatgccaacaatgggaatgggaattggaatgggtatgggcatggatattggaaggccaacgatgccatttacaaatgttttggctggctcaccattaccaacaccagcagctgctgctcatctgggtccaagatttcctatgccaccctttcatatgccaccaccggctctggctccagctcctgatccatcaagaatccaaccaaacaatcagtcagacaccatgttaaaccggcttggtgtacaaaacccgaaccagccttgtgtcccaaactttgctgatccttatcagcagtataatattggtcttcacccgatgcaattatcccctccactgaatcaagcaatggcccagccaagttctagtaaacccagtaccagtaagggagctgataatcttgaaaatcacccatcagaataa

SEQ ID NO: 16844 - DNA, 507 bp, Zea mays
  Peptide Sequence Number=SeqID_58623
atgatcgagatcgtaacgtcgcccaacaatcctgatggacaattaaagaaagcgatttttcatggacctaatgtcaagacaatctatgatcatgcgtattactggcctcattttacacctattccagctccatcagatgaagatgtgatggtatttacactttccaagcttacaggtcatgctggcaccagacttgggtgggcagtgataaaggatgaaacagtgttcaacagaatgatgatacacatgcagatgaattccatgggagtttctaaagatgctcaactacgaggttttaagcttttgaacgcagtccttgaagaaggaaccggaatattcgactttgcataccagacaatgaagagcaggaaaacaatcctcaatattgcactttttacaacaaagtccgacaactttccccagttctggaggcagctaatatcattgggcgtcaaggaaatctgttcggtgcagaagacggagggggatggtgacaaaactatgtga

SEQ ID NO: 16845 - DNA, 381 bp, Zea mays
  Peptide Sequence Number=SeqID_58624
atggtggtctgttggccacaccacgggacgcttccagataaggctgccaggttcccagtcaaaaggaaaaaagggtggcccgctggcttctctgtgggcgcttgggcagagatctggatagcgaagcctactccacgccgctgctcctccttccccgcgaatgtccgctccgtcgccggcgactatgatcctgtttctgatcgcgtcgcattccccatcagcaactgtactgttactgacggccactgcgtggtgttcccgacgtgtgctaccatctccggtacacccaatcctcaacgtgccgacgatccccgcaagtacgaagacttctctggctatgtgttcttcgtgttaggttttgtcttttggatctcattctga

SEQ ID NO: 16846 - DNA, 1635 bp, Zea mays
  Peptide Sequence Number=SeqID_58625
atgcgcaagctgagcgcgccccggggcggcggggagaagctgggcgtgctgggcttcgaggtggcggcgctcatgtcgcgcgccgcggggctgtggcgcgcgctggacgaccaccacctggcgcgcctccgaggggaggctatccgcctggagggcgtgcggcggctcgtggccgacgacgacgccgcgctcctggcgctcgcgctcgccgagatggccgccgcctgccgcgacctgtcgcgcgccgtcgcccgcctgtccgcgcgctgcgccgacccgctgctccgccgcttcgacgccctcttcgccgcgctcctcaagcgccgcgccgccgacccgcacgggctgcgctacgccgcgcgcgccaagatggaccgcaaaggcgcgcaagatgcagcgcctcgtggccgccacggcgcacctcagcagcagcagcaggccgggaccggggccgggaccagcaacagccgggccgagcgcgcgcgccgcgtcgccaggcagaggcaggaggtggagcggatccgcgccgcgtcgctctggccgcgcaccttcgactacgccgtgcgcctgctcgccaggtcgctcttcaccatcgtcgccaggatcatcgaggtgttcgacctggactacgccgtggacgacgacgaggaggaggaggaggagacggcgtcgtccagggcctcgcggctctcgtggggctcctcgttcgtcagcggcagcatgcacatggtgtacccttccgacgtcgtcgtcgccggcgccgacgcgcctcggacggcgctgcgacgtgcgaggtccgggaagactgctgccgccgctaccggcagcaagagccacatgtccaggagcaagagcctgaggcagcagctcaggtggccggcggcggccggcaagcacctcatcggctgcgtcgtcgtcacggggagcagcaggcctcagggcagggacgggtggatcccgcagagcttcagctacgtatccgattccgacgaccactccagcggcgccggcatcatgagcttccactccctgggcgacggcaggcaaccaccaccaccaccaccaccgacgacgacgacgtccgtgttcgacgcctcccgcgacgcgctggcgcacccgccggaggcgtctctgggcggcgccggtctcgcgctgcactacgcgaacctgatcatgttcatcgacaggctggcggcggcgccgcaccacatccgcgccgacgagagggacgcgctgtacggcatgctgacgggcagcctccgggcgtccgtgggcgcgcggctgaggccgtcgttcgccgccgccgcgccccgcgccgaccccgcgctgtgggcggacacggtgcggcggaccctcgcgtggctcgcgccgctcgcgcgcaacacggcccggtggcaggccgagaggagcttcgggcagcggagcgtcgcgccttgtggcagcggcggcggcggcgccgccgccgtgctgctgctgcagacgctccacttcgcggaccgggggaagacggaggccgcggtcacggacctgctcgtgggactcaactacgtgtggcgagacggggctgctgagctcgacgcgaagctcggactcggatcggagtcagccgcggggcggcggcggcggttacgatga

SEQ ID NO: 16847 - DNA, 243 bp, Zea mays
  Peptide Sequence Number=SeqID_58626
atggagttgcttgcgatttggcagaggggattttatcaggtgcgacggaggggaagggggcctggtgccggtgatgatggcggcggtgggtgcactgcaaagggggcgtgggcggcggtagtgcgctacaaagggggcgacacgggcttcaagggtaagcttcccggtatcttctggggtaagggctctagccaaagtgaagaaaaacttcactacccaatgcatgcagaggactgggcataa

SEQ ID NO: 16848 - DNA, 1500 bp, Zea mays
  Peptide Sequence Number=SeqID_58627
atgtccaccgccgcggcgccgccgtcactctccctgcaccgcccagcggtgaccgccaccagcaccagagtagccgccgcgccgccgccgagcaacgccgcgcacctcgccagcctcgacaagctcttccgcaaccgcggcggcgtcgagagcgcggcctcgcccgccgtcgccgctgccgcaccgcagaggaggcagcagccgctgctgcggctcccgtccttcttcacgcggaccggggcgaggggccaggagccggcgcccacgctgtcgccgcgccggctcgagcgcctgctccagcccgtggcgcccgacgggccgtcgccgcgcggggacatcgcggcggcgtggcgccgcctgcacggcgaggacggctggcgcggcctgctcgacccgctgcacccggacctgcgccgcgagatcgtgcgctacggcgagttcgtcgacgccgcctacggcgccttcctgtcccgccccgacgccgagccgggccgccgcgcgcgcgtcccgctccaggacgccgcgtaccgcgtcaccgcgccgctcttcgccacctcctccgtcggcctccccacctggctggccgccgccgcgccgtgcgccgggcagcggaccagtctcgtcggctacgtcgccgtctgcgacagccccgccgagatccggcggatgggccgccgcgacatcgtcgtcgcgctccgcggcacctgcaccgtcctcgagtgggccgagaacgtgcgcgccggcctcgtcccggccacccactgtgacaccgccgccgccaccgcaccggacacatccaacgccaaggtcgaatgcggcttctggaacctgtacaagaccgccggcgaccgctccgcgagcctgtcggagatggtcgtgtccgaggtgcggaggcttctcgacatgtacaagggcgaggaggtgagcatcacggtcaccgggcacagcctaggcgccgccctggccgtgctcatcgcggacgagctctccggcggcatcgccggccgcgcgggggcgccggtggcggtgttctcgttcggcgggccgcgggtgggcaaccgcgcgttcgcggcgcgcgtggaggcccgtggcgcgcgcgtgctccgcgtcgtcaacgcgcacgacgtcgtgccgcgcttcccgcccggcctcccgctcccgggctacgccgacgtcggccgcgagctgcgcctcgacagccgcgcgtcgccgtacctccggccggacgccgacgccgcgtgctgccacgacctggaggcgtacatccacctcgtcgacggcttcctcggctcgcattgcccgttccgggacaacgccaagcgcagcatcctgcgcctcgtcaagaaccagggcggcaacgtcaagcagctctacatgagcaaggccaaggacatgcgcatccagctcgacggcggcggcgccgccgacatggccgggtctatgcttggtcgcgtcgacatgcctggcgcggcgagcaccgtggtggagtgtgtgcactga

SEQ ID NO: 16849 - DNA, 489 bp, Zea mays
  Peptide Sequence Number=SeqID_58628
atggtggatcctgaattatctgaagctcttgattatattttatcactcctggataaacttgagcaggttgatcaactcctcgttcagtctttgcattctaccctctgcgtgttagatggccaagttggtctagggtgcagaggaagattccccaaggacaataaagtaaaaaccacacttcgcttgaggcccctctcggcggtcactcataactctgcctcgcccgagccttccctcggacaagcatcgcaggcgaacaggagcgataagaccgcggtcacgtcagacttcaccaactacgatgacatatgtatgagtacaacgaccactgttcccccatgctgcctaccaacttctaatgggacacacatacgacaaaagtgcgggctgttcctcgggcgcaagctccatcttgcccgcagccagcctcaacctcgggacaaacttcgcctcgcccgagtctggccttcagctacctactccccgtga

SEQ ID NO: 16850 - DNA, 189 bp, Zea mays
  Peptide Sequence Number=SeqID_58629
atgctctcaatcaccgacgagcaattggaccagtctggcggtgaccgagaggaagtgcgtgcggctgagcattcgcctgaatctagtcaacaggaggaagactaccatgaagagttcgaggagttcttggctatcgccgctctggtcaacttgtccgtggcatgttttggggatcatcgtcatcattga

SEQ ID NO: 16851 - DNA, 432 bp, Zea mays
  Peptide Sequence Number=SeqID_58630
atggctgttcctcattggcgctgcgacttgaagcataaggcttgccctgagatcttcgtggagtttcctggagtgaagttggggccgtcctggtgcgaattggcgctctggtcgggcagaattcctcgccgaagacctgtccgcgccacaatcccaccccacgtcgtggactggcgttccagctgcccaacagctggtatgaagctttcctccgagctcacctttgacttcgctgcgcatagcatcaagccaggttcgatttggggcgtcgaggccctggatcacctgcattccggcgaggctccgccgtacctagcgcatgtgtctctgcctgggctgcgggaggaattcaccataccccttcgtcgcggttattttctaaaagagaccctctactttttaagaaccaacccgccgtcctcgcgggagtag

SEQ ID NO: 16852 - DNA, 363 bp, Zea mays
  Peptide Sequence Number=SeqID_58631
atggctgttcctcattggcgctgcgacttgaagcataaggcttgccgtgagatcttcgtggagtttcctggagtgaagttggggctgtcctggtgcgaattggcgctctggtcgggcagaattcctcgccgaagacctgtccgcgccacaatcccaccccacgtcgtggactggcgttccagctgcccaacagctggtatgaagctttcctccgagctcacctttgacttcgctgcgcatagcatcaagccaggttcgatttggggcgtcgaggccctggatcacctgcattccggcgaggctccgccgtacctagcgcatgtgtctctgcctgagctgcgggaggtagaagatggcccctga

SEQ ID NO: 16853 - DNA, 324 bp, Zea mays
  Peptide Sequence Number=SeqID_58632
atgacgtcgggggcgattaataccaagcgcttaagcactcgcactctccatgcaaccgagccctttgccttccaaaacttttcgtcttccttcaagcaagcacctcatcccttccacgaaacaccttcctcggcgaaaacaatggtgccatcaacgaagaagcttacgatgcagcggtcgagggtcaaaaaggagaccaccttggggttgtatcggacacttctcgagtggacaggccaggatgagcgtggcaagttgtctctgactgctgcttggctggtgtggatgatgatgaaaccaaggaagggggtgtttggtttctag

SEQ ID NO: 16854 - DNA, 165 bp, Zea mays
  Peptide Sequence Number=SeqID_58633
atgtttgatgctggtaatgaggacaagtgtccgaggaagttgaacaacaagagtttgaagaaggcaacctgttatcgttaccccactcttttaagtggtatcggataccgcgaaaaggtgggactacaagaccattctacctttgtaaggcatcaactagaatga

SEQ ID NO: 16855 - DNA, 1329 bp, Zea mays
  Peptide Sequence Number=SeqID_58634
atgccatcgcagatgcgccaagccatccatgctcgccgcctcgccctaccttcttctcagcatggacgcttgcgcacgggtgggcggggtttcttgaaattgatgggctcggactctgaagagctgtccgagagcagcgaggaggcagcggagtcgtcggattcagaaggagagtcgcatgacgtcgaaggtgatggcgggggatcaagatgttcgtcggagccgatggtggtgctgacggtcgaagacgcagacgaagggtgctcctccaaaatcatcggcgacggtgtcgagggagttgcgtcgttgctactacctggaggtcgtacagctcattctcgtttcaagattccttgtgatttagatgaaactgctatctgcgatattaggagaggtacaatgctcgctgaattaattgaagcagtttcattggtgatttgggacgaagctttcatgacacatagagctgcgttcgaagctctagatcgcactcttcgagatttaatgtcaacaaattcacataaagctatgacaattccctttggcggaaaagttgttgtgttaggaggggatcctcgtcagatcttaccagtaatagaaggtggcactcgcacacagattaccagtgctgcaattactaactcacctctatggcattcagttactattctacaattaacagagaacatgcgactttcatcacctaatttaccagatgaagtgaaaaatgaaattgctcttttcagcaaatggacattagacattggtgaaggaaagattgaagcatcagcaaaaattggtgaatcagaaccttcatggatcataataccttctgattttctgttaatgccaaaagacaacaatttatctattttggtacaaagtacatatcccaacatttcagaaaattataacgattctaagtacctaaaagcaagagcaatcctaacacctacaaatgacatggtcgattcaatcaacgaatacatagtgtctataattcctggtgacaataaagaatacaggagttgtgatacaattatcaagggtccaaacacaaatgatgaatacgacttattgtatccagtggagttcctaaactcgctacatggtaacaactttccacagcatctacttgtgttaaagaagggcatggagttcacgcttatcccagatttagttccacaaaacagacatgctgttataaaggaagttcctgctgacaaggacaaagagatcgaacctaatcttcggtctcctccaaaaaggcacaaacaagaaccactaataatcaaggattccacggaaccagaacaccgccaagaatga

SEQ ID NO: 16856 - DNA, 351 bp, Zea mays
  Peptide Sequence Number=SeqID_58635
atgcgtgaagaggtcatcctcgtccaccagcttgaggagatgatccacatgtgtggcgtcaagccacatgaggacaatgagtgcacgacattggtgaaggagtcggtcgacatgaagcccattgttgaggagctcatggctgcaatggtggatttatcactggaagcgcagctcgcggagacctatactcacaagcaataccgccaccagttccgttccaaagctgaagtcaaactgtttgtggattccaatgggatgacaacgggcatatttaaaggaagaaaacttcaaaagaagaagatagctggtatggatgctcaaggtgctggtacggcctcttcaactaaatag

SEQ ID NO: 16857 - DNA, 417 bp, Zea mays
  Peptide Sequence Number=SeqID_58636
atggggagcgccgctcaaatgtgtctgcgccgtggctcgaccgctcgggatgagttcgacgcggggaagcggaggggagaggcgaccacgactgaagggctggaatactggagcagtcaactgaactctagaatgttcgtgagctcccgagtcgtcgctggatgggggatccgaggggtggggtggagggggctgagggaagaggatgctgtcgtggtggcgctgtggctgtgctgctgcgcggccggcggcgaccggaggatgggggaggccgtggcttccgcgctcgaggcggtggggaagctgctggtggtgatgcaaggggactgcgcctcgaccacttcgcggatggccggagagctgctgcgagcggtgcggatggagcgtctccctgcagtttcactcatctggacctga

SEQ ID NO: 16858 - DNA, 177 bp, Zea mays
  Peptide Sequence Number=SeqID_58637
atggggaccctccctggcgggctctttgccgagtgtcccgaatggcactcggcaaagaaggcggctttgccgagtgctgccaggaggacactcggcaaagatggagataatcttcctcacaatgtctgcaccacctatcttattaatgacaatagaattgggctcattgatggttaa

SEQ ID NO: 16859 - DNA, 210 bp, Zea mays
  Peptide Sequence Number=SeqID_58638
atggccggtgagacacacaacgctagccgttttcagaacccgatcctcgacgagatcgaggccaacgactacgacaacttcacccggagggcctacattcctaagacgaagaagctgatggcgctgcccaaggcgtacctgagatcactggtggtgccctcctcgtctcctcaggctgagagccggagacactattccaccctaacatag

SEQ ID NO: 16860 - DNA, 714 bp, Zea mays
  Peptide Sequence Number=SeqID_58639
atgaaggtggtgtctccggagcgagcgtggtggagtcctcgttcctcggagttgaggtgggcaaccagacctgcggcggcggagtctgctgaggaggaggggagcgcactggccccagaggacaggcacgaagagcggggcgcgcacgacgcgtgggtagtccgccatggtcgtcgatggaagggcacggtgggggaggatttcggcgtggcgcagcggcgacgaagatgcaaggaggatgcgcggcgcttcggtagcgacatcatcgttggaagggcgcggttagggcgacgaagaccggggcgtgcgcggcgtggtggtggtgggcgaggttttcggcgcggcgcggtggaggatttcggggcgggcaagcctggggcggcagccggaatcgagggaggagaggggagcccattgtcacctctaatcacggggggcggccagatgtggggtgacgacaatgacgtggatggtggctggtgcagtggtgtggctgtcggtgagcgtggcgacatggctagcgacgagggcatggaggttggtggcgtgcggcttggagtagggttggaaatgagtagagccgagcttggctcgatcgtattgcgagctcagagatcagacttggctaaggctcgttcaggctccatgccgtacgccgcgcagctccaactgtacggtgccgtcgcaggcatcgtcgcctcgaatattcaataa

SEQ ID NO: 16861 - DNA, 1341 bp, Zea mays
  Peptide Sequence Number=SeqID_58640
atggaggcgcgcctgctgcagctcaacaacggcatccccacccgcgccgtgctgcagaccctcgcggataagttctccgcttcgcccgagcgcgctggcaaggtggccatccagcccaagcaggtgtggaactggtttcagaacagacggtactcacaccgggccaaaactcccagggccgcgtcgtcaccgccggctaagatgacgccctcgggagctgatcaccaccagcatgccgctaacgcctccgccttcagggctgctcagctctcttctgttgctgctgcgcaccacggttcctcctctacaggtggaatgtgggcgccaatgtatgtggctgcagcagtcatggatatagtggctgttctacctgctaatgagcaactcgttctacctgctatattagtcaaccagtgctggaagaatcctgtggaaagtgtctcagttgagtttgaggccaagtcagctcgtgatggtgcatggtatgatgttgctgcctttctttcacataggttgtttgaatccggtgacccggaggtgcgggttcgtttttctggatttggggcagaggaggatgaatggatcaatgttcgcaaatgtgtgcgacaacgttctcttccatgcgaggccacagaatgtgttgctgtgcttcctggggacctgattctttgttttcaggaaggtaaagatcaggctctctattatgatgctcatgtccttgatgctcaaaggagaaggcatgacgttagaggttgccgttgtagatttcttgttcgctacgaccatgattcttctgaggaaattgttccactgaggaaggtgtgccgccgaccggaaactgactacaggcttcagattctgcatgctgctagagcggcagccactaatgcagatgttcacactccacccaaagaggttaaggtggagttggcgtccactgataagagcccagccgagcagaaaccccataagcagcacaagatgatggacgtgaacactgatgaggtgaccatggtctccaccttggagcaagatgagacaccaggcaagactgtagcccccgtaccgtcagcaactgcagaaacccgcaattcaagttcggacacagtgatgaaaggtgctgaggcttcctcggtcgttgaagatgacgatgaagtgcaggcagttgacaagatgaaagagggatcacgtggcttgtgtgaggcacatggcgaagagttacatggcgatgacattgtggatgtcgagctcgacacgcttcgtgcgctgatactggacggggttagtggagagttacatggcgctgaagttatcacaatagacaatggtgctccgcattag

SEQ ID NO: 16862 - DNA, 522 bp, Zea mays
  Peptide Sequence Number=SeqID_58641
atgcaggcggcatgcaaccgcgccaagtggatgcgcttctccgactcccgacacgcccagcatggaggcccaggcccacgcgtcatgcaaccggcgcgccggatgcttcatgcaagcaactgcaccgccacttgcgccaccacctcgcctcctcaattgcggaaccaataccgcgactcgaggagaagcgggcgacgcttcgccttcgccgtaataaccgcgccaaaaaagggaccgggaaagggggataccccgaaaaagatccttccccgtgaaggaaccaggctccgagcctccttactgatcagaggttcgaaggctggccccccgaagggtttcaacagccgcctcagatcgtgtgggccctacacccactactggtcagaggttcgaaggccggcccccccgaagggttccacggccgcctcaggctactcgggctccgcgcccattactgatcaggggtttgaaggctggcccccgaagggttcacagccgcctcagacgccgagcgagggatga

SEQ ID NO: 16863 - DNA, 327 bp, Zea mays
  Peptide Sequence Number=SeqID_58642
atgccgataaagtgtgaaaccccaatgccaaaaaacccaataccgcgaaaggggaaatccgcgagcgacgacaccagccgaatattcactactagctatgggaggaacgacggcccgaaaaatctcacctgcgatggaactgtcggccgactccgcaactggatgtgggtgagggcgagatgccctattcggcccaccccacccgcaagtcgcggcatttttcacgcaaaattcgcgcgctacgcggttgttagtattcgaaccgtcgacctcaccctcgcgcgtaccctcccctaccactccgtctatgacatgtcttgtgtctag

SEQ ID NO: 16864 - DNA, 321 bp, Zea mays
  Peptide Sequence Number=SeqID_58643
atggactacaactccgacgggtcagggtcggtcacgccatcgccacagctgtgggcgagccaccccgagcaccaccagttcgaccaacattactcggtaggtgtcgctaagcatctcgccgtcgtgagcgtaggccatagcggccgggggtactgccgcgagatgctcgagctcatccggggcctcccgcagtccgcctacgagctctcgctccacgacatcgtcgagcacccatccgtcacccctgtcctcgcaccgcactcctccctctccaccgcgccggcggcgccgacacctagcgcagccgactgcaagcgatga

SEQ ID NO: 16865 - DNA, 165 bp, Zea mays
  Peptide Sequence Number=SeqID_58644
atgcccgaaacagcaaggtcccggtcggtggattcgacgccggctgccgagacgggactacgcaccggtcgtcgcgacaatccagtcgtcggccgtatatacaaaacaccagtggcggaggacaaacaaaattcaagaacccgtgccttcttgccttacaaataa

SEQ ID NO: 16866 - DNA, 471 bp, Zea mays
  Peptide Sequence Number=SeqID_58645
atgccactgacgggctggaatccgctggcgcccgtcctccagaccgtcgccgctttctcccgccacatcctcatcgcccccgacgccgggctcgacgaccaccgcctccgcccccttctagcgctctccctctccccgccttcgccggcaccaccgcaaccggagttccctgacgaacctacgaggcaacaaagacgggatgcaaaggagttgatgcatataatctcgagactatatccttgcaaagaatgtgctgatcacttcaaggaagttttgaaagcaaatcctgtgcaggcaggatctcaggctgatttctcccagtggttatgttatgtccataacgtggttaatcgaagccttgggaagccaatatttccctgccaaagagtaactgcacgttggggtaaactggattgtcctgagcgctcgtgtgatctagaaggcagcatcgacatcatgccaaaccgatga

SEQ ID NO: 16867 - DNA, 243 bp, Zea mays
  Peptide Sequence Number=SeqID_58646
atgcaggtcccccgggctccagattcgccggccccgctcctgctcccgctcaggcctccgctcccggtggcgggcgccttccggatcgacgacgcgcctgtgaggacgaggagaagcagcgaactgctctgtttgactagtgccaaatgcatggagacgacggcgagcggcaaggacatgggaaggcgccagagttccatgattgtgttgttttcctacggctcaggtcagcccccctactag

SEQ ID NO: 16868 - DNA, 219 bp, Zea mays
  Peptide Sequence Number=SeqID_58647
atgtccggttttgttttgctctaccatgtgttgcctgggggctggggctccctctctgacgcggaaatccactccgtgaccgtgaccgtgaccatgaccacagcatttttggaccctttgctcggcgccatagcctgtggcgccgaggtaacacagctcggcgccataggttatggcgccgagtctactccaatgcttcgtggtaaagcaaacccgtag

SEQ ID NO: 16869 - DNA, 576 bp, Zea mays
  Peptide Sequence Number=SeqID_58648
atgcatatggtgcatttgctgcccggtgaagccgaagatgaggagaagcgtcgtgtcctctggcggtctggcctgtggcaggcacaggacggtgtctgctggcctcgtctcgtcttcgtcttgtctcgtgggaaacaggcaattaagcagcagcgcatgtcgcgtgaatcgtggacgagagaggcgaggtccatcatcattcatcggcttgggaagatccccagcgcgctgaacttcccaactcatgattcacggtcacgcgcggcgtgcagcagtttaacggtgttttgtgtgactatacaaacaatacagtttacagtgaacaatgtttcgtatgactatacgtcacaaaagaaaaggaggccactaagaaggatcttaatagtattacatcactttggagaaagattcacaaaatacggacgcgaccagctcttaacagttaacatgacatccggcggcgcgctgtcgaccccaggtcgatcaccaccgtcgcggtccttctccggcgcgtccacgtcggaaggcacagcacgcaaggccgctctgctggctgctggcttccccgaccgctag

SEQ ID NO: 16870 - DNA, 1515 bp, Zea mays
  Peptide Sequence Number=SeqID_58649
atggtggctgccgcggcggcggccaccgcgccagatccggaccaatcctcgcgcccgccgctcacgccggcgctcgacaagcccaactccgccgccgcgcggaggaactcgcgctccaacaagcccgtctcctcgaggtacctgtccgccgccgcatccccggcctcctccacttcgtcctccacgtcgtcgtcgtcttcctcgtcctcctcccgccgctccctctccgcgcagcgcacccggacgtccactccgccgccgcagcactccacgtcgtccacaaccaccgcgtcggcagcggcagcatccgccaccgcgaccacgatgcggagcctctccgtgtcgttccagggggagtccttcttctacaagacgtcgcgcgcgccgcgggcttcgtcgccgtcctcaccggcagcgcgccgcgggcccacgccggagcgccggaagagcgtctcctccgtgccggaggccgagaacgcgcggccgtcgggacgatggccggcggcgaagcccaaggcgtcggacccgctagcgcggagccttgaatgcagcctcgaccgcaaggactccatcctcgccgccgttcacctcctccgccgttctatggccttcgactcctccacgtcactctcgccgtccgaccgggcagctgcagccgctccagacctctccgcgtcctccgacaccgacagtgcctcgtctggtagcaactccggcgccggggatcccccgcgccgcggcatcagcgtgccggcgagattctggcaggaaaccaacagccgcctgcgccgacttccagagcctggactgccgctaccgtcgtctggccggaggtcgttttcagacagcccaatgtcacccagactgccaggtcggtccccgtctccatgccgtggaagccggggcgctccgagtccatcaagagggcgcagtggggaggcatcgccaaatggacatacggtgcaggctccagcaaatgcgccatctatcatcagttttgcggcagaggtgagaagggcgaaaaagggggagaagagaatcgaggaggcacacagattgcggctgctggacaatcggcatttgcagtggcgatgcatcaatgctcggacagatgcgacgcttctggtgcagagcttcactgctgagatgtcatatctagaggcctggtctcatatcgaaaaacatcattcaagtgctttatcagcagcaatcaaagctctgaaggctagtactcttcgtcttccagttgttgatggcgcaaaggctgatgctcaagccgtgaaggaagcagttaactcagcagtggatgtgatgcacacaatgacatcctcgatttgtaatttgctatctaagagctttgatacattttctttcccttggatcatatctaagtattatatcaatgacaaaaaatcatcagtcccaaattggaaaatggttccaaataaatatatgctccaccctgtcctaaattggaaatgcttccagataaatactcctttatgcttcacctga

SEQ ID NO: 16871 - DNA, 1479 bp, Zea mays
  Peptide Sequence Number=SeqID_58650
atggcggagcagcagggctggaggcagcggcgctcgcggaggacgacgctgcttttggcgttcgcggcgctggccatggagcgcgccgacgcggcgctgctcccggcggtgtaccgggagatcggcaccgcgctgcaggcatcgcccacggcgctcggctccatcgcgctgtcacgctccgtcgtgcagaccgcctgttatccgttagcggcgtacctggcggcgcgccacgatcgcgtcaccgtcatcgcgctcggcgcgttcgtgtgggcggtggcgaccttcctcattggcttctccaccaccttcccacagatggcggtgacggcggctttgaacggtgtcgggctggcgctgcagatccccgcgatctacgccttcgttgccgattccgtggacggcgccagcaggggcatggcattcgggtggctcgccgtggctggcaaggccggcaccgtggctggcacctccctcggcctgctcatggcgccgacctcattcctggggctaccgggctggcggctcgccttcctcttgcttggcgtcttgggggccgcggtcggcgtgtccattcgcgcgttcgccgcgagcgacggcgcagcaagaggccgcgtggtggtgagcccggccacttccaagccagtgaggcaggaagtgcaggagttcgtcagggaggccaaggccgtgatgcggatcccgtcgttccaggtcatcatcgcgcagggcctaaccgggtcgttcccctggtcggcgctgttgttcacggcgatgtggctggagctggtggggttttcccacggcgagacggcagcgctcatgacgctgttcaaggtcgccacgtcgctgggagctctcttcggtggcaaggtgggggacgtcctcgcccggcggttcaagaactcgggccgcatcgtcctctcgcagatcagctctgcttccgcgattcccctctccggcatcctcctcctcgcgctccccaacgacccgtcctccacgctcaagcatggtgccgcgctgttcattttggggatcatggcctcctggaacggcacagctacaaacagcccgatactcgcggagatcgtcccgccgagggcaatgacgaccgtgttcgcgctggaccggacgtttgaggcagtgctggcctcgttcgcgcccccggtggtcggcctcctcgcggagcgcctttacggttacaagctagcccgatctgcaagtggcggcggcgtagacgagcgcacggctatcgacttccagatggagcggcacaacgcgacgtccctcgccagggcgatatacacctccattgccatccccatggcaatgtgctgcgccatctactcgttcttgtactgcacctaccccagggacagggagatggcgcgggctgaggcggcgcgaaatagaggggattatggcgatgaaggatttggatccgaggacgaagacaatggcgagaggaagctgctgccgcagtga

SEQ ID NO: 16872 - DNA, 1464 bp, Zea mays
  Peptide Sequence Number=SeqID_58651
atggagcgcgccgacgaggcgctgctgccggcggtgtaccgggaggtgggcgccgcgctgcacgccacgcccacggggctcggcgccctcacgctgtaccgctccatcgtgcaggccgcctgctacccggtggcggcctacgccgcgtcgcgccacaaccgcgcccacgtcatcgcgctgggggccttcctctgggccgccgccaccttcctcgtcgccgtctccgacaccttcctccaggttgcaatttcaaggggcttgaacggcattggtctagctctcgtcataccagcagtccagtcgctggtagccgactccactgacgacgacaaccgcggcacagcattcggatggctgcaactgaccagcagcatcggctccgtattcgggggattctttgccttactgctggcccagactacagtcttggggatcgaaggatggcgtattgccttccacctcgtcgcgatcgtcagcgtcatcgtcggcaccctcgtgtggttcttcgccgtggatccccatttccccacaaacgatgccgcaccaccatccagcaaaaagtccgcgcttgatgaagcaagggaactgatcatggaggccaggtccatagtccagatcccgacgttccaggtcttcgttgcccagggcgtcagcggctcgttcccgtggtcagcgctgtcgttcttgtccatgtggctggagctcgtcgggttcagccacgaggacaccgccgtcctcacgaccaccttcgctgtcgccacctccgtcggcggccttcttggcgggaagatgggggattcgctcgctcggcggtatccgaacgctgggaggatcgtgctgtctcagataagcgccggctctgctgttcctttggccgctgttcttctgctgggcttgcctgataatccgtccacgtccagtggtgttgcccatggacttgttctgttcgtcatgggactcatcatctcttggaacggagctgctacaaactgcccgatttttgcggagatcgtgcccgagaagcaaaggacgagcatctacgctctggacagaaccttcgagtccattctggcgtcgtttgcgcctccggtcgttggcctgttgtcgcagcaagtctacggcttcaaacaggacgacggcagagggagcagccctgggcaagaccgggagaacgcggcgtcgctggccaaggcgctgtacacggccatctccataccgatggtcatctgcacctccatatacacgttcatgtaccgcacctaccctcgagacagggagcgtgcgcgcatgcagtcggtgattcagtcagagttggaccagattgagctgctgggcggtccgagtttaggaggcggcggcgacggcgacggtgataaacctgacgaggttgatggcagttatggttctgaaagatctgctgaggccgatgccggcactgaaaaactactaggaaggaaaccatga

SEQ ID NO: 16873 - DNA, 147 bp, Zea mays
  Peptide Sequence Number=SeqID_58652
atgacgaaatacttcgccatgactgttgagttacctccatacaaggatatgtggggaagcttcatcatagaggaaatccttggtgttggtcacttgttcttaaatgttgtgaatcaagaacaaggcaacacaattgttaaagattaa

SEQ ID NO: 16874 - DNA, 252 bp, Zea mays
  Peptide Sequence Number=SeqID_58653
atggtgactcctgactccactccgcagcaggcgccagggaacagatttgagcagggatacaggaaattgaaaagccgaagctatctaccagcatggcaggcggttagggccgggtcgatcggagacagggcgagggaccggaggagggcacaaccgcgtggtgggctggtggctcacacgacgttgccaaaaacacagcctttgcttctcggctctcgggcagccgtgattgccgccgcaacactgctttga

SEQ ID NO: 16875 - DNA, 639 bp, Zea mays
  Peptide Sequence Number=SeqID_58654
atgagttcattctttgatactttcgaagatgaagctgagaaagatactgccggcacaacattagcgtcgaaggactctacgctgccagatgaagaaaggactggtccaagtagtctaggatttgaacagattactacagcgatgactccttcgataatcatggcagctaaagacaagggttcctccaaacctgccttggcggaggagaagggaaaagggcccgctgaattcgaagaggccaagaaggcgattgaagatgatagaccacttgttgaagggtccttccaccaagacctaggtggccgaaggtgcaatcaagtgagggcttggacggaccctgacttcaaagtctctgctgaccatgtccgaaggtcaactgtcaaagcatcggaatggttcgaaaaattcttatatgagatttggaagagaggcgagaaagaattgagtattgaggaatccatcaagaatagggagaaggtaataattgaagtaaaacataccgcggccgaagctaaggatgccactgccgaaactgaggcaatctcaaacagggctatgaaaaaagctgaagatgatgctattatgaggatctatgaacaagtttatgatgaagcaatgcgaagtaatccaagaaattga

SEQ ID NO: 16876 - DNA, 1341 bp, Zea mays
  Peptide Sequence Number=SeqID_58655
atgcgttatgtgcaggtggctggggtggccagggccggcgacgtcgtcggcgagatcggggtgctgtgctacaagccccagctcttcacggcgaggacgcggtccctgtgccacctcctgcgcatggagcgcaccgcgttcctcaggatcgtccaggcgaacgtcggcgacggcaccataatcatcaacaaccttatccagtacctcaaggagaagagggacagcggcgccatcgccggcgtcgcggaggagatcgagtacttgctagttgctagctcggggccagctcgagctccccgtcacgctctgctacgccgcgtccagaggagacgacttcctcatgcatcagctcctcaagcgcgggacgcgcaaggaagagtgcccctgtgggaggccctgtcgcgggggcaccgcggggccgcgcagctgctggcggacggcggcgcggacctggcgtcgggcgacgcggagctctacgcgcgcgcggcagtggaggcgggcgacgtcgcgctgctggaggacgtggcgcgccacggcggggacgtgacggttgcgtgctgcgacgacggcggcaccgcgctccaccgcgccgtgctccagggggacgtcgggatggccagggccctgctggagcacggcgccgacgccgacagggaggacggcggcggccggaccccgcgggacttggcgggccagctcggccaccgcgacatgcaccagctgttcgggccgccgtcgcagtcgcagcaccgggaagcggtggagagtccgatcaggcggcagggctcgggaacggaggaccatggcagcagctgcaggcccgccgtcgcggtcgcggctcggccggcggtcaccaggttcaagagcgcgcccgcggcgagggtcccggtcgcggtcgcgcagcacgacggcgccggtttgtcgccgtcgccgtcgccgtcgtcgtccaggcatagcagtccgcggcggatggtcagcttccggaactccctcttcggcgtcctctcctcgtcacaagtgaacaggcacgacggagcagctggtggcggggggcatagcctccacgagaggcacactcacagcaggtcccgggtcagggtgaccgtctcctgccccgagcagggcgtcggcgcgaggaagctggtgttcatgcctgagacgatggcgcagctcgtggagctcgccgggagccagttcgggttcgccccgacgagggtggtgaccacggacggtgcccaggttgacgacgccaggctcgtcagggacggcgaccacctcctagtcgtcacccatcagtggcagagggtgcccgacactaagatcgtgcatacgaatcagtag

SEQ ID NO: 16877 - DNA, 297 bp, Zea mays
  Peptide Sequence Number=SeqID_58656
atggacgcgtcctgcactgcatggtctgcatttgtccgccccgcttcccttttgctgatggaatcccggctgcagctatatatatgtgcttcttccagcatcaggctgcttaaggctttaccggccagtcaattcaagcagagagacgacgatgcagcagcactagttcctcctccttaccgcctgttcccggagccggaggagacggccgcccgcgacatccagctccgtcagttcttctccgtggatcggcgccagccgccgcagctggaggctacatctatagatggccaataa

SEQ ID NO: 16878 - DNA, 2745 bp, Zea mays
  Peptide Sequence Number=SeqID_58657
atgccgttgagtggcaggccatggggcggcggcggcggcagcggtggcggcagctcgggtaggctcgcgtcgtccggcgcgctcctcccggcggcgctgggcggcgcgcgcagcgggcggcggccccggctccggcggttcatcgtgtccccccacgacccgcggtacgtggcgtgggagcactcgctggtggcgctggtggcgtactcggcgtgggtggcgcccttcgagttcgggttcgtcccggacccgcggggcgcgctggccgtcgccgacaacgccgtgaacgcggcgttcgccgtggacatcgcgctcaccttcttcgtggcgtacgcggacggcgggacgtacctgctgcaggacgacccccggcggatcgcgtggcggtacgcccgctcctggctcgcgctcgacgtcgcctccaccgtgcccaccgaggtgtaccgccgggtcctgccgcgccaggccaggagctacaacttcttcggcatgctccggctctggcgcctgcaccgcgtcggcacgctcttcgcacaactggagaaggacaggaagttccgctacttctgggttcgatgcacaaggctcatctgcgtgacgctgttcgcggtgcactgcgcggggtgcttctactacctgctggcggacaggtacccggacccggggcacacgtggctgagctcctccatgccggacttcaagcagcagagcgtgtggaagcggtacgccgcgtccatgtactggtccatcaccacgctcaccaccgtcgggtacggcgacatgcacgccgtgaacacgggcgagatggtgttcaccacgttctacatgctcttcaacctcggcctcaccgcctacctcatcggcaacatgaccaacctcgtcgtccacggcaccagccgcaccaggaaatacagggacgcgatcaaggcggcgacgagcttcgcggtgcggcaccagctgccgccgcggctgcaggagcagatggtgtcccacctgagcctcaagttcaggaccgactcggaggggctgcagcagcaggagacgctggacgcgctgcccaaggccatccgctccggcatctcgcactacctcttcttcgccctcgtccagggcgtctacctcttccagggcgtctccaatgacctcatcttccagctggtctctgagatgaacgccgagtacttcgcgcccagggaggacgtcatcctgcagaacgaggcgccgtccgacttctacatcctagtcaccggtagtgtggtggctggggtggccagggccggcgacgtcgtcggcgagatcggggtgctgtgctacaagccccagctcttcacggcgaggacgcggtccctgtgccacctcctgcgcatggagcgcagcgcgttcctcaggatcgtccaggcgaacgtcggcgacggcaccataatcatcaacaaccttatccagtacctcaaggagaagagggacagcggcgccatcgccggcgtcgcggaggagatcgagtacttgctagctcggggccagctcgagctccccgtcacgctctgctacgccgcgtccagaggagacgacttcctcatgcatcagctcctcaagcgcggggtcgatcccaacgagtcagataactattggcatacagcactgcacgtctcagcttccggtggacatgagcagtgcatcaagcttctgctagagcatggcgctgatcctaatgcttcaggagcatgtgattggggccaccaaccaaaccttgcgctgatcgtaatacaatgtccagacgcgcaaggaagagtgcccctgtgggaggccctgtcgcgggggcaccgcggggccgcgcagctgctggcggacggcggcgcggacctggcgtcgggcgacgcggcgctctacgcgcgcgcggccgtggaggcgggcgacgtcgcgctgctggaggacgtggcgcgccacggcggggacgtgacggtggcgtgctgcgacgacggcggcaccgcgctccaccgcgccgtgctccagggggacttcgggatggccagggccctgctggagcacggtgccgacgccgacagggaggacggcggcggccggaccccgcgggacttggcgggccagctcggccaccgcgacatgcaccagctgttcgggccgccctcgcagtcgcagcaccgggaagcggtggagagtccgatcaggcggcagggctcgggaacggaggaccatggcagcagctgcaggcccgccgtcgcggtcgcggctcggccggcggtcaccaggttcaagagcgcgcccgcggcgagggtcccggtcgcggtcgcgcagcacgacggcgccggttcgtcgccgtcaccgtcgtcgtccaggcacagcagtccgcggcggatggtcagcttccggaactccctcttcggcgtcctctcctcgtcacaagtgaacaggcacgacggagcagctggcggcggggggcatagccgccacgagaggcacacgcacagcaggtcgcgggtcagggtgaccgtctcctgccccgagcagggcgtcggcgcgaggaagctggtgttcatgcctgagacgatggcgcagctcgtggagctcgccgggagccagtttgggttcgccccgacgagggtggtgaccacagacggtgcccaggttgacgacgccaggctcgtcagggacggcgaccacctcctcgtcgtcacccatcagtggcagagggtgcccgacactaagatcgtgcatacgaatcagtag

SEQ ID NO: 16879 - DNA, 333 bp, Zea mays
  Peptide Sequence Number=SeqID_58658
atgaagaatagtgaagagaacaagaaagagtaccgagggcggtcggggcagaattcgaaatcgaaagctaggtggaggccccacccgtcgtgccacgtgcagggcgcaggcgcacggggggggagggggcaaatgggtttcgtcgagacgctgccaccgaaaaaagtactaagggcgtttcatcgaggccttctgtggaaggttcgtttaatggggacgaggccagggtcgcagtgcgcgtccctctctcctggggttcgattacgagggcctcaggttgtcaggcaggctttaccggccccagggcaagttcaaccagttttggacttttga

SEQ ID NO: 16880 - DNA, 291 bp, Zea mays
  Peptide Sequence Number=SeqID_58659
atggatccggggtccccgatctttgttgccagccctgaatttgtctccgtttttttcttttctttccacggggtccctggtgagattgagatggaccgtagatattgtctgttcagtttcctggacgaaatgggctcgctctacatggtgctgtctctgtctcctggatggattacgacaacaattgtgtctgtttggtcttccagaggcgacagcgagttctgcatcgaccaacggaaggcgctgtttggcggcgaacgggctggcggcgagcgggcggtgacaaactga

SEQ ID NO: 16881 - DNA, 205 bp, Zea mays
  Peptide Sequence Number=SeqID_58660
atggcggacggcgagacgagctcgtggcgaggcacgacgacggcgagactgctgcaccgggatcgtgcaagggtcgagacggaatgtgcaggctacgctggccgtgccggggctgcacagatgagtcacgccggatcgttgcgctgggctggctggggagctcctccatgtggcgagaaggcggagtgccatcgcgccgggcagg

SEQ ID NO: 16882 - DNA, 462 bp, Zea mays
  Peptide Sequence Number=SeqID_58661
atgggtgacatcacccctatacctccaccaccactgacggctgggaccatgatgtattcgcatacgcgtattcttctggatgtgggcgttggtcaaacggagaacgggttctccggtgctaccgctctgctcgcccataagtcggatggtcctagttgttggccgtcgcggttgacctggagcagaaaaaaatggcaggtgtgcgccgcctggattgcagccattaagagagagaaaccaagggagaagggagtgggtttgatcgcgggtgagcgcaggaaaccgagaggagggcatgggttcttcgacgtcaaagcatgggggatggcccacgacgtctccctgattcagagtgggggaatcgtccgcaacatcacggagacaaagaagcagaacctcaccggcggtgatgaagaagcaccgtcacgtcacgcggccgaactacgcctcaatcgccagtaa

SEQ ID NO: 16883 - DNA, 327 bp, Zea mays
  Peptide Sequence Number=SeqID_58662
atgcagggtttagctcaatgtgagttctcgtaccgcggagacaattacaagagaatggtgaaagaaatttctcaggcttggaatcaggttcataggatgaaaaggctaactatgggttcaatgacaactccagagtacggagagtggcgaagtaagagaattaatgataacattccagagttaaacttggagggtgttcaaccaatggaagagtacctacaagtaatcccatcagaattggagattataaagcaagacttcaaaaagaggaattcagaacttgaaaagaaaaatagagcaatttggaagaagagaagatgcatttga

SEQ ID NO: 16884 - DNA, 162 bp, Zea mays
  Peptide Sequence Number=SeqID_58663
atgggtttggaaaatacagtagaaaataagtttaaggatgaacgcttcgaccaagtagtcttcttcgttatcctcaagctcacgtctgtcgagtgtgggctcgcttcgaatcaaaaaaatttctacaaaattaccagtggggtaattttgcaatttctctaa

SEQ ID NO: 16885 - DNA, 258 bp, Zea mays
  Peptide Sequence Number=SeqID_58664
atggaggcaaggctttgttttcgatctgcttcgctattaacgcaggaaggcaagatctgcttctttaaccagctccactgcaatcgatggaggaaggcaagatctgcttctttaaccagctccactgcaatcgatggaggcaaggctttgttttcgatctgcttcgctgttaatgcaggaaggaaggcaatatatgctatcttcactaatctgttctctggggaacatgacctgtataatgaacctaattatgcctaa

SEQ ID NO: 16886 - DNA, 2370 bp, Zea mays
  Peptide Sequence Number=SeqID_58665
atggaggaggattcaaaccatttggcaaatccagaaacaccccatagcttggaggctgaaacttatgaagaagaagaaggaagagatcctgagagcaattctttgcgtcagccacttctcaaaagaaacagaaccctttcttccactccactagccttggttggagccaaggtctcccatattgagagtttggattatgagataaatgaaaatgatcttttcaagcatgattggagaagaagatctaaagttcaagttttgcagtacattttcttgaaatggtctttggctttccttgttggattgttgacaggattgattgccacccttatcaatcttgcaattgagaatattgctggctataagcttcttgctattgttggtttcatagaggagggcaggtatatatctgggttgatctttttcactgggataaacttttttctgaccttgattgctgcagttctctgtgtgtgttttgccccaactgcagctggtcctggtatccctgaaatcaaggcttatctcaatggagttgatactcctaacatgtttggtgctacaacattgcttgtcaagggttgtgtgctgattgttggcagcattggagcagtttctgctggtctagatctggggaaagaagggcctttagtgcacattgggagttgcatcgcttcattactagcccagggagggcctgataactaccgcatcaagtggcgttggcttcgctacttcaacaatgatcgcgatcgcagagatattatcacctgtggttcttcctcgggtgtttgtgcagctttccgtgctcctgtgggaggtgtcctatttgctctcgaagaagttgcaacatggtggaggagtgcccttctctggagaactttctttagtacagcagtggtggtggtagtgctaagggcattcatcgaaatctgcaactctgggaaatgtggcctttttggaacaggagggttgatcatgttcgatgttagcgatgttaaagtcagctaccaagccatggatgtaatcccaattatcataattggaatcattggtggacttttgggaagcttatataatcatgttcttcataaggtcctcagagtctacaatctcattaaccataaggggaaaatgcataagctactcctagctcttggtgtctctctttttacctcagtgtgccaatactgtctcccatttctagcccaatgcagagcatgcgatccatcttttcctgagacttgtccaacaaatgatcggtctgggaacttcaagcagttcaactgccctgatggctactataatgatctagccaccctcctccttaccactaatgatgatgctgttcgaaacattttctcaaccaacactacaaatgaattccatgttacctccattttaatcttttttgcactttattgcatcttaggactcattacttttggcattgctgttccttctggtctcttcctccctatcattctgatgggctcaggttatggtcgacttctcagtatggccatgggatcatatacaaacttagacgagggtctttttgctgttcttggtgcaggctcccttatggctggctcaatgaggatgactgtgtcactttgtgtcatattccttgaactcacaaacaaccttcttttgctgccaataactatgatagtccttttgattgccaaaactgttggagactgcttcaaccccagtatctatgagattatactggaacttaaaggccttcctttcctggatgcaaatcctgaaccctggatgagaaatctcacagttggcgagcttgctgatgtcaagccaccggtagtcactctttgtggggtggaaaaggtttcacggatcgtggacgtattgaggaacactacacataatgcattccccatcgtagaccagggtgtgccggtgccaggcatggtagccaccggtgcaaccgaactgcatggactgatcctcagagctcaccttgttcaagccttgaagaaaaaatggttcctgccagagaaaagaagaactgaggaatgggaagtgagggagaaattcaactgggttgaacttgctgaaagggaaatcaagattgagcaggtggcagtgacccgtgatgaaatggaaatgtatgttgatttacatcctctcaccaacacaacccctttcactgtggtggaaagcttgtcagtggctaaagccttggtgctgttcaggcaagtcggactccggcatttgctcatcgtgccaaagtatcaaggtgcaggggtagctcctgtagttgggatcttgaccaggcaagacttgcgggcttacaacattttgagtgcctttcctcatctagaaagacccaagctttcttaa

SEQ ID NO: 16887 - DNA, 687 bp, Zea mays
  Peptide Sequence Number=SeqID_58666
atgggttcatgtgtttcagtgcataagagctctcaagagtctgccatgaaacttgggctttctttagagcctaaaacagatagccttatcattccaccttcacctgttaaagagaaacctgctgctgccaatggtgactttgcacttaaatctcaatcttcctctacttttaaagatttaggtagtaaagatgaaactttttttgattcccgagcgtatctcgattcagattgtgaggatgatttcgttagtgtcaatggggattttactccttctcatagtaataccccagttcatcagagcttctctgtggggacatctcaagttaacaaagtcggtgatgatggatctccagggtcagtttctgaaacatccccatcgggaaagaaaaagaagctggttgaactattccaagagagcattagggatgaccacgatacttccgagtcaaatacctcaagcaaccaggacactgccaatgaaaagatagtcaaaccaactatccaagacatactacctccaaaatccgcagatggtaccccttatgtctctggagctaactcttgctgcagtagtgaaaggactgtgaacggagataaccctatctttaaagagaagccattaagtagttttagtgagaggaagaagaagatgagccctgcaatagctgcaaacaataagccgtaa

SEQ ID NO: 16888 - DNA, 2016 bp, Zea mays
  Peptide Sequence Number=SeqID_58667
atggcatctgtaatgagtaaaatatacttgagagctttggtcttattaatatggttacttatctctccacttggacagaacttgcttagctgtaacgttacatctccagatgctttgggttaccgttgtggtataaatggatcagaggatcaatgcggcacgttcgcggtgcttcgagctacttcatactactcatctctttccaatctgagcttttatttaggcttcaacagggttgcaattgctgaagctaatggcttctctgcacaaactgagtttctaccaagagatcagcctttgctgttgccaattgattgtaaatgcaacaatggttttttccatgctgatttaacaaaaactacaatcaaaggggagagcttctatggtattgctgaatcactgcaaggcttgacaacctgcaaagcaatccaagacaagaatcccggggtctcaccatggggtcttggtgacaaagtccggttagtggtaccactaagatgcgcatgtccgtcgccgtctgaagtcactttgaaagcaaggctcttactttcttaccctgtaagtccaggtgatacaatttctaacttggctgctgccttcaatacaacctcggaagctataatatctgcaaataacagatctttagagacctttgaacctgaaagtttagctactcttacatctcttttgattccacttaatggtgagccccttccgcattttccagaaaccagcattcctataattaacccgcagaagaaaaagccaaggatgtggaaagcgggagtttatattgctgtaagtggtgttgtaattgggactatcattgctgttgcagcaaccttcttggtgatccgattgaagaggaaaaagaagaagcaaaacttaagcaaggatgatgatttggaactgcagcagcttagcttaagtgtgcggactgcaagcgagaagaaagtctcgtttgcaggatctcaggatgccggagacggtccgctgatagacagtgttacacctcgtaaggcgctgctggagttatataccatagaggagctcaggaaagctaccgaggatttcaatccgagtactcatatagagggaagtgtgtatcatggtcatctcaatgggaaaaacatggcaataaggcgcactagaacagaaaatatttcaaaggttgagactagattctttactgatgcaactcatcaccacccaaacataattagattactcggaacatgtgtgactgagggctcccatccatttttggtctttgaatatgcaaaaaatggttccttgaaggattggttacatggtggattggcaatgaaaaatcagttcatagcctcatgttactgcttcttgacatggaagcaaaggctgaagatcagtttcgatatagccgtggcattacagtatatgcatcaagttatgaatccaagctatgttcatagaaatatcaagagccgaaacatattcctggatgaagatttgaatgcaaagattgggaactttggtatggcaaggtgtgttgaagatgatacaaaatatcctgatctttcaacaaacccttccagttggagcttgggttatctagctcctgagtatcttcaccaaggggtgatctccccaggcattgacatatttgcttatgggatagttttgctggaaatcttatcgggacaaaccccgataagccgaccggataagaaaggaggcgggaacgtttggctttcggagaaaatcaaggccatattacaatcagaaagtgcagatgagttaagggcatggatggacagtgcattaggggagaattactcatttgatacggcagtcacattggcaaaccttgcaagagcttgcactgaagaagacccttgtttgagaccaagtgctggagagatcgttgacaggttatcaagattggtggaagaatcaacagaaggagaacacacattgatcttcgaaagctcttccaaacctctggtaaacacatcatccacaacatccaatctgtga

SEQ ID NO: 16889 - DNA, 984 bp, Zea mays
  Peptide Sequence Number=SeqID_58668
atggccggatcattgattcgtcttgataggaatcacatatcggtggagcaattgaaaatgtctgaagatcgggtattggaatgcactatccggaatatgcatggtcctccatcaccgttagtagagaactacctgtgggaagcgggtttttggcacgtggcgacggtaggccggggatgcaagttggagccgaaactgatcagtgcgttgatcgagaggtggagacccgagacgcacacatttcatcttccatgtggtgagtgtactatcactctaaaagatgtccatctgcaattgggattgccggtggacgggcacccagtcaccgggtctgcccaatctagcaattgggaggcggtgtgctacgagcttttgggcgctgttctggataaaatggatggaggtaaggtggagatgggctggttacgtgccaccttccccgatccgaatgcaaattcaaccgaaattgaaagaatccgatatgctcgatcatacattcttcaaatcattggaggttatctgatgcccgacaagtcacggagccgtgtacatctaaggtggctgctaaaactcgttaattttagaggagccggtgaatttagttgggggtctgccgtcttggcaacattatatcgggagatgtgcggggcgacgcgaccgaggagagcaaacattggaggttgtctgtcactattgcattcatgggcacggtttcgctttccatttctatgtcctcgagtgaaccacccacatacattcccactcgtaacgaggtggaaccatccggcaagttatcgtggattaccgtctgaacttaaagatatacggcttctattggagcaacggtcggaagcagaatttcaatggacaccatacgaggatccggcaatccgggcagtaatcccggaagagtttttacaaaatccgaacgcttggtacgcgaaagtggtgttgatcaactatgcaaccgtggagccccactag

SEQ ID NO: 16890 - DNA, 210 bp, Zea mays
  Peptide Sequence Number=SeqID_58669
atgaattttgttagcgggttacctctgacatccactgagaaagattcggtgtgggtcatcgttgataaactgaccaagtgggtcaacctaaatgctatcaaaaggcttgtggaagctgatgcactcaagatggagatcattccaaacccgaaggaggtcaatggaatcaaggttcttcaactggaaactgcagctggtgcagcaattagg

SEQ ID NO: 16891 - DNA, 1074 bp, Zea mays
  Peptide Sequence Number=SeqID_58670
atgggctgtgttaatggaaagtgttgtagtagatatccatcatcaccagatggtggttcagatcactgtggagaattgagaccttataaaagcaaacacattcttacacaacggtcattggagatagttcatgtttcatctcacaagtttactctgcagtattcaatcttaacacaacttggttattaccaggacacagttgaaagggaaaaccaagatagtttctgtatcaaaacacaaattcaatgtaacccaaatgttcatgtctttggtgtatttgatggacatggtcaatacggtgctcaatgttcaaactttttcaatgatagacttgtagaaatattatccagtgactccactttgttggatgatcctttaaaagcttatacttcagcatttctagctataaattctgagttacatgatagtgagattgatgacactatgagtggtaccacagcaataactgtccttgttgttggggatactctttatgttgctaatgatggtgattcaagagctgtgattgctgttaagaatggggatcaaatattggctgaggatttatctgtggatcaaacgtcatttaggaaagatgaatatgaaagggtgaagctttgtggggccaaggttttgagtattgaccaagttgaaggctttaaagacccaaatattcaaaattggggtgaagaggaaaatgaaggtagtgatcctccaaggttgtggattccaaatggaatgtatcccgggactgcatttacaagaagtgtaggagatagtacagcagaaaagataggtgtgattgctgatcctgagatttctgtagttaaacttacaccaaatcatctattttttgttgttgcaagtgatggagtttttgagtttctacctagccgaactgttgtcaacatggtcgcggcatacacagatcccaaggatgcgtgtgctgcaattgctggagaatcctacacactttggttggagaatgaagatcggactgatgatattataatcatcattatacagattaaggctctttggattcctgtagtcgggtggtggtgccacagatag

SEQ ID NO: 16892 - DNA, 258 bp, Zea mays
  Peptide Sequence Number=SeqID_58671
atggctgttggcgacctcaggttcgtctttgcatcgaatgtggttcagtaccttcattcgtgggtcgcgaagttcttctcgaaggttccggttgtgttggttgatgcgcatgaaagtttggttagggagaggggcggtcttggctatcggataagtttggtggttcgactgggttgtttggaggatgatcggccgaaatgggtggcttatggggcgggtagactacggcgatcggagttgggctgcgatttcttctag

SEQ ID NO: 16893 - DNA, 243 bp, Zea mays
  Peptide Sequence Number=SeqID_58672
atgtggcctttgaaagttgagattaacttctctgcatatgcctctaggtaccgaggaaagagaatgaggatcgactacttccttgtttcggaacagttaaaggacagaatagtttcatgtgaaatgcatggccgtggcattgaattggatggattttatggaagtgaccactgccctgtttcgcttgagctttccgaagctgtagcagaagaagcaccaggacagcccaagccatccatctaa

SEQ ID NO: 16894 - DNA, 180 bp, Zea mays
  Peptide Sequence Number=SeqID_58673
atggcgactggattatatagggcccgggtcttaaccgaaacggccccaccaggcgcggttcacggggacccaatgatggcggccatgttccgcccgctgttaggaactgaaatcccgattggtacggggaggaaggataccagatgggatcacggggaaagagggaaggtgataagatga

SEQ ID NO: 16895 - DNA, 171 bp, Zea mays
  Peptide Sequence Number=SeqID_58674
atggaaggaagcaagtcggtcctgctcttgatggtgatcctgggaagtttgatggttcctgcacactgcggcagttgttattcgacgatgcaggattgcgcaccagcttgccgctgcgacaagctttcgcacgccccactaaatgtaagggatcatgaatcggtcctgtga

SEQ ID NO: 16896 - DNA, 348 bp, Zea mays
  Peptide Sequence Number=SeqID_58675
atggaccctaacctcgacgccgtcatcattggcgccgagccagagcccccctgtcgacccgagccctcgtcatgcccctgtcactgttcaagggtcccggagtcttctctcgagagtaaagccacgccgccgctaagccaccctgccgtggacgactaccttctggtgcctctacgttattgccatgcccacacccgtgtttgccacgttcccccgaacctccttgatcccctcccagcgccttgggcccctagcgcgcccacaccctcgtctccggtgggcctccaccgtgggcgcgagcagcaccaccgctggtggccagagagccctgcccaagctagtcgttag

SEQ ID NO: 16897 - DNA, 180 bp, Zea mays
  Peptide Sequence Number=SeqID_58676
atggtgatgaatgggttgcccatcagtgtgtacgcatctgagacattggggttcggcacatacacatgcggctcgtgcgccgtgtcatgcacgctcaagtgggacgtggccactgtcatggagtacaagggtatacccctgcagcaggtcgtcgactactatgtcaggggcacgatgtag

SEQ ID NO: 16898 - DNA, 1368 bp, Zea mays
  Peptide Sequence Number=SeqID_58677
atgggcgagacaatcttgttcgctcctcggaaggccatcaagtcccaagtcttggcggactttatggctgaatgggtcgacacccagcttccagcagctctgatccaaccggaactctggaccatgtttttcgacgggtcgctgatgaagacaggagcgggcgcgggcctgctcttcatctcgcccctcgggaagcacctccgctacgtgttgcgcctccatttcccggtgtccaacaacgtggccgagtatgaggctctggttaacgggttgcgcatcgccatcgagctaggggtccggcgcctcgacggtcgtggcgactcgcagcttgtcatcaaccaagtcatgaagaactcccattgccgcgaccggaagatggaagcctattgcgacgaggttcggcgcctggaggacaagttctacgggctcgagctcaaccacatcgctcgacgatacaatgagactgcggacgagctggctaagacagcctcgcggcggacaacggttcctccagacgtcttctcccgagacatacatcaaccctcagtcaagaccaacgacacgcccgagctcgagaaggtctcggccctgcccgaggcaccctcggctcagcctgaggcaccctcggcccccgagggtgaggcactgcgtgtcaaggaagagcggaatgggatcccacctaatcgaaactggcagaccccgattgtacgcacctgccaagggtgtcaattctacgcaaggcagacgcacctacctgctcaggccttgaaaacaatacccatcacctggtcgtttgctgtgtgggtcttggacctcgtcggtcccttgcagaaggcacccgggggctacccgcacctgctggtcgctatcgacaaattctccaagtggattgaggtccgacccctaaacagcatcaggtccgaacaggcggtggcgttcttcaccaacatcatccatcgcttcggggtcccgaactccatcatcactgacaatggcacccagttcattggcagaaagttcctggacttctgcgaggaccaccacattcgggtggactgggccgccgtagcccaccccatgacgaatgggcaggtagaacgtgccaacgacatgattctgcagggattcaagccaaggatctacaacgacctcaataagttcggcagacggtggatgaaggaactcccctcggtggtctggagtctgaggacgacgccaagccgagccacgggcttcacgccgttttttctagtctatggggccgaggctatcttgcccacagacttagaatatggctcctcgaagacgaggacatacgacgccggaagcaaccagaccaaccgagaagactcattggaccagctgtaa

SEQ ID NO: 16899 - DNA, 591 bp, Zea mays
  Peptide Sequence Number=SeqID_58678
atgggacaccggtcttgttctctgcggcccgagtcggctcggggtagggtgatgatgacgcttcctgtcgacgtggctggcctatgccctaggttgggcgacgtggaggctcctccgaagcctgggtcgagtctgtcttccatggccgaggccgagtccgagcccctgggtcgggcgaggtggaggtcgtcagcagaggccgagtccgagcccctgggtcgggcgagacggaggtcgtcggcagaggcaagggcggtgtccgagccctggggtcgggtgaagcggagttcgtcgtcttctggggctgagcccgagtccgagccctgggtcgggcgaagcggagttcgccgtcttctgggtcttagcccgagtccgagccctgggtcgggcggagcggagttcgccgtcttccggggccttagcccgagtccgagccctgggtcgggcggagcggagttcgccgtcttccggggtcttagcccgagtccgagccctgggtcgggcggagcggagttcgccgtcttccggggcttagcccgagtccgagccctgggtcgggcggaacggagttcgccgtcttctggggcttag

SEQ ID NO: 16900 - DNA, 465 bp, Zea mays
  Peptide Sequence Number=SeqID_58679
atggacgcaccgggagcgctggccgcgcaggcaataggggacgtgccaggccagggagccgcgtcgcgagcagccgcacgggcggaccgtgagcaggccgcacggggccgcctcgagcagctgcgggccgagcagcacgccaggccacgcgcgacaacgaagaggaagggagggaaaggggaaaggagaagcagggctcacctcgatggggatgggatgcaaacgcagcaagtccggcgagctccggtaggcaacggtctcgaagctcggtaccatgcggtttggggaagagaggcgcctggcttctgtgctgcacctgggaggaggctgggccacgcgtggcggggaggttcacgggccgcgcggggagagagcggctgggccgcgtggggcactggccaggtgggccgcgaggggggaaagaagcgcgtggcgctaggccgcgtggcagcttggtcggcctag

SEQ ID NO: 16901 - DNA, 195 bp, Zea mays
  Peptide Sequence Number=SeqID_58680
atggcgctgtcacgccgtccagctcatcatctatgtgaagctcaacctgtcacgaagctgaaggagaagggtcgtatgcggcaagccaagagacaggcagctgaaggatctcgcatgcggttgatgaagagacgggcaactaaaacgtttaacccagagttgaaactaccgcggttaatgagtgctaaaaattaa

SEQ ID NO: 16902 - DNA, 198 bp, Zea mays
  Peptide Sequence Number=SeqID_58681
atggccttgttcagccaaagccagctcagtctgggtgcaccggactgtccggtggtgcaccggactgtccgggtggtgcaccggacagtgtccggtgtgccaggctggactcaagcgaacttgccgctctcgggaataaattacccggcgtacgggtataattcacccgactgtctggggtgcaccggaacagtccag

SEQ ID NO: 16903 - DNA, 570 bp, Zea mays
  Peptide Sequence Number=SeqID_58682
atggatccatatgaagacgaggagatcgtctactgtgacaaccacataacactcaccgtgatcctacgctctgtgctgcccaacatgctagccagtcttcgaaagagaagaacagagacaacaatgtggcgggtccagcgggtgtgtgaggcgtaccagctccactgtcaggtttggagtttggagttccgagagacagttgaagcaaagactcaacaaaaaggagcaaatggatttagaagatcaaaagagctactgactcagcaggtgaacattgtcatatttgatgcaccatcaaatgtgtccagtgttaccgtagactgtgcaattttgctaagtgtcaaagagatgcaaatagaaaagcaagaaaccttgtcaaaacgagagaaatcggattggagaagtttggttaagttcagccaaacctgcaccagcctgtggggcatcggactgttcggtgtgcaccagacagtgtccggtgctcaggctggcgcgctcagcaaactggccgctctcgggaaaaactcagggagccgcggctataattcaccggactgtccgatgtgctag

SEQ ID NO: 16904 - DNA, 624 bp, Zea mays
  Peptide Sequence Number=SeqID_58683
atggcgcttcctgttgacgtggcgggtctgtgccctaggcagggtgacgtgggggctcctccgaagccgaggttgagtctgtcctctgttgccgaggccgagcccgagccatggggtcgggcgaggcggaagtcgttcggccgaggccagggcggagtccgagccctggggtcgggcgaggcggagtttcgtcgtcttccggcccgagtccgagccctagggtcgggcggagcggagttcgccgtcttccgggtcttagcccgagtccgagccctgggggtcgggcggagcggacccgagtccgagccctgggggtcgggcggagcggagttcgccgtcttccgggtcttagcccgagtccgagccctggggtcgggcggagcggagttcgccgtcttccgggtcttagcccgagtccgagccctggggtcgggcggagcggagttcgccgtggcgcttttggcaaggcctgactgcctgtcagactcactctgtcgagtggcaccgcagtcggagtggcgcaggcggcgctgtccttctgtcagactgctttatgctgatgggggttaccagctgagaattaggcgtcttgagggtacccctaattatggtccccaacagtag

SEQ ID NO: 16905 - DNA, 270 bp, Zea mays
  Peptide Sequence Number=SeqID_58684
atggctaccaagatattagccctccttgcgcttcttgccctttttttcctcccaccagttacttcaatgggcttcgaacacctagctgtgcaagcctacatgctacaacaagcgcttgcggcgagcgtcttacaacaaccaattgaccaattgcaacaacaatccttggcacatctaaccatacaaaccatcgcaacgcaacagcaacaacagttcctaccagcactgagccaactagctgtggtgaaccctatcgcctacttgcaatag

SEQ ID NO: 16906 - DNA, 1404 bp, Zea mays
  Peptide Sequence Number=SeqID_58685
atggctttcatcgtgctccttgctgctgcagcagcggcaatagccttggttctccaccacctcctcagtgcccaaaaaaagcgcagcagcaggtctgcaggctcgacgtcctacagcctaccgcccggcgacctcggcgtccccgtcatcggccagaccttctccctcctccacgcgctgcgcagcaacacggacgaccagtggttcagggcgcggatcaagaggtacggcccggtgtccaagatgtcggtgctgggctcgccgacggtgctgctggccgggacggaggccaaccacttcatattcaccaaccagggcctcatcctcacgcagacgcgcgcgctccgctccctcctccgccgctccatcctcacgctcaccggcgacgacctgaagcaggtgcgcagcgcgctgcagggctacttgcggcctgagatggtccgggggtacgtggggaagatggacgccgaggtcaggaggcagctcaagctcaactgggttggtcgcagcactgtcaacgtcctgccgatggcgaggagccttacactaggggtcatctgctccgtcgtcttcggcgaggaagcagccgccatagtagacgccctagctaccgacttccagcagctaggtgacgcgatcctgtcgttcccagtcaacatccccttcaccaggacgaagggtgcaccaccgcccactgctactgctacgacttcagccgccaccgacttcgtcacctacatgctcctcctgcgctccaggggcgcgcactccctctcgctggcggacatcgtcgacaacgtgatgggcatcgtcatcggcgcgcacggcaccacctcgacgctcatcaccttcatggtgcgccacctcgccaacgagccagacgtcctcgccaagatcacccaagaacaagatgagatcgctggtagaaacggaagagacggtgctctaacatgggaagacgtttcgagcatgaagtacacatggagggcggcgctggagacgctgcgcacggtgccgccggtgttcgggagcttcaggactgccaccaaggacatcgaataccagggctacctcatccccaagggctggaaagtcttcgcatcccaaagcatcacgcacatggatcccaggttcttcgccgaacccaccaagttcgatccgtcccgcttcgagaagcgctcgtcgatcccgccgtacagcttcctgccgttcgggggagggccaaggatgtgccctggaaccgagttctccagggtggaaaccatggtggccatgcactatctagtgacgcggttcaggtggaagctgcgcttcgaagacgaagcctacaacaaggatcccaaacctacgcctgttttcggatgtccagtggaactggagctgagaaaaacccctgcaatataa

SEQ ID NO: 16907 - DNA, 345 bp, Zea mays
  Peptide Sequence Number=SeqID_58686
atgccgcggccgctctccccccccccccctcgcgtccgcaactccctccccccggcccatttccggcccgctctcgcgcacgctcgccagctcgccctgcgcgctctctctctcgctgacgagccgtccccacccatcagccgccccctgtcaacgctcgctcgcgatcactcccaccggcagtacggccccgctttcgacttcacccatgtcactggcgaccccttctcgtgggaagatttggcccgcaactttcatcctttccatgtgcctgcccgtgagatggtatcttttaacgcggagctcctgccccttacccccgggccattgtctgtcagtgggtag

SEQ ID NO: 16908 - DNA, 159 bp, Zea mays
  Peptide Sequence Number=SeqID_58687
atggctaccaagatattagccctccttgcgctccttttcccttttactgtggaaaacactgctgtatacctgcaacaacgacaacaactacttagtccactagtagtggctaacccattggtcgcagccttcctgcaacaacaacaatttctgccataa

SEQ ID NO: 16909 - DNA, 255 bp, Zea mays
  Peptide Sequence Number=SeqID_58688
atgaaatcacactacatgagcccgaagtttaagtggttgtacatgaagtttgagttccatttgacaaaggttaactcaacaacagagcttcgactacactatgcccccgatgagcgaaggtttgtattaaatggaaaagatcgaaacgtgcttgactgtcctattttatttagtgatgatctatctgttttgatggttgataaaaagattcttgtttttgataatgcatgtgtgagtgaatctatagaccgttga

SEQ ID NO: 16910 - DNA, 657 bp, Zea mays
  Peptide Sequence Number=SeqID_58689
atggaggtggcaacatgctctttcagtgatgagaatctgcttggaaaaggaggatttggcggagtctacaagggctccctgcgatcaggagaggttgttgcaatcaagaagatggagttgccgtcattcaaagaagccgaaggagaagatgagttccgcgtagaagttgatatcttgagcagacttgaccatccaaatctggtttcgttgataggttattgtgcagatgggaagcaccggtttctagtctatgaatacatgcaaaaagggaaactacaagatcacttaaatggtcggttttctactcaaatctgtttccagaccagttgctcacctattcaacatctatcaaagttaaactgctccattaggggacttgcttatctccactctagttctgctgttggagtccctatagttcacagagattttaagtccaccaatgttcttctaaatgccaactttgaagcaaagatatcggattttggactagccaaactgctgccagagggtcaggagacttctgttactgccagatttctcggcacatttggctattttgatcctgagtatacatcgactggaaaactaacattacaaagtgatgtttatgcatttagagtggttcttctagagctattaacagcagggatttaa

SEQ ID NO: 16911 - DNA, 159 bp, Zea mays
  Peptide Sequence Number=SeqID_58690
atgtctgggacatggcgttggtaccgagatgagaggtcccccgtaagaccatgtctgggacatggcatgggcaccaatatgagaactcccatgtttctagagattcaaatgacaagtttcaacttcattaccttcttgatgaaagacgattccatttga

SEQ ID NO: 16912 - DNA, 438 bp, Zea mays
  Peptide Sequence Number=SeqID_58691
atggagtttgatggggaagtggtaaaatttaatgtttatgaggtgatgggtcaacccagtacaatgtcaaatatttctagtgttgatattattgaacctctatcaaaattacattttgaatatcatgaagtggataggttacaaactatgctctctaggagtttagaccacaatattatgtataaattggaggaattaatgacgttgggagagccaattcatgaagctatcattcgcatgaaggcctcaaaattagagctcaaatcattaccgggacatttaaggatttcgatagaggaaaatgcaaactcgaatggagaagctcaaaggcgcctcaatccacccatgatagagaaacccaagaagtgctttaaggaaaatgggaaaatgttgaaacctttctacaagaacttcaaagtgcactttaatttaggttga

SEQ ID NO: 16913 - DNA, 924 bp, Zea mays
  Peptide Sequence Number=SeqID_58692
atggcgttcctcctgcccaagctcacaacgccgtcctgcaagttgcccccgagccccctcctcaagccccagctcgtcccgccgggccacggcggcggcaagatccaaggctcctccgtctccggctctggcgcggcgcaggtcgcggccccgggccacctcagcctcctgctcctgctcagcgcctcgcagcaggcggccggccccgcggccaagtcgacggcgaccaagaaccggggcaagggcggcggggatccgcaaaggtcggatttttacctcaacctcggcaccgcggtgcgcacgctgcgggacgacctgcccgacgtcttcgtccgggaatccaactacgatatctaccggtgggtaaagagagccatttcccctttgtctgtcgctatttcagttaatttttgtgaagacatcacatttgtcgacccactaaacactttccacggcattgacaactacaagaccatcttctgggcactcagatttcacgggcgcctgctgttcagagaaatcgggctcgatgtatcacgcatctggcagctgacagagaactcgatcgttgtccggtgggagctgtggggcactccccgtgtcccatgggagtcatacggctgcttcagcgggacgtcgaggtacaaggtcgacaggaacgggaaaatctacgagcacagagtcgacaacttggcgctggacttcccacgatcagtagccagagtgggcagcatcgctgacatggtagtcgccacgccgagccccaatttgacgttttggaatgcggttgtgacaggcgatggttgctcgtggacaaagctttatgaagccgtggtggaagctgtggaacgggaagagcatagttccactggcattggccctgttggctgcagcttcggttgcggctgtggctgcagtttttga

SEQ ID NO: 16914 - DNA, 984 bp, Zea mays
  Peptide Sequence Number=SeqID_58693
atgaaggaggagatggtggtcggcctgtcggcgccggggccggtggggaggtggggcgccgcgccgccgcaggcgatgctggagaggatgaaggactacggccaggagggcgccttcgcgctctgggacgatctctcgcccgaggaccgagagctcctcgtccgggacatcgagagtctagacctttcaaggatcgatcggatcatccggcgctcccttggatcgcaaggcatcccgttgcctgccgtcgagcccgtgccggaatctagtgtatccaaggtggaggacaggtctcctgaggacaaggaaagatggtggaagaaggggctcaaagccatctctgaggggaagctggctgttgtccttttggctggtggtcagggtactcgtctgggaagctcagatcctaagggatgtttcagcccgagtaacactgtgctgatccactggtatataatgacaagccccttcacagatgcttccactcgcaaattcttcgaaacccgtagatactttggcctagaccctgaccaagtgacatttttccaacaaggcacacttccatgcgtctctgccgatggtagatttattatggagacaccatatagggtagcgaaggctcctgacggcaacggtggagtttatgctgcgctgaagtccaagaagctgatggaagacatggctgcgcggggagtgaaatacgtagactgctacggagtcgacaacgcgctggttcgagttgcggatcctacgttcttagggtacttcatcgacaagggtgtgtcttctgccgccaaggtggtgaggaaggtacggtcggtccagtctcatgctccactagtccacgcttcaaactggtttgctaccgctgtcgtagcagcgcacctcgctgacagtcagctgaatgctcgaccaggcttacccgcaagagaatgtcggggtgtttgttcaacgaggccgcggtggacctctctccgtggttga

SEQ ID NO: 16915 - DNA, 195 bp, Zea mays
  Peptide Sequence Number=SeqID_58694
atgtggaaattgtgtttcttgggaggcgagatcaatgtctgctacgaagaaaacgaccctctgcgctattatggaccgtcagagtcccagttatggaccatctggacgttcatagagaaggagccacccctacgtcaagtcgtggaccgtctgggccgcagaccatccgcgcctccgcagggtgacgcgcactag

SEQ ID NO: 16916 - DNA, 489 bp, Zea mays
  Peptide Sequence Number=SeqID_58695
atgcaggctgcgtgccctctgttttggtaccctcgggagtcgggaactggcgggcgctgctggaggacaaccggcgccaccgacgagtcgcaggcccacgtggggcttgagaactgccgacgtcatggttgcatgcgggaaaccaccatcgcctattaccgggttgatccgagcctgaggtcgggcgaggcggcggctcctccaaggccgaggctagggccgaggcctagggtcgggcgaggatgtgactcttcccgaggccgaggccgagccctggggtcgagcgaggaggagatttcctcccgaggccaagccctggggtcgggcgaggcggagcttcctgttgcgcccgaggctgaacttgaccgttgtcggtttcgcccaggtggttggcacagtagccggagcggagcgggcgacactgttttcctgtcagatcgatcagtgaaagggcgaagtgactgcagtcacttcgaccttgccgactga

SEQ ID NO: 16917 - DNA, 351 bp, Zea mays
  Peptide Sequence Number=SeqID_58696
atgtcgacgtatccgccaacaataatgattcttggatattatgcgcaaccaagttatgcgatatcatacaattattcgccgatagtttcacaaacacttactgcatcgttgttttatcaaggtggctcatcattgcaaccgccttcttgtagaatagaggagacacgagggaaggctaggatgacaccgtacttaaccacgaaagaaggagatagagacgaaaataaatacagaggtagagatgaagatgagggtcgagatgaagatgaatacgagagtcgaggtgaagatgaagatgatgatcacgacgaagaggaggagccagcacccaaatttgtaccttacctgtaa

SEQ ID NO: 16918 - DNA, 720 bp, Zea mays
  Peptide Sequence Number=SeqID_58697
atggagttcagaaagaaatatattagccagagatttcttgataaaaaacggaaagagtttctaaagttgaaacaggttcgcatgactgtgacggaatatgaacttgaaagagcttgcaaagccgaggagcttagcaaagaaaagaagaaagcggattcagaagctaaagacgagagaaaaagatctatgagtaagcattatcaatcttcgtcaaagaaattcagagaatcacacagtcgttcaaatgcttcaattgggtatatgagtagaggtcgtgcaaaacaatactcctaccctaaggctcaagtttcaatggaatcaagtgttggtagtgtcagaaacaataaacttgagtgtcgacagtgtgggagacggcatgttggtgaatgttggggcaagtataataatagattttgctataaatgtggttcacgagatcacttcatttgggattgctcaaagttagctaagaaagataatgtccagtgtacgaggcaaagtaacacggcagctagaggtagaccacccagaaacacaggaattgttagtggtagtcaaagaggcacaacagatacagctttgaggtccgaggccagagcacctgctcgagcatacgctattcgcgctcgcaaagaagcgtcgtctccagacgtcattactggtactttcactctctatgatactacggtagttgcattgattgatcctgtttattcataa

SEQ ID NO: 16919 - DNA, 2973 bp, Zea mays
  Peptide Sequence Number=SeqID_58698
atgtttggtacaactaaccctttcgggcaaccagcaagtagcccatttggccagaccaatccaagtagcaatccgtttgcacctaaatcttcctttggtagtccaactccttttggctcccaaacagggggttcactatttggtggtacttctactggggtgtttggtgcagcccaaccttcttctccattttcctcaacaacaacctttggtgcatcatcatctccggcatttggaagttccatgcctgcttttgggtcttcgtctactcctgcttttggcaattcatcatcatcttttggtgggccttctggttttggtcagaagccagcatttggttttggatctactcccactcaatcaagtccttttggaagctcagggcagcaatcacaacctacatttggtagcggaatatttggttcctccacaccctttggttcaacacagtctgcatttggtgccacaagcaccgctgcgtttggtgccacaagcacccctgcctttggtgccacaagcacccctgccttcggtgccaccagtacccctgccttcggtgccacaagcacccctgctttcggtgccacaagcacccctgctttcggtgccactagtaccccagcctttggttccacaagcagccctgcctttggttcaactggaagtccttttgggagcactggaactgcatttggtgtgtctaatgccccagcatttggagcatcaagcacacctgcttttggcacatctagcactccagcttttggagcgtcttctactccttccttcagctttgggtctagccctgcttttggacaatcaacagcagcatttggtagtagtccttttgggacgactacagttggagcacagagttccccttttggaagccaatcctcttctcctgcatttggaagcacgacctttggccagtctgcatttgggggtcaacgtggaggcagtagagtagctccttatacacctacaactgatgcagatagtgggagtggtacacagcctgctgcaaaattggagtcaatatcagcaatgcatgtttacaaagataaaagtcatgaggagctgagatgggaggattatcagttaggagataaaggtggaccgcaaccagctgctcagccttctggagggattggctttggtgtgtcagctgcacctgcaagtccttttggctcttcttcaacaattggtcaaacatctgcaaatccattttccggcacgagtgctaatccatttagtataaaacccccatcctttaatagtgcaagttttacaacctcaactactacatcaaatccttttcaatcaacatcatcaagcctttttggcccatcttcatcaacaacaccttcaatatttagttcttcagctcctgcatttggaactggttcatctctttttagttcatctgtaactccttcattttcatcttcgccatccatatttggtactggtgcagctccagcaacaacacccacatttgccactggtttaaattttggcagcagtcaggggtcttctctgttcacttctacccctgcaattgggcaggcaagctctacctttggacagaatactagtagctttggtccaactagcattttcaatacaccttccactgggtttagtgggaatatgttttcgagctctctgtcattgcctccttctagcaacccaactgccttcggctcaacaactccctcttttgcttcacctttccagccagctcagacttctggagctttcagctttagtaatcttggtcagacacaaatgagtggtggatctggcatttttggtcagagtaatgttggcctaccgtctgtgacacaaaatgctgctgtagtacaacctgtgactattagtaatccctatggaacactccccgcaatgcctcaaatgtcaattggtcgggctgggactgcaccatctgttcaatatgggatttctagcatgcctgtcacggacaaacccgttcctgttagaatatcgcccctgttgacttcacggtacatttcacaaagacggattaggttgcctgcaaggaaatatcatcctaataacggcaatccaaaggttccatttttcaatgacgatgaagagacacccagcacacctaaggctgatgctgtttttattcctagggaaaatccaagggctctggttatccgtcccactgaaaattggccttcaagagcttctgtagagaaggtattgcctttgaaggatgcatcctctctggtgcatgagaatggcaaagtttctgatgatggcttcaatgctgaggataaagataaaaatccagctgaaaatggccttgtgaaggagcagattcatcataaccagaaagctaatggagtccatgatgatcattctgtacagaaagaggattcgttcaggacactcagtggccacagggctggtgaggctgctattgtgtatgagcacggggctgacgttgaggctctaatgccaaagctcaggcgttctgattactatacagaaccccgaatccaagaactggcagcaaaggaaagggctgaaccagggtactgtcgccgtgtcaaggactttgtggttgggcggcatggttatggaagcataaagttcctgggtgagacagatgtgagatgccttgatctagagtcccttgtacagttcaacaaccgtgaggtaattgtttacatggatgacagcaagaaacctcctgttggacaaggtcttaataaacctgcagaagtaacgcttctcaacatcaagtgcttcgacaaaaggaccagagagcagtatacagaagggccaaaagtggagaaatataaggagatgcttaagaagaaggccgaggaccaaggagcagagtttctctcctatgatcccatcaaaggagaatggaggttcagggtaaatcacttcagcaagtacaagttggaagacgaagaggaagatgtgctgtaa

SEQ ID NO: 16920 - DNA, 714 bp, Zea mays
  Peptide Sequence Number=SeqID_58699
atggacatccccgatggggttagcgtcaaaataaaagccaaggttatcgaagttgagggtcccaggggtaagctcatccgcgacttcaagcacctcaacctcgacttccatctcattaaggacgaggagaccggcaagcgtaagctcaggattgaggcttggttcggctccaggaagactagcgccgccatccgcaccgctctcagccacgtcgagaacctcatcaccggcgtcaccaagggataccgttacaaaatgaggttcgtctatgctcactttcccatcaacgcctccatcactaacgccaacaagtccatcgagatccgtaatttccttggcgagaagaaggtgcgcaaggtggatatgttggaaggggtttccatagttcgatctgagaaggtgaaggatgagattgttttggatggtaatgatattgaacttgtgtcacgatcagcagctttgataaatcagcatcagcatcctgattttgatagccaacaaaatgggaaagactggaatgtgggggcatcttattctcatactgattatgaattccactggctactcgagatggaaaatgtgaagattagaagtggcagcggtggagcaaaggtatcgggtaccttttggagaggagggttccaattgaaaggctttgtagagaggccattgataaacatatatggcacaaatggttctgaatctcaagagtga

SEQ ID NO: 16921 - DNA, 1257 bp, Zea mays
  Peptide Sequence Number=SeqID_58700
atgcccgttgaaccacttagaatatcgttagatatgcgggtagcacacaccagagataatcctgatacaaaatccatcgtaactctatcccatttccactctggtatcatcactagctgtgatagtcctaaagacgaagacattcagcctcttgttgttgataatggtactggaatggttaaggctgggtttgctggagatgatgctcctagggctgtcttccctagtattgttggacggcctagacacacaggtgtcatggtggggatgggacagaaagatgcctatgtgggggatgaggctcagtctaaaagaggtattctcacattgaaataccctattgaacatggtattgttagcaactgggatgacatggaaaagatctggcatcacactttctacaatgaacttcgtgttgctcctgaagaacaccctgtgcttcttactgaagcacctctcaatcctaaggccaacagggagaaaatgacgcagataatgtttgaaacgtttaatgttcctgccatgtatgttgcaattcaggcagttctatccctttatgctagtgggcgtactacaggtattgtgctggattctggggatggagtcagtcacactgttccaatctatgaaggttatgcacttccccatgccatcctcaggcttgaccttgctggacgagatttaacagatgctttgatgaagatcctgacagagaggggttactcattcaccacaactgctgaacgagaaattgtacgcgacatcaaggagaaacttgcttatgtggcactcgacttcgagcaggagcttgaaactgcaaaaagcagctcatcaattgagaaaagttatgagctacctgatggccaggtaataaccattggaacagagcgtttccgttgtcctgaggtcttatttcaaccatcgcttattggaatggaagctcctggaattcatgagaccacttataactccatcatgaaatgtgatgttgatattagaaaggacttgtacggtaacatagtgcttagtggtggatccaccatgtttcctggtattgctgatagaatgagcaaggaaatcacagctcttgcaccaagtagcatgaagattaaggtggtagcacccccagagagaaaatatagtgtctggattggtgggtctattttagcttctcttagtacattccagcagatgtggatatcaaaagcggagtatgacgaatctgggcctgccattgttcataggaagtgcttctag

SEQ ID NO: 16922 - DNA, 372 bp, Zea mays
  Peptide Sequence Number=SeqID_58701
atggatgcggagccgatggcatattattctccgcaacaggcagagcccgagcaagacccccagccagatcccggacaatcacagttaaatatggattcacctggctatcgtccagattcggtgggcggtgaatattattcgagcttcgcacagggcgaatacgcctacgactttgaactgtttggatccccccggccgcagtacggcatgcccggcccgttcgacacgtatccgcagcattataggactcatgatggttcaagttcgtcggcggtgaacgaccaacaggacctttcatctacattttccacgtccccacctgcggacgatgaggatgttagtcgtcgcccaggccttattgcttacttctga

SEQ ID NO: 16923 - DNA, 211 bp, Zea mays
  Peptide Sequence Number=SeqID_58702
atggacgcccagaattctagcagcgagcccccttcctcgctgttcgtcgtggacagcagtcgtgtcgcattcgccatcgacctcgccttcgtgtacaccccctcgcagcagcgccaacatagcagccgcgacactcccctccaccccgcactcgccacgctcaacaaaaatgccccctcgcgtagctacacacttgttgttgctgcacgtt

SEQ ID NO: 16924 - DNA, 141 bp, Zea mays
  Peptide Sequence Number=SeqID_58703
atggcgaaatcggtagacgctacggacttgattgtattggctaaggaacttcttgtttcagagggggaatcaatcaagcttgatcaaccattaacaagcaatcctaatgtaggagggtttggtcagggggtgcagaaatag

SEQ ID NO: 16925 - DNA, 294 bp, Zea mays
  Peptide Sequence Number=SeqID_58704
atgcccccaaaatctgatccgagaggtgctttacaacaagggcacgaaggagaaatgaaggggaggggtctcaccaagcatgggcggtgcagagggctccgcccacgtcgcagggcgcgcgcggttcacatgagaccgttcaagtatgcgggcgtggacgaagaagatgacaagtggggcccaagtgacagcgtctttatggttgacgagcgccaggctggtggccctccgatggggcctagtgcagaggcaaatgagcccaattggcccaggccgagtgcggggggaaaatga

SEQ ID NO: 16926 - DNA, 174 bp, Zea mays
  Peptide Sequence Number=SeqID_58705
atggcgtgccaaatgctgccggtgtggattcatatttatatactcagcgtgttacaacttgaagggccccatctatcattgactattgctattctagcaaagggaagagtgttagaaactggtatatcagccgagctcacggttaagagcatccatgggatcctctttgattag

SEQ ID NO: 16927 - DNA, 576 bp, Zea mays
  Peptide Sequence Number=SeqID_58706
atggacgaaccgccccacggagtttggcggacgcgcggcggtgttcgcgccacggtgacgaatcccgagggctctggccgccaattcacggcagggaggtccctggatcaatccccgacgcacgacgagactcacagggccggcgacggcgctaattcctctctctctgcgctctgctctctcttggtggcggcggcacagattccgcccgtggtggcgtggatcacccccccttctctctcaatcgtgcctcacttgatgacctgggcagcgcccgatgggttgagtcgagggggaaagcacctacgagctgtggattttatgggggagggcaagtccgagctggtcagggcgaccgcggttggcgcgagtttaccggcgaggagatcgcgttccgttgcaggagaacgagcgaggatccaacgtgatgaccccaccaagcgcggatcacggggttccgttggaggtggtcgtgcactgcccaccgccaggaaacgatgttccgatcggcgtggggaagaagaatgggtccgacaagtggagaccacccgacagcggcccaaggtgacaagctag

SEQ ID NO: 16928 - DNA, 360 bp, Zea mays
  Peptide Sequence Number=SeqID_58707
atggacccaggcccctcgataagcgcggtccgattcgccgaccccaccgtcatttataatcgccacgagccagccacacctgtggcccctaagtcgtcggtgtaccacccggccaccattcaccgcgacccccggcacatccacccgatggtgactcgccacgccttcggtgtccttcggccagtcgacaggatgatcctggccactggtacgaccactactctggctggacgttcgggtttacccaaaattttgggtcaggcttttcgggttttttacattttgggtttcaagcagctaaacccgaacccgtacccaaaccttcgggtacccgtaattttcgggtacgggtttgggtaa

SEQ ID NO: 16929 - DNA, 204 bp, Zea mays
  Peptide Sequence Number=SeqID_58708
atggcttatggcgctgagataacacgtctcggcgccatcgcctatggcgccgagaaaagacaaaataacccagaatttggaatggagtacaacgcaagatccctgcaactaaagattggtctctgcttagcatgttatcgctactctggatacaaatttcttaatgcagttacctttgttgagaatgaacactgtggaacctaa

SEQ ID NO: 16930 - DNA, 144 bp, Zea mays
  Peptide Sequence Number=SeqID_58709
atggccaactgcagcgccgcagccggcaagctcatcgtcgcggagaccttctccaacctcagggagcaaggcaagggttggattgctggcgccatggtggccgatacccaatgttggtcccggttggttgcagggaatacctaa

SEQ ID NO: 16931 - DNA, 375 bp, Zea mays
  Peptide Sequence Number=SeqID_58710
atgtacgcctgcgacggcgcggggctggacctatcgccggtcctcatccacatctatgtcaccccaataaagcgcttcctccaggtgctgtgggcgatcggggcgctcggctccgtcgggacctacctcgtcgccgcccgcccgctggatgagggcctcgtgcagtacgtggtggaccaccccgtcgtgttgtggttcgtcggccccacgttcgtcgtgctcactggcctcgtcttcaaggaaggacaagtggagaaacctgctgaaaggaaaactcacagaaaaagtacgctgctgtatcttgagccatcattggttgaaaagatcaggaacctggcagcaaaacagccatacccatatagaaggcacagatag

SEQ ID NO: 16932 - DNA, 282 bp, Zea mays
  Peptide Sequence Number=SeqID_58711
atgtgcgaggccggagccgccttgcccgccggcgccgtctccgtcgcgcccatgcccttcattgctgctggatctttggaacgggacgaggacgagaacgagttcttggctacagcgaaagagcgaagcgagcggaactgtgagtgtgtgactgtctgtgtgtgtaacgaactccggccgaatcaagctgaagtagaggatcggcaatcagatggccatctccagattcttgatgagctgtttggttacagtgttgcactagtcaacattgctgacccatga

SEQ ID NO: 16933 - DNA, 164 bp, Zea mays
  Peptide Sequence Number=SeqID_58712
tggacttgacgacctcatcttcaacaccgggcactgggctcaccgccaaactcaggccgtatgtacacaagctccaaaatgtcaagtttcacttgccacagcctactcatctgtaggcagttggggtcatctcgagtgggacggaaaggtggcgcagacggcag

SEQ ID NO: 16934 - DNA, 1344 bp, Zea mays
  Peptide Sequence Number=SeqID_58713
atggaccccttttccaagaagcgcaagcccgacgagaacggtgccgtcaccgcctctcccgccggtggggctgccacgctgggcctcacccgcgacgacgtcatccgccttctcgagccgctctcccgggaccagcttgcggacatagcggccgccgccgcgctcgtctcctcgcaagcgctcgacgccgtgcgcgcagccgccgaccgtgacccggccctccgcaagctcttcgttcgggggcttggttgggagaccacatccgactcgctccgcgccatcttctccgcttacggggacctggaggaggccgtcgtcatcactgacaaacccacggggcggtccaagggctacgggttcgtcaccttccgccacgccgattccgccgtcctcgcgctcaaggagccatccaagaagatcgacggtcgcatgactgtcacgcagctcgccgccgccggctcggctggtgggcccgccggtgggcccgccggcagtggcggtgctcctgtgtctgatgtgtcgctccggaagatcttcgttggtaacgttccggcagacatggcatcagagcgtctccttgcgcattttgcctcctatggcgagattgaggaggggccgctgggttttgacaagcagacgggcaagttccggggttttgcactcttcgtatacaagacaccagaaggtgcgcaggcctccctagtggacacggtgaaggtaattgacggccaccagcttgtatgcaagcttgccttagacgggaagaaggagaagcaggggcaatcacagcaacctggacctggcaatcaccagcagcagcagatactgccgggtggtccgcaggacattcagggagggcttgggcttgggtcacaaatgggagcacagtatggtgtccctggtactggtatgccttcatttggttttggtggtgttggcggcgggtttgggggtccaaatccttatggtaacatgccatcttccatgggtggaggtggcgcaggtggtttagggtcgatgggaggccaggtgcccagtggtttggctagtgctggggctggtgcatttgggcctggcggattgggtggtggttcatttggtgtatcatctcagttcggtgctgctgggatgggggcatatggtggccttggaattggtggaggctctatgtaccgcatacaacagggagcaggtgggctgcctgcaggcacatttggtgatggagggagctacccacctccaggttctggtttccggggccaggaccctcaaggtggaatgtctcctcctggtccaggtggcagggctcctcctatgtatcccaacgtgccaccttatttctaa

SEQ ID NO: 16935 - DNA, 1077 bp, Zea mays
  Peptide Sequence Number=SeqID_58714
atggggacttcggaattgccctgcatttttgagtttgattcaggcgggacagcatttaacggtgttgttgaagaattgaagaaagtcactactcgagtcgcgcacgtgctccctgtttctgatgatggtggaagcactgctgagattgtgcgtgtgcttggcgggcctgctgtgggagacataagatcaagatgtttgaggttgtctgatgaaagtactgcagaagctctttctgttcgaaaattgcttgggcatcgtttgcctattgatccttcagaggcaaagctggaatggtaccagattgtagaaggagaccacactttatgggagggagtctctcgtccatacagggaaacaattcgtgcctttttggtctactttcacagtgagatacttcgacggtcagctgaaatgttttgcttcaccaatggcaggatgggactatcattcgtggccaaaatgaaatatcacatccaagcaatggacgccgagaaattgtcaacaagcacacttccttcaaggatcaagcgtgtgttttacatgtcaagtgaaggcagcaacctattgcatgaggttttccctgaagttaaccatacagttttggagcagctaagtaaggtggactgcattgtctatgctatgggatcactctttacatcagtctgtccatcactggtattacgtggcattggtgagactatagcatcaagatccatccccaagatacttcttctgaatgggtcacatgacagagagactgctgggctgtctgcctctggttttgtcactgcaattaccgattctctaaatcggacttatggcgaccctcacaaaagcttaaagaatcataccaatgactatgtaaatgctatattggttccagaaggaggccaagttcctttagatattgaaaatttggcagctcagggaatttttcatgtggtaaccgtgaagtctattcatgaccctaaagttggcgtcatatttgatgcacggtcattgatccaagccctaaccattctcatatctgaacatatggatatgtgtgtatcaaaagttcagaacgtggtcatgtaa

SEQ ID NO: 16936 - DNA, 1662 bp, Zea mays
  Peptide Sequence Number=SeqID_58715
atggcggattggcaagaccaagccaagcccatgatgcaaaccaagttctctagctgtcgtggcgtctccttcgaactcaatgcgtctccgggcagcccgttcgccctccaagccgtcgattattatccgacccagccgccgccggacgccccgaccccgacgatcgccggccggtgggtctggctgccgcagacgtttagccgtgcctcctccaggatctttccttccacttttgacaggaccctgagccgcgcgagcagccacttctgcgacctcgatgaagaggacgcggacgatgaacccgtcgtcaacggtgccgacgtggagatggctatcgccacgtcagctgtggctgtcggcgatgacgtgccgggaaagaaggcgaacgctccagcgccggcgaagccgccggcatcgtccgcgcgctcgaggctcggtgtcatactgctggaccagggcctgttcaccgtctacaagcgcctcttcgtcctgtgcgtcgcgctgaacgcggtgggcctcgtgctcgccgcgacggggcactttccttacgccagggcgcatgcagccgtcttcgccatgtacaacatactggcgctcacggtgtgccgctccgaggcggtgctccgggtcgtgttctggctcgccgtcgcgctcttcggccggccgtgggtgccagtcgtagtgaagaccggagtgaccgcgatcctgcagtcgctaggcgctccagcaccgggacgtgacgccacgagaggtcgtcggcgtgggcgtcggccatactcggcctgctcgcgctctcgtgcatggccgcgttccccgctggtgcgccacctgcaccacaacgtgttcgagcgcacgcaccggttcgccggctggacggcgctcgcgctgctgtgggccttcgtcgtgctctctgccggctatgacccagcgaccgcctcctacgaccggctcaccggttccgtcctcgtgaagcggcaggagctctggctcactgccgccatcactttcttcaccttcctgccatggctcaccgtgcggcgcgtgccggtcacggtcgccgcgcggtctaaccacgcttccgtcataaacttccagggcggcgtcaaaggtgggctgctcggccgcatcagccgctccccgctctccgagtggcacgccttcggcatcatctccgacaatgggcacacgcacgccatgctcgccggggcggtgggcgacttcacccgggctctcatatcggaccctccaacgcgcctctgggtgcgcggcgtccacttcgccggcctgccctacctcctcaacatgtaccggcgagcgaccatggtcgcgacaggctccgggatatgcgtgttcatgtccttcctgatgcagcctggcccggccgagctatcgttggtgtgggtcgccaagggcatcgacgcgaactatggcgaggagatgaagtcggcggcgtacagcagtgagaggctccgcgggcgggtgatcgtgcacgacacggcgttgttggggcggcccaacgtggcggcgctagccgtggacgcggcgcggcgttggggctcggaggtggtggtagtgaccagcaacccggaagggagcagggacgtcgtcgcggggtgtaacaaggccggcatcccggcattcgggcctatctgggattcttga

SEQ ID NO: 16937 - DNA, 429 bp, Zea mays
  Peptide Sequence Number=SeqID_58716
atggtggtggacggagggcctgacatatccgacactattcccaaagttagggggcttccagctgagacccttgtggaccggtacgtgacagtgggtgcctactgcctgctgcgctcttgcaccatcgagcccgagtgcatcattggccagcactctatcctcatggaaggttcgctggttgagaccaactcaatcctggaggctggctctgtattgcccccaggaaggcgaattccgactggtgaactctgggctggaagcccggctaggtttgttcggaagctgaccaacgaggagatcatggacattccaaagcttgcaactgccatcaacgatctgatgcaaagccatttctcggagttcctgccttactctaacgcttatttggaggtagagaagttgaagaagtcgttctcgatccccctgtaa

SEQ ID NO: 16938 - DNA, 186 bp, Zea mays
  Peptide Sequence Number=SeqID_58717
atggaaattatcctgggtggagtagcttctatcagcgatgagatctcttggttcaagaatgaaggtgaaaaatctgcgataatttacagaattgcacatatcgagtactacaaggctagaagcacaccatcaaatgtttctaaggattacacctgccttggaactacagtaggaagcatatcatga

SEQ ID NO: 16939 - DNA, 1272 bp, Zea mays
  Peptide Sequence Number=SeqID_58718
atgaagacgctgtgccccaagcccggaaagggcggcaagatccacccttcgcccgccgaggaccccaccgcggcggcattccgcctcctcccggccgccatcctcgtcctcgtcgccgggctgtgccccgaggaccagcgggtgctggcccacctcgtcacgcgctcgttcctgctgggctgggacaccatcacggcgccgccgccggagcaggcgcgcgggggcccgcgtcgcaggcgcggccacccgcccaccgtcgggtgcctgtgcttccagtgctacggcagcttctggtcgcggtgggactgctccccgcagcacgaccgcatacacgccgtcctcgacgccttcgaggagcacctcaacgccgccgaccgccgacgcgggggcagccccgagtcccaggagcccccatccgaggtggcgcatgaaccctcggcgccgctcctcccttcctgcccttgtaccccgccaccaccggcccccgcggcgtgcctctccgagaacaaggagaatgtcccggaagagactggcgcggaggccaaagcggagcaatgcggcggcgaggtggcggcggaggccgatgaagagaggaagcgcgggtgggcggacgtgatgggcgggggaaatgcggcgggggagtcaagccgcgcgacgcaactgctagcataccagagcctcggggtgttgtacggcggggagggcggcaccttcgcgctctactccctcatctgccgccacgtccgcgccggcctcctgcccggcggcggcaccagagatgagctcatggaggaagagaagaccaccgggcgtcatggtgagcgacccgtgtccagggacagggcggtgctggagaagtacagagtgatgcagcggctgttgctgctgttcacactgctcgggacatgcatggtcatcggggacgacctgctcacccgacagtctcaggttggaccccttgccacagtcttggatttggatggttggtctcaatccgcttcccccgtcgctcacgaccgagtcgcatgcccgcatccgcccgcttctcccccaccccaatcaacatgcgccatccccggatcccgccgccgcacaagccgcctcgaccccgacaccggcccgtgcgcgccatccctgctgactacatcgaggggcacgcaactgcacttcaagccgccgcacaagccgccgcaaaagacgcctccaactgccaatgtgcatgccgcgctcgcccaacaacccacccttgtgctaccggacgccccgcattaa

SEQ ID NO: 16940 - DNA, 309 bp, Zea mays
  Peptide Sequence Number=SeqID_58719
atgtccattggagatgtgtgtccaaaagaacccaaagagtcttcacaagcgcaagatcaaccgtcatcttccatacaagcatctccacgagctcaagatgaggaaatggctcaagaggaagaggatgaagatcaagacgatgagccacctcaagaggaggacattgatcaaggggagatgaagatgatcatgaaaaggaagatgaacaagaagttcaagatcaaatacaaccgcactcaagagtccaccaagcaattcaatgagatcatcccgtcaactccattcttggtgacatccacaagggggtaa

SEQ ID NO: 16941 - DNA, 948 bp, Zea mays
  Peptide Sequence Number=SeqID_58720
aagacgctcttttcttacggcggcgccaaagtggtgttcgaccagatgggagcgatgtgcgtcggctattcgcccctttctggtgcggtcagtgagatgaggaaagctacgcatgattttagtggagcaaacaagattggcgagggcggtttcggctccgttttcagggggaagcttaaagatggaacgatcgtcgcggtgaaagtcctttctgctaattcaaggcagggttcgggccggagcaacattcggttcaactggagagcccgtgtcaagattgctgtaggcgttgctcgtgggcttgcttatcttcacgatggaattcggccccctataattcatcgagatataaaggcgagcaacattctccttgacaaggacctcaccccaaagatctctgatttcgggctggcaaggctcctccccccaaacgcaactcatgtgagcactagggttgcaggaacaataggatacctggctcctgaatacgctgtgagggggcaagtgacgaagaaatcggatatctatagtttcggcgttttgctactggaaattgttgctggtagatgtaactacaacagtagattgcctcagggagaccagtttctgcttgagaagacatgggcatactacgtgcagggaaagctagagaaggtcatagacgccgaagcaggggaggacctgaacgtcgaggaggcatgccgtttcttgaaggttggcctactatgcgcccaagacgcgatgaagctgcgtccgaacatggccagcgtcgtcctgatgctgataggagagaagggaatctccgtggacaggatcaccaagccagccgtgatcggtgacccgtacctcgaccggaggccaagcaacgcagactctaccacgatgaagtccttcgccacgaccgaagctttaacgtcatcagaggcaaacacggagtggtctctgtga

SEQ ID NO: 16942 - DNA, 321 bp, Zea mays
  Peptide Sequence Number=SeqID_58721
atggcagagagggtgcaggccgataagggcggcacaacagagagggccgagaatggcacaaacgaggctgttgcaaacccaaatgtcaaggctgctagagtaaccccactgcatattgctgcagatagtggaaacgcgattcagctacaaggcggctccagagctgctaggctaggcaaacagctagcctgtatctgtatggcttcctccacatctccggtggttggaatgccagcactatcccctactatgaaaatgataaagccactctggagtttgaaagccttgaataggggtaatgccattgacgaagtttactaa

SEQ ID NO: 16943 - DNA, 378 bp, Zea mays
  Peptide Sequence Number=SeqID_58722
atggggagctcgtatataatcggcgcggatgctcgtgtgcccaatcccgtccctaaaaacctagtgccgccacaggtcgagagagagaagtggggggaagaagtgtgcactacggccggcgcagtgccgggtgatctccggtggtttgtcgcggcgccacgaagcgggtcaagccgggtcggcatcaacctcggtggcggacaacccgtctcggcgttggtctctagtgagccctactttctcctccatggtattctagtcactgacgggacgttgtgggcaatccatggaggcaaggttgggcgcggactcgggacctgggtgcaaccagttagtttcgtagggagcagtggcacggcatggcgtgtccgccgctag

SEQ ID NO: 16944 - DNA, 321 bp, Zea mays
  Peptide Sequence Number=SeqID_58723
atgtgcgtcggtggtgcactggtgctggccgctggcgtgccgacgtgccgtctgtcacagggagaaccggagaagccgagcaacggagcagggccgaatgggcgaagggagaagccgcgctgccacgctgggcgcctgggccgtgatgccgccgccgcaactttgacctggagactggagcaggagtcccaccgccgcatgcctacagtagtggcaaagatgccacagtcgttcctcatgctgctcgttactctcgtatccgcagctaccacacttccacccgaggcgctcaacatgcgaggccaactgctcaagttctag

SEQ ID NO: 16945 - DNA, 1032 bp, Zea mays
  Peptide Sequence Number=SeqID_58724
atggccctggtaatcccgactgctgctgaggagaatggcagtcttagtgctccgttaggtggggagaacatcgtcgcgataagaccaccacgcatccaatccatccctgtcttctcttcccacttcccagtccccaatcgcgttctcttccttggcgacatggcggccgccaccggctacagcgacgccccaaccgacgagcaactgctggcgtacgctgagctgcccaaacatggccgcgacatggcggaggtgttcgccgtgcgcatccccgccaccgtcggaggaaacctgccgccccgtggcagcatcgttttctacggcggccactgctgcagcgatttcatttacagctggagtccactggaagaggaagaagacacctcgaagcaaatctgcgacagccagggtaacctcgtgctaactgggccatcattggccacctcggcatacagtccaattgctttcttcctctacctccatgatggcagcccgcaagccggagaagccaccgaggacgacgaggacatcgggaggatactctgcgactgcatcggcgacgacttctccaactacaacagggccatagtcgagactgtccaaacgggctatggccccgctgaagtgatctatgccgtcctgagcaacggcgtccaaggccgggtcgccgtcaaacttgctcgcccgccggtgtccaaagctggagaagaagacgccaccaccattcttgggaggatcgttgctcgcagcaagctgttcgacgtcggctgcgtgctcttctacaaagagggtgacaatggagtgaacgtgcgaccgggggggctgattcagttggcgagggaagcgctcgccgtgccgctgcacatgccgctgacgattgagcttgacctgcatcgctgttccggcgatgaaattgttggaggggtccttgagttcaatcctgcgaccaacggccagcacacggaacgacttgttggagaaaatggcgctgaattggaagtggcaatttcatggtcgcagtacccttggtaa

SEQ ID NO: 16946 - DNA, 297 bp, Zea mays
  Peptide Sequence Number=SeqID_58725
atggactccaagcgccggctgcaggggcccttctcgctgcgcatcactaacgagtccggcgagacactggtggcttaccaggtcatcccggcaaactgggcgcccaacagctactaccgctccaacatccagtacgaggcttttggctctgctgctggacaggctactggctctgctgttggactggtagttgatgtagctctgtgggaaatgtacacttgtatttggtgctggatagctgggctgtcctgtcttgttctggctgttgtaggggctcacaactttcaactgttctag

SEQ ID NO: 16947 - DNA, 423 bp, Zea mays
  Peptide Sequence Number=SeqID_58726
atgagagagggagaaagggcagagctccggccaaggagaaacagggggtgcgcggccattgaagctccaaggccgagcgaggagcgcggctgggggaagaagatccacggcttggagatgcaggggacgcgactgcacgcgcaggggctccacggcgagcttgagggagatgagcgcactagaaaccggcagagcgcggacgacgagcaaggagcagggaggaaggagtcgagcaggaagccgacgcgccataggagagctcggccggcagggaaccggagggggaaaatccgggcgctcaccagagggccgctcggcagggcgctggggagcagagccgagggagagagagcgagttgcagggaggagcagagcgccggcgagcatgagcaggagagaggaaggcctggcgcgcgtagataa

SEQ ID NO: 16948 - DNA, 408 bp, Zea mays
  Peptide Sequence Number=SeqID_58727
atggactccaagcgccggctgcaggggcccttctcgctgcgcatcactaacgagtccggcgagacactagtggcttaccaggtcatccccgcaaactgggcgcccaacagctactaccgctccaacatccagtacgaggcttttggctctgctactggacaggctactggctctgctgttggactactcattagctctgctactcgactgcacacgctcaagcaatacaatacactcacagtggacgtagggtcttacgctccggcggtccggaccactctaagcctcgatgttcttgtgctcttgccaactgctggattagaagagcactttaatgtaccagtaaacaactacgatctatggatcaacttcctgcagacactagtttctggtagaattgatttgtag

SEQ ID NO: 16949 - DNA, 252 bp, Zea mays
  Peptide Sequence Number=SeqID_58728
atgagtatcaagctcaagaagatgaagatggagatcaagacgatgagccacctcaagaggaggacaataatcaagggggagatgaatatgatcaagataaaggatgcattaagagatctagattgggtggtggcagtgcaagaggagctcaacaatttcacgaggaatgagatgcatatttcttattcttcttgtgccaaggctaagaataatgtgctttcaagagtatctcttgtattagtcttagattga

SEQ ID NO: 16950 - DNA, 291 bp, Zea mays
  Peptide Sequence Number=SeqID_58729
atgttcatgacttcatatggtgagattggtggctgggagcatgggaatttctcgccggggatgtgggatgccatggatccgatttgcgtcgtggacgggagtgcctgctacgtcatcgatggtcatcgggggactgggtcccctggcgccggcgggtgcgccgccaggagggtcgcgtgggccactgcgacgggagctaaggtggaagatgagggggcgttgatctggcaatggatggtggcgattagatgctcgtaccccttcggcccgattaagccagtgtcgtcgtga

SEQ ID NO: 16951 - DNA, 306 bp, Zea mays
  Peptide Sequence Number=SeqID_58730
atggtccgccacgtgtgcatcctgctgggtgcaccgctcggggcttggcagacaatcgaggaaagcctccagagtccatcgaacacgtcggtgacctcatatggtgagattggtggctgggagcacgggaatttctcgccggggacgtgggatgccgtggatccgatttgcgtcatggatgggagtgcctgctacatcatcgacgctcgggtaagcgtagaatcggggtcatcgggggactgggtcccctggcgccagagggtgcgccgccaagaggattgcgcgggccactgcgacgggagctaa

SEQ ID NO: 16952 - DNA, 348 bp, Zea mays
  Peptide Sequence Number=SeqID_58731
atggcgtccgggggcggggccctacaacatgggccgaattgtacatgggccctcctagtgctgagggagacatggcctcatggtcttcgcgggaacggaaacagcagaactctgccgtttcatcacctacaacaacatggattcgaaaaccttaagtacggagtgtactttcgcaagtcttacccgtataaggaaaaagactctcaaggatatgctggcttttgggaatcaaggaggtttcgggtctactccacaaatgttgatgtagaagttattctcagctggaggattctcagatggagtgacaacttcttcaactacaatctcttcctcgttttctatacatga

SEQ ID NO: 16953 - DNA, 423 bp, Zea mays
  Peptide Sequence Number=SeqID_58732
atggcccccaagagagcaacctcgaaggctggcgtttccatcgacgacacggcgaaggcggcgctcctggcggagaagaaaggcaaagccctcggggacagcactcttcaggaggccttcgaagatgatgccgtcaacagcaagagacaacgccacgacaaccccaccctagacggcactatgcacacttccagttccgagggcgcacgaagggcaccaccaccaggcttcgctcccctagaaggcgaagacaccatagaggatggagaggtcattggcatctcagccaaagaccagctagagctgcgagccttgcgcatcaagaacaaccacctacaaaagcaaaaggagatacttgaacccaagcatcaacgagtcaccatgcaagccaaagtgcaacagatgataatagatgaagagtag

SEQ ID NO: 16954 - DNA, 192 bp, Zea mays
  Peptide Sequence Number=SeqID_58733
atggcgtggaagtggttccaccatgtccttgcaggtccacgaagcgagtctttgcggcatcagggcaagctcccggctggcgttgcaccagctgtcgcaggatctcattttgttgagccattagcttctgcattgttagagctatgggaggtggtgggggaacctgctcgttttgtccacgacaaggtctag

SEQ ID NO: 16955 - DNA, 375 bp, Zea mays
  Peptide Sequence Number=SeqID_58734
atgtgccaatgtgcgggttatcatgcagactctgatgagaagaagacagactacttccgaagagggctcaacaccaagctccatgagcgcctcaaaacggaggactgcatcttagcccatcgggcagagaagaagaggaaggcaccaatgacagggtcctcagctccacctcaaaggttccggattgtctcaaataatcaaagcagggatcccaacagcaagcagggagatgggtcatcaggccgccttagcagcagcaagcacccaaccgtttccccgctcccgctccaaggaataatcagcctcagcgacagcaacaacagcaacagtctcaaaaaggaaatgggaacaaatgtttcacatgtggaaacatag

SEQ ID NO: 16956 - DNA, 171 bp, Zea mays
  Peptide Sequence Number=SeqID_58735
atggcgggcggaggaactctcgccggagctaaggaggggcgtctagccagcgaggccgatccggccatgaaggcaacattagaaacaataaggattgctgaagaagcggttgatgaagcagtcaacaaacttctgaatgaagctgcaaagaaaatgttaaaagaagattga

SEQ ID NO: 16957 - DNA, 3564 bp, Zea mays
  Peptide Sequence Number=SeqID_58736
atgggtgggcaagatgccaatgtggtcactgactatattctgaagatattaggactagagatatgtgcagacacaatggtaggggatgagatgctcaggggcatatctggtggacaacggaagcgcgttacaactggtgagatgctggttgggccagccagggcgcttttcatggacgagatctcaactgggcttgatagctccactacattccaaattgtgaactcgctgaggcagtccattcacatcctcggtggcacagctgttatctccctactgcagccagcacctgagacatataacttgtttgatgatatcatactcctctcagatggtcaggttgtgtaccagggtcccagagaagaagtgcttgagttttttgagtctgtaggtttcagatgccctgagaggaagggcgttgctgacttcctgcaagaagtgacctcgaaaaaagatcagaaacagtactgggcgcgacctaatgagccctacaggtttgtggctgtgaaggaatttgcgactgcattcaagtcatcccacacagggagatctataacaaatgagcttgctgttccgttcgacaagagcaaaagccacccagccgcactaaccaccacaaggtatggtgtgagtggcaaggagctgctcaaagcaaacatagaccgggagatccttctcatgaagaggaactcttttgtctacatgttcagaaccttccagctgatgctcatgtcaatcattgcaatgactctcttcttccgtaccaagatgaagcatggcacggtgaatgacgggggtctctacatgggcgcactcttctttggtgtgcttatgatcatgttcaatggcttctctgagctggcactaactgtcttcaagctgcctgtattcttcaagcagagggatctccttttctttccagcatggtcctatactataccctcatggatcctcaaggtacccatcacatttatcgaggttggtggttatgtattcttgacatactatgtcattgggttcgacccaaatgtcggcaggttcttcaagcagtatctgcttctgttagtagtcaatcagatggcagcatcactcttccggtttattggtggggtatcgaggaacatgattgttgctaatgtcttcgcatcgttcatgttgctagttgtcatggtgttgggaggatttattctagtaagagataaagtgaagaaatggtggatctggggctactggatctccccaatgatgtatgcacaaaatgccatttcagtgaatgagatgttgggccacagctgggacaaaatattgaatagcactgcatccaacgagaccctaggtgtgcaagtccttaagtcgcgtggagtattcaccgaagcaaagtggtactggattggctttggtgctatggttggtttcaccatactcttcaacgctctcttcactgttgcccttacatatcttaagccatatggcaactcccggccatctgtatccgaagaggagctgaaggagaagcatgcaaacatcaaaggggaggttctggatggcaatcacttggtatcagcaagcagtcatcgatcaacaggagttaaccctgaaactgattcagcaatcatggaagatgattctgccttgactaaaaggggaatgatcctcccatttgtcccgctctcgctcacctttgacaacatcaaatactctgttgacatgccacaggaaatgaaagctcaaggtgtacaagaagatcgtttggagctcctcaaaggtgtcagtggatcttttaggccgggtgtgttgaccgcactgatgggcgttagcggtgcaggaaaaactactttgatggatgtgttggctgggagaaagacaggtggatacattgaaggagacatccgtatttcaggatacccaaagaaacaagacacctttgcacgtgtatcaggatactgtgaacaaaatgatatccactcgccacaggtgacagtctatgagtccctgcttttctcagcatggctccggcttcccaaggacgtcgattcaaacaaaagaaagatcttcattgaggaggtgatggagcttgtggagctgaaaccactgagaaatgctttggttggacttcctggagtgaatggtctgtcaactgagcagaggaaaaggcttaccattgctgtggaacttgttgcaaatccatctatcatctttatggatgagccaacctcagggcttgatgcccgagcagctgcaattgtgatgcggacggtgaggaacactgtcgatactggtagaactgtggtctgcacgatacatcagcctagcattgacatatttgaagcatttgatgagcttttcctcatgaagcgtggtggagaagagatctatgctggtccacttggacatcattcttcagatctaatcaagtattttgagtcacttcatggggtcagcaaaattaaagatggctacaatccagcaacatggatgctggaagtgaccacaacttctcaggaacagattctaggtgttgatttcagtgacatatacaagaaatctgaactctaccagaggaacaaggccttgataaaggaattgagccaaccagcaccaggttcaactgacctgcatttccctagcaagtatgcgcagtcttccattacacaatgcgtggcttgcctatggaagcagaacctgtcatactggaggaaccctccttacaataccgttaggttctttttcactaccatcattgctctcctccttggcaccatcttttgggacctcggcggcaaaacgtatacatcacaagacttgatgaatgccatgggatcaatgtactctgcggtgctgttcattggagtcatgaattgtacctcagttcagccagtggtggccgtggagcgaacagtcttttaccgtgaaagagctgctggcatgtactcagctttcccatacgcgtttggccaggttgtcattgagcttccatacgcactggctcaggatatcctttacggtgtcatagtgtactctatgatagggttcgagtggacggctgctaagttcttctggtacctcttctttgggtacttcacgctgctctacttcacattctacggcatgatggccgtggggctgacacctaactaccacatcgccgcgatcgtctcctcggcattctacgccatctggaacctcttctccgggttcatcatcccccgaccggtaagacctccgatcctcatgcccctctgcaacttttctgtacggtttccaaaagctcattcccgttcttgcctgccgctccgctaccttcagaaagtgccgatctggtggaggtggtactgctggatatgccccgtggcgtggacgctgtacgggctggttgtgtcacagttcggtgacgtcatgactccgatggacgacggaagggccgtgaaggtgttcgtcgaggactacttcgacttcaagcacagctggcttgggtgggtggccgccgtggtggtggcgttcgccgtgctctttgcgaccctgtttggctttgccatcatgaagcttaacttccagaagagataa

SEQ ID NO: 16958 - DNA, 387 bp, Zea mays
  Peptide Sequence Number=SeqID_58737
atgtctgcgaccacggcggcggtgcccttctggcgggcggccgggatgacctacatcggctactccaacatctgcgctgcgctggtacggaactgcctcaaggagcccttcaagtccgaggccgcgtcccgcgagaaggtccatttctccatctccaagtggacggatggcaaacaggagaagcccaaatactctgtttacagagtggagtttgtaatgggagataggatgggtaaggctgctagagataaccttaagaatcacattttcaggatttgtgcaagtgagtatgaacctgaattgtgttcagtttgcatagcttttagatatttcttcaacgctaacttggttctctctgcagctgtccgcacagaatccgatgaataa

SEQ ID NO: 16959 - DNA, 3798 bp, Zea mays
  Peptide Sequence Number=SeqID_58738
atgactctgctgctcggacctcccggctcggggaagaccaccttgctcctggcgctggcggggaagctcgacaaggacctcagggtctcggggaaggttacctacaacgggcacgggatgaacgagttcgtcccggagaggacagcggcctacatcagccagcacgacctccacatcggggagatgactgtgagggagaccttggccttctcggcgcggtgccaaggtgttggcaccagatacgaaatgctcactgagttggcgagaagggagaaggcagccaacatcaagccagatcatgacattgatgtctatatgaaggcctcagctatgggtgggcaagaatccagtattgttacggactacacactgaagatattaggcttggaggtctgtgctgatacgctggtaggaaatgagatgatgaggggtatttctggtggtcaacgaaagcgtgtcacaacaggtgaaatgcttgttggtccggcaagagctctgttcatggatgagatatccactggactggacagctcaaccacataccagattgtgaattcccttaggcagactatccacatccttggtggaactgcagtcatttccttgctccagccagcgcctgaaacatacaacttgttcgatgacattatactcctatctgatgggcatgttgtataccagggcccccgtgaacatgtgctcgagttctttgagttcatgggcttcagatgccctgccagaaagggtgttgctgacttcttgcaggaagtgacatcaaggaaagaccaggggcagtattggtatcggcaggacaggccataccgctttgtgcctgtgaagaaatttgcagatgcattcagtatattccacgtgggccggtccacacaaaatgaactttcagagccatttgataggacccggagccaccctgctgccctagcaacttcaaagttcggtgccagcaggatggagttgctcaaagccactattgatagggagcttctactcatgaagaggaacgcatttatgtacattttcaaagctgttaaccttactgttatgtcgtttatcgtgatgaccacatttttccgtaccaatatgaaacgagacgcatcttatggaaacatctacatgggggcactcttctttgctctcgacacaatcatgttcaatggttttgctgagcttgccatgactgtcatgaagctgccggttttcttcaagcagagggatcttttcttcttccctgcatgggcctacaccataccttcatggattgttcagatccctatcacatttttggaagtcggggtttatgttttcaccacatactatgtcattggatttgatcccaatgtgttcaggttcttgaagcaatatctgctgctccttgcactcaatcagatgtcatctgcccttttccgcttcattgctggaattggaagagacatggttgtgtctcatacctttggccccttagcactgttggcttttcaagcactgggtggctttatacttgcaagacctgatgtgaagaaatggtggatttggggttactggatctctcctctatcgtatgcacagaatgccatttcaacaaatgaatttttggggcacagttggagcaaaattcaaaatggaacaaccgtgggaattggggttcttcaaagtcgtggtgtctttactgaagctaagtggtattggattgggctcggtgtcttggttggatatgctctcctcttcaacctgctctacactgtagctcttgcagttttgagtccattcactgattcccacggatcaatgtctgaagaggaattgaaagaaaagcatgccaatttaactggtgaagtcatagaggtccgcaaggaaaagacatctaggaggcaggaattggagctgtcccacagtgttggccaaaactctgtgcatagcagtgaggattctagtcagaacaggaagggaatggcactcccatttccaccactatcacttacttttaacgacataagatactcggtggacatgccagaggcgatgaaagcgcaaggagtgacagaagatcgtttgcttcttttgaagggcgttagtggttcttttaggccaggagttctaactgcattgatgggtgttagtggtgctggaaagaccacccttatggatgtcttagctggcagaaaaactgggggatatatcgagggagatattaccatctcaggatatccaaagaagcaagagacgtttgcacgcatatcaggatactgtgagcaaaatgatattcattctccacatgtaacagtgtatgagtcactcctattttctgcatggctacgccttccttcaggcatcaacttagaaacaagaaagatgttcattgaggaggtcatggatcttgtagagctcacatcactgaggggtgcacttgttgggcttcctggagtgagtggcctgtcaactgagcaacgcaagaggctaactattgctgttgagcttgttgccaatccttcgatcattttcatggatgagcctacctccggtcttgatgctcgtgcagctgcaattgtgatgaggactgttaggaacactgtcaatactggaaggactgttgtttgcaccattcaccagccaagcattgacatatttgaagcatttgatgagcttttcttaatgaagagaggtggagaagagatatatgttggtccagtgggccagaattcatcaaaattgattgagtactttgagggaattgaaggtattagccagataaaggatgggtataacccagccacgtggatgttggaagtgagctctagttctcaggaagagatccttggggttgatttcagtgaaatctacaggcaatcagaattataccaaaggaacaaggcactcatagaggagctgagcaccccacctcctggctctagtgacctcaatttccctacacagtactccagatcgttctttactcagtgcctagcctgcttctggaagcagaaaaagtcgtattggaggaacccaacctacacagcagtgaggctactgttcactgtagtcattgcgctcatgtttgggaccatgttctgggaccttggacgaaaaactaataaacagcaggatctgttcaatgccatgggatcaatgtatgccgcagttgtatacatcggaatgcagaactctggctctgttcaaccagtggtggtggtggagcgaacagtcttctaccgagaacgagcagcgggcatgtattcagctttcccgtatgcatttggacaggtcgcaattgaaattccttatatctttgtacagactttgctatatggagtgctagtctattcaatgattgggtttgagtggactgttgccaagttcctctggtacctgttcttcatgtacttcacactgctttacttcacgttctacggaatgatggcggttggcttgactcccaacgaaaccatagccgtcattacctcatcggcgttctacaacgtgtggaacctcttctcaggatatctgatcccccgacctaaactgcctgtctggtggaggtggtacagctggatctgcccagtcgcatggacactctacggattggttgcctcccagttcggcgacatcgcgcatccgctggaggactcaccgacaggccagacggtggcgcagttcatcacggattacttcggcttccatcacgacttcctgtgggttgtcgcaggggtgcacgtcgggctgaccgtgctcttcgcgttcctgttcagttttgccatcatgaagttcaacttccagaatagatga

SEQ ID NO: 16960 - DNA, 231 bp, Zea mays
  Peptide Sequence Number=SeqID_58739
atgtgcacatcgacgggtttaccaccgatttgcgtaggtggttgttgttgtccaaggagcttctgtgctaaaatgccttcaaagcagggcgtagagaaagacgaaggtgtcaacttcgtcatgacaacaaggaaacgaagacagaggatcaacaaagccaagagaaggtgtccatataattccatggccgaatcactaaatatagaggacaatattaccctcacattgtaa

SEQ ID NO: 16961 - DNA, 210 bp, Zea mays
  Peptide Sequence Number=SeqID_58740
atgcacatcaccgccaaagacaacccgaaagatgtggagtttgatgattggttctcgagtcatgaagataaacccatggaagactctaagcttgaggacccaaacatgtttgactgggtggttcaagtgcgagaggatgaacaactagaatatttcaagctcggggattatcttatcatgtctacgcacaagaatggtaggcatgaataa

SEQ ID NO: 16962 - DNA, 276 bp, Zea mays
  Peptide Sequence Number=SeqID_58741
atgcgtagtgagatcctaagatatgatagcaatgggaagagagtaggggtggattttgaaggaacaaaagacgccagcaaggaaccactggtgacaagctacaacagaaaattcatgggaacagtagactacatatgggcctcggagggtctgcatactgttaaagtcttggacacatttcccatagagattttgaaaaaaacaactgggttcccgaccaagaaatggggaagcgatcacattgcccttgcctgtgaattggcttttacaaaatga

SEQ ID NO: 16963 - DNA, 366 bp, Zea mays
  Peptide Sequence Number=SeqID_58742
atgtccaaaccatcccaacaggtgttcctgcgcagttacatcaaaaggtggcacaatgtgaagaccgacatctccattatgccagaggaaacagccatctacgttttaaaagtcctcagggattgggagctacctcagaagcttgttcataaggctctaaccactctagcctctctatttcaggtcacatataaatacgctatgagtaaggaggttcttcagcatatgtcctcatcccgaaaagacaagaaaaagaaggaacagaaggtcgggccagagaaagccatgaaccaaaagcgcaagacagatcgccatttcaccgcaacagtggaatgggagctccgcgatgaccccaaatgcaattag

SEQ ID NO: 16964 - DNA, 690 bp, Zea mays
  Peptide Sequence Number=SeqID_58743
atggcccccctgtgtcgtggtcggtccgagccctgggcaaggcgaaggctcctccgaggtcgaggtcgagtccgggccccgggtcgggtgaggcggagaccatcgtctgaggccaagacggagtccgagctctggggtcgggcgaggcggaccgaggccgagtccgagccctggggtcgggcgaggcggagcttcctatggcgcccgaagccggacttggctgctgtcagcctcactctgtcgagtggcacagcagtcggagcgacgcaggcggcgctgtcttcttgtcaggccggtcagtggagcggcgaagccacccttgcattaaatgctcctgcgatacggtcggtcggcgtggcgatctggccaaggttgcttctcggcgaagactgggcctcgggcgagccgaaggacgcggtggtggagggcgtggccccaacggaggcggagatcgcggcgaacgcgagggctaaggaggacacggtggtggagggcgtggccccaacggaggcggagatcgcggcgaacgcgagggctaaggaggtggtgatgctgattcatctgcccgccgtggcgtcgcaggacgcggtggtggaggtcgtggccccaacggaggcggagatcgcggcgaacgcgagggctaaggaggtggcgatgctgattcatcggcccgccggcagtgcttcgtga

SEQ ID NO: 16965 - DNA, 258 bp, Zea mays
  Peptide Sequence Number=SeqID_58744
atgtcgggagatcacgccaagaaggagatggtgatcgacgggaacaagcccacaagccccgccaaggctacaagccacgggaaggctccatcaagggagtccggcaacaaaaagaaggaaggatccccctcgcgcattaggatgcacaaggatggcgaaatgaagaagaaaatgaagaaagtggtctactacgagaccgactctttgtcgccatctacctcgggatccgacgccgcgtccatcacttctaagcgctaa

SEQ ID NO: 16966 - DNA, 690 bp, Zea mays
  Peptide Sequence Number=SeqID_58745
atgtctctactttcaaagttgcgcttgatcaccgtggatgttactggtacactgattgcttacaaaggacaccttggggattactactgtatggcagcaaagtctgctgggatgccatgtcctgactataaccgcatgcatgagggcttcaagcttgcatacactgagatggcaagacagtacccttgctttggatttgcagctaagatgccgaacatcgaatggtggaggacatgtgttaagaattcattcgttaaggctggctatgattatgatgaagagacatttgagaaagtcttcaggcgcatttattctgcatttggctcctctgcgccatactcggcgtttcctgattcgcagcccttcctaaggtgggcacgcgaaaagggactcactgttggcatcgtcagcaatgcaaaataccgctacaaagatgtaatcctgccagctttaggattgaatcaggtgacagcatgcggaaggactacaccccaggctaggagcatcgggatgcatgcgctgctcctggaccggttcaagactgccgacgctgagagctggaggcagtcaggcgccacggtgctcccggaccttgtcgccactcaagagtggctcaccaaggatcagaatgacgaacaggaggaaacagtggcagcacgagtgctgaagagaatgtccgaaaagctatag

SEQ ID NO: 16967 - DNA, 645 bp, Zea mays
  Peptide Sequence Number=SeqID_58746
atgccttccactccaatgccccagtcatcagcattcgccgaagtcatcgatcgccaggcgacatccgtcatcgatctgctcgaggatgactcaagccacggtttggccggggccaactccaacgccaaagagacatcgaaaagggcctgctttgtggcaacgccccaccaaacgacaacggtggaggggacaaggagccccccaatcaataagaagagtaccaacgccaagcacgcatcatggcttgtgaggcctccctcgatcagtagcaggaggagcgcgacaccctcatgcaaaagctcgaccacgtctacggcgatgttgagcgaaagcctgtaccagaacctccgcaacatcgtggaaagggccacagtgcaacgagccgagatcgatcggcacttcaccctcggcattgagagctacaacctacaaacgaccttgtcttggagcaggggggcacaacctgccccgtccacgaggacacgtgtccccatgaaggatcacatcagggacatccacgacgcatactcgacaacaggtgtcgggagcaggaggaagttgaggaaccacgcgagaggaggcgtgccaaaggttcacaacaaaccaataaaaagaccaaagatgggttcaaataaagagagctaa

SEQ ID NO: 16968 - DNA, 1302 bp, Zea mays
  Peptide Sequence Number=SeqID_58747
atgatgcaccagcaccaccctcaccaccttccgcgcttccactcgccgttgtcctcctcatctgaggcggtggacatggatccccgcgtgtggggccggctgccgcagccgctggtggatcgcgtgctggcgtgcctaccgacgccgtccttcctccgcctccgggccacctgccgccgcttctgcagcctcatctactcgtcgccgttcctccattcccacctcctcctctccccgcacctccccttcttcgccttcgcggtcccttctgcggggtacctcctcctgctcgaccccaccaggcaggcgccttcctggtcccgcctcccgctgccgctgcccgctcccggcgctggccaagggttctccccggcggccgcgtcggcgggcctgctggcgttcctgtcggacgcgtccggccacaagacgctgctcctcgccaaccccatcacgcgcctcctcgcgccgctgccgctctgccccacagcgcgcctctctcccactgtcggcctcgccgcgggacccacctctttcatcgccgtcattgccggcgatgaccttgtgtcccccttcgcggtcaagaacatctccgcggacacattcgtcgccgatgccgcctccgtcccgccctccggtttctgggccccaagttccatcctgccccgcctctcctccctcgacccccgcgccggcatggctttcgcgtccggaaggttctactgcatgagctcgtcgccgttcgcggtgcttgtgttcgacgtggcggccaacgtctggagcaaggtgcagccgccgatgaggaggttcctgcggtcgccggcgctcgtggagttcggcggcgggagggagcgcgaggcgagggtggcgctggtctccgccgtcgagaagagccgcctcagcgtgccacggagcgtgcgcatgtggacgctgcgcggcggagggcacggagtcgccggcggaagcagcggcagcggggcgtggaccgaagtggcgcggatgccagctgacgtgcacgcgcattttgcggcggccgagggcgggcgcgggttcgagtgcgcagcgcacggcgacttcgtggtgctggcgccacgcgggcccgcgagccccgtgctcgtgttcgactcgcgccgcgacgagtggcgctgggcgccgccgtgcccgtataatccgtacgtcggggggatcgccgcgggaggcccggggttcagggtgttcgcttacgaaccccgcctggctacgccggccatcggtctcctggatgccacggcgccggcggcgtttttgcatgggatgcagggctag

SEQ ID NO: 16969 - DNA, 313 bp, Zea mays
  Peptide Sequence Number=SeqID_58748
ccagaaagaaacaagagaaccggccacacacgggatagattcggcacgagatctcacatttgggcatcctggtgttcctcctggccgcgcccccggcggccgcatccccggatccgccgttgcttgttccaaccgcgtggctgctcatctcgccggccaccacgaacacgccgccccaggagccaagaccacctcacggaagccgccgcagggactggcggcgcggattggtcttcccggccgccgtgagaggacgcttctccccgccagagcagcgccgatgggggaaacgaggagcttctccgcgatctag

SEQ ID NO: 16970 - DNA, 489 bp, Zea mays
  Peptide Sequence Number=SeqID_58749
atggggctcagtgtatgcggctcgctctgccaaggtggtgacgaggatgatggttttggttatgcctatggtaatgcacagtgtgatgatgtccagttatataactgctatgtacgtgaattgctaatcctgatggctcgtcttagacacactacacggaagtcagtcattcctttcttgccttctcgtctcgctgagcgtccgcttcgccatccagtgactggtcagtctagccacttagagaggctgcaccaccgcctgcacgaggagcaggagcgtcgacgacaggagctggagcagcagggctcttctttctcgcttcagcaggagatagagtctgtgaggagctgctcccctgtgcttccgctagaggcgccccctgcaccaccactgagcgccccagccgctggagtagctgctggaggagacccagatgacggaggtggcgatagcagctcgagccatagcactgaccttttagaggagtag

SEQ ID NO: 16971 - DNA, 378 bp, Zea mays
  Peptide Sequence Number=SeqID_58750
atgaccgcacttgaacccaccatagctagcatgggagacccagtctcaggacaaggcatccaccctactcaacttcactcaggtaccaaactttgggttttaaatgataaagatgagaccaggcgggtgacttgcacgggaagagagtctccatctaagtcaattaaggactgtgtcgatgtaggcttgatgattgagaaccttttaatgtcacatgcctcatcatgggtaagctttgcctcaggcagactaataccagaaaggccaacacacaatgggagtggagagatggcgagactagcgtgtaccctccgtggcaagaggctggacggtggtgtatctgagttctcggttggagtgaactcggtctggtcttaa

SEQ ID NO: 16972 - DNA, 447 bp, Zea mays
  Peptide Sequence Number=SeqID_58751
atggtcacacggcggctcccaaaccctaaacagcggtggtgcccctacgcttcagcctcgactcagtattcccccttccccgcttcgacaagtctcgtcccccgcccccttattccattacaagcaactccgccggtgccaccgctgctggtgggacaggccgccgccgccgctgctggtgggacctaccgcctcgcgctccgcatccagcgccgcctcatcccgcccaaccaccccaggatacgggacttcgtctacaggtactgccttcgccgagccccgctgtcgtgcgtccgcgctcaggacgccgtcggtcactgccagccaaacaggatcagcgcgagcagccagtgcaggcacatctcctactcctacgccccgttcccgtcggtcactgccaggaggaagggtgtcttccgcgaggacattgcacagctgatggtgtaa

SEQ ID NO: 16973 - DNA, 471 bp, Zea mays
  Peptide Sequence Number=SeqID_58752
atggcgcccagcccggtttccagcgccctcctccaccaccgcgcacctctggccgctccagctcatcgatccgcagtcgtctttgtttctccgtcaaccatcctcttcctccggacaacgcgcttgtcccccgcgcaacgtcgtcttcaacctttggctcttcttcctcaagcgttgttccagcagctcgctcctcggatcctcgttgccggtcttcagtcctcgtcagtcgctgacgtgcagcacgcctcggtctcgtgctcgccgtcgcttgatcgagaaaaaggtcctagaaattggttggagaagaaggttgtagcgcatggctcaccaagtgttcgatcaaagacttcaattaaaggctatcgtcgttcaggcaaatatcaaatcaaattgagatgtggtgagccgattcgctatttttactattggttttatgatcgtgaaataagacgcttcgtatgcgcatga

SEQ ID NO: 16974 - DNA, 351 bp, Zea mays
  Peptide Sequence Number=SeqID_58753
atggtcgacaatgaaggtgaatctcatgctgatggaccaggagtggtgaaggacaagcactgggacttgaccgagggactggagaagccgtggaatctcaatgtcatcacacgccaggacgatgacacgcctcgtaggcagcctttggcccataccccgacgctgtttacaaccactacagtatgggcggcctctccctcggggactcgggtgtacggacaaaccctcggcctcggctctctgcagaaagtcagcaggcatgaatctactgcatggttcgtcatcaccttgcaaggtgtggcactgccgcccacctacgtggcacagtcgcggtctggccccgtcgactag

SEQ ID NO: 16975 - DNA, 204 bp, Zea mays
  Peptide Sequence Number=SeqID_58754
atggccgaagggaacaaaggcaagaaagggcgccgcccagccgatgggaagcgcaagcaccccacaaggcctcccttagaggactttggagactttgagtactcgaaggaagtctccttcaagtatgatcgttcccccgctccgtacaaggaatcaagcagtctcattagctgcgagaagcagacgattcgaatcgggttttaa

SEQ ID NO: 16976 - DNA, 378 bp, Zea mays
  Peptide Sequence Number=SeqID_58755
atgggagatggtggtcggtaccggcgtttagaaccagcaactggtggagctcagcgccgtggaggagcaggagatgggacggcgctggggcgtggcttgggaaatggcataggggaggagtcggccagggagttcaggcttggggagctgtggtcgacgatggaggctgggcgcagggaggcgcgcgctggagcagcgacgcgggcggccgagctggagtcgggcgcaatccgagctgggcgagctgggcgcgcggccgactggagcagtgcgcgtgcagagggcagggagggcacgggcctagggagaagacgagggaggcggccagcaggggagatgacggttggagagaaaaatggagagggagcttgcggctga

SEQ ID NO: 16977 - DNA, 516 bp, Zea mays
  Peptide Sequence Number=SeqID_58756
atgagggacgaagagatcgaagacctcgctcgcttggagagcttagtgactacacaggatgctggcgcggaggcagatgtggaagagcagtcgtcgcacgttccggtgattgggcctacgcaagcaaattttggcttcttagacaaggggaaagaaattgttggggctgttgaatgtgttacaccattgtctttccggagtccaatggggcttagcgatgagggctatgaatttgattcatggtcgtcgagtagcgaaggacggttgggccccttcgcaaagatggatgaagagtcctcggaagaggatttggatttctttattgtgttagatgtgtctgcgacagaatctaggatggggaagtcttcatctagggctccgatgactgtggcgaaaagtgattttgcccccttaggtgactttgcgcacttcttgtgcatatccagctgcacccttgggcaacttttaactcgaatagatattgcgtctgttagacgacttcgtaccattagatga

SEQ ID NO: 16978 - DNA, 369 bp, Zea mays
  Peptide Sequence Number=SeqID_58757
atggctacttcgtcagacccatgggtgcgattctgcgcggttgctgacgggggcgaagaggtcaccagcacgtctgtggctgagggtgtggcgactactatcgcgcggcatctccggtatgctgttgtcttcgccgatcaagtggcattcggggcgctagtgaatgttgtgacctcgccactgcgttccgagaggaaacgactggaggacaagatagagagccttcagatgctgaatactgaagctatcatggataaatctgcggccaagatcaagagtcggaaccttttggagaaggttggctcactcgagaaagagaatgagagtcttagtcgccggctgagcaaggagaaagatgctaccaactag

SEQ ID NO: 16979 - DNA, 1734 bp, Zea mays
  Peptide Sequence Number=SeqID_58758
atgccgagcaagtggcaggtctggggccagcccgacggcagcatcgtctggctccccgtctccgacgcgcccccaaacccgcctcggccggaaaccctatgcccggacaccgccggcggatgccgtatctcttctatggccgacctactccttcaagcgcgggagcagctgattgaaggcgatgcgatggatggattggctcagagtgtcaatacggctggactgttctccaccgggtctgggaggccactggctgtcagccagagagccgtaaggagggccagtgcgttggttggcgaggaagtggacgaggctactgataacaataacaagaagagaaagaaaccatttggttgtgatgctggtctggagggtgaactggcaaacttacatgttccatttggaggtggtgtgcataaagataacttcttcccaatgttccaaagtggatctggtaaggcagtcttgctcaacaaggactcaattcagaaggcaagagctgttctagaagaaaatgttgagaatgcagctggtgccaaacagccaatgttccataccagtacgggtagatctgtcctagtcagcaagagctcaatcgataaggcgagagctgttttagggggtcggatgattgcacatgaaggagatgtaggaggtgtggatggtatggaacagtttcctgtgtctcaagctggttcaggacaatgggatactggctgccagctcccaattttccaaacaggacttggaaggcctgttgctgtgaaacatagttcaattaaaaaggcaagcacaattttgggggatggagatgttaaaagaagtgaaaaatgtttcaacgatgatggccaattgccgttatttcagactgggtcagggaggtcagtcacagcaagtaagggttcctttaaaagggcaagttctgttctggagccaagaaatattgcaaaggaattggaagatgaatctcatctcaatgatggttatgccacctcaatatttaaaactggacttggaaagtctatcttaccaactgagaactcaagagaaagggcacaatttgtattagaggctaaagaggctgtaaaacaagcagtaattagtgacattggagctggctttggtgaaaatccaatgttccattctggaaaacaacagttttcacctgaaaatgatacttcaagacctagggccagtacccccatggagcaaggcaaatttgcaacaaaaggatatgaagactgtggaagtccattgccaatgtttcaaactggatctggaaaatctgtattggtctgtgaaagctcgatgcaaaaggcaagagccgttcttgaggaagaaggtgatgctgctggcgtggccttctccctggctgctcaggcctctcgggagtcgaggaacgttagcgatcttacaggggcgcccctgcgccaccaacgcaggtgtcgggcgcgcgagtggggtggccgagctgcggagcaggagggccttacgcctggtggagttatgtcagggccttctcagcctcctgaggtgctccccgtgcttgtccctgttgatgttgttgagacggtggaggatcactgcattctggattggtccgcagagatcgcccaagcagaagacgcgctacgcaatgctttcttcgtcaacatcattcgccatcagcttggggtttctgctgaagatgtggcccttgacttcaggaggagattcaaccacagtgatgcctag

SEQ ID NO: 16980 - DNA, 357 bp, Zea mays
  Peptide Sequence Number=SeqID_58759
atgggcgctgacaagcgggccaagggcgtagggcgcgcgtgcgcgaagtggtatccgcgatctaggccgtgcgatcaggatcgggcggaggggatcagaccgagggaagtgaacagctgcggggcggcactgctcctctccatggcggtgaagtcgtcggagttgaggcaggcgcgagctagggtggttccggggtcgcctggattgggtagagagggtgagaatgccacggcgaactcagtggcggggaaaaggccacgaattcgagggctgaaaggggagaacggtggggagaaggcctcaagtggaccgaaggaactccggcgaggcattccggcccccaaggagggggcttga

SEQ ID NO: 16981 - DNA, 1273 bp, Zea mays
  Peptide Sequence Number=SeqID_58760
atggccgtgttcgacatgaagtccgctcccttgatgatcctagaactcctcttagttagccttggccttaccattgcgcccttcagcgccgaagaaaacaacgaccactggttcgtctactctggcttcgccaatgctagcctcaccctagacaacacagcctcgatcacaccaagcgggttgctggagctgaccaatggcacggtcatgagcatgggccatgccttctacccgactccactgcgcctccgtgactcgcccaacagcacggtgcagtccttctctgcctccttcgtgttcggcatcatctccatctacgacgacttgagcagccacggcctcgctatgttgattgcaccgagcaggacactttccgcgcttccagtgcaatacctgggcctcctaagtggctccaacgatggcaacaagagcaaccatatcttcgccgttgagcttgacacctaccagaacagtgagtttaaggacatcaacaacaaccacatcggcatcgacatcaacagcatgacctccgtgcagtccaacccggctggtttcttccatgatcaagatggaaccttcgaaaacctgacactcagtagcaaagaggcgatgcgggtgtgggtggagtacgatcgagagaatacacagattgacgtcaccatggctcctctggccatagtcaaacctaagagaccaacagtgtccactatccaaaacctctcagacgtgctcaccgacgtggcatacgtcggtttctcatcgtcaacgggcaagatccatacgcaacactatgttctcggctggagcttcgccatgaacggccctgctccgtccatcgacctgagcatgcttccaaagcttccacggcatcatcacaagagtcgacgatcctgggtgttagagacagttctgcccatagcaactgcagcattgctcttgtctcttggtgtcgttgctttcttgcttgtgcggaggcatgtcaggtacgcggagatacgggaagactgggaattggagttcggcccgcaccgattctcatacaaggacctgttccatgcgacgggtggatttgagaacaagaatcttcttggcattggaggatttgggagagtgtacaaaggggagctcccgagatcgagattgaagatagccgtgaagagggtatcgcatgactccaagcaagggatgaaggagtttatcgcggagatcgtcagcataggacgtcttcagaaccgcaatctcgtccagttgcttggctactgtcgtcgcaaag

SEQ ID NO: 16982 - DNA, 1401 bp, Zea mays
  Peptide Sequence Number=SeqID_58761
atggcttccgcggcgacacagtgcttcagctactcctcgttgccggccacgtgggctctgcggcagcggggcggcggtgccagcgtgctccggctctcttcccggcggaccttctcggtctccgcggcggccgggcgggtgcctggtggtgttcgagaagtaaaaagaatgctcatggatggttggttggttggcggatcgccggactgcaggtatgtgatcgtcgggggagggaacgctgcgggttacgccgccaggacgttcgtcgagcatggcatggctgacggccgcctttgcatcgtctccaaggagccagttccaccatacgagcggccagccttgaccaaaggctatctttttcctccggacaagaaaccggctcgcctacctggtttccatacatgcgttggatctggtggacagcgacagactgctgaatggtacaaggagaatggtatagaggtgctgtatgaggatccagttgtagcatttgatggcaaaacgcaaaccttaaagacttcatcggggaaagttctgaaatacggctcacttattatttctactggatgtgaagcatcgagattacctgagaaaattggagggaaattacctggagttcactacatacgggatgttgctgatgctgatgctctagtatcctcattgggaagtgcaaagaaggtggtggttattggtgggggctatattggcatggaggtagctgcagcagcttgtggctggaatcttgacacaactattatattcccagaggaccacattatgccaagattatttacaccctcgcttgctaagaagtatgaggaactgtatcagcaaaatggagcaaaaccagttgtcagcccgtttgaagctgttggagttaaccctaaagttggtggaatagaggttgattccttgttcagaactagtgtacctggcatctttgcaattggagatgtagcagcgttccccctgaagatgtacaatagaattgctcgagtggaacatgtggatcatgctcggaagtctgcgcaccactgtgtagagacgctcctaacatcccagacaaaagcgtatgactaccttccatacttctactcgagggtttttgagtacgagggaagttcgaggaaagtctggtggcagttttatggcgacaatgtcggcgaagcagtcgaagtagggaactttgatccaaaggttgcgactttctggatcgactctgatagccggctgaagggtgttttcctcgagagtggaacctcagaggaattctcgcttcttccgcagctcgccaaatctcagcctgttgttgacaagtcaaagctccaggccgcgacttctgttgaagatgcattagagattgcaagaagctcactccggtccagtgccatggtttag

SEQ ID NO: 16983 - DNA, 894 bp, Zea mays
  Peptide Sequence Number=SeqID_58762
atggccgagcacgccacaacgggcgtcgaagagcagaggcaggtggccatcagcatgtgctcggcgccaacacccagcaagctggtggcggtggagtcgtcgtccctgcagaaactgatgctcaagtcgccgccgcaggctgacgcgcacggcgacgagcagcaagggcgcgaggtgccgctggccaagaaggtggcggcggagttcgtgggcacgttcatcctcatgtttgcggtggtgtcgaccgtcgtggcggacgcgcagcacggcggcgcggagggcctggtgggggtggcggccgcggcggggctggccgtggtggccgtggtgctcgccgtggtgagcgtctccggctcgcacctgaacccggccgtcagcctggccatgggcgtgttcggctacctcccgcgcgcccacgtgctcccctacgccgccgcgcagacggcggggtccgctgccgccgcgttcctcgccaaggccatgtaccgccccgccgacccggccgtcatggccaccgtgccccgcgtcggcgccgcccaggcgttcttcctcgagctcgtgctcacgttcgtgctcatgttcgtcatcgccgccgtcgccaccgacccgacctcggcaaagcaaagagctggtggccatcgcgatcgcggcggcgataatgatgaacgctctcatcggaggaaatcgatacgcatgaactggggctccgatccgacagatgaacgctgcgtgtgcatgagatgcaggccgtcgactgggccgtccatgaacccggcgcggacgatcggggcggcgctggcgacggggaagtacaaggacatctgggtctacctgctggcgccgcctctgggggctatcgcaggggctgccacctacacgctcatcaagccctga

SEQ ID NO: 16984 - DNA, 1734 bp, Zea mays
  Peptide Sequence Number=SeqID_58763
atgaccgtcacggccgccgcatggccggtatgcaccatctgctacgaggacctccgcccgctctccgaccagcacctccactgcctccccgcctgcggccacgtcttccacgccctctgcctggagcaatggctggagtactgccctgggggcaagaagaagcgcacctgccccgtctgcaagcagccctgcggcgccgcgcacccgccgacccgcctctacttcagctccaccggcacgtgcccgatccaggcctgcccctccccgggaagcgcctctgggggcgcggacccggaggcgctcgccgccgaggtcgcccggttggagcagaaggcggcgtcgctcggcaaggctgcctggttgagggagcaggcggaggcgggagactttatgctgcaagccgcgaagaaggacaaagaatctgtccagatacttctgaatgcgaaaacagaggagttgtcgaggaagacatcagagtgcgggaggttgcaggagaagagccttgcattagccaaagagcttgcggcgctgaagctgtccgcagacatgaaccttcaggaggaagaaatcatgaagtttgcttcacttggtaaccagggaaacctgcagaatgctgttgatgttttgaagagatcacttgctattcggaacaagagctacaaggaattgatggtccagtgtaatgttttgggaagatcagagtctcgcatgcagcagaagcttgaaaaggccaaagaaattttaaagaagttaaaggcaagggtacaggaacttgagaaggaattagaagataaagaaaatggtctgttaagggacttgaggtcttcaaagaaatttaaagcagaccatataaaatctgggaatgtcacagctaatagtgctttcactagttcaagtcctggatatgaaaatcaaacaaacaagctcgatgaggtgatgcaagatccgtgcaacgacaagactcactttgaccggttaaaatctgaagctgggagtgttctgaatgcccaagacaacctggacaacaaggatgtagatgtgatagacctagaagccaatgattctgtttttggagatgaacagaaggctcagttttccgccaagccattcgggaccgatgatagcacaccgaattccgagaacaagtctagcctttgccaaaatgatgaccgacattccgtggcatctgaatgcacaaccgcacacgcagcaaatggaggacccttcctcaaacacagagaagcaactgtaaaatcaacctttatggcgaacattagggccaaactgcatattcctcgggagagtccttccgtgagaactaacgcgacaagttcaacgctggagagtgaaacattgacaattgatggcatctccaaacaagcaacgagattggcatctggcactggacctcagcagatccacaacttcaactctttttctggtgagatcttttgctgttctgatgatttccaagcgccaggaattcctggcacggatggagcaaggagaagcattggcaaatggtgcaagggcccagcagatcccagttctgcgagtgggagcagaggcaacctgatcgccgtgggaccggatggccgaggaggcaaggtcaagatcctgagggaccttggccgaccccaggatagcaagtcccaagcgctgtggcccaaggcgcagaaggttgcaggcagaggtggccagtcccagatccatcagttctttggcaagagatga

SEQ ID NO: 16985 - DNA, 423 bp, Zea mays
  Peptide Sequence Number=SeqID_58764
atggccatgtgcaggatttttatgagagaaactcaagatcctattcctaatgttgatggcagtcatggtgacaacccaataccaccaacacaggttgagattcacactatagacacaaatacaagcgatgatgataacattgtcaatggtgatcaagataagatattgtcgaagaagaggccgatgaaggttggaggtgctcgaggacaacaaccacatgccttaggaagaggacctgaaccggtcaaggcctcctcaatttcttgcttcctgctccacaatcatctttgtaatttaagttattcaagcacaaggattgatgaggacatcactgagtacgactacaccagcagcacctccacatcaagcgccacttccttcattagctgggccaatcactcgggcccgtgccagagatcttaa

SEQ ID NO: 16986 - DNA, 522 bp, Zea mays
  Peptide Sequence Number=SeqID_58765
atgggtgtgggggccacgacgctaggagttggactgccctcgtgcgagcctaggagtgggaggggcatgcgggccaggcctcgatgggccacagggaggggttcaccggcttgtagccctgcatatctgaagtttgatcaccttctcatccgagtcaccgccgaatgcttagctcttcagttccatcagtaccaggcagcgggtcgcgcgctgccagtccccgctgatgagcaccccaagatctaccgcatggagcttgcgctaccaacgaggtactatctgaggaagctcaagtctcaagaaggtttaagagcaacgatctttgagtgtaaccctacaacaatcaagagctgtggcatctggctgtgttaccagtgcaggacaggttaccacgacctgcacaaggagtaccgtaataccaccctgaatggtgccatggagcagatgtacaatgagacggcttcctgtcatcgtgtggtcaccctacatacagatcatcaagacggcaacaatcaactttaa

SEQ ID NO: 16987 - DNA, 426 bp, Zea mays
  Peptide Sequence Number=SeqID_58766
atggatcaagcagtctcattagctgcgagaagcagacgattcgaatcgagtttttatccttgcaagatcagggctcaccgccttggcgtacaatgcctcactgaccccgactgccgtcatgcagtgaccgcacttgtacccaccataaccggaatgggagaccacgtctcaggtcgcgtgaggggatatgtccactgtcaggtccggacgctccgctgctcctccgcgaaccacgcgctggatcttcgcctgggacgtcgtgattcattgcgcaacctccggcggctgggctctcccatcgtgctcgtgtccctacccgtcaatgcgacaccggccaccttggcctcgcctcaggcctcgggtgcccgcacggtcgaacaaggcagggagctcgtcgccgtggctgctcctagcttggggcgctag

SEQ ID NO: 16988 - DNA, 360 bp, Zea mays
  Peptide Sequence Number=SeqID_58767
atggtgcgcgtgggcagggccgggggcgggatctcggcgaccttccgtaccgcacggggaaggattcggccgggggcatcaccgtgcgccgcacacttcactggcgacgtcgtcggcgttttcactccatcggcggtgagaatcctcttccgcgctccatttcctttttctatgattgcgcgcgggacgtcgatccgtgcgctgttgggttgggaggctggccgctgggggaggcgcgtagacttgggcggaaaggtagacgatgggctgggtgcccggtctgggaagacgatgactggggggacccgtccctattttgatgaacgccccacattaaaagggaaagaagatgaggggtaa

SEQ ID NO: 16989 - DNA, 282 bp, Zea mays
  Peptide Sequence Number=SeqID_58768
atgtggctgtctcgacacctctttcccgagccaaaggacgaccggagcaccaccgtcgatgccaccgttcctcggtttctgccgacgtgcatggaccgagcgtcgtcatccaccattcgcaaatccgagggcaccatcgagttcgtagtcaactgtcgctactcgctgacccccgcctcgactcgtcctatcgccagatcgcaggaggaagtaccggtggagattgtcgaggagctgccaggaattctcgtggaagagggtgaacccaaagttgaagcttag

SEQ ID NO: 16990 - DNA, 159 bp, Zea mays
  Peptide Sequence Number=SeqID_58769
atggcgggcggaaaagagctcgtcggagctaaggaggggtggttggccggtgatgatctacagagctccaaagtcagcctggctcatcagttttcagaattagtcatattagaggaattgagtggctttttgcaaataagcccaattcacaccttttga

SEQ ID NO: 16991 - DNA, 276 bp, Zea mays
  Peptide Sequence Number=SeqID_58770
atggctggccgcgccagaccacgagtcgcactggggatgtccgcgtcgggctacgcgcacagcggggagggagtttaccatggcgagatggagaaaggcgagaggaaggaggaagactcaccagtgagtgctcctcctggtgacggcaacacaacgcagggagaggagggggcagagccgggtggacacggggcagttttaggtgcacgatgccctgttttctcgctgagacagttggagaagaatgtggcctcccgagttgggcccatgggctag

SEQ ID NO: 16992 - DNA, 372 bp, Zea mays
  Peptide Sequence Number=SeqID_58771
atgagctgtcatcaggccagaatgcagatggcagaacaactaaaaagacctttaagtttgatagtcttcacgccgaaggatgatcaagatggttacaatgtatgcatctttgcttacggacagacacgaacaagaacttttaccattgaagggactgagagtaataggggtgttaactatagaactctagaagaactgttcaatattgcagaggagaggaaaggaattgtcacatatgacttatctgttagtgttcttgaggtttacaatgaacaaatcagagacctatttccttgctctatttgtgcggtgttatatgctgttcaatttaaccatttaagttacttcttcgttcaagagatacatttttag

SEQ ID NO: 16993 - DNA, 489 bp, Zea mays
  Peptide Sequence Number=SeqID_58772
atgccagggcctccacaaaaaaaagcaacacaaaaccaagcaacgggcagaaacattcatctgagaaatgcctccacaataaccaatgacttgtctctgcctaagactatgtctccttttcaacgaatcaaggtggacaacgtcagatttgcagacgagaggcttcatgataactcatattgggctaaggacgatacagacacgggttacgacgcaaaggcacatgagatccttggccaggtcaggagaagcgggtttaggcacaaaaagaccaagaagaagcgtggcacctacagaggcgagcagatcgaccaccaaacccactcgatcaagttcgagaattcagatgacgaggcaaatgctctgagcttcccaaaaagacagaagcaacgatttagcagccgaccgatttctatagccctggtgggaccgtgggaaggtgaggcgatggacggtgcattcaaggcaacatggtaccaacgggattaa

SEQ ID NO: 16994 - DNA, 675 bp, Zea mays
  Peptide Sequence Number=SeqID_58773
atggcggaggcagagccgcggcgccggtgggcggtgtgggcgctactgctgctgctccaccccgccgcgctcgtgctcgccaacaccgaaggtgcgcgggagctctacagtaataatatcagcggaattatacctagtggatttggaaaccttacaaacttggtcagtttggatttgtacctgaacaacttcactggtccaataccagattcattggggaagctattgaagctgcggttcttttactttgttaataaaaggcgtcttaacaacaacagcctttctggttcaattccaaaatcattaactgctatcactgcactccaagttctggatctgtcaaataacaatttgtctggagaagttccatcaactggttccttttctttattcacccctatcagttttgcgaacaaccctaacttatgtggtcctggcaccacaaaaccttgtcctggtgctcctcccttttctccacctccatacaaccctacaccccctgtgcaatcaccaggaagtagctcttctagtactggagcaattgctggtggagtggctgctggcacagccttgctatttgctgttcctgcaattagttttgcctattggcagcgcaggaaaccacaagaacatttctttgaagtacctggtaggtattcaacagcaggagaataa

SEQ ID NO: 16995 - DNA, 174 bp, Zea mays
  Peptide Sequence Number=SeqID_58774
atgagggtggtatgggacgcccttggccatgcatatgttatggctcctatattctcgcaaagggatctgggtacgggcatcgtcccatggctttttcctgagggcagaggtaaagaagaaggcgtcgaggcggatctccaggagttccaagacttcgacgagttcgagtattag

SEQ ID NO: 16996 - DNA, 432 bp, Zea mays
  Peptide Sequence Number=SeqID_58775
atgcggaaggcctcgcgtgctactgctgtgtgtgctcgaacctggaagcggaaggcgcgccggagtgctgggctgctggctcggctgctgggcggtgccgcactgccgcgtgcggatgctgggctgggcggacggcgtgggcgtggctgctgggcgcctgggcggacagggcgtcagccgtcagagcggtgcgccggccgatgccgtgcctactgcctgctggtgctggcggctggcctgctgtgctgggcgcgggcggtgccgcacgccgcggctgctccgctgctggggctgggcctgggcgcctgctgcctgctgggcggtgctggctgctgctcgtggcctgctgccatcggcactgctgcggagccggatggcgtggccatgaccggctggtccgagcagcacgggtacgacctcgcccaccactag

SEQ ID NO: 16997 - DNA, 774 bp, Zea mays
  Peptide Sequence Number=SeqID_58776
atggcaggttccctctggagtctggaactcgttggcaaaccgctttgggctggggtcaatgtcgtcgcggtttcggtcgccgatcattatgttaattgtaacatggagaaccacccgggaaaacaatgctaccacaagggtgttttaaccctttcctttggtaagccttacacttcacatgagctctcacctttgagccgaagtgaccgccgtcactccaccgctccactgaccagtctgacagaagaacagcgccgcctgcgccactccgactgcagtgccactcaacagagtgagtctgacaggcagtcaggccttgccaaaggcgccataggaaactccgctctgcccgaccccagggctcggactcgggctaagacccggaagacggcgaactccgctccgcccgaccccagggctcggactcgggctaagacccggaagacggcgaactccgctccgcccgaccccagggctcggacttgggctaagacctggaagacggcgaactccgctccgcccgaccccagggctcggacttgggctaagacccggaagacggcgaactccgctccgcccgaccccagggctcggactcgggctcggccccagaagacgacgaactccgcttcacccgaccccagggctcggactccgccctggcctcggccgaacgatctccgcctcgcccgacccgagggctcggcctcggcctcggcacagaagacagactcgaccccggcttcggaggaacccccacgtcgcccgacctag

SEQ ID NO: 16998 - DNA, 1536 bp, Zea mays
  Peptide Sequence Number=SeqID_58777
atggaactaaactcagacaccctcctcttcctaactactatcatctcagcggctatccttgttgtgtgctcacttagccgccgcaaaccttcaccaggccccaagaagaagcggcctccaggcccatggcgtctccccttgatcggaaacctcctccacctagccacctcgcagccgcacgtcgcgctacgggatctggccaggaagcacggacccgtcatgtacctgcgtctgggccagatcgacgccgtcgtgatctcctcgcccgcggcggcacaggaggtgctccgggacaaggacgtcgccttcgcgtcgcggccgaacctgctcgtggcggacatcatcctctacggaagcatggacatgtcgttcgcgccgtacggcgcttactggaggatgctgcgcaagctctgcatgtccgagctgctcagcacacacaaggtgcggcagctcttggccgtccgtgacagcgagaccatttcgttggtcaggaagctgtgcggcgacgagctcatgtcggtcgtcgacgtggcggtgctgtacggtggcgggttctgcgccggggacctcttcccgtccctgtcgttcgtggacgtcgtcactgggttgacacgacggctgtggcgagcgcgccggcacctcgacggcatatttgacaagatcatcgccgagtgtgaggcacggcagcgacaggcgaagacgacgaccgggacaacgaacggagatggcgacggccttctcagcgtcttgcttaggatccgagacgagggggagaccggcatcagcatgactagtatcaaagcaatcttatttgtaagtgcggtgaaatatatatatggtgctgctgaatcttgtctttctagttcaaaaagtcaattcttgctcatcgatcatcaggacatgctcgccggcgggacggagaccacgtcgtcggccgcggagtggatcatgtcggagctgatgaggaacccggaggcaatggccaaggcgcaagccgaggtccgccgagtgctcgacggcaagagcccgcaagaccacgaagggcaaatggacaagctcagctacacgaggatggtggtgaaggagggcctgaggctgcacccggtgttccctctccttcttcctcgtctctgccgggagacgtgcgacgtcggcggcttcgaggtggcccagggcaccaaggtcatcgtcaacgcgtgggcgttggcgaggagccccgagcattggaagcatccggaggagttctggccggagagattcgccgacgacactagcgtcgccgcggcggcggactacgtagggtctcagtttgagtatatcccgttcgggagcggcaggaggatgtgccctggaaacacctttggcctcgccgcgctggagctcatggttgcgcggctgctctactacttcgactggagcctcccggatggaatgcggcctgacgagctggacatggacaccgtcgttggttcgaccatgcggagaagaaaccacctgcatctggttgcgtcaccgtgcaaggagatcgagagctga

SEQ ID NO: 16999 - DNA, 270 bp, Zea mays
  Peptide Sequence Number=SeqID_58778
atggctcctaagaaagcaaccactagggccaactcccccacgggcaagatcgtgaaggcagccctcactgccaagaaatgcaaaattaccttcgtcgacaacaccttgtccccgcaggtgagaacaatagaactgaagcagaaagcatcaagcaccctcacaccgaacacccgcccacgccacaaggtagcattgacactagcagcttcgaaagacagctaccaagtgatgtcccaccacccgagttcgcacccatgggacaccccataa

SEQ ID NO: 17000 - DNA, 1407 bp, Zea mays
  Peptide Sequence Number=SeqID_58779
atggagaacactgcgccatgcggtgacttcgggaagatcgtggccgatcttgagtctgagaacttggtggctaacgtctctgccgtgaatcaagcctcggcgttgattgctggaggtaaaatccctgaaccccagcttctgtgccgcctgatcgctggtcttgcttccaatctggagaagcctgaccatgactctgccatcaagaggtgtgtttcctttactctaaaggcaatcagggtggccgtcatcaagaaccgcatgaacatggattcctcagctcgtggtgaggctctccatgccatctggtgttgttttatggatcaaggccttcgccgtattcagcgtgattcaaatatggtgaggctgtggacagtccaggatcaattgtctgcagtcaaaatcatatgtactttcttccgtctctcaccggattttcatttgccattgcaagagcctattgccatatgcttgcaacagtgtcacccacaatcaccacttgaggtaagcagcatggttgcgatgcttggtaggctgaagcaagtaagtacgaccatggtccaccacccagggtttagtgaccttgctgtggatgtcctagcagctttatcaaattgcaatcttgctgttcgaaagaatcttctgaacctgatggtgaggctcctcactccaaggaacatcagtgctgtgctattgctccttgataatgagctgaatagggctgctaacatccatatcgagtaccacaagatgctagaggaggcgatcagagaatgccatgctgcttttccggggtgtattgtagaattcacactagatcccaagtacagtgtgttcattgatagtattctgtacatcatagacatcatgaatcccgaccagtcgttgcgaggcccacttctgaaaggtctactaagggcgctccggcatgtgaagtcaccactggtatgcgccgctgctgtttgggccatctcaatgttctctggatcactggaagaggtcagtgatgccattgttgcactttcatgcttcttcaaggacctgcttgatcgacgtaagattgagaagctgatacttggaggagaagcggagaatcaatacaagctttctactgactattatggtgtcactgccggagatgcaacacagggaaagcaccagcagccatggctgatggagatggaggaactgctgtttgtgcgcatagggctcacacggcaagcaggtgggagctatgccattccttcgagttccaagagcagtgctagttcttcaaacgcgtatcttcctgagccattgggtaatacagacaatctgatcttcctcgtgcattctggagatgccctcttggcagatttcgtggaaatcatgctgtctaacctcaagaagaaggtcaaagagctggagtga

SEQ ID NO: 17001 - DNA, 399 bp, Zea mays
  Peptide Sequence Number=SeqID_58780
atgaaggggagggtcggaaaggagacacccaccacctccttcctcgacttcctccttctgttcctcttctttctcactgcatcatatttattctacacgctgcacctcctcctcatctcggcatcatcggctgcctccaactgcgagcccgacgttgtctcggtctcccaggtgtctgctaacctcactacaaccgtggcgacagagaagccgctgccccctttcgtcgcaacacagctctccacgaggaagagaatcctaattaaaattgatctccacgtgcttgagaaggagaaggacaaggccagcaaagcccggctggttgaggttttagttctagatagacaatcaggcataacaaatttctatcggaaacaacaatttctgcaaggaaattga

SEQ ID NO: 17002 - DNA, 2367 bp, Zea mays
  Peptide Sequence Number=SeqID_58781
atggcggaggatcctgccgccgaacaggagacgcggcagctagaggaccggctcagggaggtcggggaacggctgcaggcgcctcccgacgacgcggaggacctgctcaacctcctcatcgaagttgaggagtgtttactaaaagttgagcagtcacctcctgaaagcacatcgaatgctcttcaactagcaactgcagctcttgtcaagaaagagctgctggcccatgctgattcaaatattagacttgccgtggcatcatgcatatctgagatcacacggatcacagcgccagatgctccatatgatgacgatgcaatgaaggatgtattctctttaattgtggaggccttcaagcatctggatgacatagagagccccttctttggaaggagaacttcaattcttgatacagtcgcaaaagttcggtcctgtgtggtgatgctagatcttgaatgtgacgatttgataaatgatatgttccatcacttcttgaggactgttaattctgggcattcagaagccgtcatatgctgcatggaaacaataatgagattggtaattgaggagagtgaggatgtccaaccacagattgcttcatgtctactccaaaatgttagaaaagaagaaaaggaatcttcttcagcttcctttgagcttgctgaaaaagtgataggcacatgccgtgagaaacttaagccagtctttctgcaatcactaaaaggcacttccttgagcgaatacagccaaatcgtcgcatcggtttgtgaagatgtttcagatgacagggaagataacaatgctgatccttctgggaaggacacggtggatgatggcaagctctctgaaaggactatttctgatgaattgcctcaggaatcttcaaaggcagagcaagatgttagccgtcctgaacaagacggtacttgtatgaatggtaatacaggtactgctattagcagtggtgctaccctaccagatactagcgaatctgatcaaggaccaccaaaagagaagactgaacaaccttgctatgctgatgacataacagatactgatcagttgaaatctgaccacaatgaaggtgcggagttcgatactgcaaagcccgaaaagaaagctgccgttgattcagacaaaagtgctaagcttaaactgtccgataaatgtgaagcacctgtgcattctgatgctgacactaaaaaggaagcatctgcagagggtaccgatggagccgctgatgatacatcaacggctgctgattgtacacctaaaccaaagcgaggccgtcctcctggcccaaagtcatcgcagaagaaggctgctggaaaggatcaatcttcaggttcagatttgaaaaaggtcaatgaggcaggtgattcagccggaaagttggcgaaacgatcagcgaaggatgagaagtccacaaagaaggctggtgaaggagaatcatctaagaagacccaaaagtacaattcaaagcaacagaaggatgaaaacctatctgaggatcctgccaaggatctgagtttaaagcctcctcgttcaaggaaaagcaaaggacttgataaaagtctagttggtgcaaggatcaaagtttggtggccagatgataagatgttctacaatggtgttgtggagtcatttgattctgtttctaagaggcacaaggtcgcatatgatgatggggacgtagaggtactactgttgagggatgaaaagtgggaattcatcagtgaggagaagggagcttctgtggcatctgaaactgtgattctaatcaggaccgagcattggctttggttcttagtttgctatgttcactccacagttgttggagttgccaagccaggaggcagaaaaagaaaagctgatgcagtgaaggaagaaaatacagagacacctaaaagtgatgctgttgatcatccaaagaaaagaggacgtccaaaaggtgtaagatccagcaatggcacacctagtaactcagctactccgagcacaaaggggaaaactgccggcaagaataccaaagaaacaccaaaaactggccccaatcttataaaggaactcgagaagagctccaaggacaaagctagtgtatcaactgagacaaaggatgaattgcctaaagatgacaggagtgcaagcagacctaaggaggctattagcaaaggcaaggattcaaaagacgaaggcaagtccactgaaggaaaagctaggccaggtcggaaactaaaaaatgctggtactcctgcgggtgacgctgacaaagagaaggggaaggagaaagaagttaaggcagctgaaatagagcaggaggcaccaggaaacgcttctacaggaaagaagcgcagaaggaaggcttga

SEQ ID NO: 17003 - DNA, 447 bp, Zea mays
  Peptide Sequence Number=SeqID_58782
atgacgcgaagacaacccgaggcggcgccacagccgccgaccaacgatgaagacctgagtgcgctgctctgccagctcgatcgccgtcgccgttctcctgtcctgctgcttttcctgcagagaatttctgcctccctcttgtcatctgttggatctctcagtctcactgggattcacggacagtggccgctctcgatggcgatcctctcggcgctgtcggcggggaggcacttgtgcagcgagtcgaacaccacggagaagtaccggagactggccgtgaaaggtggaagcagcagccgcgccagccgcgccttggttcgccgcagctcgtcgtggctcgtgccggagccggtgattcgcagggaaactggctcgtcgccgtcgccgtcgtgttatgcgctgctcgttctcgcgctcgtgctcgcggcggcggccgacagggactag

SEQ ID NO: 17004 - DNA, 669 bp, Zea mays
  Peptide Sequence Number=SeqID_58783
atggcgactgcgagtgaaccggagaggcgagagccgcggcggctgcggctgcgagtgaactcgagaggcaaccaggcctccaagctgggccaggataccaaacatgacgtgattgtttcaatgggcctggtcgtgcgttggggccaggcaaccaaacataccctccctgtcccactccccgtctcgcgtcaacgcaacaaccgccggggtgtggacgtgtgcgcagtgacgtcgtgcgcgagacgaccaaatcctctaggttcttggacctggccgacctgccgttgcccactgccgcgcccgcgcctccttttctccgtcccagcccagccggcacgtcagctccgcacgatgctgccgcgccgttatatacgccagctccgcgacccgggtcatcctgcccgtctcatcccacacgattcaaaacggccgtgcgcaccaactataacctgcgacagcggctccttttgcgatccatcggccatgtgcactcccgcggcgtgccgcgggcgcgtgcgcatcaacgtcggcgggcgggtgttcgagacgacggccgccacgctctccagcgcggggcgggacaccatgctcggcgccatggtggacgcctcctggaacgcgttccccgacggcgcggccgagtacttcatcgaccgcgacccggcgtga

SEQ ID NO: 17005 - DNA, 822 bp, Zea mays
  Peptide Sequence Number=SeqID_58784
cgccccgaccgccgcgacggccacgacggcggcgtggccgccttctccgcgctcacgggcggcctgcgccaccgcttccgcgtcgcgcacgcccgccagcctcggtcgttcaccgccggcgccctggccttcgacgggggaggagggtcagggtgcgccgtcttcgcgagctgcaagggccggctcaacgagtacggcgtcggcgtctgggaccgcaacacgggcgagcaggccgacttcttgtacgagccgcccggctgcgcgctaggcgacgccgacaggctccagtggctggacggcaccggcgcgctcatggtggccacgatgttcccgcgggccgactcctcctccatcagcctgctcgacttcagggacaggagcgtcgtctggtcgtggtccgacgtcggcacgccggcgtcgctcgaggacaagcacgcggtacacgccgtcgcgatggaggacgggaggtcggtgtgcgtgatcaaccagtacgacgacctcggcttcctcgacctccggagcagcgccggcggcgtgcggtggcgatcgcggagcaagctggcggcgggcgggaaggcgaaagcgctcggcgaggaggtctgttacccgaagctcgccacgtacggcggccagctgttcgcgtcgacgggcgacgccatctcggtgttcagcggccccgaccacgtgctcacgtcgacgctgcgccgcagcgaaggcggcgccatctgcgacttctccatcggcggcgatcgcatcttcgctctgcacagcgacgagaatgtcttcgacgtatgggagacgccgccgccggcgatcatctga

SEQ ID NO: 17006 - DNA, 198 bp, Zea mays
  Peptide Sequence Number=SeqID_58785
atggcggtcctgccaaggagagcatcgtcgtggcgttcggtgttcctcatcgcgatccgcgcgcgccgccgaggggactcgcataagacgaccactgacttcctctacgtcggcacgatggaggagcggatatggagaggcgcccatgcgcgctggaacttgtcgtactcggtgacgagcagcgacttgcgcaggtag

SEQ ID NO: 17007 - DNA, 381 bp, Zea mays
  Peptide Sequence Number=SeqID_58786
atggatatgcggaaggctacaactagaactacgctacatctacacctagggcaggaaaggaagctccgcctcgcccgacctcagggctcgggctcaacctcaacgctggacgacggactcccgcttcgccccgacccccagggctcggacacagtctcgggcctccggaagacggtctccgcctcgcccgacccaggggctcgggctcaacctcgacctcggaagacggactccgccttgccagaccctagggctcggacacagcctcggcctcggaagacggtctccgcctcgcccgaccctagggctcggactcagcctcgaccttggaagacggactcgacctcgacctcggaggagcctctgccttgcccgacttag

SEQ ID NO: 17008 - DNA, 297 bp, Zea mays
  Peptide Sequence Number=SeqID_58787
atggagaggacggggaggcgggaggtgggtgataaaaaggcgtgcggtgcgggcggggacgggcagcttcgtggaagcttcgtggtcgatgtcgtgcaggcgatttttcggcttcgtctccctgcccgcctggccctggctggcctatatacttctccgtccgtctccgtcctagccaagcgactgaggctgttgcgcggcctgtggtgcctgttcggccacctctgcgttcgtcgagttggcaatacgaggacacgccaatatggtgatgctgatggtggtgttgccagaaaatag

SEQ ID NO: 17009 - DNA, 3027 bp, Zea mays
  Peptide Sequence Number=SeqID_58788
atggtggcctcctccgccaatgcgccaccgggcgccggcgcacggaggccgcgcagccgcccccgcgggagcgtgcgctcgcggagcctgaggtggagcacgcctccgcgcagccccctgccgtcgtcgttgtccgcgtcgccccggcggcattgctcgctccccgcgctggacccgatcacgcccttacctgtcggcaccgaggtcgaggtccgcgtcgacgacgacggcttctacggctcatggttcgaggccaccgtcctcgacttcgcgcccgcgcgcggctaccgccaccctgcgcggtacaccgtcaagtacgtgcacctcctcgccgaggccgacgacgaaggcgtcctcgcggagcccttcgcgccgtcccacatccgcccgcggccgccgctcccgtcttcgccgccgcgcttccgcccccaccacatcgtcgaggcgttccacaacgaggggtggtggtcgggcatcgtcgtgtccgccgccggagccggggtcaccgtcgcgttccccgtcacccgtgaggtcatcgagttcccgtcgggcctcgtccgcccccgctgcgactacgttgacggtgactggatcccgtcccgggtcgcgatggttgtccgccccagccgcaccgtcagggtctacgaggtcggggacaaggtcgaggtggtgaggaaccgggacgtgtacggggactcctggtttcccgccacggtgaaggtcgtcatcgacaacctcagctacgtcgtcgagtactttgatctggaggaggaggagggcgggctggagaaggccaccgagtatctgcattggcggttcatcaggccggcttttgagcatacaccgggggagggtgagttccagctccagcctggtgatgccgtggaggcctactgtgatggggcatggtcaccgggagtcgtccatagggtcgtcagcgagggtgagtatgacatcagtattgttggcaagaaggcggaactgctggtgaccaaggtggtggaattgctcaagccgcggtataagtggaatggcaaccgatggagaattgcaactgctaaggacatgtctgagtcatacgtgaaacacgcaatgaacctggatcacctgcagtcgcctagcgcttttttgaaccttggagtagagaatgcggattttacggcttccgtcctgaaatataagagacagactaacttgaggtggcattctaagtctggagaaagtccaatctctccagttgatttgacatctagtgatgaagaacacagccatgatcctgattcttcttccataaaaaagtctaggaaaaaactaaagcagctagatgccacattagctgaaggttctgaacacgcttcagtctctgagatggacattcctttgtcagctatgtgcaagtcaccagaaagcacacattcgccgaattctttgctctctgagaagagcagtcctcaagggcattcagcaccagtggacaaccaagcaatcctgtctgatatgggtgtttttgatggtgagcttcatgaatctgtatctgggagaagcgttgatgcatatgatatgcttcccattgctgaactaagaaagaaaatggcttcagctagaagaaattgtgctgtccaacatacagaggaacaacatgtgaaatcgctcagagtgaagaaatgtatatcgaatagtaaagacaaaaaaacgcgccctattcaagagcttatgggagaaattcagttgaagggaaacaagaatttctctagggactttgttttagctttgggcgtctctagggatggcccgactactttatctccagatagactggtgtcaatagggccaaaaaggtgctcaagtacaaaggttcttgcctgtaagaaattggctaagaggagaggatccaaagaactgtgcagtccaaatagctcattggatgtgactaggactgaccagcagggaggaagaaaggaagtggcagaagcaatgaaagaatgttccttagcattggagtgtccgaaatctgatgctcaagggcagcttgacagaactttggaggatgcaaagaatataactgaattatcaaatcaggagaacctcttatccatgctgcctcctggctttaaatcagtgtctaacaggaaaggtactaacatacatgatgctcaacttggggaagaaccagcggttatgaccaacaacagccttattgaaccgaatggaaatgatgacatgtgcacagaccatgctgctactaccaagttagctgaaaactacaatgtgatggaaacagctatcatgtctattgattgtccggctcaacaaccctgtggggaagtggatgagaggtcagttttaggtcttaagaatgctgggagtacacagtgcatcatcgacagttctccatcgagtgagagcttgttgccttcaccgcaggctttgttcgtcaagagctcacctgtgtggcatatagttgaagcaatgcatgtgtttaaagagttacctcaacaaccacatttcattccactccaagaagtccccccgacactacgcgaaggaatggcattaggtatgatggtgtcattcgcggacttggtgaaggttacaatggaagcaagcataggcaacgacatggaatggtttgaggacaagatcaggacaatctcccatctagaggcaaatggatttagtgtgcaatctatacagagcgccatgaccgaaatggtcaaggtcaaaactgagcacaccagttatcattgcgaaatcggcaagctgagttcaaagttagtggagaatatggcttcctcctccagagccggtgcactgcttgatgaaaaagatgaagctgcagcacggctcgaggaagaacttgtgagtattcgccaagaaagccagaaaatcgcaaaggagaaggaaaaaatagatgcagaggtcgtgagtatcaagacagcatgtagcgggtatgaggatttgtgcagcggtgtggaacgcaagtttaaggaagtcttggctgggctgcagcggaagaggctaacctga

SEQ ID NO: 17010 - DNA, 309 bp, Zea mays
  Peptide Sequence Number=SeqID_58789
atgcagtgtttgggttatttcagaaatggagtagggcgagtgctgggggctgaagatgtccccgagctggaagatggtgtggagcctgccttcaccatcgacctgcgagggtgggatgtaaccaccttcgttcgtgaggtggagtcggaggcgattaagattgttggtaaatatgcgccgaagatggagatgttaaggagctgggatatatgcgattccaacgtcaggttgaactgggtctttgaattgaatagcttgcggtacggtctttacccggagggggactctgctgaagacggggacgactga

SEQ ID NO: 17011 - DNA, 498 bp, Zea mays
  Peptide Sequence Number=SeqID_58790
atgagcaaagtttgccactcaacggttgtgctggcaagacttgggcgtggatctggggtgaacaggagcaacaagacaacggtcctgtcaagcttcaccaactatgatgacgcatgcgactactgttcccgcacgccgtctgccaagccccgatgggacgtacaatacgacaagagtgcaggatggccctcaggcgcaaaccctaccttgcccaaagtagactccggcctcgggacaaacgctaccttgcccaggcctggccttggctacctactccccgcgaatcccacaggaggccactccttcaactgtggcgtgcacgtcttcgaatcctggaatgagctcgatcgcgacctcgggcagacctccgcctcgcccaagcctagctccaacctcgatatccgcaacaaaaaggtgcccaacgtcaccatatactgcagagctgaccagaaatcaagcgggcacaagtcaaacagcaagtacaagaccatgctctag

SEQ ID NO: 17012 - DNA, 363 bp, Zea mays
  Peptide Sequence Number=SeqID_58791
atggtcccacctgtcatagacacaggatggcataataacatacaaccaagattgagagtggcacaatcacaaatttctcctaagaacaaggcatgttctgtgccacctgaagctagcccgccgtctaatgtgcttgctgaggctaaggtgattgatatattagaatttaagactttcttagcgggtacgggttacctgatggataaaaatacccgcgcgggtacaggcatgtctaagattttatacccacgagcatatatgggtaacccgacgggtaaatttttttatgggtacgggtatggaaggatactacccgacgggtatgtacctgttgccatccctaagtgctccatcagccggtga

SEQ ID NO: 17013 - DNA, 1191 bp, Zea mays
  Peptide Sequence Number=SeqID_58792
atggccgggatgttgcccgacggtgggcgggcggtggtccggttgggcagcggcgacccgacagcgttcccgtgcttccggacggtgccagaggccgtggacgccgtcgccagcgcggtccagtccgggcagtacaactcctattccactagcgtcggccttgagctcgcacggaggtccattgctcagtacttatcctgtgatttgccatataaactgtcacctgatgatgtctacctcacaagtggttgcactcaagcaattgagatactctgctctgcgttagctcgtcctggtgcaaacatcctgcttccaagacctggatttatgttctatgaggcgcgtgctatcttcaatggcatggaagcccgttacttcaatcttctacctgggaacggctgggaggttgacattgatggcgtccaagctcttgccgacaagaatactgttgccatggtcattgtgaacccaggaaacccatgtggcaatgtgtactcctatgagcacctggccaaggcaagttctgatatgctactactggtcgctgagaccgcgcgaaagcttggcatattcgtcatagcagatgaggtttacgcacacttgacatttggagagaggaaatttgtgccgatgggtgtgtttggggctgtggctccagtgttaacactggggtccatatcaaagagatggatggtgcctggatggcggcttggatggattgttaccaatgatccgaatggtgtatttcagaggactaaggtagtgcacagcatcaagagctaccttgatatctcctctgatcctgcaacatttgtccagggagcaataccaaaactcgtggagaacacaaaggaggaattcttcgaaaaaactatcgaaattctaaaacgatgtgtagatatatgctgtgaaaagctgaagggcatcaatgcaatcacgtgcccaagcaaaccagagggatccatgtttgtaatggtgaaactggatctgtcctgcctggagggcatcaaagatgacatggacttctgctgccggctggcaaaggaagaattagtggttgttctgccaggatgtgctgtcggatacaaggattggcttcgcatcacctttgcgattgatccatcttctctggaagaggggcttgacaggctcaagtccttctgcttgcgatacagaaagccaacaaagtga

SEQ ID NO: 17014 - DNA, 1182 bp, Zea mays
  Peptide Sequence Number=SeqID_58793
atgaagagtaagaaaagtgtgcacggatcatcatgcaagaaggctaagttgtttgacggcctaattggtagacatggttctgaaatagatccatgttataaactttttcttgaacatttaagcaaagatcggaatacatatgtccttgatgtaccaaagggtgaccacggcttgcctttttctgtacgttatgaggaggactatacgtcctatggaaatactaagagcagaagtagtccaaattttcccaaccattcacggcgcacaagttggggcattccagatggcaaacagcctgatgtaaaagctgtcaaggctgccagcagaaatatgtgttgctccttttcaccaaagagatcatatgtgaagaagaagaccacgacctcactagtagatgaatcttatgagttatttctgagccttgtgaagttcaaggatggtttcatggttattgaaccagaaccaggtgtcaccattgtatatgagcgagaagaagatatgccagctggctatgatgaatggagaactggcagttccacaaatgaactgtctttggtgtctccacttgaaaacacggagggagactacaccatgcaaagatatgattatggccttgcaccggctaacaaaatttcttctgaacatgaaatggctgcaccttcttcagagaacattgctggtcaggatattatttgcacagatgagcatggccttgtactttatgctgaaccatctgatttaaatgcatgtgaagatgaacaagcaacacctcttgctatcagctacggtggttcatctacatttgatgaaaaactcaatgctgttttaagtcaaccatatgatcaaaacgaatacgaagagttgtggagaaaagcgactgaccggaagcctgtgagcagacaaagacacttgcgaagtgcatcaaagcgctatgttacagaggcaatcgggctgtcatatctcgattattaccctgatctagccgtacaaataaagtcatctgatcgtgataagagactgagcctactacgaaggttcttcttctggttggagtggtttgaaaacaaatcgtccataatatgttggtttagtggtttgcctgcttcatggtgctgtgtaagggaggtcaggagaacttgtgccatgagggagcctacatgccctggatctccaaacctctag

SEQ ID NO: 17015 - DNA, 378 bp, Zea mays
  Peptide Sequence Number=SeqID_58794
atgagaaggctcacactggattttctagacagtcacaaccctttggtcccaattacggtcctggctgtcgtagagcagacaagcagcaagagcgaatcaaagtttctgtacttctatggatttcaaagatccaaggaacttgaggctacttggcgccggaatgggtttctagcctcccgatcacagcgggttgatgtctacagctttggagtggtgctacaggagctgcagttggagggagcccgtgtctcggacatggaagataacgagggtgaggaagtggagatggtccttggaaggatggttaacgataatctgcagttggatggcagcactgagcagtcatggatccctgacttcgttgacacgctaggctga

SEQ ID NO: 17016 - DNA, 462 bp, Zea mays
  Peptide Sequence Number=SeqID_58795
atgggaaaaaggaatgagaaaaagaaaaagaaaagggttttcctgcttgctgggccgggggggattttggcccacccgggcgcgcgcgagggcgtggcaggcggcctagatggcccaaaagcgagggagacggcgggggacagcaccgtggcgcgggcccacacgtcagtgagggaaggaggcttaacggtgcggggcagcgacggagggggggaggtcgaccggagctcgaccaccggtgaaatcccgcggcggttctccgccgtgggtccggttctgtggtgggggagcggtggcgaggcacgggcgggggcaggggatcacggggttggggtcaatttgaccggcgggggcctagggtggtcggtccacgacgcggtggcgggtgctcgcggcggtgaggtcgctggtgaggcagccgagcacaaaagaaggtggggagaggtgccttgcgaacgttag

SEQ ID NO: 17017 - DNA, 366 bp, Zea mays
  Peptide Sequence Number=SeqID_58796
atggaattggaccaagatcaaactaagctagagcaatatagcaaagaaccattgctgtgttggaaagatggtgaccactttgacatattgagctggtggaaggcacatggaacaaaagacatgaccaagaaaagagaaaaaggatggaagaaagaatggctaagtaagccaaaccaacgcagtctgtggtgcaccgcactgttcggtgctccagactggcccgacgatgaactggccgctctcaaaattggcggggcgatgtggctaaaaatcatcggactgtccggtgagtcttcagcgcctgcgcccaagtacatcggcgacgaactcatcgctctcgggaaaaggagaaagcgccgcaactaa

SEQ ID NO: 17018 - DNA, 1104 bp, Zea mays
  Peptide Sequence Number=SeqID_58797
atggaaagggaaatgtgcccttgggccatttctataaatgttttggtgattagatgcccaacacatggttttaagttaatatgtgctaagtggttgagaagtgcaaaatcaagaatcaaggaacatagccaagaaaagtggaaaagaattggagaagttttagctgagttcagccaaaccagcatcagcctgtggtacaccaaactgtccggtgcccaggctggcccagtgacgaactcgtcgctctcgggaaaaagcgaaggcgccgcggctaaaaatcaccaaactgtccggtgtgcaccggactgtccgggcgagaggctccaatttgtggagattcctcgcaaacgggaaaagactgcaaaggaagaaatccgtgttcttcctccccaacctgctgtccccgcccacggtcgcagccgcgagccgaccgacgctcgtcgacgcgggtacgagatgtaccattggaatgttcgaaggatgtccaaagatgttggcatcttaaagcttcggacgcggagcgttctgaggatgcacaagcaaatgaacaataaaaagataacgggcggtgctacaggatcctacaagagcgatccacaaggcagtgaggaagctcctgacaccgaagttgtgtacaggtcgtcaagcggtgctcctatgtcacaagtcgaggttaaaacgaaggttgactcaaaagagaggaaggggtggtctctaatagagcctgatgaagtgaaagttttgaagaggattggatatatcgatagcaaagatttgaataagtttgctagtgatgaaacaacctcgaagctgaaggatgatgggattgttgtgatgagtttctttcgtgctagcctttgcttgtctaagcattggatggttgttgaagtgttgaggaaatatgtggttttcatgcatcaactaacaccaaatatgatagtggttatgaagaaaagggatgagctaaaggatatagtaattaaaccattaagaataagctttgatttcaagagacctatttgcaacatgagcaaggctgccaaaacagcttacgttgcatttaataatgtggtggacaagattggcaccagggacttagtgtaa

SEQ ID NO: 17019 - DNA, 126 bp, Zea mays
  Peptide Sequence Number=SeqID_58798
atggcgccgccgcatcacggcggaagagaccctagaagacttaagaatcaacccgccgtcccatgctacagccctctgagtctcggggatctttttagtttagcccctggactttcctgtaattga

SEQ ID NO: 17020 - DNA, 276 bp, Zea mays
  Peptide Sequence Number=SeqID_58799
atggagacaagggagctgggggaagggccgcgacgctggagctggaggaacagagggcacggcggccatggcagggagctcggggagaaactcggccgggcgccagagctggaggccgagcagggcgcagacgcgctcgctaggaggagagagctccgcgagctgagggagagagagtgggaggtcgttgtagggaaaagatataggtaccattgtgcaagagtggacgagggagaggaagactgcaatgccaaaggttgcaatggtgggggatag

SEQ ID NO: 17021 - DNA, 297 bp, Zea mays
  Peptide Sequence Number=SeqID_58800
atgaccgacgtagaacgctcgggggctcccttcgtgcccaggctgtggccaggtgacaaacggagcccaccatgcctacagaggagactgagacaaaatgttcgcaaccgtgctacgggcggtgccccacgcccagtcaatgttcccacgcagaccaacgacgcggactccctcgcgagggatctatcgcacgttggctttaggcccgaagcatcgacaccagcgcacgttgctccagcctctattcccctagatggcccatatacaatgaacacctacatcagcctgtacgagtag

SEQ ID NO: 17022 - DNA, 531 bp, Zea mays
  Peptide Sequence Number=SeqID_58801
atgacgggcactatgtcaacctctacggtatggataatcccatgccaaggggctcaggtcgacgtgacaatccggttcagaagtcatgagctcatgccccttaacttcggttatggcatgactctcctcccacccggatatcccaccaacatcgtctaccatttctaccagctggggagagcacaatcacacttgcttccctggccaatagtaggatacctgaacacaatgatctggttcaggagagcgagaccaagcctgctccctaggtcggaggacgtacatccggatttccgcccccgtacctcctactgcaggagactgagacaaaatgttcgcaaccgtgctacgggcggtgccccacgcccagtcaatgttcccaggcagaccaacgacgcggactccctcgcgagggatctatcgcacgttggctttaggcccgaagcatcgacaccagcgcacgttgctccagcctctattcccctagatggcccatatacaatgaacacctacatcagcctgtacgagtag

SEQ ID NO: 17023 - DNA, 423 bp, Zea mays
  Peptide Sequence Number=SeqID_58802
atggctaaaaattttggcagcaaaacagtgcaaatagcaatgaatgttgtggtaacttcacacctactcgtctgtttatatagtactgcagcatttgagaacaagtccccaacagacctattgtcactatgcgcggaattaaaggacgaggtcgtggccacatgcgggagggtggtgccactacaagaggaggtgcgactgctgaatgagagagtggcgctgctggatcaggaggcgatgaagtcgctgagggagagggtggtcccgctggaggaggaggtgcgacgactgaaggaaagtcttctagcggtggccggtgaacgagatgagtctcggcgccaagccatcgatgcctttctccgtgctgactcccttgcgagggatctggagaccgagcgatctgcccaaagcctaagggcctag

SEQ ID NO: 17024 - DNA, 459 bp, Zea mays
  Peptide Sequence Number=SeqID_58803
atgggcaaaaacaacaaacgcaagcgcgagccgactccttcgtcagaggactttggcgactcagaatactcagaggaggagttctcctctaagtccgagggatctccggctcccgtctctcccccagcgtcgtccgatgactcggacgactctcaggggattgccgcggaggtctggacttacatccgggccgtcgagcgctccgggctcgagggctcggatgagtcggagtactcctcggacgaggatgactcggacgacggcggcgaggacgaggacgacgacggcgacgacggtgacgacgacgacgatggcgacggtgacagcggcggcggcggcaggggcagcaacagcggcagcggcggcggcaacggcggcagcaggagcggcaacggcggcagcagcaggggcagcggcgacggcggcagcagcaagggcagcaacaaggccagtggctaa

SEQ ID NO: 17025 - DNA, 522 bp, Zea mays
  Peptide Sequence Number=SeqID_58804
atggctgcttcggttgcccgtgccttctttgagggcgttgttcgtctacacgacttccccaccttcatcgtcagcgctcatgatccaatcttcaccagtcgcatggcagctcaaatggaggcggtcgatgccctcacgtgtgactacgatggcttcctcgcggagggggcgtcgggctcgaggaggtgtcgggcgtgcctgccgaaggcgcaggtgcacccatcgccagggcaggaggggccaggcaggagcgggtgcctaggcaggggcgctagaggtgtggccgatggtgttgcctttggagccatcgtggccttcgccacgccacttgttgcgcctaccagaggggttgggggcgctgacgccagaaggagggggcgacaattgatgggtcaggttggtgtccatgtcctcatcaacggtagcctgagcagccttgacgacggcttgttcggcctaggcgcgttgcgtctggagggcagctacgctgaggttggccatggagcagattggatctgctag

SEQ ID NO: 17026 - DNA, 1631 bp, Zea mays
  Peptide Sequence Number=SeqID_58805
atggcatgcgccgggaccaggctgcggtccgggaccagggctggagtaagcgaaatacccggggtgcattcaagtccgctgtcaggccctggcgccgtcgcaggctccgctccgctgggcaccgccggccgcacgctcccctccttgtctcggctcctcctgtcctactcctatactacgcccgttccgtccgattctgatatggtctcgtgcatgcagcgagcgatggtccccggagcaggcgagctcagcacggggacgtcaaatcgaacggggcttccgctggtagcctggtactactactgtgcggcgcacggacgcgcgagcgcgggcatcgggtgcgcgccgtcggtgggaactgggaagccgaccgccggcagggcgcaggcgcgccgccgagcaggggcggctctgtcgagcaggggcgactccgccgagcaggggcgcagaggcggctctggtgaccgtcgcgctcgcgcaaggacgcagggcgcagccgtcaggggctacttcggtcgcgccgtcgcggtcgcgctggagctgggggcctcctggccgcctgggaggctgagacggcggctggacggggacgggacacggccacacgggacgggagcaagaggactcggcattttagggtttctgggaaatgggccgcgccttaggcccatccgccgtggacaagtgcgccgtcggcctgccgctgccgaggccgtggaggcagccatttcgggccttttcgtgcctgttaacgggccatttcgggtctgcttaaacgggtcgggctcgtgcccgcccgtgggcctcgacatcggcccaagcacggcccgatacatcgggccggggcggcccggcccggcccgaaatgatttcgtgccgtgccgtgcttgggccgtgctttttttcgtgcttcgtgtcagtccattaagcccggcccaaatcacgaagacgaagctctggtacatggcgagcagcgcggaggagcgcttcctgaggcagctgagcgcgagcaacggcggcgacgaaggggtctgcggcggccagcagctgggccacaaggagtactgcgcggagaggaggggctcccggcggtggtccaggaagcgggccgccgccgcgaggggctactgcggcgggtacgacgactacgacgtgaagcagcaggcggaggccgcctctgccgccgcgaggaagcgggtgatagtggtggtggacgacacctcgggctccaagcacgccatgatgtgggcgctcacccacgtcgccagcaagggggacttcctgacgctgctccacgtcctgctgccgcactccgcctccggcggcggctgtagcaggggcgaggaggcctcctccctcgccaactcgctcggcacgctctgcaaggcgtccaggccagaggtggaggttgaagccctggtgatccaaggccccaagctgggcaccgtgctcagccaggtgaagaagctggaggcctccgtgctggtgctcggccagggcaggccgtctccctgctaccgctggctaagctgtttcttgcggagcagcagcgaggagttcgtggagcagtgcatcgaccaggcggagtgcctgacgctggcggtgaggaagcagagcaaggccgtcggcgg

SEQ ID NO: 17027 - DNA, 297 bp, Zea mays
  Peptide Sequence Number=SeqID_58806
atggcttccgccccgtggcgcgcttgtcggggttggaccggcggtgtcccgggctttctggaacggcagcggggattggctggcctcaccgggggagcagcccggctttctgctgcgcattcaagaaaaaaggacctctggccctttgccgcctgtgtcgctcgccctcgccctcgcctccaccccatcgctgatcggccgccgggaagaagatgcagcagctggcggagcggcagatgggagctgcccatggatcgcatcgatcggcggcaaccgagtcggaggatcatggtgtga

SEQ ID NO: 17028 - DNA, 501 bp, Zea mays
  Peptide Sequence Number=SeqID_58807
atgaggtgtggtcgatgggaatacaggatcggggtaatgcgacgatccggaggaagaacctggacggggaaccggccagagacggtgtcggttggtgttgttgccatcgggacgggaggacggacacgtgcccgcgacggccggcaggccgactggctgcgtcatgttggacctgggccgtcatggtcgtgggcaactgaaaatgaagacagcgctgcctgcatcgctccgactgttgtgccgctcgacagagtgaggctgacagcagccaagtccggcctcgggcgccataggaagctccgcctcgcccgaccccagggctcggactcgggctcggccccggaagacaacgaactccgcctcgcccgacccccgggctcggactcgggctcggccccggaagacgacgaactccgcttcgcccgaccccagggctcggactcgggctcggactcgggctcggccccggaagacgacgaactccgcctcgcccgaccctag

SEQ ID NO: 17029 - DNA, 1233 bp, Zea mays
  Peptide Sequence Number=SeqID_58808
atgcctccctccccatcctccgccgcgggctccgcctcgccgtccggctccgcgtccgcctcggcctccgacccaaccccgtcctggtgggagtccgtgtcgcaggcgcgctcccgcatcctggcgctctcctccatcctgccggccccggcctcccacgacgtcgcggcgctggccgacgccgaccgaccggcgcgcgcgctcctccgctcgcccgctgcctacgcggcgctctctgacgcactgcgggcgggtggcggcgccgatgaccccgcctgccactggctctacgacacgctcctctccgccgaccccgacctccgcctcgccgcgctcgcgttcctgcccctgctggcggcgctctacctccgccacctcccgcccgagctccgctcctcgctttcgggcttcgaggccgtcctcctcgccgtctactcctccgaagccaagaatcgtcaggggaagccggtcctcgtccagatgcccgacctctctgtcccatccctgtaccacacgccagcgatggcgtccagcctcagctccaagtcccctcggtggtcgcagcccccgcagtccccgccaatcccccctccgcaggcgactcccgtggtgggggttctctcgccgccgctggagccacaggccgcgatgcttgctgcgtcgaaggtggatgcctgcaatgctgctgctgcgtgggcggggcagtactgcaaatgccgttttgagctggatgagaaggaactggaagaagaggaagctgactctttggggtctgtctcgccagtgtcctcggaggctgagaatgggaaggagctggtggacgaattggccaggctgcgtatcaatggagacaacaattgcagcgaggaggacatggaggcaagggtgccacttccctgggacctgctccagccagtgatgagggttcttggccactgcttgcttgcaccgctgaacctggccgaggtgcatgatgctgcagcagaagcagtgagggttgtttatgctcgtgcgtgccacgaccttgtgccacaggcaatcttagcagcccgaagcttgatcgagcttgacaagagtacacgaaaggttgcaaaggcagcggcagtggtggcttctgggcaaattgtcacagttggcactgctggaagcaacacatcaagctctaggccaagttcgaagccaaacacaccaagcaaacagcggaagcctgatacactactcatgtccaaatga

SEQ ID NO: 17030 - DNA, 234 bp, Zea mays
  Peptide Sequence Number=SeqID_58809
atggcggacggcggcgcgatgggcgagggcgtgggcggacggcgcggcgcgatggcggacggcggcgcgatggcggacggcggcgcgatggcggacggcggcgcgtgggcgagggcgtgggcgacggcgcgtgggaaggacggcggcgggcgtgaaaatgagagtgaaagagtctgtgataaaaatttgaaaaagtttggagaaagctgtaacgcattatgtgtagaaacctaa

SEQ ID NO: 17031 - DNA, 351 bp, Zea mays
  Peptide Sequence Number=SeqID_58810
atggcccagcaacagctccgattgcttattcgtcaccttgcctcgcacctgcaagagatacagtctcgcatgcgttctctgcctgcacacagtgcctcctatcgtggtgccccaaccatcctgtgcgtgtccgtggacggcgcagcgacgccaccaacgcctgagcagacgtcgctgcctcagcacgagcaggccgacgtggccacatggcgaatgacaaggaatacgaggaggtggtcgacattgaatcgctgcactgttgatgatgaagatatagggacagacatagcagagaggattcgtccatggaagctcttccgtaaagacgcgttatggagctggatgccctga

SEQ ID NO: 17032 - DNA, 702 bp, Zea mays
  Peptide Sequence Number=SeqID_58811
atgcagagccggagtctggagaggggcgccgcacggaagggggccgatgacgtagatccgacagagactacggcgacggccgacggtgaggcgcggcgagctataacaaaacagtcaggcagcgagctacgtatggagcagccgtggaaccagaaccagcagagggaagccggcggcttcggcttcggcgtcgccatgggcgagagcagctgccacgccgccgccgaccttggccagggaggcgcaggcctgtgcgaggtcgacggggcgctcctcctcatggagctgatgcaggagcaggacccgccctcctccgacttgcttcttctagatggcgatggggatggcgatcgccggctgagccatgtcatccggtccctcgaggcagagatcggcggcggtgaggcggtagcgatggtcgccgacgacgatggcggtgtgagcatggacaggatcgaggatgcgctgtcgtcggacggcaccgatggctacgactacgaaggcgcatgcgcgtcgtcgtcgtcgttcgggtattggccgccgtcgtccttgttgttagccggtgggtatgatgacgcggagggttggtgcgtctacgctaatgggtatgagggtcctggcggtcatgttgtagggtacgatgactactgctgttgcgcagaaggttctgctgagctcatgtatctcccgctgtgggaatga

SEQ ID NO: 17033 - DNA, 285 bp, Zea mays
  Peptide Sequence Number=SeqID_58812
atgacaggagacaagacgatagagtgggtgctccctgcgtttgccgtactcacgctcggtgactcctcgtcaccgcagccacgggttagtccgcctgcatgtggggcgctcgtaaccgctgcttctcaggacaaaaggggaagcggggaggaggacaaaccgatagctgatcaggtgggcttcggcaacgagacgctgagcgccgggctggatcggccccaccgcgatgatttgacatcggtcgctgtctccgcctcaccatcggccatgatggtcagtggatga

SEQ ID NO: 17034 - DNA, 636 bp, Zea mays
  Peptide Sequence Number=SeqID_58813
atggagtactcagaccttgacaaggatctgaacaatgaggctgctcagcctgaacaagaaatttgtagtacatggatatcaaaagttcataactccagcagactgtcagcacaatatttatctgcttttgccactgaattagagaaacatagtcttaaaaagttaagagacgaatatccacacaatgctgcttatagtagtccagggtaccaggatggcggtctagcgttggccgcgcccgcaacatggcatcatccatccgcacccaccatctacgtgcttcacctcgtcgagctcctcgtcttcgaggtcgccccggtgctgacctccacgtctccccgatcagcaccaactgcaccatcgagatgttgtcgtgcagggtacgtggcttggttgtctgcctccccgtttcgtgtccacatctctgatccccacgctcggcgctttgtcttacggttcgagcagaaccttcactcacctgagctcttgataatttttagttcgagggatcagaggcacttgagcagcagaatggactcttctcagggcacctctaggtcttattctacacttattgcccgcagaaagctgaattctctaacctatgggatactaacaaaactacagctcccatga

SEQ ID NO: 17035 - DNA, 447 bp, Zea mays
  Peptide Sequence Number=SeqID_58814
atggcggcagcagcggcagcagcatccaaggcatgcgcgcccggcatgcgcgacgagcaggtcaagggcttgctcctcgggctcccgccgaatgcccgagcggaggatatcgagtacgtgctgggcgacgtgcaacgcacgctgtcccgtctcgactccaagcgcatcgttctgcaggacgagatagccgcggcgtcccgtggcaagcgccgtgcgtcacggagggcgccggcggccgctcctgttccggccgcggcaaacgggtccggcgcgttgtacaccaggaacggcgccggcgctgtccggaggaggctgcggacggctgccggtgacgtcaagaaggagaagaagcggctggaggccgcttggggcgacctggaggaggcgcttgtggacgccagggagaggcttgccctgcagcctggacctggagaacgaaccgcatag

SEQ ID NO: 17036 - DNA, 1023 bp, Zea mays
  Peptide Sequence Number=SeqID_58815
atggcgcctcccgtcgatgtggccggtccgcgccctaggttgggcgatgtggaggctcctccgaagtcgaggtcgagtctgtcttccgtggccgaggtcgagtccgagcccctgggtcgggtgaggcggagaccgtcggctgaggccagggcggagtccgagccctggggtcgggcgaagcggagttcgtcgtcttccggggctgagcccaagtccgagccctgggtcgggcggagcaaacccgagtccgagccctgggtcgggcggagcggagttcgccgtcttccggggcttagccgaagtccgagccctgggtcgggcgaagcggagcttcctatggtgcctgcggccaggcctgactgcctgtcagccttactctgtcaagtgacactgcagtcggagcggcgcaggcggcgctatctttctgtcaggccggccacctttgcattaaatgctcctgcgatttggtcagtcggcgcggcgatttggtcagggttgcttcttggcgaagacagggcctcgggcgagccggaagtatattcgtcgctggaggagggcctcgggcgagacggagatcctccggggccttcgcagctttatgctgatgggggttaccagctgagaattaggagacttgaggggagcgggcaggggctcggcatcgggcgaggaatgaggcacggtcaggcagggcccagctccagcgagcggcgtaggtcacaggcgcgggatggtgggagagaggaaaccgagaaggcgccgagggaggaggtggcctgcggcttcatggccataaaaactccaataatggcgtcggtttccattgatgaggagaggaaatgggggagggagtggaagaggaggaaccggccttttccggctcgaagggagtcgaacgggcgcggcctgggtgcatgttgggctcggtcggagaagcggcgcaggagcgcgcccatgtgctcaggaggagatgctgacaacatggagaactttgaggagtttaaggactacgacgagttctag

SEQ ID NO: 17037 - DNA, 672 bp, Zea mays
  Peptide Sequence Number=SeqID_58816
atggcctcccgccaggcgctccacatcttcacgccctcccggcgggcgatgcacatcctcacgtcgtcccgcggcatcgcctcgaccccgcacctctcgtccttcggctggtttgataagatcaagtccaccatcactggcaagaagcccgaggaggcctccgaggcatcctccttcaccctcatccagttcgcagacacgatggagaaagcgaggaagctggggacgttcaagaacttcgttgccgggcgggccagcgaggccaccgtcgtgaacgtcttcgagaagcactccgctgtgctgcgctacctcggtgccatcgaccccaccggcgagtgctcgctatttgggggtggggatagattaattgtctgcaccgtcatttttatacagaacctccgaaacactgacaaaattaacgcgaccaagcactgcaactgcacaattgctgacgtggagcacattctggccaagtacacatgggctaaagaggctcagaagaagattgcaaagctcaaggaagaagggaagccattaccgaagtcatttaacgagattattattgaaattttatatcacaatttggaggacaagttcatgcttatggccaggctcgttggctcggtgagccagctcatgagccgaggtgagccgacttctcaggatctctag

SEQ ID NO: 17038 - DNA, 423 bp, Zea mays
  Peptide Sequence Number=SeqID_58817
atggagaataaagctattttaactacctattccatatatgacaatatatttgagaatctaaatctgttggcaaccattcccttgtgcaaattattgggtttgatgtctcagttcctagctctgcatctcaaggcaacaacattttcaagaccaggattgaaggtgcaaacaacgttgatgcagatgtgcaaggatcgttttgagcatttattcaagattgattctctgaaagaggttgatccaacattgggcagtcaccatatgtccaaggtccttacagatgaatgtgcaaatggatcatctcaaacgataacatgttcaagtggcaaggtgctagagaaggtagtagcccttaagtcatccaaagttgcctgtgatgaaaatgctatagtgaagattatggcaaatacgttactaatataa

SEQ ID NO: 17039 - DNA, 483 bp, Zea mays
  Peptide Sequence Number=SeqID_58818
atgggctgcacgacctcccacgacgctgtcgccactgcgcatctgcctacttccgctcgctcgccgccgtcggacacgctgcggcgcttcgtggcatccgcgcccgccacgcccgagtcctcgccggtgctcacgctcccgccttcccctgccaagccggtcgctgccgcgtccgccagcctcccgccgtcgccgtcgtccaccgtctcgccgctctcgcactccctctccgacgacgacctccatctccatgaccttgatgacaccccgtctccgtcaacgtccacgaggcactaccaccacttcatgagaagatcgcccaccgtgcccaccgtggtgtacgaggacgtcgctgccgccggtgggctccctcatcgttggagggaaagaggggagctctctggagtggtactccaccgtcaaatagtcactggctccagcggccatggtcgtaggcggctacagcggcatggacgacagtga

SEQ ID NO: 17040 - DNA, 354 bp, Zea mays
  Peptide Sequence Number=SeqID_58819
atgggaactgagcgcgcggcgctgggtgaggacgctcggtccgagcaggagccttggttaggtgctgccggatggacgccatgggagggagctccgcgagctggagggagcagaggaggcgccgagcttgaggacggcggtgacgagatccgagcgtggcgagaagggagatggagcagggagggaaaagctctgcgcgaaggggaactcgacagcagggcacgcggcgaggaggctccagggagcttggggaagaccacggcgcgctgggaaatgggaggaggaaagaggagcggccgaggtggaagaaaggcagggcgcctgcgactggaagccgagaacgaaggagcttaa

SEQ ID NO: 17041 - DNA, 273 bp, Zea mays
  Peptide Sequence Number=SeqID_58820
atggtggtgactggggagggagagcgagaacgagtgggccgccgtctggctcagcgctcccgcttttattttggaaggaatggaggacctgaggagcagccgagcaggtggagtggaggtctgcagatggccttggcagtaggcaacggaatgcgccgagatattgggcccctttctttcatggcccccagcggtcgcctccgctgcatggccctagggctggccctgattacatataaaggacttgtcgagaacctagaggttatctgctaa

SEQ ID NO: 17042 - DNA, 972 bp, Zea mays
  Peptide Sequence Number=SeqID_58821
atggccgccggggacgcaggccgcgcgccgacggcagcggccgcgcaatcgctggtggagtccttctgcggcgtgacctccgcgaccccccaggaggcggccttctatctcgagagccacaactgggccctcgaatccgccgttcgctcctactacgactccgtggacggtgaagccgacgccgtcgcggccgatccagtgcccccaccaccagctgcaccagccggaggcggggaggataccgaggatgaggattgcgtggtcggcggtggcggtggcggcgacgacgacgaggatgatgaggactacgtcgatggcgacggcagcgatgatgaggacgctgcgctcgcggctgaggccgcggaggaagaggagaggaggaggcctttcaagaggctgaagagaacccacgacgcgcggggtgggagcggtagcagtgccaaggcgcgggggaatgtgaggacgctcgccgatctcgatagtggcaagggaaccgcgggttccgacgagaactccgaagacgatgatgaatggacaccaccgcccgagtacgagacgagcatcaaggattctgactgcccaactgagcttgtgccggctgatgagaaatctatagtgaatgagccagtcaagcgtgctgctccttttgaaggggaacgaagaaacctcatggaaccttctgataataatacttccaatgctgctgctgctgctgctgcttccagtagtgcaactgcttctcggacaatcacagtggacgattctttgccatcaacctccctccaaatcaggttcgcagacggcagtcgcttggttgcccgtttcaacacaagccacaggattagtgacgtgcgggcatttatcgacgcgacaaggccaggagccagtgattacacgctgcaggccgggttccccccaaagccgcttgaagacacggccaagaccatcgaggaagccggcgtggccaactcg

SEQ ID NO: 17043 - DNA, 1992 bp, Zea mays
  Peptide Sequence Number=SeqID_58822
atgggctccctgtcaaaactttctagcctttatatgcaaaacaatcagctgtcgggcacagttgatgtcatcagcaacataagccttgcgacactagttgcaggaaactcatttgtcaatatgcctgcctccccgccacaagctctgacgccacctccgaatccacgtggccggccagacgatcgtcggggaccaaccagcgctccaactgtcccggagactcccattgacccggacgacaagaagatgcaaacgggacctcttgtagggatagctgttggctcaatagctgctgcctcgtgcgttcttttcgcgctggtgttgtgcctccacaacgcacggaaaaaacccgatgatgggagcagtgaagcgaaagcgtctagcagggaagtcatggacagtagccatgacaacgctgctgtggcaacttcagacctccaactgatccagcctgctggaaagatgactccggacgacagagcgcatggtccaaacggttgtaccgccaaaaggccaaagcagcaggttactgtgacgacagtgagttcctacacagttgctgctctccaagtcgctacgaacagcttctgccaagactctctcctaggcgagggctcgcttgggcgtgtttacaaggctgtttttcctaacgggaaggtacttgctgtgaagaagatagacagcgcttcgctgtctctgtacgaagaagacaactttctcgcggttgtgtcgaacgtgtcccggctcaggcatccaaacatcgtgccccttgcaggctactgcgtggagcacgggcagaggctccttgcgtacgagtacgtcgggaacggaacgctgcatgacatgctgcacttctctgacgacgacgggatgacgatgccgggcaagactactaggctcgcatggaacacccgcgcgaggatagcgctaggcaccgcgcgcgctctagagtacctgcatgaggtgtgcctgcccccggtggtgcacagggccttcaagtcatcaaacatcctgctcgacgacgagtacagcccgcgtctgtccgactgtgggctcgctgctctgtcgccgaaccctgagactgagagggaggctttcgctggagtggttggctccttcggatacagcgcccctgagttcgccatgtcagggacgtacactgccaagagtgacgtgtacagtttcggggtagtgatgctggagctgttgaccggccgcaagccgctagacagctccagggagaggtcggaacagtctcttgtgagatgggcgaccccgcagctccacgacatcgatctgctcgccaagatggtcgatcctgcactggatgggctgtaccctgccaagtccctctcccgtttcgccgacataatcgccatctgcgtccagtcggagccggagttccggccgccgatgtccgaagtcgtgcagcagctggtgcgcctgatgcagcgggcgagcatcgtgaggcgacaatcggacgaccagctgggctactcgtacagggttcccgagcgcgacggcggcggcacgttcttcgaccatacacgccagccgcagacggtgacctctgcagccttgctttgcggcgagaggcaaggcagttttctccggtttgcgatgcggcaattcagcgggcgccttgtggcttatcgcatggaacggaacggattacggaacacatggagggagggagggagggaggcaggtgttgaacgtggggtagtatcatgcgggatccgtcgatgccgacggatttggaagacgcttggctggcgtggcgtcgtcaccatctctgctggctgcccagtgctgtgtaccgtccgggtcatttcgactggaaaaatgctcgtttactgcagctgcagttctgacccagcgaatggattgggttggattggaatgacgctagcggacggacgagcagttggaagaacaacagtcgacagattattgatggtcgtcacgtcacccctactagctagggaatag

SEQ ID NO: 17044 - DNA, 225 bp, Zea mays
  Peptide Sequence Number=SeqID_58823
atgtgcgacgtgactcgcgacggcacatacctggcggtggcggtgtggtgcgtggaggcgacgacgatgaggtccacgtcgtccgaggacgcgacggcgccggggagcttctctgtgtcggccggacactcgccgctgctcgccctgtcgcacgtcggtgatggggtggcctactactgcgccttggatcgccatgtgctcggatcgacgatggagattgagtag

SEQ ID NO: 17045 - DNA, 282 bp, Zea mays
  Peptide Sequence Number=SeqID_58824
atgggtcttgtggtgatgtcagtggaaaatacagcctgcaagaggtaccacttggaattggaacttagcagggtaagattgccataccatgcccgccctctgtgcgggagctcagcaggaggttggggatcccgcagagtacaccgtccaacggccaaagtcctaggggcacaaatttgcaatcagcccgctgaaatccaagcactgagaatcacaaaaactattgggggcagaggtccgcttactcaaggaatgaggaaagtgcggcaggaacggcaataa

SEQ ID NO: 17046 - DNA, 330 bp, Zea mays
  Peptide Sequence Number=SeqID_58825
atggctaccgcgccgcgcgctgctcaccgccaggtagggcctaggggtcagctgcttcttctagacgagtgcgttgggctcctccgggtcttccgtcgcccacctccgcatcccacgccgatcgtttctctccctcggactttctcctgtgactacaaagctaggccgcgaccccctccttcctatcgcatgaatttcgtgctgcccattctctgctgccatgtccaccgagagtgggagatagaagatccgctgacaacgccgttccccaccctcgccgtcggtcgcgatctgctgggtggtcagggtcaatcaagttgggagtgctga

SEQ ID NO: 17047 - DNA, 330 bp, Zea mays
  Peptide Sequence Number=SeqID_58826
atggctaccgcgccgcgcgctgctcaccgccaggtggggcctaggggtcagctgcttcttctagacgagtgcgttgggctcctccgggtcttccgtcgcccacctccgcatcccacgccgatcgtttctctccctcggactttctcctgtgactacaaagctaggccgcgaccccctccttcctattgcatgaatttcgtgctgcccattctctgctaccatgtccaccgagagcgggagatagaagatccgctgacaacgccgttccccaccctcgccgtcggtcgcgatctgctgggtggtcagggtcaatcaagttgggagtgctga

SEQ ID NO: 17048 - DNA, 996 bp, Zea mays
  Peptide Sequence Number=SeqID_58827
atgcagcccaagatcagcgcgttcttcgagcggcaggagacggacccagatccgattagtggcgacggtgaggggaacgggcagggaaacgtcggcgcggcgacggaggcgaagcggaaggccaatggctgcaggctcgatgggctcgtcagcaagaagaggaactacgcgcagctccatctggagctagggcagcctgatttcgtcctccacacgtgctccgtgtgcggcatgatgtacgcccgagggaacgacgaagacgaaaaggttcacagggcgtaccacaagagctactccgagggagtccctttcaaggttaagttaaccgatgagctgcagggttggaaaaaagagacagtgatagcgaggtccgagggcggtgatcgggttgttcttgcaactgacgagaactcttgtatgtcgaaaagtaaggtcagagaggtgatcacagtggtggagaaggagctgggatttggtgaagggaaactcctgcataagctttgcaaggtgtatctatacatatctgcacaaaggatcgtggggtgccttgtcactgaaccgataaaaacaggacatagagttatcccaagctccacggaaggaagccctaatgatttgccagttagtagtactgagcgaggaaaaaatggtcatacattagagttcggcagtattagtttcaagagggaaatcataaggcggcacagtcgttcggtcaagaacaaagaagagtgccaggaccctggtgccatactttgcgaaacggaagctgttcctgcgctttgtggatttcgagccatctgggtggcaccatcgtgcagaagaaaacgaattgcctcaaaactaatggacgttgcaaggaaaaccttctgcgaaggcaggactttggggatttcacagtttgctttctctcccccgacctcctctggcaaggggctagcatgccgttactgcaagaccagtgcattcttagtctacaaagacggaccggtgtaa

SEQ ID NO: 17049 - DNA, 345 bp, Zea mays
  Peptide Sequence Number=SeqID_58828
atgacgagcaaggctaagcatcaaaaatcttttgtaaaatgggtgatcaaggaaggtaatcaaattcaaggaagaacggcacagggaacggcggcactggagagctgggctctggacaccgagcaaggagctccacggcgcggcgctagaaacagtagagaaggcgcggcaggggagctcgcgactggccacagaaatccgagttcatcgctgctgagggagacagtgctggggaagaaaggagcagggagctccggagagaagataagcattggtgaagaaaaatccagcaacggtgtggcgaggataaggaaggaggagcgctcggcggaggagaaaggctga

SEQ ID NO: 17050 - DNA, 231 bp, Zea mays
  Peptide Sequence Number=SeqID_58829
atggagagtcatgatctctgggcagaaagggaatcacggcttgtgggtaaagtgcacaacctctgtagagtatttgaaactgatatatcagccgtgctcgcggtgacaatgagactgatggttcctggttttgactctggtaatggttgtccgcattgcaaccactgctcaggagaagatgaagccgtggaaggagacttccaggagttccaagactacgacgagttctag

SEQ ID NO: 17051 - DNA, 261 bp, Zea mays
  Peptide Sequence Number=SeqID_58830
atggcgaccaccgcgggcgggactctgggcgccgccgcgtctaaccgtgggaggaagaagattagcctaggtcgtggatctgtggccaacgatggggatttgatgatgggtgtagcgcctgtgtggatggtctgtgtcattgatcacgagatgggcggtctagatcggtgcgcacttacctctctgcgccatctaatccgtatcatagatctccaatcaacggtccctgttgcgtaccggtttagggctggcgggttttaa

SEQ ID NO: 17052 - DNA, 459 bp, Zea mays
  Peptide Sequence Number=SeqID_58831
atggcgatcaacgacatcgatgtgtcagcacaacgatttccattcgacgaagacaatggcatgatgactttcaagcaccatgctgacagtggccaccagaagggcgaggacaaggtcgagcaagggaggacggggttcgacgggctcgacggcactcacggccggagcgagcttgagaacagcgagcagggaggtcgacacggctggtgcctgaggagggagacaacagaggggaggagccagacgccatggcgaacgcctaagaccggatcggacccaaaatccgagcaacccggcgaaaccaaactcagctcgctgctggcgtctcgcggaggcaaaacggcccccaagggatgcgagcgcgttgaggcgacgaagtgcaagacagagataggagaggcaaggcgcttggacaaggacgccgaggcgaagagaggaaaacccgagcgtgaccaatga

SEQ ID NO: 17053 - DNA, 267 bp, Zea mays
  Peptide Sequence Number=SeqID_58832
atggcagttaggcaagggatccttgcattggagcttcctagaaactgtaacagtatagcagggcattttagcatgtaccaccataaggaaaaatcaaattggaaaagagatggctttgttcagccaaagacagctcggtctgggtgcaccggacagtgtccggtgcgccaggctggctcgagcggactggatgttctcgggacttcgacggcggtgtacggttataaatcaccggactgtccggtggtgcaccggactgtccggtga

SEQ ID NO: 17054 - DNA, 2094 bp, Zea mays
  Peptide Sequence Number=SeqID_58833
atggcgttggtgagaacgatatgcaggaggagcgagtgcaggaggcgaggatcccgacgagtcgacgagctgatgggtgatgagaaggcaaggtgcgctgcagcgggcgggttaggtcatcgacttactggtcagtcgatgactgaagaaacgagattggtcctttacgagcatgttataatgggagagaacggagttcagctgacactgacctccactttgaagagcacaggcaagccacggatcaatgcggacgggctgaataatggatcacatactaccaaagagaagcatgaacacggtggcactttccaaccatcaaaaggccagaagcagcagctgtgcacaacatgtgcaaaagggcatacttgtcaatcggtcatcaaccggacaagacaaatgcgagctctaatcgactcaaagaagccttaccaagcacactctgtattcaagcacttaatggatgaggggcacaagccttcattggtcacatacacaattctactgaccgccctgacgaaccagaggatgtttgagtcgattccatcactgcttgctgaagttgaactagctggagttaggccagactccatcttcttcaatgccttgataaatgcgtttgttgaggcgaagcggatgggcgaagcgataaacacattctggaaaatgaaacattctggctgccacccaactacaagcaccttcaacacactgataaaaggttatggcattgtaggcaaacccgaagaatcacagcgcgtcttcgacatgatgggcgttgaaggatcagtcaggcctaacctcacaacatacaacattcttgtgaaggcatggtgtgatcacagaaatcttgaggaggcctggggtgttgtgggcaaaatgcaagcaggtggttttgagcctgatattgtaacttacaataccatagccagtgcatatgccaataatgacgagacatggagagcagaagagctcattgtggagattcagactagagtgcgcaccagtgagcgaacatggggcataatcattggtggttattgccgggagggcaggttggaggaagcattacgatgcgtccagcaaatgaaggatgcaggaagtgttcctaacgtcgtcatcttcaacacactgctgaagggctttcttgatgcaaatgacatggctgctgtcaataagatcctgggtctgatggagaaatttggcatcaaacctgacatcgttacctacagtcaccagttgaacacattcagctcgctgggccacatggctaaatgcatgcatgtatttgacaaaatgatcgaagcaggaattgagccagatcctcaggtatacagcattctcgccaaaggatttgttcgtgctcagcagcctgagaaagcagaagaccttctgttgcaaatgagccatcttggtctctgcccaaatgtcgtcactttcaccactgtcattagcgggtggtgcagcgtggccgacatggagagtgccatgagagtctatgacaagatgtgcaagtcaggcgtctatcccaatctcaggacatttgagactctgatctggggctacagcgaacagaagcagccatggaaagctgaggaagtccttcagatgatgcgggagactggtgtcaagccgaagcaaagcacctactgtctcattgctgatgcatggaaggctgttggtttgactgagaacatcaacaactcaaatggttcccccaatggtccttatgcaatcgagaaattggatcattcaaatgacaattgcaacgtgcgaatatcagaagacaataataacaagctgcagttttttgatgaaagtaatgggcgtgcaatgaatggccgttcacgttccagttttcttcagataacaaatgcactaggcagcagtggtatagtttctgccaaggtcatgaaggctggagaatttccatctgaaagactgaaggctatcaaaaacacatcctttccacaaggatttcaattgttgcatctcgagttttgtaggaagcagcttcggaagaatggtggattctgtagtcagagcatcaactcattcaaaatgggtttctctagcagaggatgcatttattaa

SEQ ID NO: 17055 - DNA, 846 bp, Zea mays
  Peptide Sequence Number=SeqID_58834
atggactatatggtgtttgaggttgctgaattggatagagcaacaatgatttatcacactaacagcaaaatgaaagtttatttgttggttttaaactcaatcgttgtgaactctcttctaatcgctcacttcattggccgtgttgaaattttttttatggataatttacatgggtattgttcccaagaggcaaccatctttattgcgtgtattgaaaaaatgggtaccctcaaaacgcctaattctcagctggtaacccccatcagcgtaaagctgcaaaggcctgatggtctgacagaaggacagcgccgcctgcgccactccgactgcggtgccactcgacagagtgagtctgacaggcagtcaggccttgccaaaggcgccacggcgaactccgctccgcccgaccccagggctcggactcgggctaagacccggaagacggcgaactccgctccgcccgaccccagggctcggactcgggctaagacccggaagacggcgaactccgctccgcccgaccccagggctcggactcgggctaagacccggaagacggcgaactccgctccgcccgacccagggctcggactcgggctaagacccggaagacggcgaactctgctccgcccgaccccagggctcggactcgggctaagacccggagacgacgaaactccgcctcgcccgaccccatggctcggactcgggcttagacccggaagacgacgaatactccgcctcgcccgaccccagggctcgtactccgccctggctctcggccgaacgacctccgccttcgcccgaccccattgctcggaactcggcctcggtaaacagaagtaa

SEQ ID NO: 17056 - DNA, 144 bp, Zea mays
  Peptide Sequence Number=SeqID_58835
atgactggtcacccgattgctctggtccatcagtcaagacccaaaaaatcacccttcaccgctcctggtcgatcaacacgagcctatctggattctatcacttgtgtcaaagctactcgcccgaggggttgcatagggttgtga

SEQ ID NO: 17057 - DNA, 486 bp, Zea mays
  Peptide Sequence Number=SeqID_58836
atggttggcaaagatgttgacatggttaggccccctagaacaaccattcatttttggagtcttgacttcatcgctagcagcaaggaaacactagacaaggccccgaaagccctggttcccctggcgagcaattcacttgacttcatcgagagccttggccacctccgccttggttccctaagaggtggtgaccaacggcggcgcgcgccgcaacccgcttttgtcgaggtcgtggggactgtaggccctgtccgaggcccattctgtggccttctcccatcaagtgggatcaaccacgagtgggcccaggagtgcctcatggtcaccacgacagggggatcctctgcgcacgtggagaacctagatggggccctcgctagtgtcgcagtatacgctgcgacatctgccccgtctcgattcgacctgccatcccaggaactgctagctggggcgaggccccaacctaggtcggtcgaagctccatag

SEQ ID NO: 17058 - DNA, 1176 bp, Zea mays
  Peptide Sequence Number=SeqID_58837
atgccggagtgcaaacttggcttgaatgatagggttcttttggaggctcaaggcagagcaactaaaggcaaagcgatagacctcgatgatatcaaatttcatcagtgtgtacgtttggctagatttgagaatgatagaactatatcgttcatacctcctgatggatcttttgatctaatgacatacaggcttagcactcaggtaaaacctcttatctgggtcgaagcacagattgagaaacattctagaagccgtatagaactcatggtgaaggcaaggagtcagtttaaagaaagaagcacagcaacgaatgttgaaattgaagtgcctgttccttcagatgccacaaacccaaatataagaacttcaatggggtctgctgcatatgctcctgagagagatgcaatggtttggaaaataaaatcattccctggtggcaaggaatacatgtgcagagcagaatttagtcttcctagcataacagcggaagaaggggccccagaaaagaaggcgccgatacgggtgaaatttgagataccatatttcaccgtatcaggtattcaggtccgttatctgaagataattgaaaagagtggttatcaggcactcccctggtcaaagaccttctctccagcactatcaatttcaatagcaaagaaactggatgaaggtgtttgccagagattcggttgtcgtcttgctaggttgctcgatgggcagtttgatcggcaaccctacctggtcgagttgctcgacaatgttgtttggcgggttgatcggcagccccgcctcgccgggtcgctcgacaatgttgttcggcgagcgggttggtcgacagtcccgccctaccgggttgctcgacgggcgggttggttggttagtggaccgtctttgggaggccttttgggccttcttcgggcactcggttctcaggtgttggactatactcaatggaccgacaaccctatttctcaaggtcccacgcctccaaaatctttgaaaccacttccaactcaaaactttgtgaatgagatcattaagctaaagaggatcacaattaaaaatgttggtactaaatatcaactagcggacatattcaccaagcctcttgatgaagctagatgttacaaacttagaattaacttgaacatccttgacttctcgaacatgagttga

SEQ ID NO: 17059 - DNA, 2400 bp, Zea mays
  Peptide Sequence Number=SeqID_58838
atgctcttggggttcatcgtctccgagcggggcatcgaggccaacccggagaagatcgcagccatcaccagcatggggcccatcaaggacttgaaagacgtacagagagtcacgggatgccttgcggctctgagccgcttcatctcgcgcctcggcgaaagaggcctgcctctgtaccgcctcttaaggaaggccgagtgcttcacttggacccctgaggccgaggaagccctcgggaacctgaaggcgctccttacaaacgcgcccatcttggtgccccctgctgccggagaagccctcttgatctacgtcgtcgtgaccactcaggtggttagcgccgcgattgtggttgagagacgagaagaggggcatgcattgcccgtccagaggccagtctacttcatcagcgaggtactgtccgagaccaagatccgctacccacaagttcagaagctgctttacgcggtgatcctgacgcggcggaagttgcgacactacttcgagtctcatccggtaactgtggtgtcatccttccccctcggggagatcatccagtgccgagaggcctcgggtagaattgcaaagtgggcggtggaaatcatgggcgaaatgatctcgttcgcccctcgaaaggccatcaagtcccaggtcttggcggacttcgtggctgaatgggtcgacacccagcccccaacagctccgatccaaccggaactctggaccatgttcttcgatgggtcgctgatgaagacaggagcaggcataggcctgctcttcatctcgcccctcggaaagcacctattctacgtgctacgcctccatttcccagcgtccaacaatgtggctgagtatgaggctctggtcaatggtttgcgcatcgccatcgagctaggggtccgacgcctcgacgctcgcggtgactcgcagctcatcatcgaccaagtcatgaagaactcccactgccgtgacccgaagatggaagcctactgcgatgaggttcggcgcctggaagacaagttctacgggctcgagctcaaccacatcgcccgacgctacaaggagactgcggacgagctggctaaaatagcctcggggcgaacaacggttccccaagacgtcttctcccgagacctgcatcaaccctccgtcaagaccgacgacacgcctgagcccgagaaggccttggtcgagcctgaggcaccctcggctcagtccgaggtaccctcgtctcagtccgaggtaccctcggctcggcccgaggcaccctcggcccaacccgaggcgccctcggctcagcccgaggcaccctcggttcggcccgaggtaccctcggcccccgagggtgaggcactgcgcatcgaggaggggcggagcggggtcacgcctaatcgaaactggcagaccccgtacctgcaatatctccaccgaggagagctacccctcgaccgagccgaagctcggcggttggcgcggcgtgccaattcgtttgtcttgctgggggacgggaaggaactctaccaccgtagcccctcatgcgtcctccagcgatgcatttccatcgctgaaggccaggagcttctacaagagatacactcgggggcttgcggccatcacgcagcacctcgagcccttgttggaaacgccttccgacaaggtttctactggccgacggcggtggctgacgccactagaattgtccgcacctgcgaagggtgtcagttctacgcaaggcagacccacctgcccgctcaggccctacagacgatacccatcacctggccttttgctgtgtggggtctggacctcgtcggccccttgcagaaggcacccgggggctatacgcacctgttggtcgccatcgacaaattctccaagtggatcgaagtccgacccctaaacagcatcaggtccgaacaggcggtggcgttcttcaccaacatcatccatcactttggggtcccaaactccatcatcatcgacaacggcacccagttcaccggcagaaagttcctggacttctgcgaggatcaccacatccgggtggactgggccgccgtggctcaccccatgacgaatgggcaagtagagcgtgccaacggcatgattctacaaggactcaagcctcggatctacaacgacctcaacaagttcggcaagcgatggatgaaggaactcccctcggtggtctggagtctgaggacaacgccgagccgagccacgggcttcacgccgttctttctagtctatggggccgaggtcatcttgcccacagacttagaatatggttccccgaggacgagggcctacgccgaccaaagcaatcaagctaatcgagaagactcactggaccagctggaggaggctcgggacatggccttactacactcggcgcggtactag

SEQ ID NO: 17060 - DNA, 459 bp, Zea mays
  Peptide Sequence Number=SeqID_58839
atgccccggcctccaccatccccgccccacgagtcgtccctggcctcggaaatctcgtcgcgcccccgaaattctcgccccgccaccgccccaaaacctcgcctacctcccacccagagaagatcccatccactaccgccgggtcgccgccctcccttccgccgcgcccctcctgttccacccgctccgcttgctcaccgcaggtacctggaccgctgccacctcaacgcgtcggtgaccgaggacggccaggtgatgccggcgtgcgtgctgggcctcgtccccgtcgtcgtcctcgctaactacaccaagtcgcagtacaaccggttcctcaacgacagccagttctccggcgccgggatcgcgagcgagggcgactgggtcgtggtcgtgctcagcaccagcacgggatccggcgactactcgcccgctctgtcgggctccaactgggcggattaa

SEQ ID NO: 17061 - DNA, 702 bp, Zea mays
  Peptide Sequence Number=SeqID_58840
atggcatatacacgacaactttttgtgttagaaatatgggaagacaactgtggggagtttcctctgattgatcttgacggaggggctgctatggtaaacaagacacatatggtgccacctaaattaaagtcgtttttggttatatctgtccctaacatatgtcaagagattagcgttgggttgcagcatttcggtcaatgcaagaaggcgagaagtcattgttgccaacattgtgatcgtcaggcacagatctcaaaaaggggacgacaaggccgaggggttgtcgctgatgtcgttattggtgaggttgacggtggtgatgccgtggatgctggagtggcgcttgtccttgacgtcggagttgaggcggatgttataactaatgctttcatatccaggcaactgccaggaagcgctcaaggcgatacatgcttgatactgatgagtattcatgtctttgtcgtgccctatgtttcaatttcgcacaaccctataaaagcatgtgttgatgcaaaagagttgttctattgtggattgaagacaaatcagattttcattatttcactctttcccgaaattactacatacaagcggttgttgagaagctttccaaatgcacaaacttaccatggcatcaaggttggatctctagagaaaaatgttgctcacttctttgaggttgcaaaagggatcagatactaa

SEQ ID NO: 17062 - DNA, 111 bp, Zea mays
  Peptide Sequence Number=SeqID_58841
atgcggaccaccaggcgaagcactgggaaggagctcaccgtggacgtcgtgcgtaggaagctgcaaccccgacacagggtggcctgcagcggcgctatgccaatgatttag

SEQ ID NO: 17063 - DNA, 2730 bp, Zea mays
  Peptide Sequence Number=SeqID_58842
atggcggtcagcgcgagcgcctttggcggacatgtcgtcggggcgctaaagggcctgctgctcaacggtccgctgccgcgcaaggcgggcgcggagctccatgagaagctgaaacaagaggtgcgctacgcggcggacgccgagaaccgggtgctcgaggacgaccgcgcgcggcggtggctggcggagctgcggcgggtgctgtacagagcggacgaccgcatcctgcaggcgtacgacgcgcaagagcagcagcggacgacggcgtccgtattatctctaccgatcatgcgccgttttaccatggacatgtacatcaagcgagagataagcagcttgctcaaggacatagatttactatccgagaaccgtcctcccgcgctcacgagcagcgatacggcaacctaccagcacgacggcagatcgtcgtcatgcgacggtctggacgacgacctcgtgcgccatggcagcagtctagtggaggcagagaagatcgagatgaggatcctgccactggtcgacaagctgacagagcaccacgagccacctcgcgagttcctcatcttcgcgatctacgggccgggaggggcgtccttcaagggcccaaaacgaaaggcggacgcgctccagacgcagctggccgacaggatcgagggcaggcgggtctttctggtcttcaacgtgcacaacggcggcggcccctcgagccaccaccaccagggcggcagcacaggcgccgagatattcgggaacctggtcgaggtcctcaagctcttccgcgccgcccaggggagccgtgccctggtgacgaccaccgacgagaacgtcgggaacgagattcggtcggcgcagatccagaagggcgccgccgaagggttcggcctccagaccgaccgcctgtggcagctgcccgtggaagacggctgggcgctgctcctccgggcagccggtctggagccggcgaaggtcacgcctgagctgaagaaggtcggcgtggcgatcgtgcagaggtgcaactgcctccctctcgccatcgaggccgtcggcggccttctccgccggaaggggtacgcgcaggaggagtgggagcgggtgcgcgatagcgaagcgtttgagctcaaggatcctgccacggggacccaaggaggggctgggagcagcgtgtacctgagctaccagcacgcgccgccgcgcctgaagcagtgcttccactatctctcgcttttccctgcggacgtcgagatcgagcggcgccgtgtcactcagctgtggatctcggagggtttagttgaccctggctcgtcggaagaggggtccagcaccagcagccgcagccgcaggcaccacaacaacaacacgcaggagacagccgccggtgagcagcagagtggcgcttcccaagaggggtccagcaggtccagcaggcacaacaacaacaacaacaacacgcagagtggcgcttccactgaaatcgccgccgccgccgctgctgatgacgatgatagagaggacagcacttcctcatcccaagggccacctagagagctacctcgcctcagcagcagtagacaccattctccaagaactagtctaccagataccatgccgagccatcgttcggatcaagaagaggtggctgactgctacttgacagaactcgcagggacgggccttcttcaacgaacaaacagaaggggtcagtacaagatgcacgatcaagtcaggaagatcgcagagtccctgactgaaaacgaggtgtgcgctggcgatcccaggtacgcggctactactacactgccggagaacctgattcgtctgtcgttcctgaacaaaggactcgccgctctccctgaaaacgtcgcgaggatgacgggtctgaggacgctgctcctgtccggcaacccactcggcgaaaccgacgtggacaccgtgtgcaagaacctgggaggatcactgcgagttctcgacctctcagaaacagagatccgatctgttccgaagtccttgggaaatctggcgcgccttaggcacttggatctttctcgtacgaaaataacagcagtccatgagtccgtcggccgcctcaggaggctgcggttcttgggtttgcgggggtgtggagatctcacttcgcttcccagaagcatacacaagttagcgaagttggaatacctcgacttcagagacagtggcgttgccaattccacaaggtcgttgcacagcctgaggcatcttactctccttcatggctttgtggtcgacagcgtgtcttcttcaaatgccgtacttctggaagatctgaagcacatgagccgtctaagtgacctgcagataaacattacaaaaaccgtagcaggaaagaatgcagacgacaagatgctgaaggagaaaggcagtctcagaaacctggagctcagatggtgtcctgttagctcagcggtggatccgaagacactggaaacaatgctgacgcagcttcatcctcatcagtgtttggtgtcgctcaagatcgacggctaccatggagctgcctatccagaatggctgtgttcctctgaccttccgaacctacagcgcctaagcctggaaaactgctggtcctgggagaggttgccgcccgatctggcatctccagaagctgaggtctctcagaatggccaacctccccaagctgcaaagaatcgatatgccacagccaccagcggaggcggcggcggcggcgtttcctaa

SEQ ID NO: 17064 - DNA, 492 bp, Zea mays
  Peptide Sequence Number=SeqID_58843
atgcagagcctgaaggcagccgtctcgtcgccttcagcgaccatcagaaccatggtcgacggtctaagcaagctcgggagcatctacgaccgcatcgacgcgcccacactcttgcaaagcacgagcagccagagggagagctcgagcactccctcgttttccgcgcgagagagcttcgtggagctcaaggtcagtgtccaggacatgcagttggctctcaaaagaggagacggcgcggatctccggacctgggtccagtgctacacgcgtctggtcaagaaggcacagaagatgttcaagaaggccaacaggaagactgcctctgacgttgaaggatgcagggcgatcgacctggtcgctgaggcgagggaggttgccgtgtcgatcctcgaatcgacgttgcatctcctatcgaagcagattgtgctacctagttctagcatgtggtcgcttgtctccaagtcttctttccacaagaagagtcttgtgtga

SEQ ID NO: 17065 - DNA, 981 bp, Zea mays
  Peptide Sequence Number=SeqID_58844
atgccgaggacaccggagaggtggcccgcgctgcctcgcactccagagtacgcgttgccgggcgtcaatgctagccggaaagagatggttccaacggtctatattgaaggtggaaagtgcatcatgctttatgagttaatgagagagggccagtccatcggcgtcatcgccgatggcatcgacaagaacgacaagccgcataaggtcaggctctactccatcgccagcagcgcgatcggcaacttcggcgactccaagacagtctcgctgtgtgtcaagaggctcatctacaccaacgatgccggagagatcaaacatatgtatgaacaacagaagaaaaagattcagcacaaaagatctatcggtgggcctgtagtggatcttggcaagattgtacaagtcattttggctaatgagataggtcttggcaagactgtacaggtgttgtcagcgtattcttttttcctggatgcatgcaggttttttgagcatattcttttttgcattgcaatagcaagcattgttctcattggtgaaattggaggtatgactgaggaggatgttgcaacattcatccaggtgagaagaactgcctgcaaatcattaggagtgctggcaaaattttctactcagtacacagagaaggccttggacttgttgatggacatgatgaatgatgatacagaagcagttaggctgcaggctctagaagcactatttcgtatggcaacatatggatgtttgagtgtgcaggagaagcacatgcatatggtattaactatgaacatactccgttcacaaatgcatgactggtccttccagatagataactatcatagatctggaatggttccattggctgacctatatgaggcggagggggtgattctattgcaggaggagaaggagggagtgattctcctagaggtggaggaggatgaagtggtgatcgacttcaagccaactccaagtgccatgtag

SEQ ID NO: 17066 - DNA, 3024 bp, Zea mays
  Peptide Sequence Number=SeqID_58845
atggcgtcggcggagcgcagggtggcgctggacgaccaggcggccacgtactggctgaagcgggtcacggaccacatgtaccaggtccagatcgtcgtggaccagtgggtcatcaagaacgagaagatgcacagggagggatctctcaaacggacgatcagctgcggcgaccattccggcgtcatgaaactcgctgccgccatgaaggagctcaacgctgatttcgacagcatactggagctttcagctgagaccaataagacgaggcagcctgcagcagttcggtcgtacggaaagacggcgcccggctacaacgccgacatcgtcggcgactacgtcgacagcgacgctcgcggtataatcgagctgttgcatagctccaagagaagatcctgccgtctcatcgccatcgttgggccggttgggatcggcaagacgaccctcgctcgcaggatatatcacagtgtcgacgcccagcgcttcgagacgaagctatggatacgcttctccaacgatctgagctcactgataatctggccggagccgggctggtcgtcagatcgctacaaggaagggccaaccaaaagccactggccggactcagacagccggtcgtcagatcgccgcaaggaagggccaaccagaagccactggccggactcagagtgctggtcgtcagatcgccgctgggaagggccaaccaaaagccagctgatgcacctgggggctgagatagcgagcaagaggttcctgctggtggtcgattcggtctggacggaggacgtctgggaggcgttgctggagggccctctgcagcagggcgacctggaaggcagtagagtgatagtgaccaccaggaacaagcacgtcgcgagacggatcggggctgggctcatccaccacgtcagacggatgagcaacgccgacgctctgcgcctgctattccggagagcgtcggtcagcgagagcgacgaggcggagctgcaggacgtcgggcggcggatcgtggagaagtgcgacggcctgccgctcgccgtccggagcgtcgggcgcaccctgagggggcaggagccgacgcggcacgactgggagaccgcctgccgggcggcgttccaggacctctcgcccgaggagcagtacacgatcggcctgagcttccggaacctgccgccgcacatgcggcagtgcttcctctactgctccgtcttccccgagggcttcttcatcgagaagcagtacgtcgagcagcagtggatatccgagggcttcatccttaataagaggagagtcaccatggaagaggccgcggagcgttgcttcgatgagctggtcggaagaggcctgctccgtctcgcggtcgggagcgatggagccacgggagccaggatgcccatcgtgatccgctccttcgcgaaggacgtgtctgaccatgtgaacttctgcactgagtcggtgtctgcagccaataatcttttcgaggtgcggcggctgtccatcgttgagaacaacgaggctgacgatcgcattggtgatggtgatgacagtgggaatggtgagatcgcaggaggaggggatggcaatggcagcatggaggacgagcatggaaacaggggtgaagcaagaatagccggcgaagacgtaccgctgcacggactagggaggatgaagtgcctgaggacgctagtgcttcgcaagagcacagtttcacagaaaagcatccgtgcggtcaggcagctaaatcttctgagagtgctcgacctgcgaggagtgcaaggcatcagtgctctacccatcgctgtagggagcctggagcatctccggtacctgaacatctctgaaacggagatcgaaagagtccccgggagcatatcgtacctcacgatgctccagtacttgctgctcaggaactgctccaaagtgaaaacgcttccgacgggcatccagcagctaaggtacctgaggtgcctcgacatcgcgggcactggcatcaaagctgtagactggagcttttccgccatggaagagctcgtctctatgcagggcttccctgtgacgaggggagacggcgtcgtcggttcgctgcgggcactgaatcttaaattccccaagaaactcgctgctctccgtctcgacatgctccaggaaatcctggagcctctgccacgagaccggtggccggttagagagtaccagcagctcagggatcttgagctctgctacgccaatgctgactcgccattggtgcaaggaggcacgatagagaacaggatgctagtgcttgacaggttcgtccctgagaagcgccttgtgcgtctcaagatcgagaactacctcgggaagcaatacccttcatggatagcggcggcgacgctcccgaacctgcagcggctccacctccagagctgcgcgtggtgcgaggagctgcctccgctgggggagctgccgcagctcaagctcctggccgtgacgggcttcgacagcctgcgctcgcttggggcggagttcagggggggcaacggtccgccggtcaggacgacagcgttccgccgcctccagcagcttttcatcggtgacatgaaggcgctgcacacgtggtccggcctgcagagccaggacctgccgcagctccaggtgctcaggctgctggggtgcataaacctggtggccattcctctcgtcctccaggagtcggcgacgctgacgaggcttgaggtcgacaccaggactaagaccgtgatcgaggacaagctccgaggcttcaccggaggcatagtagtcaacgtggacaacacatgggaacaagaaccaccgcagcacgaagcagatgtggctccacaagacgcgcagcctcctggccctgggcaagacgaagctgttgaagcggaagttgaggagactgtcggggcactacagaaagaggtgcccaaagcattcgagcttggcgcagttaagcttgtccttactatctttgctatcactgcaatttgctccgttttgtatctactctttgtgccaagatgctga

SEQ ID NO: 17067 - DNA, 1131 bp, Zea mays
  Peptide Sequence Number=SeqID_58846
atggatgatcaggtttacatgcaacctgaagaaaacagaatgtggagactatctgaagacactcttttatgtgatagtgaagaatctttaaccaaaagaaaactcgatttttctcagcctattggtggtgacaacagcacagctacacttattccttacccaactattaccggaaacgaggattttgttccatcgtcttctgacgttgcacaagtaggagatggtgatgatgatgtgaccaatttttgcttgacaagacgagagccaccaacttgtgacgttgcacaagtaggagatggtgatgatgatgtgaccaatttttgtttgataagacgagagccaccaacttcaccttttattgattcttgtgtcgacacaacagagttagctgaggattattcaagcttcccctgcgccctaccctctgctgttaactttagtgacattgattcttttcttgatggttgcgatcaattgttcgaaaaccaaactttggatataatttctcctgttgagatacgccctagcatggacaccgttgcaacactagaagatcttttcctcaagacaaccagacaagcattggcaaatgttcttgatgggctaaatgcccatactttgagagatcctgttcgttgcgccagtctgcgcctcgcttcgtcttgtcttacaggacaatttgctagcattgcaagaattaaagctatgctggacaaattaattaccatttccgaacagctgaagaggacgttttttaactttgaagtggcaagaaaacaagacgaacaaagcactgctaaaatcaagcaggcgcttgacgttcaaagggaagctcttcacactgttgatgaggaattggcctctgctgaaaagcagcgggcagaaaccatgatgacaattgagaaacttaatcaaattttaatggaggtagagcaaaagagagtgcgacttgaggaaatgcgttctacttcagatttggaggtgaggaaattagagcaggacttgtgtgatgcaattggagacgcgagcaagaaggctattgatgtttttcagaaggaaacaacaaaactaaatcagcaggctgagcaacttcttattgatttaaatagctatcgatctagtagtaactag

SEQ ID NO: 17068 - DNA, 753 bp, Zea mays
  Peptide Sequence Number=SeqID_58847
atggcgatcgacgacatcggcgtgtcagcacgacgatttccattcgacgaagacgatggcatgacgattcgtttgggctttttgtcgagcactaatgcagggtgctgggatggagcagacgctcgaccacagacgaaagacgacgcgctagctatgaaggctgagcagggaacccagccgagcgcggtaagaacgacaacgggccaagcaaaggagctcgcgtgcgcacagggaagaaccgaagaactcacagccacctgcaagcaaatcgacgccagcgagggagctgggataagggataggggtgcggccaacagagctgggcgagtgcgatctgagatggagcagcggcggccaggcgtcatggcagagggcaggaccgagctcggcgttgggggctggggcaccatgggaacaagcttgaggaggagagggtgtggggagctgccgacggcgcagcaggggcaaggtccaacgagtggcagcggaggaggaccgctagagctcgacgccggtcaagctcgccagagagaggggctgggcgagcgtagcagcaaggcgaggtcgcggtcgggcgagctggagagccatggatgggaggagcagaggccgagctggggccgagaccaggggcgcacgcaccaaagaaggcgagctgcagcggccagcaaaggagctcgcgccggagctccaaatcgacggcgtgagagccgagcagggcgcgaccgtgggagctccagggcgcacggctga

SEQ ID NO: 17069 - DNA, 588 bp, Zea mays
  Peptide Sequence Number=SeqID_58848
atggcgaaggggtattggatgattctggtcgtccagatcagatcccacgaccagccgaaagcaggaagagacgccagcgccgcaacggcgccatggctagaacggcagcccgcccgcccgggaactcaatttcctaataaaaataatgttataccgaattggggacatggggaagctgcggaaaaggctctcaccggaattcacagggaaattcttgacggccacggcgcgctggggattgtcgatgaagttaagcaacaacgagcaattctcgcgactccagcgatccccggtgtcggcaactcctttgcccaagtactagggtccctagtgatcccgctggtgccatccgtcaaggacatacggcccagggagcagatcgcaatgacggcgggctgtcccctgtcctttctatttctcagacatggtgacgcacaattgggcacaggggtcacggctcgacccatatatgcgtcgagggagggcgagtccgagccgagaaggtcggttgcgagatccatgagttgttgcaacagaaccccgaggaagcggggaggcagctatggtgtggcgcgtgcgagattatga

SEQ ID NO: 17070 - DNA, 1137 bp, Zea mays
  Peptide Sequence Number=SeqID_58849
atggatgatcaggtttacatgcaacctgaagacaacagaatgcggagactatctgaagacactcttttatgtgacagtgaagaatctttaaccaaaagaaaactcgatttttctcagcctattggtggtgacaacagcacagctacacttattccttacccaactattaccggaaacgaggattttgttccatcgtcttctgatgttgcacaagtaggagatggtgatgatgatgtgaccaatttttgcttgacaagacgagagccaccaacttgtgacgttgcacaagtaggagatggtgatgatgatgtgaccaatttttgtttgataagacgagagccaccaacttcaccttttattgattcttgtgtcgacacaacagagttagctgaggattattcaagcttcccctgcgccctaccctctgttgttaactttagtgacattgattcttttcttgatggttgcgatcaattgttcgaaaaccaaactttggatataatttctcctgttgagatacaccctagcatggacaccgttgcaacactagaagatcttttcctcaagacaaccagacaagcattggcaaatgttcttgatgggctaaatgcccatactttgagagatcctgttcgttgcgccagtctgcgcctcgcttcgtcttgtcttacaggacaatttgctagcattgcaagaattaaagctatgctggacaaattaattaccatttccgaacagctgcagaggacgtattctaactttgaagtggcaagaaaacaagacgaacaaagtactgctaaaatcaagcaggcgcttgacgttcaaagggaagctcttcgcactgttgatgacgaattggcctctgctgaaaagcagcgggcagaaaccatgacgacaattgagaaacttaatcaaattttaatggaggtagagcaaaagagagcgcgacttgaggaaatgcgttctacttcagatttggaggtgaggaaattagagcaggacttgtgtgatgcaattgcagacgcgagcaagaaggctattgatgtttttcagaaggaaacaacggaactaaatcagcaggctgagcaacttcttattgatttaaatagctgtcgatgtcgatctagtagtaactag

SEQ ID NO: 17071 - DNA, 202 bp, Zea mays
  Peptide Sequence Number=SeqID_58850
atggcggctaggttttcggtgatttggaacatggcgagcacggccgagggcccttccccaagttttatatgcgccaggaaaagccagcggattccaagggtgcgcgacgaaggttgttgcgcgaattccggcgagcgaccagggagtcgttgcttctaccgcgagctggaggatgaccctggagtgtggggtccgccgggag

SEQ ID NO: 17072 - DNA, 360 bp, Zea mays
  Peptide Sequence Number=SeqID_58851
atggaagaacgggttcgcttcgtgcagcagttggaccaaactaagaaggcgctcacggaactctgtcttgaacagatggtgcgggacatggagtcggtggagtccatgcacaatggacgttatcgtggcgaggctccaccatctccactggttgcaccaccaggtccaaatcgcaggcagttgggatccatggaggagtacaagaaggcgtttgatgaggcgcgatatgccacttctgtccacaatcatgatttggatgactctatgcagttgagtgcttttactactgaggagttgggtatgacgctatcagagcaaacgttgacacagattgagttggaagagaaagaggaagagtag

SEQ ID NO: 17073 - DNA, 417 bp, Zea mays
  Peptide Sequence Number=SeqID_58852
atggctgcgtcaaggggatatgatggtggtatcccaagtgcggcaccaagagaagtggatttgcatgatgatagcaccaatgatagtgtatctacaacaagcaacattacacttctttttgttgacatttctaaagggagaacgctggattaccgggaatggcggaaggaagggtcggcgccatcgtcgattgggctcatcgtagcatctcgcaccaccacgggcgtgtggatctgcgctcccaaacccggtgagacctccctcaatcaattcgcatcctccggtagatcttgtaggaactatctgctcgcaaattggatctcctgggcgcctggttggggtgctcgtcggcacggcttgtcaggggtgggctctatgctgcgggttccggagaccaatgtagaagatgagtggtag

SEQ ID NO: 17074 - DNA, 384 bp, Zea mays
  Peptide Sequence Number=SeqID_58853
atggagagccacacaaagaagcccatcaacgatgttttcctcaagatcggattactggaaggccaaaccagctgctcgcattcactggtgcacggtgtgggagctgagagctccgttcctatggccgggcccccacctctcttggtcccttgtgcagatacgcagagagttcggttggacaaattaagatggattgagatcttagttgttaagcggctgaccaagtctctgtggagcaaccccacaaggcgtagcgggcgacaaagtctctgtcgagcaaccctgcgaggcagagcagacgaccaagtctccgtcgaacaaccatgtgaggcagattggccgatcatgtctctgtcgataaacccagcaaggcggaggccctga

SEQ ID NO: 17075 - DNA, 342 bp, Zea mays
  Peptide Sequence Number=SeqID_58854
atggctgcagagcagcagcccctgtcgctgaagctttctttggtggcatgtcgaagaaaaatagaaatgatatcaaattacaaatgtaccttcggcttgaaagaaggtttggctctggctagcaattccttcgcctccggagttttactcgttgaattggtaggaggcgtagcttcccaacaccctggcgacccaactgagtaccttgttgaggcctgggagacgacaaatcgcgcggtcgacgacggtggtggtagctgggccgagaaggaagcctcagcccaggacgcaggttttgaatttgatacttcaagtccaatgcacaataaaactccaacatga

SEQ ID NO: 17076 - DNA, 246 bp, Zea mays
  Peptide Sequence Number=SeqID_58855
atggatgactcgggcgagctgacgagtccgacggccaagggagctcaacgcacgacagggaatgcgacaacgtgcagggagctgagcatgggcgtggcgcaccggaagcagcgcgcgcagagggcaagcaccatggagatccggccagaggcgcggctgctgggaaaaccaggggtgcgcaggcatctggacagaaattcgcagatatttctaactccagattttagcgaaaaatgggtcgaataa

SEQ ID NO: 17077 - DNA, 264 bp, Zea mays
  Peptide Sequence Number=SeqID_58856
atggccacgagcgcggcggcgccattgctgaggccacacatcaaactatctgttgcgtcgaactccgttccaaggggtgctaaacacagcgtggaacatggcgagcatgatagtggactcactagtgatctgcgcagttcagaccgcccgcccacggtgcatggcggtatttcgagtcccggcaataaattggacgttcccagctctcttatcgtcgatttgagtgttgcagaagcttccacatgcgctcacgacccttcctga

SEQ ID NO: 17078 - DNA, 441 bp, Zea mays
  Peptide Sequence Number=SeqID_58857
atggacagggccgatctcggcaggagcgtgcgcgcgcagggagcaggtacaggcgagggggatcaagggcagtgtgttgccgcggccatggaaaagattggagcgaggaagctccaggggcttgacggcggtcatggcgagctagagcaggggcgtagtccgatggagaccgagtgcaggggcacacggcggccaggtgaggcgagcccgcggctggggaaggggctcgacttggtgaaatccaaacagggccgagcgccatgggaagttaggggcgagctcgtcgcggccaataggggagcagcgtgtgcggcgatggagcagctccatggcgagggcgctcaacggaagagggagagggaagcaggggatctgggcgccgatcaggaacacggcagggacgaggttgggcgcgagctgcgcgccatggaagagagctag

SEQ ID NO: 17079 - DNA, 552 bp, Zea mays
  Peptide Sequence Number=SeqID_58858
atgaccgccgtcaagcccctggagcttcctcgcctgcgcgctcctctgcgtcgagtctctgctcgccctcagttcccatggctgtcgcgctccctactccaatcttttccatggccgcggcaacacactgcccttgatccccctcgcctgtacctgtctagatgcctacgcgcccctagttttccctgcgtgcagtcgcgcctctggccggatctccatggttctcggcctctgtgcgcgctgctccatggtgctcggatccccatgcttagctccctctctgcgcgttcgtcgtgccgcgtcgtgtgccaatattctctcccggcagacctcaccgtcgaccatgttcaagtgattgctcggctcctcgcatcccgcctattcgataaaacacccaaatccatagactgtcgatgccctgctgccatacgcggctatctccgtcacttgcgtcagctcgccagacctgcagctctatatacgtcgccctcccgtatcttcgtcgagcacgtcgaacctcgttcttccctgcccgaccttgtcgaaccctga

SEQ ID NO: 17080 - DNA, 369 bp, Zea mays
  Peptide Sequence Number=SeqID_58859
atgtcgcaccccacgtcccccaactcctttttgagcctcggtccgcacacgctctctcacccctaccttatttcacctgctcccagcctctctcgcgctcagccgtcgccgcccaagctcgccggtgacccacccccgacgtgccgaccacctggaactccaaacgccgtgccaagtgtccccgagcaccgtcacgaggagaatctctgtgaaggctacgtagtgtatcctcggtcattcacctcggtagtgaagatcaggtcttgcaaagccaggctgggaagggatcacgactcatgggtaaagagtgttcgaaactggcatatcatccatgctcacggttatgagcaaccttgggagctcctttaa

SEQ ID NO: 17081 - DNA, 237 bp, Zea mays
  Peptide Sequence Number=SeqID_58860
atggccataaccataagggcgggcggcgccgcggtgtgctcgtgccagaaaatccatacttgtaattgcgccgccgcttatccgcatctcacagcgggtggcgtgcccttctgcatagctgcccttaagatgcgtgttcctgtgcctcgttgttgctctggtgtgcgccggccatggcgccaccgtgtggccaacagctccaccgcgctcggccggcgagaagagaggcgagactag

SEQ ID NO: 17082 - DNA, 171 bp, Zea mays
  Peptide Sequence Number=SeqID_58861
atggtgcagaagcaacaaaactccgaaggttcatcacgtgcaacggtgggttcaaagaaccctatgtactttcgcaagtctttcacgactaaagaaaagactctcaaggatatgttggcttttgggaaacaaggtaaggtcagtgatcaagtcttcatgtctgagaagtaa

SEQ ID NO: 17083 - DNA, 186 bp, Zea mays
  Peptide Sequence Number=SeqID_58862
atgttcgaggagactgagggtgcgctctccaccatgcttgagcaatgtgctagacctgatcatgttgggagcactgtgctagacatttacaccatgaactccatcatcggggcaaatgatgttgcggcgcatgcaagaggtccttttggaaaagatagcatcgaatccatccacaacaggatctaa

SEQ ID NO: 17084 - DNA, 366 bp, Zea mays
  Peptide Sequence Number=SeqID_58863
atggagctgcgtgagcactgcccgccatataagttgacaacgatgaccgacacaatagattccattctctgtgtgtacaccaaggtgctcgaaccattagttgggctaaggaacacggaacagcagcaacaatatcgtaaggagagtgcagacgttggacaaatggaagtagctcttccactactggagcaattgttggtggagtggctgctggcgcagccttgctatttgctgttcctgctatcagttttgcctattggcggcataggaaaccacaagagcattttttcaatgtatctggcttcaaagttagtctttgattattatctttctcgcaacataagggcaaacaacgtttatatgtag

SEQ ID NO: 17085 - DNA, 288 bp, Zea mays
  Peptide Sequence Number=SeqID_58864
atggccggaggatgctgggaggatgacattggtagctacggctgcacatcttgcccgatcgagcaaggtggcgttggcgaaggtcgcgacgaagatcatgacggcccggcggcgacgacggccctcacgacactgacgtcgaggacctcgccttggccagcgaaaaccaacacagcgaggccggacgtctctggcagggccggggcggtagcagacagtctaagaatatcaggaatatcagaggttatggttgataatcctaggttacaggttctgctgacatcctag

SEQ ID NO: 17086 - DNA, 288 bp, Zea mays
  Peptide Sequence Number=SeqID_58865
atgaaggcttccatggacaccacggagcgagcgagggtggcgacgatgttgctgatggaggtgaggttggtgttgaggccctccagggtcagcggtgtcgcggtcgcagatggagatgacgcaagcatgaggctcgttggggcagggagaggcgcggcggcgaaaattgacggcggtagagatgtggaggtggttcgtggtagggtggtggtgggaggatcatgtgtcatctccaataccaggttgataggattgtggatcctaccggggtcgtggcgtagagagtag

SEQ ID NO: 17087 - DNA, 936 bp, Zea mays
  Peptide Sequence Number=SeqID_58866
atggctctgatccgccaccgcgcgacatcgatgagtccagaggtggaaaatctcaaggcgctcctcgaggtggagactcgggagccactgcggcatcaacagatttacttcaatgagaaggaggtagaacacatagaagctcagtgccgctggggccccaccagtgaaaggacatctcaggatggtttaacggtaaatcctgatgggactgttgtgaatcctcaagcttttaaacaatatgctcgaggtgattcacaacttatggcacaactccttcagggtcttcctcttattttgccaattctcctaaaggagtatcctcctactcaaatgttttatgatgcagtaactgaatgggggaagcgcggatgcgaccacgcagcgacgggagcgttgcctagggcggcttcctcgcccgaggagcatcgcgcaagcagaggccacggtggcccatcctcggccacgccctatgtcaaggcagcgttggagtcccaggacagcgtcatggaggcgtgctgcctgcaatcgaccgataccactgtgcccccgcctgatgcccccgtcccttgctccattcaactctcagcaaggtatcttgaggtccattgttgtttacacgactatccctctctcacggataaagatgtcaggatcattgtttcaaactgcgctgcattagaaaatctcattatgttacagtcttcaatcagtgatggtggtctttctcaggatgctaagcaatgtagaaacctgaagttcctccataccgaagggtgcttgtccatcactaaggcgtctctaagagcccttgtgcagtatgccaagagactcgagtctcttactctgggaagctaccctcaaattgagcaacatgccatcttatctggacacgcttgtgctcaaggacatgatggctggacaatcacatacgaatga

SEQ ID NO: 17088 - DNA, 501 bp, Zea mays
  Peptide Sequence Number=SeqID_58867
atggtcgtttctgcgtatcgccagccacactttctggccacacgcaccgccagcccgttcgcctgctcactggagcacgcgcgcgccgcgacggctcttctccccactagccgcgcgcaccaccgtgccgagcttctctccatggcgtttcctcttctctctctcacccacttcctctcttcaatcgcttctctctcccgctcacctggcagccgctcctacgcgccagcgccctgccgtgcgcgctgcccaaccgcgccgcgcgtgcccctgttccgaccggccgagcccctgtgctcgagccgccccggagcccgcgcaggtcgcgcgcacccgagctgcccgcgcccaccaaaccgcgacaccgggagcccgactcgactgcccagcgcgcccctgcccctgctcagcccgctcgccaagccgacgcgcgaccacgcccaggagcagcccgacccgatgccgagcacgcgccctgcgccgagcttcggcggcgcctag

SEQ ID NO: 17089 - DNA, 654 bp, Zea mays
  Peptide Sequence Number=SeqID_58868
atggcgagtggtggcgacgacgcgcggggccggcctggcgacatctccttttcattgcctctcgctggtttccaaggcgccggaccgcgcgcgccgcggctgggacgggggcaacgtgggcaagccgcacgggcgctgcggcgggtggcaaactggcatctatgggcgccaacaggaaccgcacagcggcacctccgtgtcccaagtttatcagagactgttacaggaaagattcaacggtttgtggaacaggtctatggaaacaaggcggactgctccgacgacccttctgaacttctgattaggatcgaaggggtcagaaaccataggaccaaacggtacaatgttcgtccagcagccccggcgaacagcaagtccgccggcagcgtgcacctctccatgccgccgcccaaccggctaggcgctggggcgtggacagcagtagggtcactgcacgcgggccctgtcgcacgcgggggccacgcggcagtgccctctccccacgtcagaggatctcgttccggacagggcagggtcatcaccacgtggcccgcgctcctcctcctcctccggttcgacgagaactgctggaaggaactccgcctcgattgggttggcagccggtgctgtgtgcgactggtgaagcagcagtag

SEQ ID NO: 17090 - DNA, 876 bp, Zea mays
  Peptide Sequence Number=SeqID_58869
atggccatggggctccccggcctccgctgccaccgcctcctcgctcgcgggtcactccctccactcggtcccgccctctatcgcaggcccctggagcgaacctcggctctccgctactcctccctccaagctcaagctggggacagtattggggaggaggccctgcgcatgttccttgaggacaggcaactgcacggcgatttcgtcaccaaggtctctgacatggtctggaggaggaatggcgccaatgttggtgcggctgaggcgaccacgggccaagggagtgcaatagatgttgctcagcctgaagacgtgcgggaagatgctgtggacgagggaatgttgagactagcggcgattactagtgattgggtgtccggtgacagcagccctcctttaagcaagaggctttctgccgaggaaaggcagaacgagagcaacaaaaggaaggagctgaatcttttgaaatatgaagcactcaaggatgaattgctgctcttgaccgcaggaactggagcagcatgtagtttatattgtctcctggttttctctctggagactgctgtcagttatgctttgggggttggtttcagaattggcattacaagtgaagatttgaagaatacaatagagaagacattgggtggtgcaggactagctctttcatctccaaggcttataattcctgccgtgatttatggattgtcagctttatcacatcacttccaaaatagctttttcagttttgaggttcttccagggatgatgggtttcctcgcgtacaaggctgcagctttggttcaagtctacagagacaacgaggacctccgcttgatacttcctgatgaagaggccgctgacagtgacagcacttga

SEQ ID NO: 17091 - DNA, 360 bp, Zea mays
  Peptide Sequence Number=SeqID_58870
atggcgtttcctcttctctctctcacccacttcctctcttcaatcgcttctctctcccgctcacctggcagccgctcctacgcgccagcgccctgccatgcgcgctgcctaaccgcgccgcgcgtgcccctgttccgaccggccgagcccctgtgctcgagccgccccggagcccgcgcaggtcgcgcgcacccgagctgcccgcgcccaccaaactgcgacaccgggagcccgactcgactgcccagcgcgcccctgcccctgctcagcccgctcgccgagccgacgcgcgaccacgcccaggagcagcccgacccgatgccgagcacgcgccctgcgccgagcttcggcggcgcctag

SEQ ID NO: 17092 - DNA, 237 bp, Zea mays
  Peptide Sequence Number=SeqID_58871
atggacatcacaagtaaaacggacattgcaaaagtgatactcgggtgcatagctcagagacaactgatcaagccaaggacagaggcaagaagagcttcgaggtaccaagtggacgggagaaggtcaaggaggctgaggaacccaaagccaagggacattttgagacaggatcttctattccgctacaacctactcgaagagtcttctcactccactgagtacaaagtcttcgagtag

SEQ ID NO: 17093 - DNA, 1137 bp, Zea mays
  Peptide Sequence Number=SeqID_58872
actgtccggtgcgccttctcgcgcgtgcctgacttctgcgcgctctggcgcgcattaaatgctgtagtaggtgacaagttcaagctaaagtgccctggtgcaccggacactgtccggtggcacaccggacagtgcgacgctgctggtgcctcaatcaacgagtggtcaacatcttcaatggtgagagccagtgacggcgtcgacgctcatggcggggtctccattgttgaggccggtgaatcgagcgccatcaggagcaagaccgggagctggttccacaactcgatccgttccgagaaacgagacagctgtgctcccctgccccgcggcgccgccgccagcctctcgtgcgccatgccaccgcgaaagcgcccggcgctgccgccggatgagccctccccttcctcgaagcatcaacctgaagcacatccgtccgaaccctccaaaccctcacccgattccgagcagccgatcatctcggcggcgatcctcgcccaactgcccccccaggagcgcctggcgtacaagctcatcttcgaggcgggcaacaagggcatgtggatgctggatatccgcaagaagttgttgatgggccccaacatcgccaccaaggtcgtgcgtaccctcgtgacgcggcggctcctcaaggaggtcagcgatgtgcgccaccgtagcaggaagatcttcatggccaccgacttccagccctctgccgagatcaccggcggcacctggtaccacgacggccgcctggacactgacgccgtaaccactgcgcgccgctgctgccaggcgcaggtcgagaggctcggcgccgccaccgtgcagatgatccaccacggtattctgaaggacgatcccagggccgggtacactatcgacaagatcagggatatcatcaagaccatggttctcgacaaggtcctcgaggaggtcaagagcaccggcacgggggagttcagggatgtcagggccggcacaatgtgctatcggctggtgactggggctccgcagggagggatgatggagggaattccttgtggggtttgccccaggattgatgagtgctcgccggaggggataatctcaccgagcacgtgcgtttactacaagaagtggctgcagatggacttctag

SEQ ID NO: 17094 - DNA, 630 bp, Zea mays
  Peptide Sequence Number=SeqID_58873
atggccgccgcgagcttcgacgctgccgccgatgtcacgcggcgcggcgggaccggccgggccctcggcgtgcacgccgcgtcgcacaagatcggcaagccgccgccgggcgccgggcacgggcaacaggagcggaagccggtcatcatctacatggtgtcccccaaggtcatccacgtcgacgcccacgagttcatgccgctcgtgcagcggctcactggccccgaagccggccgcggcgacaggaagagcaggccgtcgacctccggagtaggaggcgctggcgaggcggagccttcggaaggcgcgcgcaacaagaccagggcggcgccgccggtgcgcgtgaaggcgcgcgccctgaaccggccggccgtgtccgtgacgaccacgcggcggcagcaggcggcggccgacgcgtcgccgccgtcggggctgatgttgttccaggacctcagcccgctccgcggcgccgcgctcaagggcgagcacctccctctggtctcccccgcctggctgcaccacgttggcgaccatttcctcagccctgctggcgctgcggccgcgctcggctcgccgtcccccagcttcgtcgacgacatcttcgggacgctgtcctcgcagcagcagtga

SEQ ID NO: 17095 - DNA, 353 bp, Zea mays
  Peptide Sequence Number=SeqID_58874
atggaggccaagtcacaccatcaaccaaatcaaggagccggcaagggaaagggaggcgagggcgtcagcagggaggaagctgagggcggtgctaggttgggcatgcgggaggccgagcccagaacagcgttggctggctgcaccgaaatggaaggagcaggccatggatgctggtgcgccatggacaaggaagagcagggaagggagtctggcgagctggatgtggaggcgagtacagagaacgtcccagggtgcgtatggtgttcatttaaaggcgaggcgctgcaggccctaggcagaacatggccagacattggtggacgtgggtggctgcctgccggagctctggacat

SEQ ID NO: 17096 - DNA, 417 bp, Zea mays
  Peptide Sequence Number=SeqID_58875
atggggctgcgcagcgcaatgcttcccacgggaattttgtcgaacacctacgacgcgttgatgttgtggggctgcatggaagactcggctacgaggattgcgtcgcagagggctgggcgcgttcacatggggcagccgaggcagggaggggcgagctgttgggggtatgacgccatgcgagctgctaccgctgcttgggggaaggaggatgggctgctgcatccatggatagggagcggactgtgctgcggggaagaggaacagggagggcgctgggcagaggagatgggagccgggagctcggccatgggagctggacggcgtggagaagattggttctgcgcacagaggcgaccgagcaggagatggggcgctagctgggagagggcagaggcggacgagctgctgctcgcctga

SEQ ID NO: 17097 - DNA, 1554 bp, Zea mays
  Peptide Sequence Number=SeqID_58876
atgtcgggagatcacgccaagaaagagatggagaccggcgaaaagcccactacaagcaacgagaaagctctatcgggagagtcccgcaacaaggagaagaagaaggagaagaagaaggagaagaagacttcttctcacaagtcgcatcggagtggcgacaaactaaagaagatgaggaaggtggtctactacgagaccgacacctcatcaccatctacctccggctccgacgcgccctccataacttctaagcgccatgagcgtaagaagtttagtaagatccccttacattatcctcgtacttcaaaacatactccattactttccgttccattaggcaaaccaccaacctttgacggtgaagattatgctaggtggagtgatttaatgaaatttcatctaacctcactccacaaaagtatatggaatgttgttgagtttggagcacaggtaccatccgtaggggatgaggattatgatgaggacgaggtggcccaaatcgagcacttcaactcccaagccacaaccatactcctcgcctctctaagtagggaggagtacaacaaggtgcaaggactaaaaagcgccaaggaagtttgggacgtgctcaagacggcgcacgagggtgatgaactcaccaagatcaccaagcgggaaacgatcgagggggagctcggtcgcttccgtcttcgccaaggggaggagccacaagatatgtacaaccggctcaagaccttggtaaatcaagtgcgcaacctcgagagcaagaaatgggatgaccacgaggtggttaagggctcacggaagatcaacgagcttgacggtccttctacgtccgaagctcaaccggtcgcattcaaagcgacggaagagaaggaggaggagtctacaccgagtagaacacccatcgacacctccaagctcgacaacgaggaaatggcgcttgtcatcaaaagctttcgccaaatcctcaagcaaaggagggggaaggattacaagccccgctccaagaaggtttgctacaagtgtggtaagcccggtcactttattgcaaaatgtcctatttctagtgacagtgacaggggcgatgacaagaaggggagaagaaaggagaagaagaggtactacaagaagaagggcggtgatgcccatgtttgtcgggagggggactccgacgaaagctctagcgactcctcctccgacgaggacgccgccaacatcgccgtcaccaagggccttctcttccccaacgtcggccacaagtgcctcatggcaaaggacggcaaaaagaagaaggttaaatctaaatcctccactagatatgagtcttctagtgatgaaaatgctagtgatgaggaagataacttacgcactctttttgccaacctaaacatgcaacaaaaagaaaagttaaatgaattaattagtgccatccatgagaaggatgacctcttggacacccaagaggacttcctaatcaaggaaaacaaaaagcatgttaaggttaaaaatgcttatgctctagaagtgaaaaatatgaagacgaatctctag

SEQ ID NO: 17098 - DNA, 288 bp, Zea mays
  Peptide Sequence Number=SeqID_58877
atggggaagagggcgcagagagcttgggcgtcatggatggccgacgtggaggagaagggggctgctccacctgcgctcggaaggagaagtcccctccttgctgttttgcgtttttggacagagaggagaggagatgacgtggggggagaaagagaaatgcgtgagagatggttagttgggggaggtggcttgtgggaagagatggccaaacgggccgcctggcccggttcgggcacggtgaagcccgacccgtcaggcacggttagaaaaccggaccagggcgtctaa

SEQ ID NO: 17099 - DNA, 870 bp, Zea mays
  Peptide Sequence Number=SeqID_58878
atggcgaccacggcgccgctgctctcgccccagcgcgcttgccctacccatctccggcgccgcctctcgcccctacatctcgtattccccctcgacgcgtcagcgaggcggctgcgccttcgccgggcgccgccaccttgttcggccaagttcggcaagttcgacgcctccgacgccccggcggaggccgaggaggcggggggcgcgacggatggtgggctggcgcagcccgtggaggaggacgacaggtcgggttcactgcaccctcaactcgcagaactgctgatccctcagttggaattcctcaacgaggaaggagcacaggctgaactctgggcgttgtcaaagattttcctggacacacttgtacaagagacaggacagaaagttactgccattttccctgacgctggagcagctgcccttctcaagcatcaatggaaagatgcacaattcaatttaggtgaccggaagccagttggtcctgaagatgaggtcgcagttatgattatccctgatcatcagatgctggaagctgttgaacgcatcacatctcaactctctgatgatcctataagacctcttgtcatgtggaacccacggcttgttagtggagatgttggagtaggctttaatgtacggaatctgcggagaaatttcttaaggcagtggaaagtgttttatgatgatccaaataggccaaatcggtatttgcttgcccgagaactcacaagtaggcccgatgcaactgatattgagagaatatttggtggtgccgatgagcaatctgaagaggcaccatcgttgatgaacaatgtcatgggcgtgttcagttccgtgagtcggtttatgagggtcatctccaagtga

SEQ ID NO: 17100 - DNA, 990 bp, Zea mays
  Peptide Sequence Number=SeqID_58879
gtgcagaggtgcgcggacgacacgtcgatcctgatcaccacgtacgagggcacgcacaaccacctgctgtccgcctccgccaccgcgatggcctccaccacctccgccgcagcgtccatgctcacctcgggctcctcctccacctccctcggcttcttccccgccgcctcgccggcggcggcgcacgacgcctccagacacttcttcctcccgaccggcggcgccgcgtccgtcacctccacgccgtcctacccgaccatcacgctcgacctcacctcgccggcggcggccacctcgcaggcgttctctctgagcaacagcaggttctcgtcgggcttcggtggtcccggcggcgctaggtaccatcatcgtcccacgagcttctccttctccaactccgggcccagcgcgctgtccgccgctgcatggccggcggcgaccggtggtgctgggtacctgagctacgggtcaccagctgctgcgtccttgttcaacggtggcggtggcgctgcactgatgagcagcaccaacgggaggcaagggcgacaaggcggggaagtccccgcgctctaccagccgcagcagaaggcggcagcggcgagcgagagcgcaccggcgggcgtactcaccgacacgatagccaaggtgatcacgtcggacccgggcttccagacggtgctggcggccgccatcacgtcgtacgtcggcacgcagggcggtaacaaatcgtcgccgtcggcgggaggagaagagggcgggagccagctgcagctggggctcaagtgggggcagcacctcggcctgggcccgtcgccgtcgagcgccggcgcggcgtgctcctcatcggcgctgctggcacggtcatcgtcgacgaccgcagcagcggagcagggttccagtgggcatcggtcgtcgttcctgcagccgtcgctgggcttggcaggctctcacagcgcctccgcctctcctgtggaaaaccgggagcactga

SEQ ID NO: 17101 - DNA, 408 bp, Zea mays
  Peptide Sequence Number=SeqID_58880
atggtggcgacgaggcctttgctgctgcgcagcgaggatggcacgaggttgttgctgcgcagcaagtgcgaaagagagggcgtcatggagaggctccaggccggcgatgaagggcagaccatccccggcgggcgcagcggtgcgcaggggcgttgtgcctacgccggagggggaccaaagggcgccggagtaagggaatccgagcaggtcggcctggcaccgacaacctgttggccgagcaggcccgctgcggtggcagtggcttcgtccttggtcacggcttggcccgcgctggaggaggaggcggcggctaggcctacgtcgaggccggtggtggcagctaggcccatgccaggtcgacgacggagtcgtccgcataggagagagggttggcgtctatggggctga

SEQ ID NO: 17102 - DNA, 1128 bp, Zea mays
  Peptide Sequence Number=SeqID_58881
atggacgacgaagctatagccacagaactacggcttgatgtgatgacgaagaccaagtataatgatgaccaaaaaaggatgttggaacttgctctcttgggcaagcactcgagtggccacccgtcccctgttaaagacgtttatgccctcaagtacccggccagggtcggcgccaatagtgacggcgccgactcctggcacgtaggcgccacatcggcgctccggagcgatacctcggtgtcatctatattggcgtcatgtaacctcggtgccaatagtgatggtgtcgaggcaagctccccttgcctaagggaaaagtccgaaatggacgaagcatcaaatcaaacctcaactaatttgaaggctcataacaaggtcgacaaagataaccttgcatccacaagggcagagatgggtgaggtaagagaagagaacaagaggctaaagacaatgctgtcacgcatcgtagaggactaccggtctctccaattacagttccacgacgttcttcaaaaaggagaacccatggagaagaagcttgctgaccaccggccctcgaccatcacgccacccaccggcatcgaggagtccgaattcgtctcgctgagcctcggcacgggcacaggcacgcacaagaaggaagagaagagcgtcatcatcagtgctgccgaaggaaaatggagggaagactacttgatgatgggtgttaaagaagaagaaggcctgtcactcggactgtcatcatcagcccgcaaagatgacgatggcgcggctaataacactggaaaggtccagcccgatgtgacgaccttgagccctgaagctagctccgaggacgccaaggacgacgacaccacggaggcagcagaccggcaatggctgccaagcaacacgcagaagaagtcgaggaacgtcggcgccacggaacctgaggatgacgacgacgtaggcccactgctgccacagaccaagaagacaagggtgtccgtaagggcaaggtgtgatgcaccaacgatgaacgacggatgccaatggagaaagtacgggcagaaggtagccaaggggaacccgtgcccccgcgcctactaccggtgtacagtggcagcaggatgccccgtcagaaaacag

SEQ ID NO: 17103 - DNA, 426 bp, Zea mays
  Peptide Sequence Number=SeqID_58882
atggtcgttgacccaccgttgcaacctccacgtggaattcgggtccgggggtccacgggcgctggggataaagacttgtccgcgccgcaacgacctccctctcgagctctcccctcttgtttcccccttccagccgccgtccgcggagaagtgagtgccgcctccgtcggtattggcatacgccatcgccagtgcttcgcgggtagaccggtggacttcggtggggcatccaggaaccgtgtggagatctctgggacacggggagcaaccggacagcagggaactcctcgtcggaagcacttctccgccgcaggccgcactactccaggggtggatcacgtcaagacgccattgaagatcgcgcagcttggtcgtgggtccgcacaactccgtgggaggagttcatcacattacaatcgccggtag

SEQ ID NO: 17104 - DNA, 435 bp, Zea mays
  Peptide Sequence Number=SeqID_58883
atggacttcggtggggcatccaggaaccgtgtggacatctctgggacatggggagcaaccggacaacagggaattcctcgtcagaagcacttctccgccgcgggccgcactgctccaggggtggatcacgtcaagacgccattgaagatctgtcggcgtttcgagaccggggggtccctaagccgacgagtgagtgtcgccgcgtgccccagcccagatgggtcgagtgcgtgggcgagcgcgaaggggggaaggagcgaggcggtcggtgaccggcgtgagaggtgggaatcccgcggccttcgtgttcgtcccacgcctaggtcgggtgcgcttgcagtagggggttacaagcgtccacgcgggagagggaagcgagcggccccaagagagcgcctatcccgtcctcgtccccgcgcggccaaccctctctaa

SEQ ID NO: 17105 - DNA, 138 bp, Zea mays
  Peptide Sequence Number=SeqID_58884
atggcggccacaaaacggacccgagatcatggcagatggtggtggcgctcctcgggcatgtgttgtgcgagatcggtgcgagagctctgcagaggtgcgctactgggcgaggggagttttgatatagtaaagaaataa

SEQ ID NO: 17106 - DNA, 2031 bp, Zea mays
  Peptide Sequence Number=SeqID_58885
atggcctgcaaccgccgccgcaagcttctctgcgcctgtttgctgctggcttgcgcagcccccgccgccgccgccgccgtcaacatctccgtctactggggccagaacagcaacgagggcagcctgggccagacatgcagcagcggccgctacgccttggttgccatggccttcctttccacgttcggcagcggccagacaccggtcctcaacttggccgggcactgcgaccccgcgtcgggcggctgcacagctctggccgcggacatcgcggcctgccaggcgagaggcgtcagggtgctcctcagcatcggcggcggtgctggaagctacaacctctcctccgcctcggacgccgagagcgtggccacctacctctgggacaacttcctcggcggcacctcctcatcgcggcctctcggcgacgcggtgctcgacggcatcgacatggacatcgagatcagtccgtccagccacttcgacggcctcgccaggaacctaacgtcgctgtacgggggcgacaggcgagggaggaagtacctgctcaccgcggcgccgcagtgcccgtacccggacgcctcgctcggcgcggcgctcgccacggggctgttcgaccacgtgtgggtgcagttctacaacaaccccgggtgcgagtaccagcagaaggacggagacggcgtggccaacctggcggcatcgtggaaggcgtggacgcagtcgctgccgtcgtcggcgtctgtgttccttggcctgccggcgtcgcctgctgcagcgggtagcgggtacgtacccccggacgaccttgtgtcgcgtgtgctgccggcggtgagcggctccgctaactacggcggcctcatgctgtggaaccgctactacgacaacagcaccggttacagtgcccggattctgagcagcaatatcatagcgggcaccgcaggcgtatccgggctgtgtgcaataatcgctctcgcagccttgatgtggtggtacaagagacgttatggcatggtaataccatggcgcagaggcgtatccggggtcgaatcctttctgcaaaagcaaggagctctactacacccgaaaggctacacttactcggaggtgaagaggatgaccaggtccttcgctcacaagctcgggcaaggcggctacggcgctgtctacaggggcagcatgcctgacggccgtgaggtggccgtcaagatgctgacgggcatgctggagggcgacggcgaggagttcatgaacgaggtggcgagcatcagcaggacgtctcacgtcaacatcgttactctggtagggtactgcctccagggtccaaagagagctctcctgtacgagtacatgcccaatggctccctcgagaggtacaccttcggcagcagcagtggagaagacgccttgagctgggacaggctgttcggtatcgtcgttggagtcgcgcgagggctggagtacctccacacgggctgcaacacccgcatcgtgcacttcgacatcaagccgcacaacatcctgctggaccaggacatgtgtcccaagatctcggacttcgggctggcgaagctgtgcgggcagaaggcgagcagggtgtccatcgccggggcgaggggcacggtagggtacatagcgcccgaagtcttctcgaggagctacgaggcagtgggcagcaaggctgatgtgtacagctacggcatggtggtccttgagatggtcggagcgaggaagaatgtccatgtcagtgctacagacgacggcggcaacagcagcagcagcaggtattttccgcaatggctgtatgaaaacttggaccagttctgtcgccccacaaccacgagcaacggcgagatccgcggtgacgacgacgacgccacggaagtgctgctcgtgaggaagatggtcgtagttggactgtggtgcatacagtccaaaccggacagtcggccgtccatgggccaagtccttgagatgctggagagcaacgccgccgacctgcagctgccgccaaaggccttgtgcaccgcttattaa

SEQ ID NO: 17107 - DNA, 1095 bp, Zea mays
  Peptide Sequence Number=SeqID_58886
atgggctccagagtccttcacttagacgttcctgcaaattctgaggcctatcttatgagaaatgtaccagggagtgtaagtagccctcccatgaatggtgaaaagggtctctttcgaaatcagaatgcggggttcactgcacttgcaagtcctgtgaggagagaaatcggaaacaggcatcaactgctcttcaagctaacaccatctgctatgtttctggataataatggagtttcatgttctccagatcgtcgacaaggtccttctgtgttgatgacaatgacttggaagatgaacattgtatcagtgaccatagtttctacactatccctgtccggtgctgttccaactgaaccattgacatggaatttaatcaaagtttggttgcctgtaaatatcatctttgttggaatgctgatcacaagcatgtttagtttgaagtacattaatgttgccatgctgactatattgaagaatgtcgccaatgtcctgactgcttctggggaaacttattttttcaagaagcagcatggtactcaagtttgggttgctcttatgttgatgataatctctgcagttgcgggaggaataacggatctgtcattccatgctgttggatatatctggcagaccttaaactgtgttctgacggcggcatattcgcttacattgcgacatgtaatggacagtgctaagcaagtcaccaagtctgggaatttgaatgagctttcgatggtgttgctgaataatgttctttcactgccattgggaattatcctcgttcttggtttgaatgaaatggagtaccttttgcagacatcactcttaaggatgcccgagttttggctggtcatcactgccagtggagttttggggcttggaatcagctttacatcgatgtggtttctccatcagacgagtgcaacaacatatagccttgtgggctccttgaacaagatccctctttccatcgctgggatcgtcctcttcaacgttcgtacaagcgtgcagaactctttgagcattctgtttggtctattagcaggagtattcttcgccagggccaaattgcgagataactcaccgaccttgtga

SEQ ID NO: 17108 - DNA, 495 bp, Zea mays
  Peptide Sequence Number=SeqID_58887
atggcgctgagccgcttcacgcaatggctatggccggggagcgccgcggcgccggtggccgcccacgagcaccccaacgaggggctgacgagctcctccttcccggacttcccctccggcttccgggagcccgacaccgtcacgttctacaccggcaggggcgccggcggccgccgcgcgcgcccgaggagggtcaggaaccggcgccgcagccgcggtgagccccgtgtcgaccgggagtacgacatggtcatcgtcccgtccgacggcggtgggtgcctctccggctctgactcggacgactccgactggtccatcggctggctcgagccacaggcaccggagcttcagacggatggcgaccccgagaactgcttcgccgtcctcgtgcccttgctaccgccacggccgccaagagcagcagcccgggagggcacgagggcaggttttcttggcgccggcaccctcacccaatggttggattcctctgggtga

SEQ ID NO: 17109 - DNA, 408 bp, Zea mays
  Peptide Sequence Number=SeqID_58888
atggtcggctcgtcgcttgtggtggccggagctggtctggccttgtgcgcaagagagcgagctcatcggcagcgagaagcttggcctgaacacgatggtatagctcgatctagtgagtcggggagctccacagaagacgaccgaagtctggtaaggatgatctcactgtttcggcgggggcagggccttggctcgagcttggaaaggcttcacgtcctctcggggaagctgtccaagggctcagacgaggttgggggtcaatgggaatggctggccatggaggccggtcttcagaggaggaggcgggtcacggggaggtcgtcggagctgcgtgctggctcgggaaagctaggcggagtgcggaggagtgacagggagggtgcccgtgcacgatggcgtgctttatag

SEQ ID NO: 17110 - DNA, 185 bp, Zea mays
  Peptide Sequence Number=SeqID_58889
atgaccgtcctcgccgatgctggtggctcgacccgtgagcggaaccagtggggggcgccagacccttgcctctttcccctaccgcgaattcctgggtggcgcattgagaattgctcgtcggagctgttagtccaccgcggggcagcgcaccatcgtggacgggagactaggtgctatgactcacg

SEQ ID NO: 17111 - DNA, 384 bp, Zea mays
  Peptide Sequence Number=SeqID_58890
atggatctatccactgcggcccgggcgtactggcgctccatcgagggtcttggtgggtcggatgagttgggggtctcctcggatgaggcggactcctctgactcctccgaggagtggagcggcaacgatggtgacaacgagggtgacggcagtagcagcggcgatgacgacaagggcgacggcagcagtagcggcggccgcaagggcgacggtggcgaaggcggcggtgaccgcggcagcagcgacgacaacaagggcgacggtggtgacagcagcaacgacggcggcaagggcgacgatggcaacgacggcaagggcgatggtgacgacggtagcagcgacgacagcggtggcaaggccactagcataatgccactagtttaa

SEQ ID NO: 17112 - DNA, 456 bp, Zea mays
  Peptide Sequence Number=SeqID_58891
atggagcaaatgatggcaggagcaacaaacagaccccaggaactggatgaagcagcgcgcaggcgactcacgaaacgtctatacatcccccttccttcattagaaaccttagtgcaccatggttgtgaagaagcacgggcttggataattcgcaatctattggagaaagatggacttttcatgctctcggaagaagaaacaagtgccatctgtaaattaactgaaggctactcaggatctgacatgaaaaacttggtgaaagatgcctcaatgggaccactaagagaggctcttcagacgggcgttgaaatcgcaaagctcagcaaggaggatatgcggccagtgatgctgaaggatttcgagaatgctatgcgggaggtaagaccttctgtttcctcaagcgagctggggacttatgaagaatggaacaggcagtttgggagcctatcgatctag

SEQ ID NO: 17113 - DNA, 852 bp, Zea mays
  Peptide Sequence Number=SeqID_58892
atggcggagccgcctttggccgccggctgcacgacaaactggaggagggaggcggatgagcggctgcggcgcctccactccctcctcttcggcgccgacgccgcactcgagcacggggacgccacggtggcgcaggcgctcgcgctccgcctcctcggcttcctcgactctcaggcgctagccgcaggcgcgggccccgaggacgccgccttcgtcgcgcccattcgcaccgcggcttccgctcggctagccgccgcctcacgcgcccgcgcctctgactccgaccggctcttctccccccgctgccaacagcccagcactgagctcgtcaccaccagcagcccaacactcaggtcgctgccgccagcactgctctgcgcatcttttgagcttgcaagaacggatgttggctgtgtttttgcaaatcagggtgacaataatgttgaaagaatccagcgttcgaagtatttccaagctcttcttcagaagtctaaagcaaatgtttctgaacaacggaatgcaaagtggaaacatacagggttcagaagtcctatatttgaggttgcaaattctccatcaagtaatgatgaagctgatgctcctgccaatgagtttacgactgccaagagaatgatggacgcgaagaacgcggacatcgccgacaaccacacgagcgcgggcgaaatgaagccaggaagcctcgaccacgctgttggccacaacgcgatactcaacctaagagttggagcgggagacggcaggctgccgcttcgaggaccaagagacaaggcacacgtgctggaccgcgtaggcgatgtcgagcatggtgaacaggtgaaggtgagatactag

SEQ ID NO: 17114 - DNA, 909 bp, Zea mays
  Peptide Sequence Number=SeqID_58893
atgtccgacgccatcgtgtccacgaatgagctcctcgcgttggccgacgaggctgagcgccgatgtgacttctctgtcacggccacttgcctcgagtccacgttgtgtccaccccacaccgccgctctcctctcactcaccgaggctccggcaaccaacactgcgcccccacacggccatctcctcagcactgcgccccacacaagcacgcccccgaccccctggccgctccctgtgcccagttcctctactcctggttgcgacgcgccttcctccccacgcggcggccttgcgtcggccgactcctccagcgtcggcatccactccaatgtgggtgagtgtggcttccacttccccagcagcgcgcgcagcatcgtctctcccagagccgacaagcgcgcgccaaggaccacgcccacaccgctgacatcccttttgcgtcccctgcatggagcttgggccaatctcccatcagcagccccactcctccccacgcccattgacaacaatccctacagctacatgcctacgccacacttttctgtgccaagcgttcttcctcaccctcgtgcatggtctgccccgatgtggtctccactggcgagcacgtacttctccccctgctctgttgcgacccactataccgctttcggcctctcccttcctacacctgctctttcgacatccatccttcgctccaccgcggttcatgtgcctccctaccacgtgtgtgtctctctttacgacggacagcttctccggagcacatctgtggcctttgatcgggtcatgaacccggttctcggtgtctacatcgagctcttccacccttcggcctccatacaacctcaggaggaccgccacgctactggaccatttgtgtccatgatgccgcgattgtctccatga

SEQ ID NO: 17115 - DNA, 828 bp, Zea mays
  Peptide Sequence Number=SeqID_58894
atgactgtcttttgtgatcagccagattggcttcaagtatgggcagagattgagagacatgacagtcttaatatgctgcaggcaccaattgatttagagaaaaatcaaggaacgatgcttgagcacaactcaattgattataagtctccagtaaggaaaagagaaacatctcgacctcaccttgtctattgtggcatccggcgtggaagcacaagacgtcgtagcatatggcgtggaaacatcggaggagctccggccaccgctactggcaatctcggaaccccacgacttcttggcctgtggagcggtcttcccctgaaggccaactctaggtgccatagaaaatggagcgaatcttcggcggctggtgccgtacttgcagttgtcgccatcgccgcctaccaagcacacgttggtggcgccgtccgcagcacccatgatgccgcatcggagcagcacgtcgcggagatgagcgtcgtgccacacggatgtagagatgtcgtgcgccaccggacgggagcctgcggcgggagagcaacgttcggccgagatgcggggagggcggtggacgggatccgaggaggccagcggttgaacatgagccgacgcgtgggtcggcggcgaagcgagtcggtggtcgtgccccagggcgaggtgggccaacaagggcgacggcagggacgagaggtctgggagggagtgtcaaactcacggcgggtgaaggacgaggaaaccttggacgccccttgcggcgcggcgccgtttgacggggaggcggtgggtggagagctttttggaaccgtgatatcgctaacactgggcttctga

SEQ ID NO: 17116 - DNA, 222 bp, Zea mays
  Peptide Sequence Number=SeqID_58895
atggaaagcgggaggagaaatctctggcatgtccgtcgtcagggaatctacggggcggatggcgctccaggatcccgcgccgacaaggaagtaaagaaagaaggcggggatgctgggggccgcgctggtcggtctctggctgatgctccagcagccaccgatgcctttggggagagaaggcacacagcgaccatggcgccggggcctgtgatctacgtgtga

SEQ ID NO: 17117 - DNA, 420 bp, Zea mays
  Peptide Sequence Number=SeqID_58896
atggccgcgagccgccgtgccatggtgccgagccgccgtgctgggtcgagcgcccgcacgccgagccggggccgctggttgctgctgctgctggttgccaaggagagcagggaacgaatgcttggggttgaagaagtcgtggacgtgcgtgaagaggaacaacctggtggctgggaaacaggagtagtggcggctagggaagggagggggcagttgagggaaataggcctgacaactgggtctcgcaccctgctgacggggtgttacaccctcgaagatgtggatgccgcgatgagggtggccgccgacgacgacagcatcacggccacggtggtgtctgtgctgctcacacttgcgttcatcagcctctccatcctcaccctcggggtgatatacctgtcggtgcaggacttcttgtag

SEQ ID NO: 17118 - DNA, 738 bp, Zea mays
  Peptide Sequence Number=SeqID_58897
atgtccgtggcccgctcggccttccagcctcgtcgcgcgcacgggagcacgggtagcgcccatccagttcgtgggcccacccgtcagcaggccaccaggttgttcctcttcacgcacgtccacgacttcttcaaccccaagcattcgttccctgctctccttggcaaccagcagcagcagcaaccagcggccccggctcggcgtgcgggcgctcgacccagcacggcggctcggcaccatggcacggcggctcgcggccatggcacggcagccgacacggcggcccacggcttgccctgcgcggcagcctacgtggccatcctgctcggtctctacccggcgcggcggctcgcggccagccagcgtgactcgcgcggcctagctcctagcccgctgccgagccctctcctgcgcgcctgtcccgcatgcccaggcgtccggccccggctccatagcccgccgcagtgtgctcccagcgggccctggctgacatccagccgtcgtggtcgaccgaaaggccaccctcgccgagctcctcccttcgtgttagttctcatgtgcgcagtggagaacgagaagaagaagcaatcgtcctgtggtgacgaggatgatggttacgattatgactatggtaatggtaaggggtattctttccgtttggaaagggtaaagaagaaggagaacggtgtcgaggcggatgtccgggagttccaggacttcgacgagttcgaggattag

SEQ ID NO: 17119 - DNA, 909 bp, Zea mays
  Peptide Sequence Number=SeqID_58898
atgaagggggtggcggcggagcggacaagggaccggaaaggggatatttcgaaagggatccttctccgcgaaggaagcgggccccgagcccacctactgatcaggggttcgaaggctggcccctcggaagggttcgacagccgcccagagcactcgggcttcaggctcattactgatcagaggttcgaaggctggcccctcggaagggttcgacagccgcctcagagcactcgggctccgcgcccactactgatcaggggttcgaaggctggcccctcgaagggttcgacagccgccccagagcacgcagagcgagggatgactctggaggctgatgggcgcaattcaggtcaaggcttcgtctactcaagggacgcgatctcgcctcgctcgagcccagcctcaggcgggaacagtagtcccagacggattcacgcctcgcccgagggcctcctcagcaacgggcgctccctcgactcgcccgaagcccagctcgagcaggcttcatacctcaggcgccacaggaagctccgcctcgcccgaccttgggcctcggcctcaggagaagtctccgcctcgcccgaccccatggctcggcccccgcctcggcctcggaaggtggtctccgcctcgcccgaccccagggcccggcctcaacctcaacctcgggaggaatcgcgtcctcgcccgaccccagcctcggccttaggaggagtctccgcctcgcccgacctcgggctcggaccgaccacgccacaggggccccttacggaagcaaggagacgtcagcaaggtcccgacagccccgacagctatgcttctacagggctcaaacgctcctccgacggccacgacaccatgtacacaggccctagcacctctccgacagccacgctggcatgtacatag

SEQ ID NO: 17120 - DNA, 849 bp, Zea mays
  Peptide Sequence Number=SeqID_58899
atgatcactgttgggcacccggtggcctttgctgtggggatcctaggaaacatcctgtcattcctggtcatccttgcaccagtgccgacgttctaccgcgtgtacgcgaagaagtcgacggagtcgttccagtcggtgccgtacgtggtggcgctgctgagcgcgacgctgtggctctactacgcgctgctgagcacggacctcctcctcctctccatcaacaccgtcgcctgcgtcgccgagtccgtctacctcgccgtctacctcgcctacgcgcccgggcccgcgaaggcgttcacgctcaagctgctgtgcgccatcaacatggggctcttcggcgccatggtcgccttcctgcagttctacgtcgtcgacacgcagcgccgcgtctccatcgccggcggcgtcggcgccgccttcgcgctcgccgtcttcgtcgctcctctcgccatcatccggcgagtgatgagaaccaagagcgtggagttcatgcccttctggctgtccttcttcctcaccgtcagcgccgttgtctggttcttctacggcctcctcatcaaagatttcttcgtcgcgatgccgaacgtgctgggcctgctgttcggcctggcccagatggttctcttcttcgtgtaccggaaccggaaccccaagaagaacggcgccgtgtcggagatgcagcaggcggcggtgcaggccgacgccgagaaggagcggcggtcccacgccaacgccgacggggaggccgacgtgagaaccgtcatcgtcgacatcatgccgccgcctcccgcgatgatggtgatgatgacggccgcacatcagacgccgccggccgtggaggtggtctga

SEQ ID NO: 17121 - DNA, 102 bp, Zea mays
  Peptide Sequence Number=SeqID_58900
atggatggagcccatgagaggatgaaggccagtcacaccatcaccaaatcagagtacctgcaaaatgtgccacagcaagctgagtatactatactcagctag

SEQ ID NO: 17122 - DNA, 342 bp, Zea mays
  Peptide Sequence Number=SeqID_58901
atggccgggacgcgcgccacatcggggctgcgcgagcaggggacggggacgaaggggcgaggtgaaggagagaggggcgggactcaccgcagtgcggcgaggtcggcggcatcaaggggcggtggggcgtcggggagggatgagagggagatcgtgcgagggagaggtcactatcaagcctcttgggctcagttgccaccaccaccaccactagcgccaaacttgatccataaccaacagccaaaagggcatcgccaggctcagcaacagcgcgacgctcgggaggagttcgaggctcgcacagtcaacagtactgtgcccgagtcaaggcatatctactga

SEQ ID NO: 17123 - DNA, 318 bp, Zea mays
  Peptide Sequence Number=SeqID_58902
atggagagtcatgatctctgggcagacagggaatcacggcttatggataaagtgacaatgagaataatggttttggtattgactctggtaatgataattactgagtatgttgatgtgtactcacccttgctctacacaccaaaccccccatccccaggttgtcagcattgcaacccctgctcaggagaagatgaagccgtggaaggagacttccaggagttccaagattacgacgagttctgggcgtgggttagcggcaacccccagtcggctgcctgtgaaggccacgtttatctacgtttcatttttgcactttga

SEQ ID NO: 17124 - DNA, 348 bp, Zea mays
  Peptide Sequence Number=SeqID_58903
atgatcatcaccgagaggaccgagggacgtgtggagtctccgcccttacccccagctctgagcaatccagtgggcaagacgcactgcaatggctctgacatctacctcaagactgcatcgacgactaggatgacttcagccacaatgaggaaccgcatgcccgacgtcatagaggcaaccatgatcgaggacttctaccatgggtccaatgactcggcttttgtccgggctatcctccagaagacaccctcgacctcgaaacaacagttctgcgaggcggacatctacatcaccgccaacgagcgagcccagaacctcatcaggaacacaaagcatgcaccccaatga

SEQ ID NO: 17125 - DNA, 483 bp, Zea mays
  Peptide Sequence Number=SeqID_58904
atgagtgtgtcctctacccttccctggataaagaggatgtccaggaagaaggagctgggtgtggtgctacacactccctccatctcctttgagggcggagtggtcaggatggtcgtcggcggtgccttcggggtcgcgccagtcctagaagcacatgcttctcttcgccgagtgattcgggtccatgcccgggtgggcaatgtggacaatagagttcatcatgccagagggcctactcgcaaaattctcattggcgctgttcgtggcaaccctgcagccgtttttggcaccactagggaagatttattcccggacgggtccactatgcggtgcaagatacctccccgatctgcgatgcaggagttggatctaaagtggaagtcttctctggcattgaaggataagtcattacaagaagcttcgtcttcagaatgcaagcctcttcctcatgacgaaggcacacgagatgaagaccggatctaa

SEQ ID NO: 17126 - DNA, 549 bp, Zea mays
  Peptide Sequence Number=SeqID_58905
atgacgccacgtgatcttcatgaagctgtagctgtggccttgtgtcgagggcttaaggagcttaggcttgttggctttccagcatctgttcaggcttatcacatggaacacattttatgtgacatcctgcactacaatgggatcagaaaggttgaactgcaatcctaccattttccagacacgcatgtttgcactgtagctcgttcatgccagggagctctgcaggaacttatattggacgagtgcccgaacgttctgggcaactttgtggtgtgcctcagagagtcttgccccaacctaaccaagttgaccttgaatcgtattggaatcagtgatgtccaaatcaggatccttatgcttgtaggatttcaccaacttgaggagtttaatttaacgtggtgctggtgccccttgatcactgacaggttactggctatcttacatgcatcaacattgcctaagctgaagagagtcaatttgtcagactgccctaatgtcacccaggagtctgttgactaccaccagcatcgctgggaagtcgagtactaa

SEQ ID NO: 17127 - DNA, 906 bp, Zea mays
  Peptide Sequence Number=SeqID_58906
atgaggcaatcaagctgccttagaacttcttatgaagcttgtaagaaggtaagcgcaggttcttccatgtatcaatcaagaactcttccacaggacttgataaatgagctgccagaagcttgcatagctgaaatattcaggcatgtgggaaacccagaagatcgccagtcatgtgcctgtgtctgttggagacgggccaacatattggtccctcagcggccagatttttggggccccttcagtgttcatcaaggtgttcacccttgcctgcatatgtctgatgttgatgatgtcaagcttgcagccgctgttgtcaacatatgtgcaaggggtgtgataactgatcttggtctttgttgtgcaccatgtgggactgttgttgctggtgttccacggctcactgatagtgctatccattttgtaagcagtgcatgcggcaatctgaagtcagtttgtctcgttgactgcctctctctcacggataaagctgccaggatcattgcttcaaactgccctgcactagaaaatttcgttatgttacagtcttcaatcagcgacgatggtcttcctcaggttgctaagcaatgcagaaacctgaagttcctccatatcgaagggtgcttgtccatcactgaggcgtctctaagagcccttatgcagtatgccaagagactcgagtcccttactctgggaagctgccctcaaattgggcaagatgccatcttgtccttactgatgaaccaaccttatctggataaacttgagctcaagggcatgatggctggagaatcacatatgaatgttgcaagacaatcatcagtcctccatcatttatgcttatttcgccagctctctactctcatcctggtgaaatgctcaggtttatgggacctgggcaatgcttaa

SEQ ID NO: 17128 - DNA, 348 bp, Zea mays
  Peptide Sequence Number=SeqID_58907
atggcaatgcggttggcggctgcggccacgttcgtgcggcgcctggcgccggcgcgcccaccagtacgcatcctggcggcggcatctacggcggaagcggaggcagtgacgtgcgggcgcggggacaagaaaaccaagcgcgggaagcggttcaagggctccttcggcaacgcacggcccaagcgggagaagaagattgagcgcatcaaggaccgcgtcgagtttgaggcttcaaatgaggtaagacttgctgtttatttcagtttcgttcaatttcaggcttcaaatgagagacaagatctttaccaattctttgtagactctattgttcaacctcattggcactaa

SEQ ID NO: 17129 - DNA, 2280 bp, Zea mays
  Peptide Sequence Number=SeqID_58908
atggctagcgaggagcggatcctagtatcggtgcggctacggccggtgaatgcgcgagaggcggagcgcggcgacggctccgactgggagtgcgccggtccgaccacgctcatgttccacggcaacatcccagagcgtgcaatgttccccgcctcatacacctacgcaagcatatttgcgtacggccagacgagcagcgggaagacgtacacgatggtcggcatcacggagcgtagcatggcagacatctacgactacattgacaagcatcctgagagggagttcgtgctaaaattttcggcgatggagatatacaatgaagccgtgagggatctcttgagacctgacgcaacacaactaaggcttcttgatgatccagagaatttcgttgatttagcaggaagtgagcgcgcctctcaaacacaatcagctggtgtgaggctgaaggaaggtagccacattaacagaagccttcttacattgggaaaagtcattcgccaactcagcaagggaagaaatgggcatatcccttacagagattcaaagctcactcgcatattgcagtcatctttgggcggcaatgcgagaactgctattatctgcacgatgagcccagcacatagtcatatcgagcaatccaggaacacacttttgtttgcaaactgtgctaaaaatgtagttactgatgcaaaggtcaatgtagtgatgtcagacaaggtgttattgaaacatcttcaaagagaaattgcaaggctagagaatgagctaaagtttcctagaccaacctcttgcagcaactatgctgaggctttaagagaaaaagatgagctgatcaaacaggatcaatcgaacaggtcttcagagtcccttccatgtagtgcgtctgaagacacactttcttttgatacttacagtgatgtttatgaagaacaagatgatctaggctccaaaggatttgatgtgtcacatgtctataatgattatcatcatgatgtgtatcaccaaaaagtagacgaacacccaatgtctagtttgcatcaaccaagaaaccatatttctaatagaacacagatgtaccaaccaaatagggagacttcaccagaggtccctaaggagcattgcaaggaagtccagtgcatcaaaataaatgagtttaggaggagtcggtctgacgaagaaaaacatggtgaaaacataacatacacatcagagggtgccatcaaactgtacacatgtgattctgagccatcttctgatactgaaaaaacaaataatgacgaatctttagtcctgaagaggtgtgtgataagctccagagacagtgtactaactagaagcagaagttgcagagctagcttcatggtcattccgaatagttggtttgatgattcagcggatatgagaatgacaccaccaggtgacattttaaaatatcctcacagaaggctagagaaggttaggaggagcatgtactctgaaaatggtcattgtcaaaatgatcttacattagactgccctgtggtctctggaaaagttgcatctgacatggttatagacaaaaacacttgcaatgaagaagatggatatgccaacaataaattcagctgcatcacaaaggttaaagagaagcaagaagactattgtacatcccaactagagggcaatcaggacaacgttactgcagaaatcttggacatgaaacatgcaaaaaatattgacaaagatatatttgtggccaatattgactccccttcacggtggcctattaattttgagaaaaaacagaaagaaatcattgagttatggcatgaatgcaatgtctctatagtacacagaacatatttcttcctcctcttcaaaggagtcaaagcagacaatatttatttggaagtggagcacagaagattgtccttcattcacagttctttcattgccggatgtgagcctaatgttactgttacatcaagcttgagaaatcttcggcatgaaagagacatgctctacaagcaaatgctgaggagactccatcttctagaaagagagagcctttatagcaaatggggaattgatctgaattctaaacaacgaaggctgcaactatctcgccgcatctggacacagactgacatggaacatgtgagggaaagtgccgctcttgtcataaaattggtagaacatctggagaaggggcaagccatcaaggaaatgtttgggttaagcttcacattgaaccaacgagctatccaaagacctttcagctgggttagtgctaactcctaa

SEQ ID NO: 17130 - DNA, 579 bp, Zea mays
  Peptide Sequence Number=SeqID_58909
atggtgaacaagtacgtgggtggtggtgggcttttccaacgccggtgtcagtgtcggggctggggcgggagcagttggaagggagagggcaagagagggaggcacggggagagggaagggaggaagggcggcgatggagaccgggtagatatcagtgtgttgagggcgtccaggtggcgcaagaactcaacaactctggcgctggagatgctgtccggtagcgacacgtgctaccgccacctcgctgacaaccgggcttgccgtcctattggtgtctggccctggcctgcctcggtgttggcatcgtggcttgccactacaaccctcctccatgcagagcggaggcatcgcccctgccgccgaggtcgatgtccttgtcctccatggggaggggagcagtggcggcgtcgggacaccgaaccacctttccctacacagaagctgttgaagaggatggaagagcggcagctagcggaggaggtgaggacgcgtccaccgtcttcgtctccccgcggcgaggtgtggcgagagtgcgagacggggcgtggggagggagcgcatgcgggagaggcagaatga

SEQ ID NO: 17131 - DNA, 399 bp, Zea mays
  Peptide Sequence Number=SeqID_58910
atggcgccgagtccgattgagctcgagggaggggaggtggggtggctgagttctggtgtggaggaacaaggggctcgggcggacccttttataggcggccaggagggggaaggaagggaggggacggcgagcgccgacgagctcgccatgatggcggggatggagcaaacggcgacgggatggctcgggcaggcgaggggtgaggggacagctcggtggtggtggttaggggtatttatagctccaaccaccaaaccaaccgttggggttgggctgctgtcgatgggtgcatcggacagtccgctctgtcagggcactgtgctgtcgaccgtttcgctgatagatgttgctccgcttggcgcactggatagtctggtggcacaccagacggtccggtga

SEQ ID NO: 17132 - DNA, 240 bp, Zea mays
  Peptide Sequence Number=SeqID_58911
atggcggcgcctttggcgtcgtgccctccttggaggcgtcggatctggagcccgtctcggcttgtggcaggggtggtgttggttggttggtggagatgctcgtgcgcagtggcagaagaggtgtgcagggtccgtgttggcgggaaggtgcggaggggccatgggagtcgacagtcttgggctgttgcgcatggtgcagtggtgatcctggcaatggcttggtatgttggattagaatga

SEQ ID NO: 17133 - DNA, 918 bp, Zea mays
  Peptide Sequence Number=SeqID_58912
atggggaaggtgatgggacagactcagatgctgttcttccgccatgcggggaagacgttgtcgattccgccgccggcgggcgggctgacggccgccattgtcgttgttgcgcgccggaggaaggagtaccatgttgtagctgctgttgagggacatgaactcgagactcccgaaacggagcagcgtcccgggctggagaggttgctggagactactcatctggagcttgacgggaagctgttcgtcaacacgcagcaggcccctacctggcgcgccaactatcggcgtttcgaccccggggggtccctggaccgacgacccaaggtcgagcgaggcggaggctcctccgaggtcgaggctgagtccgagccctggggtcgggcgaggcggagaccgtcgtctggggttgaggctgagtccgagccctggggtcgggcgaggcggagaccgtcttccggggtcgaggttgagtccgagccctggggtcgggcgaggcggagaccgtctttcggggtcgaggctgagtccgagccctggggtcgggcgaggcggagaccgtcttccggggtggaggctgagtccgagctctggggtcgggcgaggcggagaccgtcttcctgggtcgaggttgagtccgagccctggggtcgggcgaggcggagaccgtcgtctggggtcgaggttgagtccgagccctggggtcgggcgaggcggagcttcctatggcgcccaaggctggacttggctgttgtcagcctcacccgggcaggtggcacaacagtcggagtagtgcaggcggcgctgttttcctgtcagctttgtgctgatggtggttaccagtcgagtttaggagtcttgggggtacccctaattatggtcctcgacaacgaggtcagaggatcacgagcagtcgcgtga

SEQ ID NO: 17134 - DNA, 432 bp, Zea mays
  Peptide Sequence Number=SeqID_58913
atggggatgcaccctttcgacttcaacgcgtccagcatggagtcccaggcccacacgtcatgtaaccggggcgccggttactacgtgcgaaaaactgtagcgccacttgtgccagcgccgcgccttctcgactgcggaaccggtgccgcaattcaaggcaaccctacgcgtggaccagcagtgccagccaaacacgccggtcacggggaccgggaaaggggatactccgaaagggatccttcttcgcgaaggaagtgggccccgagccctcctactgatcagaggttcgaaggctggcccctcagaaggtttcgacagccacctcagagcactcgggctccacgcccactactagtcagaggttcaaaggctggcccctcggaagggttcgacagccgcctcaggctgctcgggctccgtgcccactactga

SEQ ID NO: 17135 - DNA, 1293 bp, Zea mays
  Peptide Sequence Number=SeqID_58914
atggccagtggcggcggcaacgcggcggcggacgccaagcacgtcgatgcggaggtcgtcatcgtgggcggcggcatcgcggggctggcgacggcgctggcgctccggcgggcgggcgcggcgcggcgcgtgctggtgctggagcgccacgcggggcatcgtgccaccggcgccgcgctcaccatcttccccaacggctggttcgcgctgcgcgcgctcggcgtcgcgcacaagctcgcctcccgctacgacgcctacgaaacatccagggtgaccaatctcgagaccggggcgacgcaggtgtttcgctttgccggcaacaagaacaagggcgaagaagtcagagtgagggcgcttgacaggaaggcgctgctggaggcgctcgcggaggagctgccgccgggcaccgtccgtttctcgtccaaggtcgtctccatcgacaccgagcgagcagccggcgactcgtcggtgaccgtcgtccttggattggacgacggcacggtgatccgagccaaggtcttgatcgggtgtgacggcgtgcactcggtggtggcgcggtggctgggcctgtcggaaccggcgagctcgggccggtctgccgtccgcgggctctccgtcttccctggcgggcacggcgtaaagcgggagctccggcagttcctatcggagggtctcagagccggcatggtgcccatcagcgacaccgacatctactggttcctcgtcaacaacacgaaagaagccgccggggacccggtgaagaccctgctcgaggtgaccgacaacctggccaggcacatgccagcggagtacctggacgtggtgcgccactccgaccacggcaacctctcgtgggcgccgctcctgtaccgcaacccggtgtccgtcctcctgggccccgcggctcgcgggcccgtcacggtggccggcgacgcgttccatcccatgacgcccgacatggcgcagggcgggtgctccgcgctggaggacgcggtggtgctcgcccgggcgctgtcgcgtgaggcgacgccggccgagggcgtgtccgcgtacgtggcgcagcggcggtggcgcgctgcctggctggtcgccggagcctacctgtcggggtggatccagcagggcgggaccaacgtcggcggcgtgcgcggccgcctggtgaaggtgttccgggactggatcttctacaggttcgtgttcccccggctcgcggacaccatgtggttcgactgcggcgacctcacgccgccgccgcccacggcagcagtaggcaagagccaccacatcgagtga

SEQ ID NO: 17136 - DNA, 348 bp, Zea mays
  Peptide Sequence Number=SeqID_58915
atggacacgaccggccatgggaggaggaaatccgagctggggactggtgggagctcggctggcgagcagggagcaccagagaaggtcaacggcgagctgagggggcgccgcgagcttgaagatggagcagagggagcagtgctgggacagcagtggagagcgcgccgagtgagaagtacaggaagcgcgcaccacgggagcttcgagctgagcgagctggagcagaggcgctgtccatgcgcccgccatgggagatcgagaggagggaccagagatgcggcaacagaggaggctaaggaaaagcagctgcgcgcggctgtaaaatggaagacgatggagtctgcgtga

SEQ ID NO: 17137 - DNA, 1020 bp, Zea mays
  Peptide Sequence Number=SeqID_58916
atgcaggcggcatgcaaccacgccaagtgggcgcgccccttcgactccaacgcgtccagcatggaggcccaggcccacacgtcatgcaaccggcgcgccggcaagagaagcaagcgacgcttcgccttcgccataatgaccgcgtcgaaaaagggaccgggaaagggggatagcccgaaaaggatccttctccgtgaaggaaacaggccccgagcctccctactgatcagaggttcaaaggctggcccctcggaggggttcaacggccgcctcagagcgcttgggttctgcgcccactactggtcagaggttcgatggccggcccctcggaagggttcaacggccgcctcaggccactcgggctccgcgcccactactgatcagggcgccgcctgcgccgctctgactgctgagccactcaacagagtgaggctggcagcagccaagtccggcctcaggcgtcataggaaactccgcctcgcccgaccccagggctcggactcgggctcagccccggaagacgacgaactccgcttcgcccgaccccagggctcggactcgggctcagccccggaagacgacgaactccgctccgcccgaccacagggctcagactcgggctcagccccggaagacgacgaactccgcttcgcccgaccccagggctcggacttgggctcagccccggaagacgacgaactccgcttcgcccgaccccagggctcggattcgggctcagccccgaaggacgacgaactccgcttcgcccgaccccagggctcggactcagccctggcctcagccgacgggctccaccttgtccgacccgagggctcgcactcgacctcaaccttggaagacagactcgacctcgacctcggaggagcctccacctcgcccaacctagggcacggaccgaccacgtcgacaggaggcgccatcattaccctaccccgaggtgactcaggctacggggaacaagaacggcgtcccatctggctcactccactatacgagtaa

SEQ ID NO: 17138 - DNA, 258 bp, Zea mays
  Peptide Sequence Number=SeqID_58917
atgtcagtggtcgtcatcatgttcatggccgcgctgctgctgctgctgctggcaactgtggagtcgtcgtcgtcgtcgtcggcggcgtcgtcagccatggcctccagctcatccgaccagctgggcgggctggtggcgcttgaggcggcaggaagaaagctactgcagatcgacttatgcggaggacggttctgcaccattgttgatgactgctgcattaccaaccctcgctgtattgccaacgcttgcaccgcctaa

SEQ ID NO: 17139 - DNA, 2829 bp, Zea mays
  Peptide Sequence Number=SeqID_58918
atggcccaacaggcagtttttgcggtgctggagcggggtggtagcattgcagttgatgaggccgtatacttgttgggcgtctctgaaaagctggaatcagccaagaagcaactcctactcatgcaagcctttctcatggacctggatgaaaagatgctgaagggtaacttcatggctaggcatctagcttccgaggttcgggagatcgcatatgaggtggaggacatcattgacaccgccaacatcttgatgaggagaaacggccccaagacatcagtcagaggggccatgtccaaatatgcttgcttccccatatacctcactcgtctccacaagctgggatcaaggatagattcaactgaagaaaggatgaaaaaacttttcggcgactttgagaaattcaacatcgctgctaatgcaattgcagaagaaccacggcgttacatcaccgaggatgatgacattcggcataggcgattggttcatcccaactcgggtgatcaagttggtgtcattgggtttgatgagcagattaaacagatcgagtatgacttgctagacacaaagaacaggcacctaaccgttgtttccattgtaggtcccggtggggcaggcaaatcaacaatggctaagaaggtgtatagtttgcctgcagtgaagggacactttaaagttcattgttggttaactgtgtcccaacgagctgttgcaactcatgattttttgaaagaggtggttaagatggttgtgccttctcacctcatgaaagttatggttctgcgtgtgatgggggatgtcaaggtcaagaaagtcgacaacgctagaaagatgatgaccgagaaggaggagaagaaaatttgggaagaccagaaagctaaagagctcgaggaagctaaagagcttgataagctggaggagcatgaggtgaaaaagctgcttcacgagtttgcactgagtcaaaggtatttgatagtgttggatgatatatggagcaaagatgcctgggatgctatcaagcatgccttccctaatcagaagaatggcagcagaatcattctgaccacacgcaatgtggatgttgcaaagcttcccggtgcaaggaagaaaatctacaggccaaagctcctgaatgaagatgaaagcacccagttgcttcttaccacggccctcccagagtacatcttggatggcgggcaaaacttggacgagttgaaggagctgggcaaagagcttgcaataaaatgtggtggcctgcctcttgctttgattgttttggggggatacctgtcaaggaatcttgatgttggcgagtggaagaggttgttaacaaacagtatggattggcatgatttgatcacctccgatagggtcattggtgccatactggatcttagttactatgacatgccgagtcatctgagatcatgcttcatgtacaccacggccttccctgaagactctcctattgatgtgcgagttctggcaatgctatggattgctgagggtttcatcccgctggtccgaggccagacccgcgaaaaagtagccttaaagtatgtggctgagctagtgcagcggtgcatgatccaagcggagggatggacgaactctgggatgatcaaggtggtcaaggtgcatgacatcctgcgcgagtgggggtttggacgagctcagagagaagggtttatgaaagattgccattctgcggaggatatcgaggtggcctactcgggggaggagatgatgaaagcttaccgagtggtgctccacagctcactgtcactggaaaggggagttggaaccaccacgagaaagcttcgcactctattagacttcaacaaccacacatcagtacaggtgccaaaatcgttccagggtttacgcgtgcttcacctgaactgttctggcgaggtttctctgccaaaggatattcaccagatgaggtatttgagatatcttggcttgggaggcaactgctcctatgatctcccttccaacattggaggcctcttaagcctcgaaacactgtactgcacagcaagtatagaccacatcccagcatcattgtggcggaacaggacactgaggcaagtgcatatcccctatgctagaagcttatcatcaccacagatcggttcacagtcatcaaaggttcttgttatactagtagattgtgggagcagtacccatatggacgatgctaagcggattgtggagaaaactagaaggcaagtgctgaggaacaagaacctggatctctcgttctgcttgggggtggagtatgggaaatatggcatggaagtcatagggagatgcaatacgggggtccagttccccatcgacctcctcaattttgatgagacgcatgattactgggaactgaagatttgctgcgccaatctactcagcaatgatcacaagatcctggagcttgggaggataaaaaacctcaaggtgctagagataggcgagcagtcatatactggcaaggtgatggttttcccgtcaggcagcttcatgacacttgaacgactggtgctctacgatcttgcagtggagaaatggaaaattgagtgtggatccatgatatgtctcagggtgttgacgctttgcaagtgccccaaactggtccacctgcctgaagagttgttaaggcttccgaaactacgcagtctggctcttatcgcaatgcctctgggttgctaccagaaaggtgaggttcctcagggggtgaagatttcagagtcagatgatgagaaagttttccagcatcttcctatttggcggtggctccacctgtctgccccgcccgcatttgatgaatactag

SEQ ID NO: 17140 - DNA, 324 bp, Zea mays
  Peptide Sequence Number=SeqID_58919
atggagtattcggcaaagacatcacttccactctacaccatcaatattatatatccttttgccggtgccaaaggttcaacacaaaccaataaaaagaacaagttagggttcaaaagaaaggagcaaaaaggaaaccgaagtgttccctggtctggcgcaccggactgtccggtaaagtatcaaattacaaatgcaccttcggctttgacagaaggtaaaagtacaagcgtgacgcacaggcaggcacaggacgcagcctatgagaaattacaattatgccctttacatttactattggcttacagaaaaatatacgaggactga

SEQ ID NO: 17141 - DNA, 201 bp, Zea mays
  Peptide Sequence Number=SeqID_58920
atggcggtgggtgcactgcaaaagggggcgtgggtggcggtagtgcgctacaaagggggcgtggggcggtggcagtgcgcatggaggcgggcacgcgtgcgaggggcacgagtgagtggtggggtcaatgaccctgatgtttgtggcttcaaggagaaaacctttcttaaaatgaaagaaaacacacaagctcagcaatga

SEQ ID NO: 17142 - DNA, 609 bp, Zea mays
  Peptide Sequence Number=SeqID_58921
atggataattggtccacaattgcactcaccaagaaccttgttcttcatgatcgaagttcacctggcatgcaattacctatggctgcataccttggagagcttgttctaagcaatgatgttaaggtacttgtggcacaaaaggctggctccacactagtcaatatcatgaaaaaagggaatagagaggccagagaagcagctttgaaggcattgaaccaaatttcatcttatgatgttagtgcaaagatattaattgaagccggtattcttccgcctctcatcacagacctctttactgttggcagtaatcagcttccaatgagattgaaggaggtctcagcgaccattcttgcaaatgttgtggcatcgggtgcacgttttgagtccattccacttgatcataataggcagaccttggtgtctgaagacattgtacacaatctgcttcatctcataagcaacactggacctgcaattgagtgtaagttgctccaggttttcgttggtctaactgactcttcgacatctgtacaaaatatagttgatgctatcaaaagttcaggtgctattgtcagtttaattcagtttgttgaagcacctcaaagggaa

SEQ ID NO: 17143 - DNA, 429 bp, Zea mays
  Peptide Sequence Number=SeqID_58922
atggcgcctcctgtagacgtggctggtcggcaccctaggttgggcgacgtggaagctcctccgaagccgaggtcgagtctgtcttccgtggccaaggtcgagtctgagcccctgggtcgggtgaggcggagaccgtcggctgaggccggggcggagtccgagccctggggtcgggcgaagcggagtttgtcgtcttctggggccgagcccaagtccgagccctgggtcgggcggagcggagatcgccggctgatgcttgggcggagtccgagccctggggtcgggcgaagcagagttcgtcgtcttctggggccgagcccaagtccgagccctgggtcgggcggagcggagttcgccgtcttccggggcttagcccaagttcgagccctgggtcggccggagcagagttcgccgtcttccggggcttag

SEQ ID NO: 17144 - DNA, 1278 bp, Zea mays
  Peptide Sequence Number=SeqID_58923
atggactacattcatgaagccaggaagatcaatccaataattttcgaagcaaaagaaactagctttgagaatggaagtaccaatcttaatcacacaagggatgtgatcagaaatagtcttggcaaggggagtaaacaaggtattgggtttcccccgttccccgtgggccactcgacccgccgacggagcggaagggcggccccggccgtgaccgcggcgcgactcgcgaccctcccagtcccagaagcggcgtgcggcgaccgggaccggctgctggtggtgaattcgcgccggcgaactgaattcaagcggcgaatcccctcctctggtcctgtctcgagccctcggcgtccgcgcctcctccgtctcgccgccgttctcgacgcccgccgatccaacaccgggtctgcccaacagccccaaggtatggtggcaagtgtttcactagtgatggcagaagtccaggatggtcattatgattcaatgtcacaggccactgatagcttgcgtgttgaacctatatatgagtcgttcctatgcccgcttaccaaacaggttatgcgggatcctgtttctattgacagtggtgttacgtttgaacgcaatgccattttgaattatttcaatgaatgtcttagcagtggaaggaggcttgtctgccctgtaactaagatggagctcagcaacactgagttaaatccaagcatagctctgaggaacactattgatgaatggatgaatcgcaacgaggcggccaaacttgacgtcgctcgtaagtcattgacttctgacagcacagaaagtgatatcctacaagcactccagtatgttgatgagatatgtcagagaagtcgatctaacaggcaggttgtgagaagagatgggttgataatcatgattgctgacttgttgaagaatagcagtacgaaagttgagattgccgctggagacaatattcgcacaattgtaaagttcttaaatcatgggcagactcaggaaaaggagcaagcggtgtcactgttgtttgaactttcagaaaataaggctctttcagaaagaattggcagtgtttctggagctattcttatacttgttggtttgtcaagcagtaaagtagaaaacttgctcattgttgacagagctgagaagacattggaaaatttagagagctgtgaaaaaaatgttagacagatggctgaaaatggacgattgcaacccctcctgaggctgcttcttgatgttagaagtgtctccctgtttcaccaggttcacctttaa

SEQ ID NO: 17145 - DNA, 378 bp, Zea mays
  Peptide Sequence Number=SeqID_58924
atgacgccacgccggcgagcccccgaccagcgacctgatgcatcaaactcaagtaccaagagatacggtgaaggatatcgccgtcagaggtcacctttatacccgacacgggccgccaagggcgcggaaattggaaccgaggcaagaggtcggcgcgctattttgttccgagtccggggggttgaggacacatctcacaccgggacccactatgcagtctcattttttggtagagtgcgagtgtgcaaggagccagtggcccgggcccgagtggtcagtgaagcaatgacccggcacacaagtgattacagagagggaaaggtgactggccaccagggcccatttgtcggcggcagaagtgagcacgggcgggagtga

SEQ ID NO: 17146 - DNA, 702 bp, Zea mays
  Peptide Sequence Number=SeqID_58925
atgggtcttcttaacaagaagaaagatttagcacttaaagctaatcaagagaagaagggcaagaccgaaattctagttaaagaagagtcttcaagtgatgatgaccttgatgtcaatattgccttgatggtgaaaaagacaacaaagatgttgaataaactaaaccgagaaggcatcaaattttattcaagaaataagaagtttttctttagtagcaaaagaaagcccatctcggagatggattgctataattatggcgagcttggccatcttgctcatcaatgcagaaagcctaacaaaaacaaattcaagggcaagaaatatgatgaaagtgaaaatgagaagaaggaaaagaagtttttcaagaaaaaagagagcaaacaaaagagattccacaaaagaaagggtgggaaagcatacattgttggtgattggctcaccgacattgaatccataagcgactcttcctcaagtggagaagatgatgaaaaggtcactgcagtcgccgtggatttctcttcaccaccgcaatcgccttcatccactacacacctatgccttatggctaaagatgaacggaaggtacaaaatgatgttgctagtgaggttgattgtggtagtgatagtgatgatgaatatgcttcccctacctatgatgagctagccgatttgcttaaagaatacactctgaaagggaattag

SEQ ID NO: 17147 - DNA, 588 bp, Zea mays
  Peptide Sequence Number=SeqID_58926
atggcggcggcggtgtctcgcgacgacgagctggtgatcaagtcaccaaacgacaagcggtcttatcgcctcctccgccttggcaacggcctccgtgccctccttgtccacgaccctgagatctacgccgacggttacccacctcagacctccaagccatgtgaagacgaggagatggaggaagtggatgaggaagacgaggatggcgacgacgacagcgaagagtacagtgacgaggaaggtgaggacgacgatgaggaggatggggaggatgacgaggaagaggatgagggcgagccgaagaggaggaaggagaaggttggcgccgagccaatcgttaagaaggctgctgctgcaatgtgtgttggaatgggcagttttgctgaccctgagaaggcacagggcttagcgcattttctagagcacatgctttttatggggagtaccgaatttccagatgaaaatgagttttgccattgtgggacagtagatgttatacatgtacatgtgggccggcctggcccggcacggcacaggcccacaaaagcacggcccacaaaggcacggcccacaaaagcacatatctaa

SEQ ID NO: 17148 - DNA, 807 bp, Zea mays
  Peptide Sequence Number=SeqID_58927
atggcggtgcatctaatgctttcactgaaaccgagtacacatgctaccattttgagattttctcagttctttgtgtcaccccttgttaaggctgaagcaatggaccgtgagatattagcagtggactcagagtttaatcaagttttgcaaagtgatacctgccgcctttaccaactccagtctcatacctgttctcaagggcaccctttgaacagatttacctggggaaataagaaaagtttagttgacgcaatgggcagtggaatcaatctaagagaagagattttagagatgtacatgagaaattaccatggaggagcaatgagattggttataatcggaggagaaccacttgacattctagaaggctggacaatggagctgtttagcaaggttaaaactggccctcttttggatataggtccgaagactgacattccattttggaagccagggaaactctacaaattggaggctgttagagatctgcacagccttttcttgtcatggacacttccttgcttgcacaaggagtacatgaagaaacctgaagattatttggctcatctccttggtcatgagggcaagggaagtttactttatttcttgaaagctaaaggctgggcaagctcattgagtgctggtgttggtagtggaggatcacaacgatcctcgtatgcttatatctttgaaatgtctatatgccttactgattctggactgaaaaatggagcgagaggcaacagccaggctgggataaggctagagaataagattgagatgagctgggataaggctagagaataa

SEQ ID NO: 17149 - DNA, 1824 bp, Zea mays
  Peptide Sequence Number=SeqID_58928
atgggcctctcttggcccagctcggaggtatttgaggtcattggtgctgtataccaatatataaagttgcttaagcagtctgagccacaagaatggatattcaaggaacttcaggacattggatacatggagttcaggttcgcagaagagcaacctccagatgattatgtagttgatcttgcagagtatatttttgaggactgggattcagaattagtgaagcatgctttgagcttcttcaatccagataacatgagagttgatgtactcagtaaatcatttgataagcagtcccaagctattcaatgtgaaccatggtttggttcacattacattgaggaggacatcccatcatctttgatagaaagttggaaaaatcctgttcaagtagatgataatttgcatttgcctagaaagaatgaatttataccaggggacttcactctgcgaaatgccaactctcctggatcctcgagcgacgataaccctcgttgcatagtggatgagccattcataaaactctggtacaagatggacatgacatttaatgtccctcgtgccaacacttattttttgatttatgtcaaggatggctatagtagccttgaaaactctgtcctgatagatctctttgcaaaccttctcaaagatgaacttaatgaggtcctttatcaggcttatgtggctaaattggagacttcaacatctgttgttgctagcaaacttgagataaagctttatggttacaatgataagcttcccattcttctgtccaacatcttgtctactgttcgatccttttctccaaaaacagatagattcgaggtcatcaaagaagatttggaaagagcttacaagaacactaacatgaagcctatgagccattctacctacttaaggctacaagtcttgcgtgaaatattctgggacgttgataaaaaactagaactacttatgaaactgacatttactgatctagtagcatttgtaccgaaaatcctttcccagctgcacattgagggactttgtcatggcaacttgtcagaagacgagacaattaatatatcaaaaatatttctcaatactctctctgctcagacactgccagaggaagcaaggcatgaggaaagagttatttgcattcctaatggtgcaaatttggttagaagtgtccgcgtgaaaaatgatcttgaagaaaattctgtggttgaggtttatttcccaattgaacaagacgttggaaaggaggcaacaaggctcagagctattacagatctttttagcaacattattgaagaaccatgctttgatcagctaagaaccaaggagcaacttggttatactgtggactctagcccaaggatgacttaccggatgctggcctattgttttcgagttatgtcctccaaatacagtcctatttatctgcaaagtcggattgataacttcattgatggtctatctgctctgctggacgagctcaatgaagagacttttgagcaccatagaagtggtttaatagctgataaactggaaaaggaaccttcacttagctaccaaactagtgattattggtctcagatcgctgataaaaggtgtcctggaaaattgaggcgcacgtcccggatgatcgaggtcgtgtacaccagggcgtacgtcgcgagagtcctgatgatgtggcaagctgacacatacgttgtccatgccactataggacacgtggcaagtcgtgggaccatgataacaaggagatgggtacaaggtggttacagttgcacatgttctgttgagtatgctttgcacgtcttctccttgatcgggtaa

SEQ ID NO: 17150 - DNA, 747 bp, Zea mays
  Peptide Sequence Number=SeqID_58929
atgggtcagaggacacttgccttcaccaagctgctgctgctcagggtcttctcctgcaattccctcagactccacgaacggcccgatatctacgcgagtgcaaacatacatccaacattcttgaaatgtaatacttttaacgtgtacatgagcaaccctgttgataggctaacggggtctacacgacggttctcccttcgtagcgggcatggcagggggctcggatgggagctaatcacgccggagaaggggcgcacgcgccagcggccaagagcagtgacgccggtggcgcggcctcgcccgagcaacgaaggtgcgggacagctcgccaacacacgacgccacgagtctaccactgctactgcgcaacgagcggggaagagcggcgtcggcggcgatccgatatcggacagcagatggcacgctaagcagctgggcgttggccgcgtttgccgtgcccgagctgagacgcgaacagccgcgccacaagctacaccgggagaggagagggaagaagtaggagagagctcacctcgacgaccaacggggacgcgacgcggcgctgctgcacgggcgggctgcgcggaccgcgggctccggcgaacggcacagcagggcggggcgattcctagcgaggtcaaggcgaagaaactggacgacgggtgcgggattgattggttttggaaacggcgtgcgcgattgctccacgggaagttcgcacaggcggttggggaagacatacagtag

SEQ ID NO: 17151 - DNA, 519 bp, Zea mays
  Peptide Sequence Number=SeqID_58930
atgaccagaatggggtggggggaatcaggaccatctaatctggagcaatcactaaggatcggtggccggcattggtggcctgctacaaataaatacattctgcagttcataagggttaaaatagctggactgctagataggcagcctaggccactacctgagttagttttatcagaggagatggttagcaatgctgcggcttcattccgtgtgaaagtgaacagcatgctgatgatagcgcatgacattactcttggcaaggacttcaggctatttttccaggtcgtgattgtcttgtggctgttatctgtcattggaaatttctgctcgtctatcactcttgcttacataggaaccgttgctttggtcacaatgcctgcattgtacaacaagtaccagaggcctgttgataggtatgctgggatggtctaccggaacatttcgaggcattacaagatagttgatgagaatgtgatcagtagactaccgagaaggtttatcagagataaagaggactga

SEQ ID NO: 17152 - DNA, 762 bp, Zea mays
  Peptide Sequence Number=SeqID_58931
atgggcagaggagaagatgccggcggaggaggggacgcatgccacacccttcagaggttgacgggggcgggggtgcggaactgtgatcaatgtggacacaaatgcggcgcggggggagcagggcggcgagcatcgtggatgccaggtgcggtcgccattgccgacttgaggtcgggcgcggggcttgcggggctggcgcgcggaagctccgcctcgcccgaccccagggctcggactcaacctcgactccggaagacggtctccgcctcgcccgaccccagggctcggactcaacctcaactccggaagacggtcgccacctcgcccgaccctagggctcggactcaacctcgactccggaagacggtctccgcctcgcccgaccccagggctcggactccacctcgacctcggaagacggtctccgcctcgcccgatcccagggctcggactcaacctcgactccggaagacggtctccgcctcgcccgaccccaagtctcagactcaacctcgactccggaagacggtctccgccttgcccgaccccagggctcggacaccacctcgacctcggaagacggtctccgcctcgcccgaccccagggctcggactcaacctcgactccggaagacggtctccgtctcgcccggccccagggctcggactcagcctcgacctcggaggagtcaccacctcgcccgacctcgggctcggaccgaccacgtcacagggggccatcattaccctacccctagctag

SEQ ID NO: 17153 - DNA, 351 bp, Zea mays
  Peptide Sequence Number=SeqID_58932
atggaagctggacctttggcgttagccaaccacatggacctctacactcgagaggcattcaccgagtttccttatagcttattgctccaccaagatatggtgcctactaggatggggctattgtcatctaacctttattggattagtataaaattgaaggaggggccacatgatgatcgtggtggaaatggagacaacagccatgatagcaacaatgatgatgagcccatggaagaggatgatgaacaagaagcacatgaagaggactctagagatggatatttccatagccagctaaaaacatggctaaagagggcttttggtcctaacaaatgggccatagagtattga

SEQ ID NO: 17154 - DNA, 315 bp, Zea mays
  Peptide Sequence Number=SeqID_58933
atggccccgccctgtgacgaggtcggtccgagccctgggttgggcgaggcggagcttcctatggcgcccgaggccagacttggccgctgtcagcctcactccgtcgagtggcacagcagtcggagcgacgcgggcggcgctgtcttcttgtcaggctggataaggtgtcaggccacctttgcattaaatgctcctgcgacacggtcggtcggtgtggcgatccggccaatgttgcttcttggcgaagactgggcctcgggcgagccgaagctttgtgctgatgggggttaccagctgagattaggagtcttgggg

SEQ ID NO: 17155 - DNA, 1524 bp, Zea mays
  Peptide Sequence Number=SeqID_58934
atgtttttcgacgggtcgctgatgaagacaggggtaggcgcaggcctgctcttcatctcgcccctcaggaagcacctacgctacgtgctgcgcctccatttcccggcgtccaacaatgtggccgagtacgaggctctggttaacgggttgcgcatcgccatcgagctaggagtccgacgcctcgacgctcgcggtgactcgcagctcgtcattgaccaagtcatgaagaactcccactatcgcgacccgaagatggaagcctactgcgatgaggttcggcgcctggaggacaagttctacgggctcgagctcaaccacatcgctcgacgatacaacgagactgtggacgagctggctaagatagcctcggggcgaacaacggttcccccggacgtcttctcccgagaccaacatcagccctcaatcaagaccaacgacacgcccgagcccgggaaggcctcggcccagcccgaggcacccccggctcagcccggggcaccctcggcccccgagggtgaggcactgcgcgttgagggagagcggagtggggtcacgcctaatcgaaactggcagaccccgtacctgcaatatctccaccgaggagagctgcccctcgaccgagccgaggctcggcgactggcgtggcgcgccaagtcgttcgtcttgcagggggacgagaaggagctctaccaccgcagcccctcaggcatcctccagcgatgcatatccatcaccgaaggtcaggagctcttacgagaaatacactcgggggcttgcggtcatcacgtagcgccccgagcccttgttggaaacgccttccgacaaggtttctactggccgaccgcggtggccgacgccactagaattgtccgcacctgccaagggtgtcaattctacgcaaggcagacccacctgcccgctcaggctctgcagacgatacccatcacctggccatttgttgtatggggtctggacctcgtcggccccttgcagaaggcacccgggggctacacgcacctgctggtctccatcgacaaattctccaagtggatcgaggtccgacccctacacagcattaggtccgaacaggcggtggcattcttcaccaacatcatccatcgttttggggtcccgaactccatcatcatcgacaacggcacccagttcaccggcagaaagttcctggacttctgcgaggatcaccacatccgggtggactgggccgccgtggctcaccccatgacgaatgggcaagtagagcgtgccaacggcatgattctgcaaggactcaagccacggatctacaacgacctcaacaagttcggcaagcgatggatgaaggagctcccctcggtggtctggagtctgagggcaacaccgagccaagccacgggcttcacaccattctttcaagtctatggggccgaggccatcctacccacggacttagaatatggttccccgagggcgagggcctacgacgaccaaagcaatcgaacaaaccgagaagactcactggactag

SEQ ID NO: 17156 - DNA, 1185 bp, Zea mays
  Peptide Sequence Number=SeqID_58935
atggcagcagccaacaagcagcagcaggcgggctcttcgtcctcgtgcagaggaggagatgctggcagcagcaggcagtcgtcgtctgtggcggcggtgctgcgcgacaggtacgagcttcagagcctgagaggcaacggcagctccgcggaggtctgggaagcgaggcaccggcgcaccggccacaaggtggccatcaagatcatctcccacgccaacaccgacaagaagaagatcgcacgggagatccgggtgatgcgcctgctcagccaggggcagcacccccacgtgatccgcttcatcgaggccatgtccacccacgcccacaccttcatcgtcatggagctggccgcctccggccagctctacgaccacgtcgtcctgcgggggaggctccccgaggaccaggcccgcaccatcttccagcagctggccgccgccgtgctctactgccaccgcaacatggtcgcgcacagggacctcaagatggagaacgtcctcctcacgcccgacatcgccgtcaagctcgtcgacttcggcttcagcaagctctacacccacgccaagcccatgcgcaagaagatggggagccccctgtacgccgcgcccgagctgctcttcggcggccgcgccaccagctacgtggggccccaggtcgacgtctggagctgcggcgtcatactctacggcatgctctgcggcggcctgcccttcgacggtgccgacgtgtcggaggtcgccaggaacgtcaggcgcggcgactaccgcctgccgtcctgggtgccggacgacgcgcgggacctcatcgctggcatgctcatcgtcagcccacacaagcgaatgaccatggccgatgtcatggcgcaccgctggctccagccggctaccatgcccgcgtacctggcgatgccgccaccggacgcaacgcgtctggcgcaggtcgccgtcgacgagacagccgtcgagcagctcgccatgcgccacggtttcgacaggagcagcctgctagagtctctgcgccagaaccaggaggacgagggcgaagccgcggtcgcgtaccggctggtcctcgccaccatgtccgacgcgcccacccggtacctcaccatgcgccccccccaccgccactgctggaaggcctgcagcacggcggcgtgctcctccaccacggctgatcgcgcctga

SEQ ID NO: 17157 - DNA, 183 bp, Zea mays
  Peptide Sequence Number=SeqID_58936
atgacggcacaggccgcaactggggagagcgagagaggagatttcagagatggcttagatctgaatgccggattcttcgtcttacggcttgaatcgagctgggaggctgtggatctgagcacgggaggttctagagctagcgaaatcgcaaggctattagggttcctttcggagcgcgtctga

SEQ ID NO: 17158 - DNA, 267 bp, Zea mays
  Peptide Sequence Number=SeqID_58937
atgcttcgtcgtcgaaggtcctgcaggaagaaacagcttcgactgatgctgtctatctttggggatcctgatgtggtagatattgtgttcacctgcggtgctgatattttggctatgtatgatgtgacttgtgattgctttgccaatgcgacatactttgagaaatatcttgatagttttgatggtagcaagaattctgataatagatggcttcaaaaccatcaggaccttattgcccaagtactgaaatctatgtctaccatttaa

SEQ ID NO: 17159 - DNA, 225 bp, Zea mays
  Peptide Sequence Number=SeqID_58938
atgcccctgcctcgccttcccctccgcgcagccgcgccagaagagggttcgctagtggcctccgagggagaggcgcgggcgctcggacccatcgccggtggcctctacatgagtggggcttcaacaactcctcatcggcaccgccttcgtggtcatgcaatgggtgctcgtgtcattggtgaagctctcccccactacgaccatgtctggcggcaacaagaatag

SEQ ID NO: 17160 - DNA, 1839 bp, Zea mays
  Peptide Sequence Number=SeqID_58939
atggaagcggcgggggacgaggtggtgcgggcgctcggtgccgggtttgacctcacgtccgacttccgtatgcggtttgccaaggccagcgaggggcggcgcctggtggagctcggcgaggagacaagggacgtgccgctcccgggcggcggcggggcaacgctccgcgcggtgccgcgcgacgtcggcgtcgacaagggagaccgcatccgctttcgctccgacgtactcgagttcaaccagatgtcagaattgcttaatcagaaatcttcagtccaagggaaagttccttcaggctattttaatgctctctttgaattaagtggagcttggttgactgatgccaaagagaccaagcatctagcattcgacggatatttcatttctttgtacaacttgcatctaaaggcttctccattagttcttcgagatgaagtaaaaaaggctgttccatcgaagtgggatcctattgcattatcatggtttataaagaattatgggacacatataattgttgaaatgggaatcggaggtcaggatgtcatatgtgttaaacaaagtcattcttcaaccatttcaactgtggatcttaagttgcacctggaggaccttggcgatttcttgttttctgatgggaagaaccactctccaatacatcgcaagacaaaggatggcaagagcaaggtgcctgatgtttttgtaaggatagtgcagcaaccaaataacctgcacctttctagctactctgaaacatcaaccaaggatggcctgacagttacatgttcgaagaggggaggagaagcatacctacccaaccactccaagtggctgcaaacagtggcaaagaaacctgatgccattatgtttaaatttgtccccatcacctctcttctaactggtattcctggtagtggttacctcagccatgccatcaatctatatcttcgctataaacctgatcttcaagacttgcaatatttcttggagtttcaagtgcctctacaatgggcacctatgtttaacgagcttgtccttgggccccaaaagaggaaaagctcttatccttcaatgcagttcagatttctcggccccagactccaagtcagcacttctcaggtatctagttctcagaaaccggtggttggcctacggctatacctggagggcaggaagtgcaaccggttggccatccatgtccagcacctgtccagtgttccaagcatgattggagactccgtggcatcttcaatgtcagaatggcgcgagtcccaagacagcgacccggggtacgtcgaggccatccagtggaagaagtactcgtgcgtctgcacctccgtcgtcaagtacaacccggagtggcacaagagagctcccggcggagtctttatcgtcactggcgcgcagctcgtcacgaagggggcctggtccaagaaggtcctccatctgcgcctcctctacacccacatccccaactgcaccatccagaggaccgaatggacgaacgctccggcggcgtctcagaaggggagcttcctgacgacgatcagcacgacactgagctccccgttcacgcagcgtgacacccaccaggggaagcatgagccggtgcagctgaactcaggtgtctaccccgacggaccgccggtcccgctccggtccaggaagctcctcaagttcgtcgacatttcggaggtggtaaaagggccacacgacgtcccaggccactggctggtgatcgcggcgaagcttgtgaaagagagaaggaagatcgggatccatgttaagtttgcactgctgggctatgaaggcctgtcgcagaatgatagtttcatgggttga

SEQ ID NO: 17161 - DNA, 2187 bp, Zea mays
  Peptide Sequence Number=SeqID_58940
atggtcgtgaacaacaaggtggacagcctgtcgtacgacgtcgaggcgccgccgccctctgccgccggcgccgccgcggggcaagcgccaccgccggcgtcgccagctccggcgccggcaccggcaacccacgcgcccgtgacgcgggaaggcggcgcggcgtcggtgctggagctgcacaaggtgtcgctgccggagcggcggacgacggcgaaggcgctgcggcagcgcctggccgaggtgttcttcccggacgacccgctgcaccagttcaagaaccagtcgtcggcgcggcgcctcgtgctggcgctgcactacttcttccccatcttccagtgggggtccgcctacagcccgcgcctcctgcgctccgacctcgtcgccggcctcaccattgccagcctcgccatcccgcaggcacgtgcgcgcgtgtgccccgttcccgtctctcctcctctgcttcctctcgccttcattcaattcctggctacttttggcacgggaatcagctacgccaagctcgccaacctgccgccaatcgttggcctatgtgagtccctccctcccttccttcctgctcctgcgtcctgccagcaaaatcgtaggaattccagcttcgtgccgccgctcatctacgcgctgctggggagctcgcgggacctggcggtggggccggtgtccatcgcgtcgctggtgatggggtccatgctccgggacgccgtgtcgccggacgagcagccgctcctctacctgcagctggccttcaccgccaccttcttcgccggcgtcttccaggcgtccctgggattcctcaggctgggcttcatcgtggacttcctgtccaaggcgacgctgacgggcttcatgggcggcgccgccgtcatcgtgtcgctgcagcagctcaagggcctgctcggcatctcccacttcacctcccacatgggattcctcgacgtcatgcgctccgtcgtcaaccgccacgacgagtggaagtggcagacgatcgtcatgggctccgccttcctcgccatcctcctcctcacgcgccaaatcagcgccaggaatccaaagcttttctgggtatcagcaggtgctcccctggcgtcggtgatcatctccaccatcctctccttcatctggaaatcccccagcatcagtgttatcggcatcctccccaggggagtgaaccctccttcggcgaacatgctcagcttcagcggctcctacgtggcgctgacgatcaaaaccgggatcatgacaggcatcctgtccttaacagaagggatcgcagtgggcaggacctttgcgtccatcaacaactaccaggtggacgggaacaaggagatgatggcgatcgggctgatgaacatggcgggctcctgcgcctcctgctacgtgacgacggggtccttctcccggtcggcggtgaactacagcgcgggctgcaggacggcgttgtccaacgtcgtgatggcggcggcggtgctggtgacgctgctgttcctcatgccgctgttccactacaccccgaacgtgatcctggcggcgatcatcatcacggcggtggtggggctggtggacgtgcgcggcgccgccaggctgtggaaggtggacaagctggacttcctggcgtgcgtggcggcgttcctcggcgtgctgctggtgtccgtgcagacgggcctgggcgtcgccgtcggcatctcgctcttcaaggtcctgctgcaggtcacccgccccaacgtcgtggtggagggcctcgtcccggggacgcagagctaccgcagcgtggcgcagtaccgcgaggccgtccgcgtgccgggcttcctcgtcgtcggcgtcgagtccgccgtctacttcgccaactccatgtacctggtggagcgggtcatgcgctacctccgcgacgaggaggagcgcgcgctcaagtccaaccacccctccatccgatgcgtcgtcctcgacatgggcgccgtcgcggcgatcgacaccagcggtctagacgcgctgtccgagctcaagaaagtcctggacaaaagaaacatcgagctggtgcttgccaacccggtggggtcggtggcggagaggatgttcaactcggcggtgggcgagagcttcgggtcgggccgcctcttcttcagcgtagcggaggccgtcgcggcgggggcgtgcaaagcggcgcagccctga

SEQ ID NO: 17162 - DNA, 1422 bp, Zea mays
  Peptide Sequence Number=SeqID_58941
atggggatctcgcacctccagcccgtcctcctcctcctcatgctccgggctctcgcgtcgcttcccacgcaggccgccgcgagaggcggccacgatccgtcagatgatggagcccacgggccattttcacgtaaacttcttgaagataagcctcagatcacagaagaaatggtccgtggatatatgagcaacactgagcttgagactgctgtacatgcctttggaagtcgttgttccaatatctccagggtgtacagattgttttttgaggagaaaaattgggtgattgaaatatcagacaagcccaggcaaagggaatctgaaccagcattcaagttcattggaaatgttcatggtgatgagcctgttggaagagaggttcttatgcatcttgcaaattggctgtgtgataactatctgaaagattcactggcaactctcattgttgagaacatgcaccttcatatacttccgacgatgaaccctgatgggtttgctcttagatggcgtggtaatgcaaacaatattgatctcaacagggattttcctgaccaaggggctcttgttgccaactatccatgggatggaactagagacacaagggcccaatatgactttgtttcacattgtaacatcctcaacaatgattttacttcttacagcaaacactactacggatgtcctgacgataagacattccagcacatggcatctgtgtatagtcggtctcactataacatgtctttgagcaaagaatttgaaggagggataacaaatggagcattctggtacccaatatatggtggtatgcaggactggaactatatacatggaggctgctttgagttaactctggagattagtgacacaaagtggccaaaagcagatgagcttcctatcatctgggaacacaataggatgagtatgctcaatcttctagcaagcctaataaagtcaggggttcatggaaggatatttgcagcagatacgggcaggcctgtacccggctcagtgatgataaagggcattgattccaaggtaagcgcgagcagcacttttggagattaccatcgaattgttgcgcctggtgagacatatgaagtggtggcatcgatgcgaggcttccggcaaaaatctacacgcatcaggctggagcaggaagccgtcagcctggatttcatcctggacccggatggagccgatgggcagacgaagctgctgccccgtagtaacgaccggggctgccgctgcgacaacgacaacgccgccaagccgttccatgtccacgaagctcacctctggttgtacctccttatcgtgtccgttctcctggccctctacgtagtcttcaagaggaaaacggtgccgaggctgctggcgtatagacactcatcgtcactcagacggcctgttgctgtataa

SEQ ID NO: 17163 - DNA, 465 bp, Zea mays
  Peptide Sequence Number=SeqID_58942
atgagccgtgcaagtggtgaagctgaagatggcgagctcaagaaggtggtcaggatccgtaaaccaaacgtgcgcgtgggtggtccggagtggacagacatgtcgaccccaccgccgtccatcgccgccgtgtgggactggcggactgcgattgctgaaccgggcaaaattgaggcaatgaccacaggctgctgcgctcttgggagagcagctcgtctaccacgccgtacaacataccattggctacgggaccgcatgccctcagtggcgctgcccggcaagaaggctgggtatttaggggagtattggcgaagtatcatggctcccgacgaagtaggggagtattggcgaagcatcatggctcctgacgaagcaggggctgcgaccagcgcgctggacgtcgttgctgggggtcacctgatgctggcggcggctgctgcttgggggcagcggcagagctcatga

SEQ ID NO: 17164 - DNA, 288 bp, Zea mays
  Peptide Sequence Number=SeqID_58943
atgactgctgtggaaattcacaaaagagtaggagcctttgccatggctcttcagacaataaacaagtgcatgtctgatgcagtctgtgccatggcacggagtatgttagatggcgagagtcgtgctgctgccctaattcattctggcaatgaaattttggagacagctagatactcttctgaagccaggctagttcgagctgggcaaactgtagatgctttgagggaaaccatcaggctacccttccttcatctggaccctaaggctccaaatgtgactgtagtgtag

SEQ ID NO: 17165 - DNA, 264 bp, Zea mays
  Peptide Sequence Number=SeqID_58944
atggagacatgggcatgccgctctcgttttggactctcatggaagtggaggatcctttcagaggcagtggcgtcctctcttctcaacggcggcgatggtggcgtaatggcgttgtctggtcaaggtcctcggaccttggatgggttttcaggcaggcacgaacctatagcagctttgaattctcgcagtcaccagcatttgataggcatccgcgcaaacaagcgaaacagattctcaagccaagcctcagatccgatagaatga

SEQ ID NO: 17166 - DNA, 402 bp, Zea mays
  Peptide Sequence Number=SeqID_58945
atgagcagccttcgagccatctcctccctcctccatatctactccacgtccgccgccgccagacgaggagccgggcggctgggcttcgcgccgtcgcccggcgggagattccgggtaccgtcgaattccggtccgcccgcgttcgtgttggacgaggtcgcgagggcggccggcggggttcggaggagggcgtccacgcgcgcggcgagttgggactcggagaaatcgccgtacgagacgcttgtttatgatggtaagggaacccttgaggaaggggaaaccgctgaagcgcgtttcattaagatccaagcagcgtatgagctgttgattgatggtgtttgtagaagagcatatgatagagagcatcatgtgaatccgatgaaggtctacgaatcttattaa

SEQ ID NO: 17167 - DNA, 639 bp, Zea mays
  Peptide Sequence Number=SeqID_58946
atggaggagctcccagtaccagtagaccacccaattggggaaaccgccggccggcctcttcacgacgctggtcgctgcaagcgcaacacgcccatgcacgtccccgcaccccacctcctccccgcgccgcccaagccccactaccatgccgcgctccgcttcaccgtggccgcttccgcggcgccggcgagcccccgcaaagccgtcattgtaggcggcgggctcgcgggccttgccgcggcgactcacctgacgtcgctctccgtgccgttcacgctcgtcgaggcctccgaccgcctcggcggccgcgtcgccaccgacgtggtggacgggtaccgcctggacaggggtttccagatcttcctcaccgcgtacccggagtgccgtcgcctcctcgacttcccggagctcaggctccggccattctaccccggcgcgctcgtcttcgtcggcgccggggagccgttctacctgctctccgacccgttccgcctcccgctgcgttccctctccgcggtgttctcccccgtgggcaccctcaccgacaagtcgtcccgcctcttcgagctcgtgttcaagcgcctcgccctggggacacgcctgccgaagacggcatcggcgcatcgcgggcagttccag

SEQ ID NO: 17168 - DNA, 972 bp, Zea mays
  Peptide Sequence Number=SeqID_58947
atggggcagggcaaggaggtgaagacgcgaccggaccccgaggtggagatccaggagaagggcgagatcttcttcttctaccgacccaaggtgggcaaggacgaggcgcacggtcccgacgacgtgcagcgcatgtacatcgtcctgcgccctgagtccgccggcggcggcggccgcaccgtcgaggagaagcaggcgccggactccggcaaggaaggccgcaagcgccgccggcagggagacggcgcccaggaagaaagcgaggagaaaggcgcggatggcggccacggcaaggaggaggtgaacatcgaggaccagccgttgctccggctggtcgtgatggggaggaagagcctgccggacccagcgaagcacagccgcccgtactggggttacgtcgagctcgtcaccaccaaggtcgacgacatcaaggacgcgctcaaggaagaggagtacagcacggcgacgcggggtaagcggcacagggcggcggcgcgggcgctgggcgagggcgtgtaccgcatcgtgaagcacgagtccgagtccggctccggcgggcggcggcggagcccgcgcccgcacacccacctcgtgtacaagctggagctcccatccacccgcggcgccatggagccgcaggaggcgatgaacgtggagccggaggcgtcgttcctcgtgcagagcaagcgccgggccgcgttccccgcgcacctgcaggacgcgttcgggggtcggcggtacgcgccggccgacccgccggacctgctcaactacgaggggtgcgagctgctgctgatcgcggcgtcggacgatgtggaggacgagctcgggctgcagctggagggggaagtggaggacggcgaaggtgagggtgtggagactccgcagggcgcgctggggtgctccgacctggtgaagatgttcggcgaggtggccgacgtgaagccgctgctgagcgggagctgggactag

SEQ ID NO: 17169 - DNA, 390 bp, Zea mays
  Peptide Sequence Number=SeqID_58948
atggctaaccaaactctagtacctccccatgttcctgctacttcgagaggtttattgcccactccagcacggtttgccaaggtgcctcccacctctgaccctggaccagcaagggagagccttcctccccctccactgagcctggaacctgcccggacactggatgagctcttcaagaagacacagacgtacccaaggatttactacatgccactgtcagaagaggaggtatctgctaaacgtgcagctcacgacaaagctgttttcagatgcaaccatacttgtcacggcacagcgatcgacaggctctcttctccgcagctgactccaccagaccagcagctgcagctctatgaagaactactgcaccgtacttgtccctacatttag

SEQ ID NO: 17170 - DNA, 348 bp, Zea mays
  Peptide Sequence Number=SeqID_58949
atgggggaggataaaacctggggcctcaccctcctccatccagccgagctcggcggcagacctgaaagtcgccgctcacccacaattcccagctgcatccggcgctggcgataccaattcaagaatccgggcgccaaggtggagagagatgaagagcacccctgtgcggaccttcaacgagtgcgtgatggttggccatgtcgcatggattgtgcgcgtggttggcagtgggggggaaacttgggggcaccggtcgaatttctcgccgccgtcctggcggacaccgtcgaggccgtggtgctccgtgttacaaatcctagtgagaaccttctgccaccgttgcgttag

SEQ ID NO: 17171 - DNA, 2325 bp, Zea mays
  Peptide Sequence Number=SeqID_58950
atgcccgaggcactcctccagaattctatgcgccttatcgaggttgatctcagcaggaacggcttctcagggtcagtgccaactgtgaattctacgactttgaaggtgttgaatctctcttccaatgttctatcaggatcattaccagccaccatgggcaaatgtacctcagttgatctgagcgggaaccagttttcaggggaattagctatattgcgttcctgggatgggattgttgaggtcattgacttgagctcaaacaaactggtgggaagctacccaaatgatgtctcccagtttcagaacctagtgtccctcaaactacgaaacaattcattgtcaggatctctcccttcggtgttgggcacctatcagaagttatctgtccttgatctgagtcagaacgcaatcgagggatctgtgttacctaccttcttcatgtcaccaactttgactgtgttaaatctttctggaaacaaattttctggaactattccatttcagagcacccattcaacggaatcgatacttctttcatctcaatcggctctcaggattgtggatctgtccagcaattcattggctggaccattgccaccagatatctctaatctgcaaaaacttgagttccttattcttatgatgaatgaattatctggggagattcccagtgagataagcaagcttcaagcactggagtatcttgacttatcacataaccacctcacaggcagaattccggatatgcctcaaaatggcctgaaggtgttcaatgtatcttacaataatctagaaggaactgttcctaaaagtgttgaaaagtttcctttatcttgcttccgacctggaaatgacatgttagttttcccagatggccttcctgctggaaatgatgattacaccggagttgatcagggccaaacatctcatggacataaggctggtgttcgagttgctcttattattggctgcattggagctgtcttgctagttatctccatagccctagcattctatttggtaaggtctcaagagctttgcggaagaaatggatttagaggtcaaattactatcagggatctaaaggggagaataagccgtccaaatctgttcaggtcccccaaagacaacgttataccaagtaaaacaagcttctcaaatgaccatctcttaagagccgcaactagatcgatgtctgcgcagaaagagttattggctgaagcctctgtcgaatatggctacacagatccaaaggaagttgccgagtccacaagtttaggtgtgactgagacttcatctgcgatccaggctcacgagtctcctccacggtctgcattgccagcagcaccacattttgctgactctagattcctcgaggaacctgtagcttttgaagtgtactctccagaccggctggttggagaactgatcttcacggacagcactttggttttcacagctgaggatctgtcgcgtgcaccagcggaagttcttggaaggagcagccatggaacgacatataaagctgttctacaaagcgggcatgtcctgacagtgaaatggctgcgtgttggccttgtgaagcataaaaaggaattcacaaaggagataaagaggatcggcactatcaggcatccaaatatagttccatggagagccttctattggggccctaaggagcaagagaggttaattatttctgattatgtcagtggtgatagcttggcactctacctctacgagtcgactccaagaagatactcccgcctgtcggtttcgcagcgtctcaggatcgccatcgacctagctcgctgcctccagttcctacaccacgagaagggcctgcctcacggcaacctgaagccgactaacatattcctgactggtcctgatctcactccaaagctggtggattacggcctgcacaggttcatgactccaagtggcgccgccgagcagatactgaacctaggagcgctagggtaccgagcaccggagctggcgaacgcggggaaggcggcaccgacgttcaaggcggacgtgtacgctttcggggtggtggtcatggagatgctgacgcggaggagcgcgggagacatcatctcggggcagtccggcgcggtcgacctgaccgactgggtccagatgtgcagcagggaagggcggggagccgactgcttcgaccgcgacatcgccggcctggaagagcgccccggggtgatggaggagctgctggcggtctcgctcaggtgtatcctccctgtaaatgagaggcctaacatgaagacagtctgcgatgacctgtgctccatcataacagcgtga

SEQ ID NO: 17172 - DNA, 345 bp, Zea mays
  Peptide Sequence Number=SeqID_58951
atgaagaaggaggcggtgaacatgaggcctacggataccatgacgacggccagcgtcgggtaccactccaccggcacggggctcgagattgccttcgccgcctgcgacacgaatcccctgggtcagcacagcgggctcccaagcagaaccctggatctacgcaagagaaggcagtggagagttcaccattccgtgagatctgctgccgctgtagtcgccgcccgctccgcctgcctcgtcgcccccttgtcgccgccgcgatgcacaaacaactttgtgacgaccagagccaaatggatccgtccgggacgatcgcaagttttagtgggcttcggatccgaataa

SEQ ID NO: 17173 - DNA, 534 bp, Zea mays
  Peptide Sequence Number=SeqID_58952
atgaaattaaggcaccttaagtcatatggttcacaaaatcaagagatcgagaggctggaaggtggtcgtttcaggaaaaaactgaagatcaaactttgcaaatatttgaagaacacgggtaaaagatctacggcactgttgaatcagatgagctcgagcgatccagtgggggaatcgatccgggggaggatagcttcgaacgtggcaccatctcatgagttcagccgggcgtggccggagttattcaccggtggccgccgtggctcggtcaattccaccgcggtgtcatccatgccttgctcctcccttactgtacctcttctatacgtggttgccatgcgtgagcaaagccttccgcggtcactgattgttagccggaccaccgtggctataaatagcgccatggaccacggcgagtcgccaccggtcatggccagtacgagccgcggggtgatcgatggcaagcgtgctgtggccatgggtctcattggagaagaaacaaaagccgagggacctatgtgtgattgtcagtga

SEQ ID NO: 17174 - DNA, 324 bp, Zea mays
  Peptide Sequence Number=SeqID_58953
atggctcctaagaaagcaacttcgaaggctaccacatccttggacgacgcagcgaaggcgacccttctccctaagaagaagggcaaagcagccgttgtccctcatgaggccatcgaggatggggcagtcaatagcaagcgacaccgaccccccgccaggcttcaccccctagaagctgacgatatcatcaaggacgatgaggtcctaggcatctcagccgacgaccagctcaagttgcatgcacttcgcataaaaaacaatcacctacagaagcaaaaggaaatattcgaagcaaagcgccagcacatcaccatgcagaccaag

SEQ ID NO: 17175 - DNA, 558 bp, Zea mays
  Peptide Sequence Number=SeqID_58954
atgcgccatggcgaggaagagatggaagatgagcacatgaagggaaacaacgatgttgtcgcacacagcgcgaaggcgaacgacaacgacacggatagtgttggacatggacgaatccattcagagcttcaaatcgacggccaccaggtcacgacaccaagaagaatgcacaaagccaagaggctgtgccgggagctggggcatgaactgggcagagaaagccgggcgatccagggactacgacgagggagaaactcggcagggcacagatggcgggacctcagcacaggacgagcgcaggggagttcgtggctacgcgtggatgggcgggctggagcgccgcgacgagcgcaggggcgcgtcacaggcgagggcgagctgccacagggaggaagaagatggagaagggccgcagcgctgggggttcgacgcgccgtgacgagtagagagatgtggcgctgcacagaggagggagatgaaggagagagagccgctatgggaaagggaggagaactgggcgcgacgctggaccaaatccgagctggagcagggagataa

SEQ ID NO: 17176 - DNA, 318 bp, Zea mays
  Peptide Sequence Number=SeqID_58955
atggactgggagatgggcgccgagcgtgcagggtggagagggaggggcacgacaccagggagctgcgcggccaggctgcgtgtagggagccggcgcggccatggcgagcaaggagcgcgcgcacaggaagcaggtcgggcgcggcagcaggtgcggcaccagggagaagacgagggcgctgggagccgggaggagcagaggcgcgtcaccagccaaagcagggacaccatgaaattcgcagatatttttggaacccagaattttagtgatacaaatgagttgaatcaaatgagatcgatagaaataaatgggacatga

SEQ ID NO: 17177 - DNA, 397 bp, Zea mays
  Peptide Sequence Number=SeqID_58956
caggaggaggggtaacactggcgggctgggcctgcgcgttggtgagacatcggcgcagtgggctggtgcggagaagtggcgcaagaactcgggcagattaccacgaccacgtgttcgacgcgccctggcaacgctagagcacgccccggcgctcagccttgcgagcgccgtgtcgtgctgcgtcaaccccgcgcccacgcctgcggctataaagtacaccctggtctcgaccgtacacccccgcgcgctcctaaccctgcccgagcacgagttcatcgacgtttgcccagagaacggcgtgccagcggccgcgcaagccctggccaccgtagaccggccacaccagcccccctccatcccgcctgacccgttggctagcttcgccggagctcagtga

SEQ ID NO: 17178 - DNA, 363 bp, Zea mays
  Peptide Sequence Number=SeqID_58957
atggtggaggctcacaggagaagacgaccctcgtcggagccgagcaaaaaatcatcgattggggatgaaatgttgatcgaatcgatgaatcgaaggcactgggacaaagctctcgacaagaggaacgtagcgggctcgaactcggcctcggccccggaagacgacgaactccgcctcgcccgaccccagggctcggccctggcctcagccgacggtctccgcctcgcccgacctaggggctcggactcgacctcgacctcagaagacagactcgacctcgacctcggaggagcctcctcctcgcccgacccagggctcggaccgaccacgtcgcaggaggggccatcattgccctacccctag

SEQ ID NO: 17179 - DNA, 876 bp, Zea mays
  Peptide Sequence Number=SeqID_58958
atggcggcgccggccagctcctcatgcttccacccacgcgcgaccgccagcccgccgtcttctctcaggttcgtcggagtcgtcatgcccgaatgtcagcgctgggttccacactgcggtcaaccggagaatctctctcaggtgtatgtctgcgcttacgtttaccatgttaatcttagtctcatgggttttggcacttacatggatgctattgtcagttcacggttcgaagaaattactcgttatgtctcttctgatagtagtgggtattctaggttgtccaaaaagaaggcgaccagagcccgcatctcgatgatgcctattggtactccacgtgtgccttaccgaacacctggtgaaggaacctggcaatggcttgacatatggaacgctctgtaccgtgagcggattatcttcattggggacaatatagatgaagaattcagcaaccaagtgttggcaagcatgctctatcttgacagcattgataattccaaaaagataatgctatacattaatggaccaggaggagatgattcatccttgcagccggtgaaaagggttcacgcactggtatgcctctatgccggatttcactccaatcacctgccggagcagctcgaggacagggctgacgatatagaaaacgaagcaaacgagcttatccgcatcaagaactatctctatggcaagctcgcggggcacacaggccattctgtcgagaagatccatgaggacctgtctagggtgaagcgcttcgacgccgaaggggctctcgagtacgggatcatcgaccgtattgtcaggccgtctaggatcaagaaagagggctccactgctcaaaggagggacatgcggaatctgggacttggctaa

SEQ ID NO: 17180 - DNA, 495 bp, Zea mays
  Peptide Sequence Number=SeqID_58959
atggtgtcacgtaagcgtttgagtcttcctaaacacatacttaacacttcaaccctaggtgttgtcggcatagtcgaggactggcgggacatatgtctggtcatgaaggacgcacaagagagtttgagcctcaaaactcagcggcggcggttccagagggaaccggtggcggcacgtggcgtgatcgtggaggataggatggttttagatctggatgtgttgcttcaaagcaacaccggcctccatatgttgaaggacataaaacagttagagttagtcctctctcatgctcgtagatatgcaagaatgtccagctatgacttgagctacttgacaagttgcaagataatggattgggattatgacactgctgaaactgggaaggtactggatatggaggcaagaaacaagggtgcactggataagaggatccaaacctttgcaaggttggttacctacattagacagttttatgtttcccctctcattaagtga

SEQ ID NO: 17181 - DNA, 186 bp, Zea mays
  Peptide Sequence Number=SeqID_58960
atggcagagccaccagatgcgtcagccaccaagtcgtggttatatcttgtagctccacgtgccatggagacaccagtacctccgttgagacatcgtggctccacgacgcagctagatgggccattagcgattggaaaatgccaaagaggacaagcagccaggcagcaactgagcaacaatcaatag

SEQ ID NO: 17182 - DNA, 375 bp, Zea mays
  Peptide Sequence Number=SeqID_58961
atggaggagagagatcgtacctgcgaagacgacgacaggggggaaggttccttcgcgacgggtctgcggcgccgaggtgggtgcgcgaaccctagccaagatggactgtcacgggaaggagacgcgacagtcgggatggaggagttcgcggaggaggtcgcccgtacctgcgaagacgacgatgcggggaggagagggaccggcggcggcgcggtgggtgcgcggcggcggcgtggtgggtgcgcgacaaccctagcgaagtcaacagactttcgcccgaagctaagtgaaggtcgcttccagcggaccgtgggcgggggcttctatccgaagcgtgccacgcagaagccacgcgagaagctgcgcgtttggtaa

SEQ ID NO: 17183 - DNA, 279 bp, Zea mays
  Peptide Sequence Number=SeqID_58962
atgacgatcactgctcccatcccgcctgtagccgaccgagaaggacgagcaaagagaatacatggaggccatgcccttcccctgcagcacgttgacgtggttaatcacatctacagcggtaacactattaagacagagtgcatcatcacccaccgctcgacccacaccttgaagcggctgaggcctggtggtggttctggctcttgcccggcggatcggccggtgcggtcggggctggtcccggtgtcgtgccgctatgccagcctccctccgtcctag

SEQ ID NO: 17184 - DNA, 666 bp, Zea mays
  Peptide Sequence Number=SeqID_58963
cttggccggattcgcgcggcgccgccaggtgggcgtgtgcgtgttcagcgacgccggcagcgtgtccaacgtgtgcgtccgccagcccggcgccggcgccgtgggattgagagaggcgggccgcttcgagatcctcttcctctgcggctccttactccggctggggcgacgaccgccgccacgggcctcaccgtctacctctccggcgggcagggccaggtggtgggcgggtcgtgccggccgctcctcgcgtccggccccgtcgtcatcgtcgccgcctgcttcggcaacgccgcctacgagcgctcccgctcgacgacgacgacctgccgcagcagcagcagcacctgccccctcctcctcctattccgcagggcatgcccggagctgccggcgccggcgggcagtcctcgtccccgccgcccccgccgctgccattgcccggacaacacccgctcgccgaccagctcccccacggcctcatcaacggcctccctctccccgctgacgcctacggctgggccaacccaggaggcggcgccggccgcgtcgccccgtactgatcgatcgaatccgtcgccgtaccggactcggtcgatccggacatggaaggggaaccaacgcttgctgcttcatcgccatcggcggatcgacgacgacaagtaa

SEQ ID NO: 17185 - DNA, 1545 bp, Zea mays
  Peptide Sequence Number=SeqID_58964
atgccgttcggcttgaggaatgcgggtgcgacgtaccagcggtgcatgaaccatgtgttcgacgaacacattggccggacggtcgaggcctacgtcgatgacatcgtagtcaagacgaggaaagcctccgacctcctttccgatcttgaagtgacattccgatgtctcaaggcgaaaggcgtgaagctcaatcccgaaaagtgtgtcttcggggtaccccgaggcatgctcttggggttcatcgtctccgagcggggcatcgaagccaacccagagaagatcgcggccatcaccagcatggggcccatcaaggacttgaaaggcatacagagagtcacgggatgtcttgcggctctgagcctcttcatctcgcgcctcgacgaaagaggtctgcctctgtaccgcctcttaaggaaggtcgagtgcttcacttggacccctgaggccgaggaagccctcgggaacctgaaggggctcctcacgaacgcgcccatcttggtgccccccgctgccggagaagccctcttgatctacgtcgctgcgaccactcaggtggttagcgtcgcgattgtggttaagagacgagaagaggggcatgcattgcccgtccagaggctagtctacttcatcagcgaggtactgtccgagaccaagacccgctacccaaaaattcagaagctgctatacgcggtgatcctgacgcagcggaagttgcgacactacttcgagtctcatccggtaactgtggtgtcatccttccccctgggggagatcatccagtgtcgagaggcctcgggtagaatcgcaaagtgggcggtggaaatcatgggcgaaacaatctcgttcgcccctcggaaggccatcaagtcccaggtcttggcggacttcgtggctgaatgggtcgacacccaactcccaacagttccgatccagccggaactctggaccatgttcttcgacgggtcgctgatgaagacaggagccggcgcaggcctactcttcatctcgcccctcgggaagcacctacgctacgtgctacgcctccatttcccggcgtccaacaatgtggctgagtacgaggctctggtcaacgggttgcggatcgccatcgagctaggggtccgacgcctcgatgctcgcagtgactcgcaactcgtcatcgaccaagtcatgaagaactcccactgccgcgacccgaagatggaggcctactgcgatgaggttcggcgcctggaagacaagttctacgagctcgagctcaaccacatcgcccgacactacaacgagactgcggacgagctggctaaaatagcctcggggcgaacaacggttcccccggacgtcttctcccgagacctgcatcaaccctccgtcaagatcgacgacacgcccgagcccgaggcaccctcggcccagtccgaggcaccctcggctcagtccgaggcaccctcggctcggcccgaggcaccctcggctcggcccgagacaccctttgttcggcccgaggtaccctcggcccccgagggtgaggcactgcgcgtctag

SEQ ID NO: 17186 - DNA, 414 bp, Zea mays
  Peptide Sequence Number=SeqID_58965
atgggcaagaacaacaaacgcaagcgcgagccgactcctctgtcagaggactttggcgactcggaatactcagaggaggagttctcctctgagtccgaggggtctccggctcccgtctctcccccagcgtcgtccgatgactcgggcgactctcaggggattgccgcggaggtctggacgtacatccgggccgtcgagcgctccgggctcgagggttcgaatgagtcagagtactcctcggatgaggaggactcggacggcggcggcgaggacgaggacgacgacgacgacgacgacggcgccggcgacgacggtgacggtgacggcgacagcagcggcaggggcagcaacggcggcagcaggggcagcggcggcggcggcagcagcatgggcagcaacaaggccagtggctaa

SEQ ID NO: 17187 - DNA, 819 bp, Zea mays
  Peptide Sequence Number=SeqID_58966
atgccgttgctgcactgctgtgctgcttgcctcgcctgcttctcgagcctgcgtcagctgggcgccaatataattcctgaggctgtgaacggcaagggcttcatcgcgcgggacctgacgttcgagaacacggcggggccggcgaagcaccaggccgtggcgctgcggtgcgactcggacctctccgtcttctaccgctgcgccttcgaggggtaccaggacacgctgtacgcgcactcgctgcgccagttctaccgcgactgccgcgtcgcgggcaccgtcgacttcgtcttcggcaacgccgccgccgtgttccaggactgcgcgctcctcgcgcgccgcccgctgcccggccagaagaactccgtcaccgcgcagggccgcctcgacgccaacatgaccacgggcttcgccttccagttctgcaacgtctccgcccaccccgacctcctcctgcagcagcagcagcagcaggcccagtccagcaacagcaacgggaccgcgaccacgcagacgtacctcggccggccctggaagccctactcccgggtggtgttcatgcagtcgtacatcggcgacgtggtgcgccccgagggctggctcgcgtgggacggggacttcgcgctcgacacgctctactacggggagtacgccaacaccggccccggcgccaccgtcgccgcgcgggtcaagtggcccggcttccacgttatgaccagccccaccgaggccggcaacttcaccgtcgcgcagttcatcgagggcaacatgtggttgccgcccaccggcgtcaagtacaccgccggactcacgtcctga

SEQ ID NO: 17188 - DNA, 404 bp, Zea mays
  Peptide Sequence Number=SeqID_58967
agagccctgagatacctcactcgctaatagaaagagacccctgtatgcgaggagacctgccaacactggggcttgcactccttgatctggtgtccgctgctctaggacctacgacatcggcgaaaccggtgctttcaaaggatagggatagggatgcctctcagagacggaagtccatgagaacacccgagttgagcagccgcgcggaggacttgttcgagatagaggacgtccagctcgcaatcggcagttgcaagatcgatccagagagtgcttctggcagtgagaagcatgggcacccgttcttgcgtagatcatctcttggaaggccgatgcggcaggccagggaacgagtcaccacctacaaggagatgcctctccatgttaaactcaggagggcctag

SEQ ID NO: 17189 - DNA, 114 bp, Zea mays
  Peptide Sequence Number=SeqID_58968
atgaagaaggttagggtgctggtggctggtatctccaagatgattgatctggggagcagtctaaaggccaaggtggacaaggataccatcctcaggactcaggttgcaatgtag

SEQ ID NO: 17190 - DNA, 801 bp, Zea mays
  Peptide Sequence Number=SeqID_58969
atgagcggcgccgaccccgtcgaagacgaagaggaagagatagacaagcgacctcatgcctgctgcccaacgacgaacgatgctaaggcaggcgggaggagcgcaagggatcacgtcgccgatgccgccacaaactggaggcaccaagcacccgcctggcccatgtgccggtccccgaatcttgacatcgcctccagttccactcttccggtggcatcggcgggcggccggccctccctcatgcccacaccatgtacggcagtggcgatggcttcaacgccctccaccgctgcctctcggcgccgcaacccaggcgacgaagaggaggacgtgggcgatgagggccgcgtcctggaggcgtgggagcgcgcgtacgcggacgaacggtcgtgggagtcactacaggaggatgagtcgggcctcctccgtcccgtcgacaccaagaccctcgtccacgcgcggtaccgctggtgcctcctactccggtctaccgccgccgccgcccgcatccaaaaagggctcttccgccggtccatgtgcggcggtggggcgacatgcatcacgtcggggggacagggggcgcaaccatcgcggcgtctggagaggggaggtaccatcgcgggcaggggcacgacgtcagggggtgtatcacgcgtggggataggggcgcgaccatcgtggcgttggatgggagaggtaccatcacagtcgagggcacgatggggggcgccggagaggatcttggagggctgggtgcgaggctggggcacgagcgagattcgcgggcgtgggcatgcgtga

SEQ ID NO: 17191 - DNA, 366 bp, Zea mays
  Peptide Sequence Number=SeqID_58970
atggcggtggcgacgactgatcggtggctcctgctcctggccgtcgtctcggcggccgcgacgtccgggaagcacgagaggtggaggcatcagccatcaggcgtggagataataatgcgggaaacggagagcgacgcgtgcgtggggccgggcggcgtccttcaggcctgtgcctggggcagggcaagcgggccaaccgacctggaccccagatcccaggggccccaccccatatacagctgtaggctggcgccaaactcaggaacatggaggcacataaacaacacacgcgagacggcggacggacacagtattgtcattgatattatgccttctaagaagtatgctagcaactttatgtattga

SEQ ID NO: 17192 - DNA, 684 bp, Zea mays
  Peptide Sequence Number=SeqID_58971
atggcgtgggcgtctccgcgcggcacagcacctcagctcctcctcgtgctgtcgctgctgctggccgctgccagtgcctccctgcttcccctgagcaataatgcgcccccgccgagacttccgccggcggcgaaggcaagggagggcggcgcctcggtgtcggcggggctgctctccacgctgcgcgaggcgctggacgcggtcaaggacgtcacatccatcatctcgtcgttccccatcggcggcatcctcggggacggcggcggcgacctccgcctgtcgtccgccgtcgccgactgcctcgacctcctcgacctctcctccgacgagatgtcgtggtccatgtccatgtccaccgactcgagcggggcgggcggcggccgcctcggcaccggcgacgcccggtccgacctgcagtcctggctgagcggcgcgctcgggaaccaggacacctgcaaggaaggcctggacgcgaccggctccgtgctgggctcgctggttgccgcggggctggacgccgtcacgtcgcttctggccgacggcctcggcaggtcgccggcggcgacgacgcgaccgctccggcgtcgtcgttgccgcctcctcctcccgccgcgagaagtcccgatgagactgatcaccattccttgtgtgtcctccagattcatgttaggccttaggcaatga

SEQ ID NO: 17193 - DNA, 609 bp, Zea mays
  Peptide Sequence Number=SeqID_58972
atggtacgtgcggatgcacgtcggaacacaaagggtacatacaggttcaggccgcatgaacgtgtaacactgtatgacctatgcggtgttgagtattggattgctttgagtttgcagattacaaatggcagtggaggccaaccgtgtgttgtggacttcttcactcgcccttacttcctctttcctgctatccttttctccacttccaaaaactccaatggcggaaaagaaggatgcaagagcaggttgaagaacaggggcgacaagaggaagtgtcctccgacttttccatcggaggacttctgcgactcgagcactccaatgagaggacttccctgccatccccctttcgtctttgtccgtttgcatggacgactccatggggctatcagcggccgagagggccaacctctggggcatcgagcggtgggcctcgatgactcagatgactccgaggaggaggaggacaagtatgatggtggtgacaagggcggtgaagacgacaatgtcggtagcggtggtggcagcaagggcagcagtgacaatgacgatggcaagggcgtgacaacggcagcaagggcggcgacgcgggtagctgagagaacctag

SEQ ID NO: 17194 - DNA, 396 bp, Zea mays
  Peptide Sequence Number=SeqID_58973
atggacgagcagacacgacacagagatggagacgaacaggaacattggcgcgtggccaagcgaggtgaggtcgagtcgcatatcatagaattcaacgacgaggtcacagaccgcggcgggctggagttaggcgcgccagcaggggagatccgcacgcagggaggaagaagaagactggagctcgtggctgcacacgatggccatgggaggaaccttgctggggagagatctctgctggggaggggcgacgagcagaggggcgcggccatgaaggtgagcgccgacaggggagcacgcaggggcgagcaggcaaggcgacgacgtgagcaggagctggaggaagaagcctgcgcgcgtgaaactgatggagacgaacgcagagcagcgcggcgatag

SEQ ID NO: 17195 - DNA, 537 bp, Zea mays
  Peptide Sequence Number=SeqID_58974
atgggctcatggcacgatgcaaatgagcaaacctgtcaggcggtgaagagaaccgagggcgaagcgccaacgaacccaactgaccaacacagtcagggacctggatctgaattcccatcacactccccgtcgatggacatccccaccgctgtcatacaccgcctacagtcctcgctccgcgaggccatcttcgccccttctgtagaagatgcacccgcccctcccttcccctctgtctccgacgccgtcgcagccttcgactcgggcgccgcctctgtctcggcggagttccgatgtgtgggctgcgggtccgcgggagggctcctgcgcggtgcgcagtctgcactctgcgcctactgcgggtgtcccaggcgcggggaggaagctgaaggcggtggaagcggtggcatcgccttccgtaacagcgcggcctaccggatatgtgagctcttctttctagcaaagcttagccaaggcattcgagaaagaagaggatgttatgctcctggagaacttctaatagaactgtttgcgtaa

SEQ ID NO: 17196 - DNA, 1278 bp, Zea mays
  Peptide Sequence Number=SeqID_58975
atggaggaacctttaaggggagattcgtctgaaaaggatgtaatagatccttggccagtaggcaacaaggaatcacccaataatgttatcgaagactctaatcaatggcaagcttttgcttctatgtctggtcaagcaagagattttgtgatatctgtagagagatcaagtggtcacagactaaatttggtgagaccagatgtagttgaagagacaatgagcagcatctcgcatcaacattcttcagaaattaatcctgttgatctgtggcctgtgggcaatgttgaagcactaaacgctgcagaaatgtttaaggaaacaaacgattattttggcgattggcaagattttactaccactggtcaggtccaggacacttcgctgaatcaaactggggacatgatagaggtccgaaaagccactcacaaagaaacagacatggattcatggttcattggaaatattagggagccagcaaatactggtaccatgaatgaaaataacatgttggacaatcggcaaggtttcacttgttcagatcaagcacatcaaacttcatctagccccggtgccgaaatgataagtgttccattggagctgcatgatgtaagtgtttctgtccaatcatgggcaaatggcagcagcaaagatgccgcaacaccatcctcaacaaatatagaaagcaacacatttaatgttaggcaagattttgctaaatcaggtcatctgcaagaaaacatttctagtcttgggagagaattgagtagtgtgtcacctgaaccagttgaagaaaatgattccttagatttgtggcttaccagcaacttcaaggaatctaagtgcagcgatgttgttgggagaactaatgcctcgtcggatgggtggcaggattttgccagttttgatcatgctcagagcagtactaaaattcctgtggaagggcatcttataaaaatccttcaggcagcatggcctgatgcttttggagggctggaatttgggggtgctttgcagttagctgcatccgaaaatctaaaggataaaaaggaggcttctaatgaagcaaaaacatctccatctgatgaccacttgaaaagcacaaacggaatgcagcagatggatgatgttgattcgctatcttcattatggccaactaataaaccagaccctgcaaatacaaatgtggaacagttgcttgctcagatgcatgacttgtcctttatgctcaaagatgaactttcggcccctgataaactcatcgatcgttccaaatcctga

SEQ ID NO: 17197 - DNA, 348 bp, Zea mays
  Peptide Sequence Number=SeqID_58976
atggagagccatgatctccggccagaatgggaatcacggcttgtgggtggttatgagattgatggttttggttatgactatgatgctgctagtccactacagccaaacaggatacttgctgagtatgttgatgtgtactcacccttgctctacacaccaaaccccccccatccccaggttgtcagcattgcaaccactgctcaggcgaagatgaagctgtggaaggagacttccaggagttccaagactacgacgagttctaggtgtgggttagcggcaacccccagtcggctgcctgtgaaggccgcgtttatctacgtttcttttccgcactttgatttattgtaa

SEQ ID NO: 17198 - DNA, 429 bp, Zea mays
  Peptide Sequence Number=SeqID_58977
atggcgaccacaaaactggccaacgatgccagatcagccagaatccgggatctggctagagccgtagagctagtcatcgcgcacgcatgcgatgcatatgcaggccgcaggcggcatggaagtgtagggattgttagtcgacttggtatctccctaggcttgaagaatctggtctacagaaacattggcacccaccaagcaaatatggctcaaatccctcttggtgaaagcataataactagccatagggttgaaaccctagaaggataccttaaacatcttcttcttgctaaagacaaatacgatggccaggatattttgcaacaagtgcaaactctcgagaagttaaaggaatacaatcaagagatcaaatgttggtgcaacacaagaagtaacttctctagcatggaacgaccaggaatacgttag

SEQ ID NO: 17199 - DNA, 816 bp, Zea mays
  Peptide Sequence Number=SeqID_58978
atgaatcataggtcatctgaagaagattcagctggtaatgatgaaccacaaataaagatgcaaggccatcgcagatccaccgcctccccgatccggtcgcctacccagccgcccgatcggatcctgcaggaccaggaccaggagagcgcagcggcgagcactgcgttggcggcatcggtggtggcggcgtctcccgagcaggtggtggtggggagcacgagggtctcggcgaggccgccgcaagacaagcgcctcggcgtgcgccaccccttgaagcaccgctggttccgtgcccggggtaaggtgatggtggagctcggaggggtgccgcccgctcacgccgtgccggaaggcgaggaggaggaagaggaggaggagggagtcagcgagagcgaggtggaagaggagttagtggaggtagaggtggagcaagcctcgtcagcggggacgggaatgcggggcgttgaagtggaggtgttatccgcgccagcaacaggggtgcaggagatggacgtggaggtcggtgaaatggaggtgtcgcctgagcccgcggtcgctgtggggggcaccgagctggagccccagccggacgacgaggacgaggtctcatccgtcaccttggcgcgaggggagaggaagcaggaggccgctcctgctcctgcttcctctgccgtgctagctgtggaggcgcccagggagaaggatcaggatggggagagggtggagaaggagaagagggacaaggagagggaaatgcagaaggagcgggagagggtggatgaggtcggctacatgagcggaggatggaagaggtaa

SEQ ID NO: 17200 - DNA, 276 bp, Zea mays
  Peptide Sequence Number=SeqID_58979
atggagctcgcagcgtccgcttccgcctcggccgtctgctcggcgtaccgccaactctcggcgccagcggcggccgctgaccgcggcgtcggcggcgacgacgcgcaggagacggcgacgcggctcgatcggcggcggaggaagcgcggcggcggctgcgcggggctccggcggcggtgctacgcggtgctcaagcagcagcggacgcggctctacatcctccgccggtgcgtcaccatgctgctgtgctggcaccagcacgacctgtccgactga

SEQ ID NO: 17201 - DNA, 1197 bp, Zea mays
  Peptide Sequence Number=SeqID_58980
atggagatacaaacttcagggaagcccattgatgtgctgatggagaaggttcttagcatgaacattctgtcttctgattactttaaggagctctataggttgaaaacctatcatgagattggtttcttgtatcttcggtatgttgcagacccaaaggttctttggatgtggtatgagccctatttgagggatgatgaggagttctcccccggatctaatggccgcaagacaaccatgggtgtttatgtgcgtgatcttatacttggacagggctcgaggccgatgctagtcacgccctcagttgcggccctcgtggcatttctcaccaaggccgcccgctcgccccagactcaacaagctggagccaatcttgaaaagatgaaattgcccactaagctttctggggcaactggagactccagtcgtcagggatcagaagatactgcacgccgtcctccttcagtgaaagcttctctgtcagtttcctttggacagcgtgctccacatcgggcttccaccagggattcatctccagttcgtcgaacagtcacccgtgatggtcatcgaagttcatactcaccatctcgtcgtagtggtagccgtgagggtcctgatcatgaccgttctgaccgggaactggatcattctagtcgtgaccgtgaaagagcccgggatcgttcaaaccgggatcggtatcattcaagccgagaccttgaccgtgacaaggatgccagagattatcatcggcatgagcgtgatagcagggatcgtgagtactacaggtccaggcattcagaagaaagacgggacgacagaagagatcatgaaagtagcaggcacaggcgctctagctctcgccacaggagcaggagtaggagccgaagcaggagcaggagtaggagcaggagaagccgcagccgaagcacgagcaggaggagcctgaatgagcagcgatccagcccattcagggatgcaaataaagagaaggcagccaccgtgtcgagcaacctagcaaagctgaaggacttgtacggtgacataactgcaaagaaggaagacagtgatgctgaaaagcttcaccgtgattcatgcgctgaggaggtcatcaggctgggaggccctcgatggagcacgggaattgaatcgacatgcagttatggcaaggctgcattgctgaatcgaggtcgcaactcataa

SEQ ID NO: 17202 - DNA, 252 bp, Zea mays
  Peptide Sequence Number=SeqID_58981
atggcggctctcagcccccttacggaagcaagaggacgtcagcaaggactcgacaaccccgacagttgtccttccgccaggctccagcgctcctccgacggccacgacaccacacgaaccgggtgccaaaacctctccggctgccacgatggcatgctagggctcgggcacatgcccatgctctcgagctcggcctcggctctctatcccgtcaagagaacatgctacagggatcaggcaccattctcctaa

SEQ ID NO: 17203 - DNA, 1452 bp, Zea mays
  Peptide Sequence Number=SeqID_58982
atgtttgtcaccgagttctttgccgacaagtaccgccgtcgcgatccacttgcgtcgtcgagtctcttgttcctgtgtgtcttggttctcgccaccgtgactccaggatcctcgtcgccacgcctacctcttcgcattcttctagcagaaccttgctgccagcgtcgccgtcttatcctcgactacttcatctactccgctgacaacttacgtgtggtactggcaacaccgacacgtgcattcgtctacgacacgcttccaggcgtggcaaacctggagcacgcctcgtccacgacggttggttctgaaaagaagcttgaggaactgaagcagaaatctggaagatgtgtgtctgctgtagaaaaggctaacgtggaactggagcatggtatagacggtggtcaagctctagacgaaaagtgtgatcatgcctcagcgaaagctgcaaaggctcctccaagcaagggcagggaggcagacgaaactgcggatacagataaggaagcttttggttctaggacagagaaaaccaggaggaggttacagccagctgctgctatgttgctcagggaattcactggcgctgacattgatgcggataacgaaagggaagaaagaggcagatcatcgtccagcgtggcaaccgggagatcagatgcgcttgttcaacttctgatgaaaggccgtccgtctcggccagagccttggcttgccctgtacatggaaacacgcagcggcagtcgcaactcagcgccgtcgccccagcagccatcgacgccctcctcacgcgccgccggcaacaagggaaaggaccccgatctgtccgttggtgacgccgacgttcctttcccccagcccttcacctccggtcagatctctgaggagcacgcacccaaccgcctgtttgcgagctggaatctgccggccgatgcttctgagtttgtcatggaagctgtcccatcgctcacgaatctcctaaaccaccatgattccaaggtactagagcatgcttctgtttgtttgacagtgacacgcattgctgaagcttttgcctattaccccgacgaacttgatgaactctgcaatcatggattagttgctcaagctgctagcttgatagctcttggcaactcctctggccaggaaccactgagtacatctacatatacaggcttaatccgtcttctctcaacatgtgcaagtggatccctgctggcagttaaaacactactacttcttgggatcagcggtactcttaaagatttcctttctggccctgctttgatttctggaacattagtcccccgtgctgtaacaaggcctgccgatcagagtagtgaactagtatgttcgaagacttgcatacgtaacccgggaatgggcaagacacaaccaggggatttttttaccaagcccgaaattcgtcccctcaggattgaacccaggacctga

SEQ ID NO: 17204 - DNA, 489 bp, Zea mays
  Peptide Sequence Number=SeqID_58983
atgaagggagacatacaaggtagggaggtacgtggatcacgacatggcgaaggccgagcgtcgagggagcagggggccgctacggagcatggggagcccgaggaggagtgtgcggcggacgttggaggagccccacgctgggaggtcgaccgtcatggctgtggagggagaggagccgagatagcggacgaggcactatggagaggcacatccgggggcggggtcgcggttgggtgctcgggggagttcttagatggtggcagcgggggcagtggggatacgcggcagcgaccaacgctagagaacacgttgagggacaagatgcttgttcgagtcgagcgggggcactatgtggttgtgcacgggcaggatgagcatggacacagggtcctggacgaagcggaggcggacgacgagtgcgggcaagcaagtggccgtagagccaactattttttttcgaaagcgcaggagaactacgcatcattttaa

SEQ ID NO: 17205 - DNA, 1137 bp, Zea mays
  Peptide Sequence Number=SeqID_58984
atgggtcccacaggctctggaaagactcacaccatctttggttccccaaggaatcctggtatactacccctcacgctgaggagaatcttcaacgcacaaggcgaaagcaaggtttccaggaaacccaacgcggtaaaatatgttgttttacatgcagtccttagttacatttgcaagctatggtcatttttcttctcgatgtttgagatattttctgagggaaaaggggaacgcattcttgacttactgtctgatactgtggagtgtgttcttcagcagtcagtgattaaaggtcttcaagaggtttccctttcaaatcctgcagatgctgagagcttggtttcacgtgacataggttcaaggctgttagaaagtaacttcatcaacaacacatccatggttttcagtctctgtttgaggtctctgttagaacatcagaaaaaccagaagaaacccttggaaaagcatttcaagaattccatgcttctgaatccttttgccatttcgatagttgacaaggtacttaagagactacctagaaggaaggaagaaaatgactttgggaagctcgcgagccgagccggctcgcaagccaactttgagccgagccgagcctacttcttcagctcgttgagtgagcgagtcgagcccgatcacccaacgaggcgcaccgagctgagcttggctcggctcgtttccagccctataagtgtaggcaaccaactcagaagctggagaggactgaaggaggctgtgatcgagggtgtcgtggaggtagcgaagaattcgcttctcagtgacgaggtgcggcttttgcagggtgtgcatgtgaaggcacacctgctggacgacgtaagcgatgtcgggtcgagcgaaggtgaggtactagagagtcccgacgaggcttcggtaggctgtcatatcgccgactgggacaccgtcgtcgtcggagatcttcacctgagtgtcaacaggcgtggagcagggcttgcagttggacatgtcagctcgttccaatatgtcgatggcatactggcgcttgtgaaggcgatcgtgtgctggagaagggcggcactagatgctatgagcatgatgtcgtcgacgtggagtgtgatatcctggcccctgggatggtga

SEQ ID NO: 17206 - DNA, 432 bp, Zea mays
  Peptide Sequence Number=SeqID_58985
atggaggccacctccccgcatcctcccaccaccatccgccggaacccaccccgccgcgcgaggcctcccccgaccccgctcgccggcgacaaatccaaaccctcccccctctcccgcctgctcgagggtgaagcagcgttcgccgcctccgttccctgtccaccgcaggaggagcgcctcaaggtgttcctccgcatccgccccctcccggaccgcgatcgaagccggccactccccgctgccaaggacccgcgccggaagcccaagcaggtcggagcccccggggagctctgcctcgcgcccgacggacccaactccgtcgtcctcaccgtcccgcggtctaagctagtcgaccccaagcgaggccgcaccgaggtcttcgacggcttctctgccgttttcccatccgactccacccaggtgctttgctaa

SEQ ID NO: 17207 - DNA, 195 bp, Zea mays
  Peptide Sequence Number=SeqID_58986
atggacgagctggcccccccggatgggacccagacccttctaggtgaggtccgggccacccacggcaaggtcccaagccggagagtaacctggacgaggtcaggtggcgaccaggccaccctgcagacggcgcacctgtccaatcagacagcggacagtacgcccatgccgccgcgtgcaccatggccatcatga

SEQ ID NO: 17208 - DNA, 1383 bp, Zea mays
  Peptide Sequence Number=SeqID_58987
atgccagaagcaaggaggttgttcgatcaaatggcccaggtggggatccaagtaaatacaatcacgttcaatgttttgattgatggatatgcaaagagtggacagatgcatcaggccagtgcagcctatagggagatgcaagcgaggggattagtgccagactcctgcaccttcaacattattgctgctagagctcacaagttcaggctttgttgggatcatcgattggatgatgcctgggagcttcggcttggtgctattgagcagggtgttccattgcgtgttactggatttaatgcattgatcgctgcttataataaggagggactccacgaagaagcttctgaactgtatagaattataaacaagttaggactgacaccatcctcgtctacgtttaattacttgataatggggctctgcaatcaagtaagacttgatgaggcacagcttcttttagaacacatggttagcaaaggatattgtctaagtacatcatttactatctgcttggatgcatacttcagagacggtaatgcagttggcgcactgaaatgctgggatgatatgggcaaaattgatttgcagactgattttattgccttctcagcatatattaatggccgaagccgattagattacgtgaatgaggcttatcaggcatttgctgagatgacgagcagaggaattgtaccaaacaatattacttacaactccatcatatctgcactttgtaaggcaggaaatatgactgaagcctttaagttagagcagaatatgaggcagagtggccttgttcctgacatttacacaagcaacattctaatcgacggtttgtgcagagaaggaaagctgaagatggtggacaaccttttattggatatgtgcagtaatggtctaaccccagacacagtgacatataatacaataatcaatgcatattgtagggctcaggatatgaacagtgccatgaatttcatgaataagatgcttgtagctggttgtgaaccagatattttcacatataatatttggatgcatagcctctacaggaaccatatgttgaaccaagcagggaagctgctagatgagcttgttgctgtggattgttctccaaattctgttacgtacaacacattaatggatggcatttgcagtgatgttcttgatcgagctatgatacttactggcaggcttattaaaatggcttttaagccaaacactatcacactcaacgttttcctttctcatttctgcaagcaaggatttgggaatagagccctcatgtgggctgagaagctcagagaagattcttatgttttttatggtgctacaagaaatataattgactgggcacgaagggaaatggaggatgacccctag

SEQ ID NO: 17209 - DNA, 213 bp, Zea mays
  Peptide Sequence Number=SeqID_58988
atggcatttgctattatgcacccttcaagtgctgcgaatacttcaaattcaactggggcaacagagtctgctgctgctgctgctgctgatttgcctagtgtgatgacgtgcgccaattatgtgaagctgcccccgtactccacaaaagaaatcatgcgcgagaagctgctttatgcgatcctggaaggccgaggatcgtttcatttttcataa

SEQ ID NO: 17210 - DNA, 357 bp, Zea mays
  Peptide Sequence Number=SeqID_58989
atgaggtcaggaggcagtggggtggaccttgggggcctcgtcaatggcagaggagagctcggagaggaggtcggagcagagcagcgcgccgtacacgttgagcagcaccggcgtgacggcagcgctgttccgagcgccgaggcagctgtcgcgccgatgaagggagggaggaggcgaggtcctccggcgcccgatgcagcaaggacaaagcaggaagcggagcttgcagacctcggcaaattgcaggaagtgaaagagagaggaactgcctcggacgcggcaccatatagcggcatcatccagcgcacgcattggaagtggaggtcgtggggagggaggatgcgagagtggggctga

SEQ ID NO: 17211 - DNA, 288 bp, Zea mays
  Peptide Sequence Number=SeqID_58990
atggagcggcttataagcgtgggcgcggactggatagtaagaagtctgttggtggctgaattggttatgttcagctcttgcgcaggaagtagaatatttgccatgcctaatggcactgggggggaaaaatgtcagacgaagcaggagccccctgtcagcaccgacacccaagacaacgtgggagcaggcaacaaagctggtggcgagccagaggaaggagctgctacacggacgccacgggtgaaacgccggagcgtgagagtttctgggccggaatgggccgtgtaa

SEQ ID NO: 17212 - DNA, 1479 bp, Zea mays
  Peptide Sequence Number=SeqID_58991
atggggtgcctcttcgcctgcttccgcgcgtccggcggcgatggcgaggtgaagggcaccggcggccagctcgcgcatccgtcccagccccccgcgacgacgacgacgaccagccaccaggtccaggatggcgcgggcaggagggccaggccgccgtcgaggaacgcgctctccgccgtgttccagcgagaagatgagggatcaaggacggcgcaagtggcgagctcgtgggcggacgagagtggcgagaggaaggagatggatcaggagcttgtgcatcaggccattatccaaagaagctgtggtgcgttgctgcaaactacaaataacattcaaggagcgctcatcaaatatgctgattcagttcatcagaaggaaacacattcaggatgtcttcctgttgtgtctgatgatctacatttcatggaagcgccgaaggttgagaaatgtgaaactccttcaaggtctcatcagagtttcactgttccagatgcaacgagttcttcaaaaacaaacgatgagttgcagacttccgctacttcccttgcaaataatgtgaaagattcgatgaatgagaacaacatggaggcacttgtgcaggatgaagagcaacaccaagctctggatcttgaagaatgtggggtctcaaaagaagaatcctttcaccctgaaaaaacagaggaaccaaagtgcgcaaagaatcaccatgtggtctccatggaaatttcaatatctgatgaatgctcccttttccagagctctgagggttctgtaccatcttcttacaagataagagagagcatgaacacaacatctgtggagaagtccccgaaaactgaggcaactatccatgccaccagaaagaagttaccgaagagcgataattcagaactggagctcccaagcttagcccaatggttgaagcccccaaatcctaagaagacattcagagatgaggccatggcaggagacaggtctcattcgggtaagagttcagatgaggataggcctattattggaatggttgcagcacattggaaagataaggtgccactgccagcaaattttacctctaaattgcgggatggaaatggcattcccaattcaacaaataagtacaaagaagtaaagtctgtctctctttctcttgctttatactttacgttcaagcaaagtggacttacccagaataatgtatcacatgtgcaggaccaaaaggtgagttggcatgcaacgccatttgaggagaggctcgagaaggctttatccgaagagaagttgctgtctgaaagcacattaatcccttaccctggtatctgttattttattggattcctgactgacaggcacgtttccagtttacctcgacaagtcgcaaacaaactaaaacaacctacgcctggcggaaaatactatgacttgggagtcgcccttgaaaataataccctttcgcccttgtcttgggatcgattcccgtag

SEQ ID NO: 17213 - DNA, 417 bp, Zea mays
  Peptide Sequence Number=SeqID_58992
atgtatcgtgggggccttgaccgcttcgagaaggcacaagccttggagcccttctcagtgaagtccaagacaggcaccaagaaggcacctgcagctgcaggaacaactaaagcactggctctattgacgttgccacaaaattctatttttttgccgggacctcaacaaccatccataagagaaactccaagaaagaagatacaactatctacagaaacaataaaaaaattttcttctcggactgctcaatctgtgcataatgtgcctgacgctacacaacaacgaggggaactacctgggaagcggcgccagaccaacctcgctaagcgcgctgcctgcgaagccaaggacgcgcccgcacaaccgtttcccaacaaggtcaagatcgccccaagtctggtgcatgaaaaaacataa

SEQ ID NO: 17214 - DNA, 1479 bp, Zea mays
  Peptide Sequence Number=SeqID_58993
atgccagaagcaaggaggctgttcgatcaaatggcccaggtggggatccaagtaaatacaatcacgttcaatgtttggattgatggatatgcaaagagtggacagatggatcaggccagtgcagcctatagggagatgcaagcgaggggattagtgccagactcctgcaccttcaacattattgttgctagagctcacaaggttcgggtatgctgcccagttagtccatgcaccatgacatgttttagttcacatatgtcggctgatgggttggatatgttggtctgtaggctttgttgggatcatcgattggatgatgcctgggagcttctgcttggtgctattgagcagggtgttccattgcgtgttactggatttaatgcattgatcgctgcttatagtaaggagggactccacgaagaagcttctgaactgtatagaattatgaacaagttaggactggcaccatcctcgtctacttttaattacttgataatgggactctgcaatcaagtaagacttgatgaggcacagcttattttagagcacaaggttatcaaaggatattgtataagtacatcatttactatcagcttggatgcatacttcagagacggtaatgcagttggcgcactgaaatgctgggatgatatgggcaaaattggtttgcagactgattttattgccttctcagcatatattaatggcctaagccgattagattacgtgaatgaggcttatcaggcatttgctgagatgacgagcagaggaattgtaccaaacaatattacttacaactccatcatatctacactttgtagccaaacactatcttactcttattttgccaactcatacaatcagccaacagaacttatctttttacatacagctgatgaacatttattgtatcacggccagcttgcaaagaagggagaacaattcattgatgtcccttatgttgtgaagagtatggatgtgtcatttagtggtatattgagctttattgaagctgcggcgattgaaaagcttaaaaataatgagtgcacacctgcggacctatgctactcattgcaggaaactatctttgccatgcttgtcgaaattactgaaagtgccatggcacactgtgattcaaaggacgttcttattgttggtggcgtcggttgcaacaaacgtttacaggagatgatgaagattatgtgctcagaaagagggggtaggctgtttgcaactgatgaccgctattgtatagacaatggggcaatgattgcatatactggtttactggcatatgcacatggcatgaccactccccttgaggagtcgacatttacacaaagattccgaactgatgaagttcatgcaatttggagagagaaggagatgccggtgctaaataacacccattcagatgcaattgctgaagtttctatagatgaagcctccatggcgacaccaatcgttatagattactga

SEQ ID NO: 17215 - DNA, 402 bp, Zea mays
  Peptide Sequence Number=SeqID_58994
atggcccacgtccacgagtacatcctcaagccgctctcggagccggcggtggcgcccgtatgcaccaggaaccactctgtccctggcttcctcttctccaacggtggcttctccggcaacctgagtcaggacacaccagttctgggggcgggtgcagctcttgctcagcgggatgaagatgtgctgggtgggcaagctccactcttttcttccagcgacatggacaatgaccaagagggacatgggcgtggacccacgccgctcgccgggccacctgaactcttcgtcacatgctacatatttgtggaggcaacgactgctatgcaagcagtacttctgtgcaagcctgcaagcaaaccatatgatccattagatcgtgatccaaccgtaggtcacatttaa

SEQ ID NO: 17216 - DNA, 315 bp, Zea mays
  Peptide Sequence Number=SeqID_58995
atggagctactattgcagggatggatcacttccgcacaacgcatgagcataactcccgttcgagaggagctcggtgtggacgtcgacacattggaaggagggaggcgcgaggtagcagtggggtcaccgatagaggacagggaagaggcggcggcgttcgcggatcctagcatcgcgcgcgaggaggggtcgtggggcgcaggcggcggcgttgcggggctggcggctcccaaatgtggattccccggcgtagggctggacctgctcccaaaaccacgtgcgaattccttcggtctaccatcttcagatgcttag

SEQ ID NO: 17217 - DNA, 1896 bp, Zea mays
  Peptide Sequence Number=SeqID_58996
atgggcgtgtctgacctctgcgcgcgctggcgcacaattaatgcactgcaggggcagctgggggtggctcccaaccgtttgccccggcgtgagttcgtttggagctatggtgccccagattctgttggcgagaaaagggagtatccaattgttcaccgtagcagggattcagtctgtcgtgaccgggatcatgatgacgatgaagactttcagaatggtcgtcgccagggcacccgtcgccagcgcagtctgtctggttgggcacgggcgtctcgctgccgaggaggccttgatgactgctacagttccaatggaaagcatagatcatccactcccttctgtcgtcatgggcaggggttgacaatcactaaatcttgggtccctgtggtagaagctaagaaggtctcctttgctaaccctctgatctcggctatgtggccgtcaggcatggacgaagggacgacagttgctgaattttccaggctggccaatgttcacctctctggcaacaaggctcataaggctgatgaggagagttctaggccgattgatgacaacaggctggccaatgttcacctctctggcaactgcattgattcgcttattttccaggcatctgcatctcccgaggtacctcctctggcttctctatattctgttgatgttcctcttctttctaatgtagaaagggggaccgaacctaattataacccagaccagaattttagtatgttgtccaatgatccattgatgcaagaaacacaaaggtcaactctatcacaaaggtcaactcaaggtgtaacaagtgtggatcctaacttagatggtcgcgatttagtcacagagcaacactgtaatcaacataatcaggatgttcctacttctaacgtagttcacatgaatgatcctctcttagttggtcagtcaaccgcacataggcagggtgtttgctccgatgctcagttacaagagtttgttgcatctattgctatgccaaaagaacaactgctaatccatccacctcctaatgataccacagctcctaccttcacaaagagatccagtgttagactagctgccaagaaaaagattacgatggggcgttccagggatgtaataacaaaagctcaggacattctgatagctaagctcaataatgctgcaataaatcaaaaccaaaaccaaaactctactgcttcatgttcctctaaccaaggtaattcttttgatcagatactgccacccattgacaaccaggaagccactcatggtcttactgccacccattgcaaggtaatcaatattgttgatctcgctaatgttttcgccacaattcacagaagtttggacagtgtgtcggcttgcccttctagtgtgaacctgaatgcttctaaaccacccaatgtcctagatgtccatccaactaacctgttgggccctgagttagtaaatggtaatcaagctgtagagtcaaatttgtctggtgctgaacaggccagcctaagggatgccttatttatccatgactcgcagagggaaccagtgtttcacccagtcgataatgatagccacaaagccttaagagtatcacccgcactgaggaccacagataaccgcacggtcgacaatactcagctacatgatttcatcgcgtctataaccaatccaccagagccaccattgattccatccccgccgaaaagtagcacgaccatcacacacccagtaatgggagttcagaaccaaccaaccactaggagatcaagtgtcaggctggccgcaaagaaaatcatgaagttcgagagtaaccgggatgcaatatccaaagcccaggaaattatacttgctaaacttaacaactctgcagcaaaaaaactgaaagctctaattctttag

SEQ ID NO: 17218 - DNA, 132 bp, Zea mays
  Peptide Sequence Number=SeqID_58997
atggacatgagcgacaccggcgacatcgtcgccacgtacgccgacgccggcgccgggtacaggaatgggagttacggtgccgtcgacggccacatcatccctcccctccgcgcgtccctcggtctatcgtaa

SEQ ID NO: 17219 - DNA, 687 bp, Zea mays
  Peptide Sequence Number=SeqID_58998
atgaagagggagcagtcgttgtcctttgagttcggggatcccagtgcccaagatgctatgggatctgcctcggagtcgtcttacagttacagccctcccggcggagctgtctttgggctctccccaccggagtcctcgccgcgcagcggccggaataataacagaaggctatacttcagatgttcttaccgtgaggacaggcactgtctagcctcgaagctgctgcaacagaagaacgatgacgacccaccattgtatgaggtgacctacacgtatgagcacacgtgcggcgcgccacccgtctcgtttccggatatcgtggctgagccgccggtgtccacggatggtctggtgcttaggttcgattcccccagcagcgacgcatggatgcaacagaacggacgctaccactcgacatctcggagcgcgttcatgatgctgagctttggttccagtagtcagacgcacgatcaacaacctgctgtgttccgctctgacttggaggctggattgtcgtcttttccaaccgaggggctaccgccggcgccaccacctgcaaatgacgatgacggggacatgttgtcgaaattgaactccttcgcatatgatttcgacaatcaaatgcacttcggcgatcacacatatttacctcataatagcagtaattatgatcatgatgatcactga

SEQ ID NO: 17220 - DNA, 477 bp, Zea mays
  Peptide Sequence Number=SeqID_58999
atggccgggcagcgccacgccgggggccgcgccgccgcagacgcgcatgccacgcgcgaggaggggcaggcgagccaggggctgccgcgggcatgggcgggccagccggggctgccgcgcgcaggggcaggcgagccgggccaccgcacgctggggcacgtcggggttgtcgcaccgagccggcgtgagcgccctggccgctgggccgcgccagcaggggagggaagggggtcgggcgtgccgcaccgggccgcagggaggagcggttctggggcgggtgcgccggggccgccgcaggcagggcgtgagggggagggtgcacgccatggccacggcaagcgggggccgggaccgaggaagaagagggggggcaagggagaggagggagatggggctcaccgcgcggggggcgagggaggcacaggagggcggcggttccgagcggcgggtgaggtggaggagggacgagccgcgtag

SEQ ID NO: 17221 - DNA, 447 bp, Zea mays
  Peptide Sequence Number=SeqID_59000
atgggcaagaacaacaaacgcaagcgtgagccgactcatccatcagagaactttggcgactcggaatactcagaggaggagttctcctctgagtccgaggggtctccggctcccgtctctcccccagtgtcgtccgatgactcgaacgactctcaggggattgccgcggagggctcggatgagtcggagtactcctcggacgaggaggactcatccgaggagggcggcgaaggtgacgacgacgacgacggaggcgacggcagcgacgacggtggtggcggcagcgacgacggtggtggcggcagcaagggcggcaacagcgacagcaggagcgatgacggcggcagcaggggcggcaacggcggcggcaggagcggcgacgacggcagcgacaggggcagcggtggcggaggcagcagcaagggcagcaacaaggctagtggctaa

SEQ ID NO: 17222 - DNA, 231 bp, Zea mays
  Peptide Sequence Number=SeqID_59001
atggccaccgcgttggccatgattgcgacctcgccggaggaatcacaattcggcgctccacacccccaaactcaaattaaacggcgcaacacgaaattggggacatggtttagcagtgtagaaggttctcacaggatatctcggagtggttcctcccggccacgacaccaggcggacggtggtgcagcacggtggtgttcgttcagcgacaaatggtctccgggttcatga

SEQ ID NO: 17223 - DNA, 741 bp, Zea mays
  Peptide Sequence Number=SeqID_59002
atggacgcgaacggtgggacgcgctccgccgctttccccccagctgttgtcaacgcgacccaccgtgcgaggtgctgtgagctttatgatattgtcattgatggttcaaagaagtttgaaccacattattattcttacgttgcaacttggaaaggagaaatctcacaattatcagctaacattaaatatatatgtgtgctaatctgtataattgatccagtggagcggcttacagttgaagaatttgtgcaccacccatttctttctgaacatgctccagagaggaccttgagccggacattatctgaaataagagatggctttccaataaataatatcagtccaacaaggccttcaagccaaagttcacaagaagattgtatgccttttcctttggatgatgagtcaagtggacaggaggagggtccaattcctgacagtaagagtccgatgaaatcttatgggtttcccacagatttccctatcattgattcattagagtttgtagatcaggaatatgtatttgtgtctggaccacacccagagggatcatcgtcttcaacaaatgcctctcagcagcttaacttaccggcaaaatatgataatttgtctgtttcaccaccgaagttaactttcttgagtgcaccaataccgataaacggtttgccgattaatagacaacaatctgctgggactggtagcttcgacaaccactattctcctgcatctgtcacttcatag

SEQ ID NO: 17224 - DNA, 1377 bp, Zea mays
  Peptide Sequence Number=SeqID_59003
atgtcggctatctctgatcagaagaaacgcaccttggaagcccttcagcaacagtatactgctgcaaaagctaagaaattgcaagatgaacaggttaagagtcagaagaagagcaattttaatacccctaagcctaaatgtgatgcaccaaggggaagcaaaggtccagaaatcactcctcgacgaacatatgcccaaccttctcataaaggtgtagcattttctagttctaattgtcaacaaaagccttccacgtcctcaggtgaagaaatcaatcctgtgtatgctgaactttcttgtgcttttcatgacactttgtccaaaggtgttgtctcggatttggatggcacagaggttgttcacaatgttatatatgacataattcagaaaggtggagatgctgggaaaattacaaagggtgccaaaaagttgaaactggaaaaagggatccttttggataattatgttcagaggggttctagattagtggattcccaagcaagatctttgttgattcattcaaagcgatcaaaaaggcacatgtctctaaaacaacataagaaatgtggttcatttgatttagatggtacattccacaagtacgacctctataagccaatgcatgagatgtggaaggactatatcagagagcttatggatctgagcccgtatccagtggcagaatgcaaagctgcttcatataaaggtgtaaacggcatcatgattcgggatactgcagagacgtttggaattatatccgaggacaaccgcttccgagttgtaccaaaagctggttcagtgttcgtacttcaagcagatcgctggaagttcacactgattggcgacaagctctcgcccagggagaagttgaaggaggatcagcgtcaacaacggtctgattggtttactgcgtccacacatacagtctcacgtgagcctggtcggtcaggtacggctatttctggcgtatgtgcagatgcagacaaccaaacaaactcttacccaaagtcaacgcacatgctgattcaggatggaatggtgcgggcaaccaatcatgtggatattcttcaactagatccaggctcgagactagaaaccagctccaggatctgtgagaagtactacactagcattctggcccacagcagtgaggcactgtgggccgctccttcggcaaagcgattatccgaatggtcaacacaccttaagcaagacattaggttgaagatctacaagaatatacaaaagtttaaaggaccagacagaatcaagtctcgcatgaagatcatgaagaaactaataagtgaaaaggatgcggttggagaaaaccctagttggcatcagcaagggtattataccaagcatcggaccatatga

SEQ ID NO: 17225 - DNA, 366 bp, Zea mays
  Peptide Sequence Number=SeqID_59004
atggaccaaaatggtctgccctaccgtctgcgactctgcgtggctgatgcaactgcccccgcccccgcctccgcctgctcgacctccggaaaccccgcctgtgcaaacctccgcgagagccatgtccgccgcaaacctcccgcccgcccgcctcgctgtgatacccgtccgcccatccgcaaacctccgaccgtcgcgatcctcaagcccgcaaatccctccgcgaatcgcgtcgcgaccatcgcaacgccgcgaaccgcccgccgcatgccctgcacaacccgtggaaccccgcagccgcccccgagcaaaccccgccgcaatccgttcgtcgcgtcccccgagcaatcccgagcaagtcgttga

SEQ ID NO: 17226 - DNA, 300 bp, Zea mays
  Peptide Sequence Number=SeqID_59005
atgcggctgcttcggtgggcggatgaggaggtcactgatccaaaggctcacctagaggatcgttcaaaggctaagtgtctatcacagtggtatgaatatcaggaaaatgcttttgctcctgttttcgccaaaatagatttcattgtaaagctgttttcgcccatgtgcagttcaaaagggagagggttggatggtcccaaattactctctactgcttgtgctattagcaactcctgcattctgaatgcagctaatcatattagaaaaggggaaggtgtaggtgacttcattttcttgtga

SEQ ID NO: 17227 - DNA, 312 bp, Zea mays
  Peptide Sequence Number=SeqID_59006
atggcagatctcggtcatggttgggcagaacgcacgaacaagagcggggcggaggcgggggcgtggcggagcttgggcgttcggcctaaacagggagcaggggcgcacctcggcgcggcggcaccggccgctcgacggacgtctgaacgtggcgccggggaggagctcggcggtgctgtaatgcccccgtggtcaccggcgatcaccggcggcgtgtgctgtaatgcccccgtggtcaccagcgatcaccggcggcgtgagcaaagggagtcgagtcgcgtggggcgtgaaaggagcctaaaagtcgtttag

SEQ ID NO: 17228 - DNA, 699 bp, Zea mays
  Peptide Sequence Number=SeqID_59007
atgctcgccgcggtcgccacgctcgtggtggacacggtcgccacggggtacctgcgccggaaggccgcggcggtcggcgacgagccaccgcagctcggcggggacgaccccgaggaggcctccggcggcgggcgccacggccacgcgcacggtgtcgacgacgacgacgacgacctcgtacgccaccgcgtcgtctctcaggtgctggagctgggcgtggtggtgcactcgctgatcatcggcatgtccctgggcgcctcggatttccccagcacggtgcgcccgctcgtcccggcgttgacgttccaccagctcttcgagggcatcggcctcggcgggtgcatcgtccagcgcgatgacaaaggtttcctatctgttccaccgcaggccaaatttcgcctcaggtcaatggtggcgatggcagtcttcttctccctgacgaccccgatcggcgtggccatcggcatcgggatatcgtcggcgtacgacgagacgagccagacggcgctggtcgtgcagggcctgttcgaggccgcggccgcggggatcctggtgtacatggcgctcgtcgacatcctccgcgaggacttcatgagcgcccgggtgcagggcagcgcgcccctgcaggccgcgctgagcgcctcgctgctgctgggagctggctttgatgtccatgctcgcccatctgggcatgagtga

SEQ ID NO: 17229 - DNA, 378 bp, Zea mays
  Peptide Sequence Number=SeqID_59008
atggcgacgacggcgacgaaccgacgggtgatccacaaggagtacgtgaagggataccctcgcgaggagcacatggagctgctccggggcgccgaggtgcccctccgcccgacgggcgccgagctggccgggtcagtcctcgtcaggaacctctacctctcctacaaccccctacatgcggcccaagatgtcgcgctcgctgcgggctacgagcggccgtggtgctacgacccctacatgcgacccctacatcacgggctacgagcggccgcaaagggagacgaacctcgtcgtcgtcgatgccgtcgtcggccagaacagtcccgctgccgtcgccgccaccgttgtgctcgaggcacgagcagtgcgagaggctga

SEQ ID NO: 17230 - DNA, 198 bp, Zea mays
  Peptide Sequence Number=SeqID_59009
atgacgacagaggaagtcagcaacaaagcaacaaagcttcggggcagcaacaaagctatcttcggccgccagctccaaggggcagaggcgccaggggcttcggaggaagccatactaataatttctgatgattcttttgcctctgcttcggccagtggctcaaagggctccgaggtggagataattcggctgtggtag

SEQ ID NO: 17231 - DNA, 666 bp, Zea mays
  Peptide Sequence Number=SeqID_59010
atggatttatcagctggtgaagaatctctgaaagaagtcgtacatgtggcagaatcatttttttctaatgcaggcgttgactatatggtccataatgcagccttcgaacgtcctaaacggagggctctagaagaaagtgaggaaggtcttaaggctacattgaatgtcaatgtcttcggaactattactttaactcgccttctagcaccttacatgcttgatagagagatgggccattttgttgtgatgagtagtgctgctggaaaggttcctgctcctggtcaggccatttactctgcctccaaacatgctcttaatggttactttgcttctctgcgatctgagttgtgtacaaaaggcattaaggtcactgttatctgccctggaccgattgaaacactacaatcttctgctgcagcttcttcatcgcaaacacattctgctgagaaacgtgagaaacgtgtttcggtggaacggtgtgttgaactgacaattgttgctgctactcatggactgaaagaagcatggatatcatatcagcctgtgctgactgttatgtacttggtgcaatacatgccaacaattggtttattggctaatggacaaggtttgaacgggttcaacccacaacaacccacgtttggttcaaaaagtctcgcgggttag

SEQ ID NO: 17232 - DNA, 282 bp, Zea mays
  Peptide Sequence Number=SeqID_59011
atgaaggagttacaatcttataagttgatgttgaatcatagtcaactgaaccaaatagttaaagcaaacatagttgtcgcttcttcctcaaaagggaagggaaagtgcggtaagaaaggcaaggctaagctctttgggccaccacaaatggaaaggaagagaaccagagagcctaaagacttatttaagtctaaattcttcttctacagtaagaaagtgcacttcaatgtgaaatttaaaaagaggaaggaataccttgctgctaaagaaaaaggggtttga

SEQ ID NO: 17233 - DNA, 150 bp, Zea mays
  Peptide Sequence Number=SeqID_59012
atggcagtgtataaatgtaagaccatagctaggctatggcatactgatgataagaccatagctggtctatggcattctgatgataagaccgtaacaagttacggcattatggacatacattttgtggatcagaagatcggattagcttga

SEQ ID NO: 17234 - DNA, 789 bp, Zea mays
  Peptide Sequence Number=SeqID_59013
atggagaagctggcggatgaagaagatgcagagcagttattcgttgcattcaccgaatttgaggaacggtgtaaggaaacggaacgagctcgtagtatttacaagtttgctctcaatcatatacctaaaggtagtgtagaggatttttatagaaagtttgcggcttttgagaagcaatatggagaaaaggaagggattgaggatgccattgtggggaagaggaggtttcagtatgaggatgaagtcaggaagaatccattgaattatgatgcttggtttgattatataaggttggaagagagtgtaggcaataaggggaggattagggaggtttatgagagagctattgctaatgtttctctagctgaggagaagcgatattggcagagatatatttacgtatggattaattatgctttatatttggagcttgatgctggggatatggagcgaacgagagatgtgtacaggcatatggtgtattctaaagaatcattcagtttttgggtgtttttcaccattcatattgtgtttgaaataagacagctcaatctcaagggtgcgcggcaaattttgggaaatgctattggaaaggcacctaaagataagatctttaagaagtatattaaaattgagctgcaacttggtaatattgaccgttgccgaaaactgtatgagaagtatctggagtggagcaaatatgtcgagttagaaagatcattagctaaaacagagcgagcaagagctatttttgagcttgccaacttagacatttttttcttattgtaa

SEQ ID NO: 17235 - DNA, 114 bp, Zea mays
  Peptide Sequence Number=SeqID_59014
atgaggccgatgtcgatggaattcatgacagacccaaacgaccaaggttcagccatggaagttgacgatgttgacacaccggatatcttcgacgaagggtctgaaatttcttaa

SEQ ID NO: 17236 - DNA, 456 bp, Zea mays
  Peptide Sequence Number=SeqID_59015
atggagagctccagactcacctaccccgaccgcttctacaccgtcgcggcctacgccacgcacaaggacgaggccatcgtcggctcgccatctccctcccttctatgggatgagcacttcccgtcctctgtgacggcgacggccgcggctgcgggcggcatgggccagctcctcttgatgtgcagcttcggaggctggatcatcccatgctcaaccgggaagatggttttggccgtcttcggggtgtcacatgcatttgtgattttcttgccaattcaggatctcattatcctatggatgaccaagagcctgatggacgacatccatgggtggggagttctcttcgacgacaaagttggggatggaaccgtctctgtaagtgcacaaggtccacaccctcttaaccattctgcagtgaagatttgctacatgggttcacatgacagcaacctctaa

SEQ ID NO: 17237 - DNA, 777 bp, Zea mays
  Peptide Sequence Number=SeqID_59016
atgaccatgcaacatgttgcattgtccaaggcaaacaatgaatatccaaaaatacacacccttttctctatcgaatgttcatcatattttgactggcaaactgttgggcttatgtacagcggacagcctggtaacatcacgcgcttattgagctgtacggatgaggacttaaagaaaggacatgatcttgctcccacacattatgttccatctatgagccgacatccattgacaggggactggtaccctgtaattaacaaacctgcaggagttctccattggctcaatcatgtgcagactgatgctgagttccttgttatcctagatgctgataggatcatgagaggccccatcaccccatgggaatatggtgcaaaacgtggccatcctgtttctactccttatgagtacctcattggttgtgataacatacttgcaaagatacacactcgcaatccctccgcgtgtgataaggttgacggtgtcattatcatgcatatagatgatcttcggcgttttgctctactgtggcttcacaaatcagaggaggttcgtgcagacaaagatcactatgcaaccaacattactggcgatatatataattctagctggattagcgagatgtatggctactcttttgcagcagctgagattaacctgcgacacatcattaggagggacataatgatatatccaggttatgttccactgcccagggtcaaagcaggagactggagacgggtcaaagcttttttgggcatccagatccagacatag

SEQ ID NO: 17238 - DNA, 156 bp, Zea mays
  Peptide Sequence Number=SeqID_59017
atggcccatgatgctgatgaggacggtgagcccgtggaccagaaggagcacaagagcatgattggctccctcctaaagatcgagatgggtttgcatttctaccacatctctgcatcgagattgcttccatttgcacttttggatgagctcgagtag

SEQ ID NO: 17239 - DNA, 561 bp, Zea mays
  Peptide Sequence Number=SeqID_59018
atggatgatgcaagggagtacaagctaatcgggagagggaaggatcccaagtccctagggttgattgaggcaagtgccaatatggtggtggaggtgagaatcgtgaagtgttcgcctgccttcctgaagctgtggactgccctatttatagcctcaaggagggttgctaggatctcctgggttggccgtgtgcgctctgcagtttacggtgatgtcgagcacctttctgttgctagtatcaaagccgaagccgggctcgggcgaggcggaggtccgcccgaggtcgtgtccgagcccgctccaggattcttagacatgcgcgacacagttgaaggagtggccttctacgggattcatggggagcaggtgtgcgcattgaatgctcatgtctcttgcggccttcggctgagacctgcctcgaggttgtattccttacccgagtcaggcctgagcgaggcggagacagcggttctaggaagaggggacctcgactgggacaaggattctcttgagaatgttccttgtccgagggcaggcttgggcaaagcagagttatggtga

SEQ ID NO: 17240 - DNA, 231 bp, Zea mays
  Peptide Sequence Number=SeqID_59019
atggagagcaaatgggagagggagaagaaacggcgcgggacattcatggcgcggggctcgggtcgtcgcggttgggatcgctcggtgcgctggtgcttggtgcggtcgcgaccgttgcgcagtcggcttcggctcggggaggccgggcgtcgcgcggtgccgcggctgctcgctcgcggcgcggccggtcgagcgtgcagggctcctggtgcctgggcgcgcgtggagtag

SEQ ID NO: 17241 - DNA, 1480 bp, Zea mays
  Peptide Sequence Number=SeqID_59020
gcgcgattcagctcgccaacgctcgacggcggccctgcggtgcgctcacgtcccggtggtggctcaccggaggctacggccccatcacagatgtcgggagaaccatattcgaccgggagctgttccacgtcgacctcgacgatgcacccgtcttcgacgccgacactgacaacctcagcgtcgaacccatctttgacgacgtggtgttcgaggacattgagcccaacttcgacgacctcgatgacgagcccctcttcgacaccaagttcgacgagctcgacaagggatcagtattcgacactgagtcgatccccgaccatgtcgccgtctccgtgttcgagttcgtcaggccggagtatgatgctgagctcaccgtcttcgacaccgactcggacagcctcaacgacctgccggtagtcgacatggggccggtccatgacgccgagctcgccgtgttcaaccaaggaaacgacggctcctcgactgcacacaccggcgtcctcgacgggcaccctgtctttgacgtggagctcgtatttgatgaggagcctctcatcgaaatcgattgcagcatctttaacactaatgcgcccttcatgtgtttgacagattgtctgagctacgtcgatgacatggtgtctgctacttttaaggaggggcatatctttgataaggagattgtagtagaagcagtacagaaggaaagtggcagggattactatactgctcacggtgagaatgccatgtttattgcaaggacatactatcacacaatttctgctttacgtcatttaggcagcaactctggtggaatctcaagtgtcggtgtgagcgaggctatgtttgagaccattgtccgcaagatcttattagataggactgactgtactttagatttctacgagggtagtagctctgattggaggttatcaaaatctggaaaacctggaaatattggtggatttgaagacattttgtttataaacaatgacatgcaagagtcaccagtcatgaccaacaggaagcttgggttggctgaattccgtgaagatagccgattcacaaatgttggatcagcacttcttgcattatgtctcacagcagattgtgagaaatccatcaattcacattctcttcaagatgccattactaaatgcagtattctgttgactgagagaaaaaagtctaacttcaaatcaaaggatcttgtgcaagatcttgaaaaaatcagaagttctgttaaactagttcatgatctgatatctcaatttgactactctcttggtgcccttggagctctactatcttatgctgagttgctagcaaatgatactaattatgggaattacacaattgaaaagtacaatttggactgctacatgagacttgattctgctgcggtgcgagcattgaccattcatgaagaaaaaactgatcgtgttggtttcaatttcagagaatatattgagctgctggagag

SEQ ID NO: 17242 - DNA, 366 bp, Zea mays
  Peptide Sequence Number=SeqID_59021
atgtcgtggccgcacgccgaggctgcacctcgccgggcgccgggggtgagccaaggccgcgccaacattggagggagggagccggggcgggcgcgcgccgtgccggggcgagcacgccgggccgccgcgagcgcgccgggaagggtgagagcgggcacgccgaggcagggcacgccatggccgggggggaagcgcgtcgggggccggggcgggaggggggtacgtcgcgcgcagggggagctgagccgaggacgcgtcgcgcccggggctgaggcaccgcgcgcgcgccgggctgagttccaagtcgtgccacgccaggctgtcacacccggatttcggggcaccaagacccgggcgcgaacataa

SEQ ID NO: 17243 - DNA, 192 bp, Zea mays
  Peptide Sequence Number=SeqID_59022
atgaatccgttcctgacttttggggggcctgaggcgaaatccattatagagggcccatcgaccaagctgccccggattcagattacagacccgatagcaagatactatgggatgaagcgtgggcaggtcgtgaagatcacaagagccagtgagactgctggaagatacatcacctaccgctacgttgtctga

SEQ ID NO: 17244 - DNA, 168 bp, Zea mays
  Peptide Sequence Number=SeqID_59023
atggcgccaccgcaccgggcgactgtgtcgccgaaacaccctcctggttttagaaaacaacccgcagtccatcctagggttaacctgagtctggggaattattgcaccgaggcccctgcactctctggtttttatgcgcctagtccaggaattagaaaaacccagtaa

SEQ ID NO: 17245 - DNA, 528 bp, Zea mays
  Peptide Sequence Number=SeqID_59024
atgatgcgagtgatcggtgtgcctatgtcaggaaggcgaacacctggattgaaagactgctctctcagttcagcattgggtcgtcaaggagaacaaaatgatggtaccttcagcgtgaggatcgatgactgtcaatggagctgtgcaaacacaatcgtggcaaagctggctgtggcactggcgcctatgccatttatgagggttttgcttgaccgttttgtggctgcaactagtggtgtgttcccagacaaccaagagctacaagacagaggtaagctctcgggttccgtcctggggcaatggggagctgttgatgatcctgagtccatgctgcaccacatccattgggcagtaatgaggtggcctgtgcctgccatgttggtatcatccaaacagtctccatgtctgcattatactgatgactggaatgagggtgtgtccaaggaggagctggactctgagatcccacctggcgaggagtcgatatacggatacataatgggaatggcagatacatgtagtctgtag

SEQ ID NO: 17246 - DNA, 270 bp, Zea mays
  Peptide Sequence Number=SeqID_59025
atggagttgttgctgcgtcacgatttgccccttcctgagatcgccgccttccacacaggcttcatccacacccagttgcatcccccgccgaccaagccccagccgacgccgattttacctgttcggtgccgagcagagcacgaaggagaagcaactgacaccgaggcgaaggtttcgagaggggaggctattctttttcctgttcgacgactgcgtggggttagggaggaagccgactgtcttgcggggaagaggaggaccgagagatga

SEQ ID NO: 17247 - DNA, 291 bp, Zea mays
  Peptide Sequence Number=SeqID_59026
atgacagtgaagaaggggtacagatcccgtttaccatggcgggatctccagccatgtgattggataatttccccaaactggctaaaagaaagcgtcagagaagggcaatttgtagaagaagcacaatatgttctggaagatgaagaatataggatgcaatataagtctgaacttagagatgcagttatgagagctaaagaaaggcataactccttatttgctggttataagcacatccaaccctcttttgatgttctcttagccattattaaatctaccggaggcaagtaa

SEQ ID NO: 17248 - DNA, 345 bp, Zea mays
  Peptide Sequence Number=SeqID_59027
atggagccaatttgcaaacacaccagttccaccaccacagttcaccacccctccgacacatatacctgcacctctgaattttatacaggcctgtatttgagaagtggagtatcaaatttcctaccaccactgcagcacgacgacctcggcacccgcgtctctcgctacagcatcgtcgccgctcctcctaattatgatcttgtcgcatctgctcctggatttcgcgtctgccacggctatggaaggcctgaaccagagccattttggggtgctgccactgctctcttcagggttcagtactttgccccgccggaacgtcaacttgcgaggcggttgcgcttgtag

SEQ ID NO: 17249 - DNA, 195 bp, Zea mays
  Peptide Sequence Number=SeqID_59028
atggatccgccgtcggacccgaagccgatcatccccctcgatgagatcgtcagcgacttcgagggtgtgctcgcggcagactcttgcctcactgccccagcgcaagatgtgaacaactcctggttggattcaccgctagagcccgagcaatatcccctaaattccatcctctatatcaacagtgtactaatttaa

SEQ ID NO: 17250 - DNA, 345 bp, Zea mays
  Peptide Sequence Number=SeqID_59029
atggatagccagcggccagttacgtacagtgtagcatcacatggcgatgagcacatcagcatgttgcaaatccgtgtcggcgaccttgcggcggcggcggcggccatggacttcgtgctccaggtcctgctgcgggtggtgatgagaagaagcatccgcaggctgcaagaggtcgttgacatcgccgtggacatcggcacggctgtcttcgtggccgtgcgggtctccggcctcgtcttccgccgccggctgcccacgccgactacgacatcgtcgtcgtcgacgacgtactactactccccggggacgtcctcctcgatcggcatgcatgtccaggaggattaa

SEQ ID NO: 17251 - DNA, 366 bp, Zea mays
  Peptide Sequence Number=SeqID_59030
atgggcccaaggccttttgcgagccgagtctcaagcaaccaggcacgacatttgcgtgttcttgccaatctgtcactatcattttctcataccctaaatctttctttggaaaccttacttcctcaaagcttttcccttatcatcttcggagtttctgaaatgactggagagggaaagggtgacgagctcgtgttggtgaaatactatgatgcggcagagaagatccaagatgaaaagattattgaagaaatcatggttagcctatatgatgattctgatggtatcgaagaattcaactttgaagaggataatgcatatgtcgaagatcggccatcccgcggtatctccggtggttggagttcctga

SEQ ID NO: 17252 - DNA, 882 bp, Zea mays
  Peptide Sequence Number=SeqID_59031
atggcagaggacgaggcccagaagctcttgtttgcccgagacatcattgttatcgcgagagttcaagcggaggcttcactctcagagcagagcacagagctccaggctctcagggcggccgtgagcacgtatagccttgaggtagatggctctcattttgacgagaccaacacgatcgtgatcatgaagggctttgccgccggacagagcgacgaggagctatatcgattcgtcgcccacgtcgggtgggagagctcggggcagataacgagagagccttctcacttgtcggaggacgatgtcccaacacgagtgtgcttggttgcgttggccgcgctggtccatgcgtccttcgcctctttggcggacttggaggctgccttgaaggaagaggacgccatgatggtcccgcgggaactgggcatctttagcttcaacttgctcgcgcccgcgcgctttctcgctctctctgctcggtgggacccacctgttggcgccaactccctcagccgcgcgcgctccctcgctctctgcgccacgggcccggcctgtcagcgtcgttcccgcctcgcgcgcccgtgtctctacgccgcggaccccgcgtgtcagacccgttgtccccgcaaccgccgctcccccaggcgtgcgcgcacgccgagaagaccggcccacgtcacagcccacgtctcccagcttccttttgagctccgcacgcacccgtcctctctctcctgcctcatttcactcgctcctagcccctctcgtgcacaactgctgccgcccgagctcaccggagaagcgcgcccgccgtgccgactgcctggagctccagacgccgtgccaaggctttccgagcgctgtcctaagataaagaaccgctga

SEQ ID NO: 17253 - DNA, 360 bp, Zea mays
  Peptide Sequence Number=SeqID_59032
atggggaggcggctgagggacatgcccgactgctgcagcgacgacggcttcttctttgtttattgggtttgctggctcaacttgatatcttggacgagcggaggtagccaagttttaaaggaaatcctgcgaagatctcggccagagcgacgaccaagaactccatcagatccggcggcagctttgctctggtttgttacgcgggtgggagaagaaatagctgacgcccgggacccattcgacaacgagggaaggagggagcacggctgcgcggagcgtctggccaggtggggcccacctgcagtggccggagcgtgcaacgcggaggaaaaaaagaaacggctggcgcgcgcggaatag

SEQ ID NO: 17254 - DNA, 165 bp, Zea mays
  Peptide Sequence Number=SeqID_59033
atggagagcggcgcgctggacaccattggcctgctggctggcggacaggactggctggcttggccggcgcttcaagccaaacaccacgcgacagccatggccactgcagcacacaacaagatcagatatggtgatatcaagtcggttcggataagacttaattag

SEQ ID NO: 17255 - DNA, 129 bp, Zea mays
  Peptide Sequence Number=SeqID_59034
atgggggtaccccattgggctcggctagccagtgttggttatgatgtgccagaagtcagcgccgcctcggtcattgagctgctcgccggagtgaggcggtgggagtcggggccgagacgttgtaattga

SEQ ID NO: 17256 - DNA, 279 bp, Zea mays
  Peptide Sequence Number=SeqID_59035
atggcttcctctgctgccaggggcctcgcccaggccatccgccttgtctccatggtcatgtgcagcgagctctattttcccagcgctctcgcctgctcgacgaaatgtcgcagcgcgaagcggccatggatcctccctgcgccgcgcccttggcgtgctcaacgtaatgccgcagcatgctgcagcagcgatgccctccgctgtgtcgcgctcgccgggtcgggcctcacgccgtcgctctgcgcaacgtttctgcgtcgtcttcaaaacccatggtga

SEQ ID NO: 17257 - DNA, 1671 bp, Zea mays
  Peptide Sequence Number=SeqID_59036
atggcgagacaagggcgagggcggaaggtggcggcgctgcttggttgcggtggcgaccgtgaaagggcgaggaagcctaggcaagccgcggaggtgaagggacggagcgggaggaagcacgggcaagctgctgcggcaagggcgcggaagagggctgaagcgcgggaacaacaaactgccacgaccgggagggcacgagggatggagatggcgagtcctacgccctcggcaaagatgacgagcgaaggggatgagataccgagcatgatggagaggaacgctgccccagtgtgccaaagcttgaagctggggaaatctattgaagttagacaggcagctggtctattactgaaaaacaatctgcgaacgacttacatttccatgcaatcttcatcccagcattatgttaagtctgagctgttaccatgtataggggcaaccaatagggcaattagatccacagttggaacagtgatcagtgtgcttttccaaattgtacgagttgctggatggattgagttgtttcaggcactccataagtgtttggagagtaatgacctggatcacatggaaggtgctatggatgcgatatacaagatctgtgaggatgtccctgaagagcttgatgttgatgttcctggtttgtctgaacgaccgatcaacgtgtttatgccaagaatactgcagtttttccagtcaccacatgcaagtttgagaaaactatcattgggtatcataaaccagtacatagtagtgatgccatcggcactctacatgtctatggatcagtatattcagggattattcaaccttgcaaaggactcttcagcagatgttcggaaactggtttgttcagcctgggttcagctcattgaagttcgcccatcaattttggagccacatcttaaaaatgttactgaattgattctgcaagctaataaagattcagatgatgaagttgctctggaagcttgtgagttctggtctgcatactgtgatgtgagcatgcctcctgaaggtttacaggagttcttgccgcacttaatcccgactttgttgtcgaacatggtatatgctgacggcgatgagtcccttgatgatgctgaggaagatgaatcctttccagacagggaccaggatttgaagccccgcttccatgattctcgattgcatggatcggaaactggagatgacgatgatgatgctgatgctgtaaatgtctggaacctgcggaagtgtagtgctgctgggttggatgttctctctaatgtgtttggtgacagcatccttccaactttaatgccattgattgagcaaaacttggctcgaacagatgatgattcttggaaggagagggaaactgctgttttatgtctaggcgctatagcagaggggtgcattagtggtctatacccacaccttcctcagattgttgcctttctaatcccacttcttgatgataaatttcctcttatacggagtattacgtgttggacgctctctcgatacagcaaattcattgttcagagccttgatcatccaaatggacgcggacaatttgataagattcttatgggagtgctcagaaggatattggatactaacaaaagagtgcaagaggctgcttgttcggcgtttgcaatccttgaagaggtcattgccatattttag

SEQ ID NO: 17258 - DNA, 957 bp, Zea mays
  Peptide Sequence Number=SeqID_59037
atggggttgaggagcacgaagacggtcttgccgttgaagaggacgatagagagcgcgattcagccgttgctggagccaatgcagcggcttcccaagacgatggcgcgccacgccgtgcagacgccccgcgcgctggcgtaccacttgaggtcgagtcggtctccgatgcggcagaggagatctgccggcagaccaccacaagcattgaacccaataacatcggtgagaagggcttccgcggaccgcttcgtccgcgtttcccttctcgagggcagcctccgccttctccctcatggccagcgcggtgagccctacggccgcatcgaattccgtggggccgacgagggacgggcgtgtgatccacctgggaccgggggagttgaacgcacgcacggcgggtgggagagtgtggacagcgtgccgcacccgtcgatcgggtcgcagatctgggcatcgcggtcggatctgtgcatggcggcgggcagcggcaatggcgaggagatccgaggaggagcaggcgggatcaaggcggtggcgctcgtgcccctccggtctcgcttcgggctggttcaggggcggctgcgggcgtgcggtcgggctggttcgggagcgactgcgtgcggcatgcgtcaggtgggcgggagggcggttcgcggcggccgcagcgagatttgcgggattgtggcgtgcgagcggttcggtgggcgggagggcgccaagatggtggatattcaaggtttgactatgtcggttgttgatggtatactcgaagatgtcgttcctgatgatctactgcttgaattacctaagatcagagttattgatgtccgtataaattgcccggacgaggttaattctgctagtttgttggccgagccagaggccgttggcgatctaagccagggctccgtcgacttcactcggcgtgttcagggctcgagcgaagtcgggcagtag

SEQ ID NO: 17259 - DNA, 378 bp, Zea mays
  Peptide Sequence Number=SeqID_59038
atgaggctggagtatgaggacggtcaccagcggaccccgctccttgatcctgctgaaggagtcggggcgtcacttggatcacttgtttatagttcatcgagcgccatgatctcgatcatcgaggaaagcatggtacagctcaatcttccccttccaatgaacaaaatgcacgagaagagtattaaaaagatagagcggtccctagacgtatcccctatagcgaatgggggacttgagggctcgctccgcaaaaagaagggcctattcggatctaccgatcaaggccctccaagcgccatgatctcaatcaccgaggggagcatggtacaactcacccttcccctctcggtggacgggatgcgtgggaaggaacagtag

SEQ ID NO: 17260 - DNA, 156 bp, Zea mays
  Peptide Sequence Number=SeqID_59039
atggcgccaccgcgcctcgacacgccggccgtcgtatgggcatcaggggtagacaacgagcagtttgtgattcccagaggaggagcaggagaagaacttgagcaactgtttagtgaaggcaagtgtcttctgacctattatgtcctattcacatga

SEQ ID NO: 17261 - DNA, 1101 bp, Zea mays
  Peptide Sequence Number=SeqID_59040
atggcgaccgagccagcgcttccccaaggccacggcgatggcgatagcatcgtagaccgcgacgtctggctggcctgcgccgtcccgttctctcgcgtccctaccgtcggcgccgaggtctactactttcccgacggccacgccgagcagcacctgctggcgccgctccctgcgtcgcaccgcttcccctgcacctgcaccgtcaccgacgtgagcctcggcgcggaggacaggacggacgaggtgttcgccaagatctccctcaggccaggccccgccgccgcttctcgtccggagcccgggcccgggcccggcagcagcaacagcacgcggcaggggctcagctacttcgtcaatgagctcttgcatagagacacgagtaccagcggaatgttctgcatcccacgctactgcacggagcacatcttccccaagctcgacctgaatgccaacccgcccgagcaggacctcgtcatgcgcgacaccaggggcaaaccgtggcagttccaccacatctacgtagtcaagatacgccaacaccggctcaccgccgggtggagcgagttcgtcgacgccaagctgctggtggcgggggacaccatcgtcttcatgcgccaccccaacggcgacctcatcctcggcctgcgccgcaaggccaccaggacgtcatggaggccgcgcgcctcgccgccgtgggcaggcccttcacggtcacctacttcccgagacaggccgccgtggagttcgtcgtcccgcacagcgaggtggatagcgcgctcgccaccagctgggaacgaggcgcgcaggttggaggacgagaacaagcagcgcagcgtgtgggtcgacggccacgtcgtcaaggcgaaccgccaaaacatctggcggatgctcgagatccactggtggggtgactcacctgcatctgcgtcaccaccgtcacgagcaatgagcagatttgtgaatgtttggcaagtccagcgtgttgcgtggttccttcctcggccatattattggagggtccgtaagaagccaggcccagggcatgagcatgacattggaggggccaccaattcctgcaatgcgaagcccctcagctgctag

SEQ ID NO: 17262 - DNA, 1023 bp, Zea mays
  Peptide Sequence Number=SeqID_59041
atgcccagatctgcgacccgatcgacgggtgcggcacgctgtccacactctcccacccgccgtgcgtgcgttcaactcccccggtcccaggtggatcacacgcccgtccctgggagcgccgcggtgttcggccacgtgggcacggcggcgcgaggcgcgcagctactggagcacctcgtcggccccacggaattcgatgcggccgtagggctcaccgcgctggccatgagggagaaggcggaggctgccctcgagaagggaaacgcggacgaagcgaccgtcttcgtgctcctcaaccccatcgccgctgtggagatcctcctcccgccgctgatctatgagagccgctgggtttccaaggtcgtcttcaccccgagccccgccaaggatgatttcgccgccgcggcaatctgcgatatcgacaggatcgcatacgtcaccgccggtgccaggaggtgggccgtcatggaccccgtccgcctcacctgcggggaccaactcaccgacgtcgtatacaccgacaaaggtaaggtctattgcctcaccaagtgcggggacgtgcatgtgctccgtcttcctgagcgccggcgccggaagcctgccaacactgatgaagcaggatcctcggagccagagttctctgttctccagttaccacaacctaatgagcgcacaattacattccgcccactgcgttggcaacatcagcgcaattttcgaatgatgcgcaatgaacaggcccgaccaagagaccaggatctaactattccactgagggtgaccttctgtgcagagacactcatcccatataagaaagttccacctgaatcgcaaggaccacacctaaatgcgccggccactgttgagcccctgttgtctgaggccaacctcccgttcaaccctgccactgtctttgctccaccttatgactctggtggtgcaacagatttcccagagacatacaattctacagctaattttgcccgagagcgaaagctaacatggcttcttgattttttttaa

SEQ ID NO: 17263 - DNA, 447 bp, Zea mays
  Peptide Sequence Number=SeqID_59042
atggtgtacgtggattcctgggacgagttcgtggagcggtccgtgcagctcttccgcgccgaccccaacaccacccgctacgtgatgaagtaccggcactgcgaggggaagcttgtgctcaaggtcactgatgaccgcgagcttatagaattgggtgatcgaaggatcataagttcttttgttggatggatctgtctgaacttcagaggcgtcatggattgctgtagcaaatggcgttgcaggcctaatgtcgagtatctgttcatgctcatactatgtgcctccatgtgcacatttcagttgctaactgagatttctaattatacggaaacaattgaagccgacatggagtacaacacaaaactatctgagttctgtttagcaaaagctggtccttcgggtgataaagctcatgtatctactcgggttgttgccacttatggttga

SEQ ID NO: 17264 - DNA, 3789 bp, Zea mays
  Peptide Sequence Number=SeqID_59043
atggcggagtcggagaagggcgccgccgcaaccaccaccgccgccgccgagcctgggtccggcccgccgcacgaggacgaggatgcgctgctcgcccgtgcccacactgtcatctccaggatcctcgaccgcgagctcgaccccaaccctcgcctcctccacaccctcgccaccatgtgcgagctccacgaagccagatatcttgagttacgtgcagctgacccaacgttcaataacacgaacacaaggagcacatttacaattgggaagctggccaatttgctccggcctccgtatcctcatgtctttgaagactctatcatagataatattaaaaagtgggtaatgaaggatcctgaagcatctaatgaatgtgagtggaagtatctaggaaaaaataaacccacagatgctgagatgctgagaacatatgcgattgggttgcttgctatggcattgtgcagtggtgggcaattggtagaggatgtcttgactttgggggtgccagcaaagctcatgcactttctgcgcataagagtccttggtgatgcctcatcttctcaaagagatgctaatcatccacaagacaccaaatatcctcgaggcagagacgataataggggtaaatcacgtctggcccaagatggttctcggttggatggaacaagggttgggtatggaatattgaccaacccaacagcagagaaggacaatgaacctggtgttgtaatgaggcaagcatatggagaaaggtcattggatggcacttttgcctcatcagataattctgacgtccctgaggttgattggaccaatgataactcttatggcacaattgtttgtgacacaaagtcaaaatatggggaaaagacttctgtgacaagggctcttaaagatgaagagatcagcgaaaatggtgaactgttgaagagaaagctgagtcgagccccctctcgacttagagtgaagggaaaagcaggagacaacttgcctgaatgtgaaatgacacctttatcaccaacctctggattgagaatcggaggtcgggcttccagagacaggaatgtggtgagggttgatgacccaaagaaggcaactgatgtgaacaatagttctgcaggcctcgagttgtttagcgctatttccaaagaagaatatgaagatcgtttgagggattgcattattggcttgaaggatatatctgacatcgttttgaaggcagtgagagctgctgaggctgaggccagatctgcaaatgcacctgatgaagctgtgaaagcagcaggtgatgctgctgccgagcttgtgaaatctgctgctttggaggtttggaaagccgaaaataatagtgatgcggttatagtagcggcagagaaagctgcatctgcagttgtagaggctgcagtgtcgactagtgtctcacgaagcacaaatcaagttggtgaagaacgtgcagcggaagaagctgtacaaaccagcgaagaccaggatttggaaaattttgttatcagtgacaaatcacagctcttacaacttagagaaaaatatagcatccagtgtctacagattttgggagagtatgttgaagctttgggtcctgttctccatgaaaaaggtgttgatgtttgcctcacattattgcaaatgagcatgaaagaccaggagggatgtgaccactttgctcaactccctgatgttcttaaattaatttgtgcattggctgcccatcgaaaatttgctgcactctttgttgatcgtggtggtatacagaagatcctctctattcctagaattacccagacatatatgggtctttctgcctgcttattcactttcgggtctcttcagtctaccatggaacgtgtttgtgcgctctcctctgacacacttgacagtgttgttgaattagcacttcaacttcttgagtgcccacaagatttagctagaaaaaatgtgggcatctttttcgctgctgcttttgtgttcaaagctgttcttgatctatttgatgcacgagatgggatgcaaaagcttctcgatatcctatatggttgcgcatctggaagatctggcagtaattctggaggagcaggatcctccaatgtaaatcaagggaatgatcggtcacctgctgaagctttgactgcatcagagaagcaagttgcataccatacttgtgttgctctacggcaatactttagagctcatctccttcagcttgttgactccattcggccaagcaaaagcatccgcagtattgctcggaacacttctagtgcacgagctggctacaaaccttttgacattagcaatgaagctatggatgctgtctttcgtcagatccagcgggacagaaagttaggccttgctcttgtgagagttcgttggcctgtgttagacaaattttttgcctcaaatggtcacgtgactatgctggagttgtgtaaggcacatggtgatcgctatttgcgtgatttaactcaatatgcaattggagttcttcacatcataacacttatgccacaaccacatgtccgcaaatcaatagtgcagggaacattaagcaacaatcgtgctggtatggctgtcttattagacacggtgaaaagttttgactacattgatcatgaggtgatctgtccagcactgaatgtcctcgtcaatcttgtatgcccgcctccttctatcagcaacaaaccattgtcaactgccaatcagcaacctgcagccgcgcaagcacttgcttcagaaagcagagataggaacttcgaaaaaagtatttcagataggaatctactagcaaatcagggtgaatatcgtgaaagatctggtgatggcaaccctgctgaaaggaacaataccttgcatcaaggaactcctaacacacctgttgtgacatctggagtagtcggtgatcgaagaataacattaggtgttggaggtggtggtcctggtcttgctgctcaattggagcaaggataccgtcaagctcgagaagttgtaagagccaataatggcataaaaattcttttacagcttctcggttctcggatggttacacatcctgtggctatagattctattcgagcgcttgcctgccgtgtcctgcttggcctggctagagatgatacaattgcacatatactgaccaagctccaggtggggaagaaattatcagaactgatccgtgataccagtgcccagacatctgcgggcgatagtggaagatggcaagctgagctgacccaagtggcaattgaactaattgcggtaataattttgaagattcaaccctctaaacaggccatgttggtattgacaaattctggaaaagaaacaacattagcagcaactgatgctgctgctccagcattgaggcgcatcgagcgagctgggatagctgctgctactcctatctcctaccactcaagggaactgatgcagttgatacatgaacatcttcttgggtctggtttcactgccactgctgccatgctgcagaaggaggctggccttgcacctttaccattgatagcagcggtgcttcctgcccaccaagttgctgccctggaagcatcatctgttcagcaacagtggccctctggacgtgttcagggatttctctcagataaaataaatatgtcgacagatcaatctgcccatagatcagattctatcccgccttcatctaagaaaaaagcactgaccttctcatccagtttctcacgaagagctcagactccacattctgtttctggcagcagaacaagcaacatccttaaaagtcct

SEQ ID NO: 17265 - DNA, 591 bp, Zea mays
  Peptide Sequence Number=SeqID_59044
atggagagctggggctgtccggccaaaggagcgcaggcaggctggacgcgccggcagaggagcttcgacaagctggacagagggcgctcggccatggatgaggcgaggagccggggcgacgcgcgcagaggagctgggagatccgaccggcgccgccataggaacaagggagtagcaggggcgcggcaccagagaaggaagagccgtgcagggagcagagaagatgggagggcgaacagagcagggcgccatggtcagcaggaatccgagcagagcgcggcggggaaacaccaggggacttcacggcacgccatggaagggagctctacgagcagggcagagggaacagaggcctcggcgccggcgagcagctgcaggggagatcgcagtccgagcgccgagcagggaggaatccgcggcgagcggggacacggcgaactgaaggagcagggagggcgcggcccaagctcggccatgggcgagctcggagggaggagatcctggggcgcgtgccagggagccgcacgacgagcgcagggcatggctctgctcctccgcgcgtgggagaggaagcttgctcgcggtgcttga

SEQ ID NO: 17266 - DNA, 324 bp, Zea mays
  Peptide Sequence Number=SeqID_59045
atgacgcaactacatctaattggaccagtgctacacgatacggtgacgaaaacgggcacaggcgatgaatacataccacaaatcgtggacgcaaaagagctgcccacggtgaagtgcaggcgcacgacggagcttttcctccgacgaccaattcacgccactccggccccaaatcttgcgtggaaagactacggatatcctcagggtgtcgaggcgaagctccctcaatggctcagccacagcgggttctgcggctgcggcggcacttctgtcctttcggcgatggcgagctacgagaagatatggtggcggctagtagggtga

SEQ ID NO: 17267 - DNA, 375 bp, Zea mays
  Peptide Sequence Number=SeqID_59046
atgcagtggaacaagagttgtgatggtgtccagaagaagataatccatgatgaaatagagattgtgaagacggaatctaagtataatgcccacaagagagccaagcactacaacgttccaattccattctatgatgaaatagagtttatcttcacaggaaaacaaactattggagaatttagtgtgcttcaagcaccttttgacggcccaccaagacatgctgccgatcccaatggcaacgggagaaagagtaaaaaacaagtagatgtgaacaataatccatctcagtactatgattctgatactcttccagattctaacggtcctacacaggtgattctaaggagaaacctgatgatgactagaagaaaatga

SEQ ID NO: 17268 - DNA, 528 bp, Zea mays
  Peptide Sequence Number=SeqID_59047
atggagagatcgcctctgcatcctcaccaccaagcaaggctcgtaaacagaggaggtgtttcgtctccttcatgggaacgcaggggttcgtccgaaggaaaccgtggagctgcgcccaccacacctgggaggtcgtccaagatgaggccaggcggccgtggagacgagacgcctgagagaggatctgccgtgcccaagtttggagaatgggacgagaaagatccctccacaggtgaaggcttcaccgacatatttaacaaggtgagggaggagaagcagtccggcgatgctcctgtcatcaccagcggcaacgcaggtggtggttatagccgctccaaccaaggccgcaaatacgaatcttcagtgagtcaactccagacttgttgccataatgctggttcaaactattttcttggcctaaagcatttatttgcaggcttgctcatgcttcagttggttcaggaactgatgcttccttgcatggttgctgatgcttctgctggttcagcagctgataggtgccgttga

SEQ ID NO: 17269 - DNA, 1704 bp, Zea mays
  Peptide Sequence Number=SeqID_59048
atgatgcacgatctgagtctcgtcgagctgctatcaagcagcgctcattatgtctgtctgccagttttcggctgttgttcgtcatgctcgcaacatgggtcatatctgagtattcgccgggctaaagatgtcagatatgcttctagagctcttatctactccccaaaccgggtaaatgagcgaagattttggaggaaatcaaaggatttttggaggaaatcaaagtccggagaggccgcggtatccgtggccatcaccaaggtcgaggccgccgccgccgccgccgccaggaaggctgaggccgcctccgatgccgccgggaccggcaaggagaaggccccgcataagaaccacctttacttcactaaactccagttagataatggtatgagaaatattgagcacgagctgaaaaggttgagagatgtactcataaagctgaggggagaggaaacaaagcttaaggagaacatggaggatggaggccgtctcatgcagttgttgtcggaggaacaaaggaagctgagacaggagcagacgaaactgtgggcgcagcaagcaaagttgagattgcagaggaaagaattctatttggagcatggattccctcttggtgctggcgaagaggggcctcaagttcccaatcgggcggaaactgttcatggctgcgacaatgccggtgctgctgccaatgtcaatggcagctgtaacggtggtaggcagggataccctgaggttcgctacaagaggaaggtccagaagtacgtggttaagaccaagcagccatcctctggccctgctactgcaggggctgaacacaagcctgaggagaaggtcacttctgatgctagctcagaggccgatcatcacgacgaagctgccactcctgccaatgtggaagtcgcggctgcctcggtggctgctgcctgtaacaacggacaagatggccctagaaccaacaacgtatttgttcgaaaggagaagctcaatggctccgtgaaaaggaagaacaagaattctaagaacggtgggagcaacgataagttgaagaagcaagatttatccgagaccgaggaaccacccagggaacaagagaaaaagactcttgatgagtacgagcgagaacagaagaagtcctcggaagatgcctcaagaactgaggccaggaaggtctgtgacgatgaatttaggggcctgcagatgttgaagaataaggtagatgatggggaagccatcatgatcaaggcagaaaagcttcagcaaaagtcgaagaagcctcagccggaggcaaaggtacctaagaaggtcgtcatcccgttgaaagatctctcctttgctccaccaaggcgtacttttttcctggaagatggttcttccaatggcggcggtttccgaggccgcagccgcgacaatggcagggttgtccagaacgaggcgagcaacggtgctccgaggggcggcggcggcgacggctaccacgaccagggcagcaacggcggtactgggtactaccaccaccagcagagtggctacgcgcgccgcccacgtggacgcggctactccggcaacggtcgccacccggcccctgccacgaagcccatacttgtggaggagttcccgccgctacccgccttctctgctgcggcccgaggtgccgcaccggctgcagcggcagctcccgcggccgcccgcgctcaggcctag

SEQ ID NO: 17270 - DNA, 1815 bp, Zea mays
  Peptide Sequence Number=SeqID_59049
atgagaggccggagggcatgcctgtggtggttcctggcgcaggacgactcacattctattgggggatacggtgccagggcagtgattaacatagacttggaaagagcttgttttgctgaattagtattcaatacttcactaaggagtgtccctgtttatgagaaacaaaaggagaagaagcataagaaggacaagaaggacaaagttagaaaagaaggtaaagaaaagaaggacaaggacaggagtaaggataagcacaaagataagaaagaccgaaaagaaaaacacagagacaagaaaaaagacaagagcaaagataaaagcagggattcaggtgaaggaattgaaagaaatgacgaggctcaccatggtcagaaggttggagagagcagcaggagatccgaagaaattaaggatcttaaattcagggaggacttggtcagagacgtacaggatgagaaaggggcggcgagtcgacctagtgaaaattatggtgtttcaaatgatcgaaatcgcaaaggcttcagtgcttcacccgcgatggagactgaaaggtttgcgcttaataaagtgcatattcagtctagtaatgctccaaggaaaaatgagggactggtacaacagagcatcagtgccaatcgacaaaagaatgggacatcaatacggcattctgaaagcctcaccacttttgctcaaagaactgtgggtggctttccaccagcaccttcaacggaggaaaaattcaaagctgcaaggcctttatccaatactgaagctgcacccagaaaagaggggattggacagcgaatcagtaacattagcatattggttccaaagagaactgaaaacacaaacagagatgttgcgaagaaagaagttgggacctcctctccattgcctccaaatcctgctaatgctatgcataagggaaatgacaaggttggtaggccaatggagaacacacaagtacccatgcagagatttggcagcccatcgatgtcaactgcagcagtggggatggacagaggaacacctaggtcatccatcccaagcccgagcattacaatccggagaccgaatggaattgtacggccgcctaaaaacatttctgtctcttctaagaaacctgatgcaggagacgtttcacctgctattggtaaggaaaaggaacaaggtggaaggttgctgcaagcaaatatttcaactgatcagaaactggttatgtcaaaaccaccagctgtggagaaagctgcacacggaagtgctgaaaggacggagaaggtcagcagagatggggtgcctgatgttgccaagaaagaggacaaaaagagtgaccggcatgagaaaaagaaaaggaaagagaaagataaacacaaagagaggaaaaaggagaaagaggcaaagaaggagaaagagaagcataattacaaggagcatgataagacaagagagaacaatataagttatccggtagatagtcttaacttgaagccctcggccactcctgtagccccaccagttgatggtggaaaatctgttgtgcccgatgagaacctgaagaagcgaaagaatcatgaaacgaatggttacctacaaaaccatcttgaaatgcggcctacaaagttgccgagaccagccctccccatcaatcttgtggagaatggtacagcatctcatgtagccgcgccactctcttctgtgaagccagaagccattatcaataatattgaaaaggctgaaaggctgcacaaggaagagaagatgaatggcccccttcctcctgagcgagctccagtcgatccggtggctgcctag

SEQ ID NO: 17271 - DNA, 1707 bp, Zea mays
  Peptide Sequence Number=SeqID_59050
atggaggccttcatcgccggcgagagcaacaaccccgagtgccccacgcgcttccacatcgagcgcggtccgcaagcgtattggtgctcctttggccctgagaattatggggagggagggacaatcttgcctagcagaaagtacaggctcaacacgaggaaccgtgctgcacgcccgcagtcgatgcgtggctgcacctgccatttcaccatcaagaggctctatgctcgcccttccctgctgctcatcatctaccacgagaggcgccatgtcaacaagtccggcttcatatgccatgggcccctcgacagggatgccatcgggcctggcgctaggaaaatgccctacattgggagtgaaatccagcagcagaccatgtcattgatctacctcggtgttccagaagagaacatactgcagacacatatcgaaggcatacagcgctactgtagcaaggatgccaaggttgataaccttgcctctcagtatgtccagaaacttgggatgatcatcaagagatcgacacatgagttggatctggatgaccaagctagcatcaggatgtgggttgacagaaataggaagtctgtattcttctaccaggattcaactgaggcagatgcctttattttggggattcagacacaatggcaattgcagcaaatgatgcgctttggccatcagagtcttttggcttctcattcctcatttggtgtaagcaagctaaagtatcccttgcacacgctccttgcattcgactcaaggcagcacgctcttccagttgcatgggtcataacccgctcagttactaagaaggacacattgaaatggatgagcacacttactgatcgaatacattctatagattccacatggggaattggtggttttatcattgatgacccggcttcagagctgggtccaatcagggaggtgttcgcctgcccagttctgttctccatgtggcacatcagaagaacctggcttaaaaatgtaatcaagaaatgcagcaatgttgagctggatgctcttcaacgtgtggactggctagtgcataagctcacaacagagctgcattcgagctactggatcaacctatttgcagacgaaagcgggtcatttcccgaggtgaaagcagactatatcgcatccacgtcatggcaaagggcactccagatacctgacgatgctgttaccttcgacgacaaggatcctcttgtagctagagtggtcagccagaaggaaaccagccagacacggactgtgtggagccctggttctgaattctctctttgcaattgctcgtggtcgatgcagggtaacctatgcaagcacgtgctaaaggtcaacatggtctgcggagcacgcaaagactttcagccctcgctgtcgttccagtcgttccagcatgtcctgcttgatctgtggcagaaaccattggacgattcgttctcgcttgacctctcggtagcgcgggtcatgcagatgcaggagaagatcaaacatgtggctgagctcgccacctccagtggtatcgcccaagttgcagggaagttgccgatgcaatggacaaaaaagagagggagaagagtaggcgtcaagcccacaagcgcgctgctgcttcctcgttctaagggcagtttgcagaaggacttgaccccgaagaacagcaggaagaggaagaggctatctagatttaaagggtaa

SEQ ID NO: 17272 - DNA, 1671 bp, Zea mays
  Peptide Sequence Number=SeqID_59051
atgacggttcatctgatatattttcctaactcaaggctattcttaaacgagtttacggttgagaaattgatcaaggaactaccaactgcgccatcggatttatcgaatgctgaagttcctaacagtgacactggaacaccaaatggggtggctggaacaggtgtcagcgaaacacaaagcattctcttagaaagaattgctagcgagatgaaccggcttaaattctacataagtcatgcacagaacctcccttttattgagaacatggagaagagggtccaaggtgctacaaaactgcttgatggtagcttggagcgctgctttgtggatggtctggaacaccgtgatgctaaagttatatacaactgtttgcgtgcttatgctgcaattgacaacacatcatcagccgaagagcttttccgtacagcagtggtgtctccattgattcagaaaataatccctcaaaattatgcaagagctgttgctggggcatcatctgatgagctggaagaggattatcaacaaataaaggaatgtgtacaaaaagattgtaaatttatattggaaatatcttcctcagaaaactctggattgcatgtttttgattttctgggtaattcaatactcaaagaagtcctttctacaatccagaaaggcaagcctggggccttttctcctggaaagcctaaagaattcttgaggaactacaaagcgagcttaggatttcttgattttcttgaaggtattcttaggttgcggcttgattattttgctgccaactatgttgaaccagaacctggttccaccatatccttttttcatccttttgttccacaagctccccagtccaatatatcttcatttttcaatggttactgcatctccaagtctgctgtaacgaagttccgctctgagcttgcttacacagatttcatgcgacaatggaatgttggtgtctacttttcgttgcgatttcaggaaattgcgggcggccttgattctactcttacaaacacttttagtcctactggattgaatgaggctcaagggaaaccattgctcttgaagcaaagtattaagctcttagaaagtttggattcatgttggagtgatgaggttcttgtattctctcactgtgataaattccttcgtctgtccttgcagcttatttcaaggtatacaacatggctttcatctggtttaacggcacgtaaagcttctgacgggagcccgaattcacctgcagatgctgaatgggcactgtctatacctatagaagatttcatatatataatgcatgatgtgcatgctgtaattggcgagctttcagaatcaggcagcttcattggacatgtgaatcagttactagggtcatgccccattgaagtatttaatcttgtgaaacaaagtatactgcaagctgttgaacctttaaaggaacggttgcctgcaataatcaatgttatgattggaatcatagttaagaagtctaacgaggacttgaagcacctgaaaggaataacagcgacatataggatgacgagtaaacttccagtcaggcattctccatatgtatcagggattttacatccgttgaaggtgactgaacctcctgttttacccttcttttatgatttatattcaactaattcaagcaaagcagctgactag

SEQ ID NO: 17273 - DNA, 738 bp, Zea mays
  Peptide Sequence Number=SeqID_59052
atggccgatctccgcccgccggagccgggcacgaacgggtccagcgccgtcgtggtcgccgcgctgccggccgtggaggccgcgaaggccgccgccgccgccgctgcggccgcgtgcggagcgcagccgcccgcgccgccctactccaagcgccgccgccgccccagcgtccgcctcggggacatcgacgcccctcccccgcgccggaaccacaaaccctcctcctcgtcgcattcgcgcccgccgcgccgcccgcacccggacgacccggacacgcacggcggccgggggcccaagccgcccgcgcagcgccgccccaggaccgcctggattcccgcggggcccgccgagggctgctacgacgacgaggagcgctactacgacgacgaggaccagtccgactccgcggctgccgctgccgccgccgccgcgatggctagggtttcgggcagccgcgacgccggcggtgacgagtctgacggggtggcggactggggcctccccaacggccgcctctcctccgcgatgcggcatggccgcgtcaaggcctggctcgatgggctggggctttctcggtacgcgccggtctttgagatccatgaggtggacggcgaggtgctcccgctgctaacgctggaggacctcaaggacatgggcattgggcgctgttgggtccaggaggaagatgtatgccgccatcctcaagctccggagcgacaacgcgtcctgaggtggtga

SEQ ID NO: 17274 - DNA, 1587 bp, Zea mays
  Peptide Sequence Number=SeqID_59053
atggagctcttcgtcactacacctgacctcccaaccccgctgctgctctccaccttaacgatagtgtccgtggtcgtatgctatgtcctcttctggaagcagcaggcggcggcgaggcgagcgccgctgccgcccgggccgaggggctggcccgtgctgggcaacctaccgcagctgggcgggaagactcaccagacgctgcacgagatgaccaaggtgtacggcccactgctgcggctgcggttcggcagctccaccgtggtggtggccgggtcggcggccgtggcgcagcagttcctccgcgcccacgacgccaacttcagcagccgcccgcccaactccggcggcgagctcatggcgtacaactaccaggacgtggtgttcgcgccctacggggccccgggtgggcgcgcgatgcgcaaggtgtgcgccgtgaacctcttctccgcgcgcgcgctcgacgacgtccgcggcgtccgggagcgcgaggcggcgctcatgggtgagggtcgctcgcggagcaggcccacggcggcctcgacgcgccgccggcggcggtgccggttggcaaggccatcaacgtggggcggggtgctcaacgtcggcgacttcgtgccggcgctccggtggctcgacccgcagggcgtggcggccaagatgaagaagctgcaccgccggttcgacgacatgatggacgagatcattgcaggttatagggaggccaggagggttgcggcagacggagaggagagcaaggatttgcttggcttgctgctgtcgatggttgacgagcggccgttcgacagcggggaagaagtcaggatcaccgaaaccgatgtcaaggcactcattttgctaacacaacagtttagaacgaagagaatatctagtttctcattgatcctatcgttcatgctggctcgtggacacgtacgccagaacctgttcgtggcagggaccgacacgacgtcgaccatagtggagtggtctctcgcagagctgatccgccacccggaaatcctgaggcaagcgcaggaggagatggacgcggtggccgggcgcgggaggctggtcacggagtcggacctccgaagcctcaccttcttcaacgcggtcatcaaggagacgttccgcctgcacccgtcgacgccgctctccctaccgcgcatggccgccgaggagtgcgaggtcgcgggctaccgcgtccccaggggctcggagctgctggtcaacgtgtggggcatcgcccgcgacccggcgctgtggcctgacccgctggagttccggccggccaggttcctgccggggcgggtcgcatgcgggacgtggacgtcaaaggcgccgacttcgggctcatcccgttcggcgccggccggaggatctgcgccggcctcagctgggggctgcggatggtcacgctcaccagcgccaccctggtgcacgcgttcgactgggagttgccggcagggcagacgccggacaaagctgaacatggaggaggccttcaccctcctgctgcagcgggctgttccgttagtggctcgtccagtacccaggctgctgccgtcggcgtatgagatcgcatag

SEQ ID NO: 17275 - DNA, 774 bp, Zea mays
  Peptide Sequence Number=SeqID_59054
atgcaggaattcccttgcaggaccgccatcgcagcaaaatcctcccgagggtctccctacactgaccactcccctactgcccttgcccctttcggagtgtctggccacggcgaggagcggacccgcggcggagatcgaactgcggcgagcaattcaagtcgccccgaggctccgcagttcgaattgagcactccagcaacttcatgggtccccggcgaacgccccaagttcttgagcttcgctcggtctacggtttacagggacgcagaggcttcggtatttatacccgagggcaagagccgcagccagccgccaacctacaggcgagaatcgcggcggagtccacggcggcgcggagatcggcgcccagttgagattggggcggagtccgtgtggaggaggcgagctgggaggagactccgcccggatttccagggcatggcgtcaacggattctgcagatcgcggcacacccgccatgcgcgccgagaggagcgcggcggcctgcggctcacgcgacgacaaggcggtgactaagttaacggagcgtgagatccaggggtcggttatatgcaggtggaatcgatcttcgaggactcggtcatgccgtggagctcggggttctgttgcgcttctgttaggggcccgagttcgccgcgaaggggatggttctgacgaagaggtcccacatatcagtgtcggcccgcgcaaggcgcgcacgtgtggtgtggccggccagcgggccccgccggtcagtgaaatgagcgcgggctag

SEQ ID NO: 17276 - DNA, 810 bp, Zea mays
  Peptide Sequence Number=SeqID_59055
atggccaggagaacttcgtctaccctgctggctgagcacggcggcgcccgtagctcacgcggtggcacccgccggcgaggaattgatggcgagtacgctgggggggtcttaccggtcgtctcggcgcggagagtgtctggccacggcgaggagcggacccgcggcggagatcgaactgcggcgagcaattcaagtcgccccgaggctccgcagttcgaattgagcactccagcaacttcacgggtccccggcgaacgccccaagttcttgagcttcgctcggtctacggtttacagggacgcagaggcttcggtatttatacccgagggcaagagccgcagccagccgccaacctacaggcgagaatcgcggcggagtccacggcggcgcggagatcggcgcccagttgagattggggcggagtccgtgtggaggaggcgagctgggaggagactccgcccggatttccagggcatggcgtcaacggattctgcagatcgcggcacacccgccatgcgcgccgagaggagcgcggcggcctgcggctcacgcgacgacaaggcggtgactaagttaacggagcgtgagatccaggggtcggttatatgcaggtggaatcgatcttcgaggactcggtcatgccgtggagctcggggttctgttgcgcttctgttaggggcccgagttcgccgcgaaggggatggttctgacgaagaggtcccacatatcagtgtcggcccgcgcaaggcgcgcacgtgtggtgtggccggccagcgggccccgccggtcagtgaaatgagcgcgggctag

SEQ ID NO: 17277 - DNA, 2181 bp, Zea mays
  Peptide Sequence Number=SeqID_59056
atgacgctcgcctccctcgcccgcgccctcggccggtccgcgcgctcctcccgcccgcgccaggcgagtatcccttctcaagttctcatcccctccccggcccccctatcctcctctcgcaggtctgacctctcgctgctccttctaggctacctgactgcggcctcgtcggcagctcttgggaagccatccgcgggcaagaccgtggattggagatatgtcctcgccagcccacatttccgacgcctcttctcggacgggtccaagaagaactacgagaactattaccccaagggtaagaaggaggtgcctaaaggagatggtacaaacaagtctgaatctaagccggaggtagctgaggtagctgtagaccacattgaagagcgggccccagttctgaccaggcggatagcgcacataagcttccaagagttcaagaacaagttactagaacctggtttagttgatcgcattgttgtttcaaataaatcagtagcgaaggtctacatcaggagttcacctcatccaaagagccaaggccaagatagtgatatccatattactaccactgatgctccaggcaagcctgctcccagcagatgcaagtattacttcaatattggtagtgttgatttgtttgaagagaagttagaggaagcccaggaagctttgggaatagatccacatgattttgtcccagtaacttatgttgctgaagtaaattggttccaagaagttatgaggtttgccccaacagcattgattgttggtctattatatttcacgggaaaaaggatgcagagtggtttcaatattggaggtggtgctggcaaaggaagaggaggtattttcaacattggaaaagctacagtgatgaagatggacaagaactccaaaaataaggtgttttttaaggatgtagccggttgtgacgaagcaaaacaagaaataatggagtttgtgcatttccttaaaaaccctaagaagtatgaagatttgggagctaaaatacccaaaggtgctctacttgtaggccctcctgggacagggaagactttgctcgccaaagctacagcaggagagtctggtgtgccatttttgtctatttctggttcagatttcatggaaatgtttgttggtgttggaccgtccagggtacggaacttgttccaagaagctaggcagtgtgctcctagtattgtattcattgacgaaatcgatgctattggtcgtgcaagaggacgtggaggtttttcaggttcaaatgatgaacgtgagagtactttgaaccagctgcttgtagagatggatggatttggaacaacttctggtgttgttgttcttgctgggacaaatagacctgacatcctggataaggcattattaaggccaggaagatttgatcgccagatagcaattgacaaaccagatataaagggccgtgatcaaatattccgcatatatcttaaaaagcttaagttggacaacaaaccatcattttattctcaaaggctagctgccttgacacctgggttcgcaggagctgacattgccaatgtttgtaatgaagctgctttaattgctgcgagaagtgaggaaactcagattaccatgcagcattttgagtccgcaattgataggattatcggtggtttggagaagaaaaatagggtcattagcaaactggagcgccgtactgttgcttaccatgaatctggacatgcagttgctggatggttcttggaacatgctgagcctcttctaaaagttacaattgttcctcgtggaacagctgctttaggctttgcacaatacgtcccaaatgaaaatcttttgatgacaaaagagcagctttttgatatgacatgcatgacattaggtggccgtgctgcagaggagggcttcaggttcgaggggccgaattattgcaggttcggggtgggtttcaataccaaccggcgggtttcccacgggccccgaactacatacagcgacaggctgacagtaacccagcccaccagcactcatcagcccatcacctaccccagccggccaacccccaaatcggtaaaaatccaaggggccaagacgccatcacggcaataccccaatcccagtgccgcctcccctgcaggcctgctgcctcactggtcatccacggcactcggcctctgcatctag

SEQ ID NO: 17278 - DNA, 279 bp, Zea mays
  Peptide Sequence Number=SeqID_59057
atgggcgtgttcgtcgccgaggacgacgtcccgaggctggacaccatcctcacgtccatcccggtggaggtgccgggcgacgcgttccatcagatactcaacgggctcgcgcgcaagctcccgcacggcgacgatgccttcttgaggaccgaacagacggtcctggtctacaaccgaaattacttcggttacttcgactttcggaaaaatgaaaccaaaattactattgattcatttggtttcggttactttggtttctgggctgcccaagcctactaa

SEQ ID NO: 17279 - DNA, 117 bp, Zea mays
  Peptide Sequence Number=SeqID_59058
atgggcgaccggaccgcctctaattactcgtcggagcagatgttccgccgcaaatccgctcctcgccgtggccgacgtcacccgaacgaccatccatggaacttgaataattcctag

SEQ ID NO: 17280 - DNA, 171 bp, Zea mays
  Peptide Sequence Number=SeqID_59059
atgtcgcacgcgttcgacgactactatatcaaggattatggcgtcatctcggcgccggagctcctcctcaagtcgcgcccgtcccctaggcacgcgttcgccggcgctcaagccctctcccagatcgtgtcggccaacctcgacgtcggccctctgcccgctggtggctag

SEQ ID NO: 17281 - DNA, 183 bp, Zea mays
  Peptide Sequence Number=SeqID_59060
atgtcgcacgcgttcgacgactactatatcaagaattatggcatcatctcggcgccggagctcctcctcaagtcgcgcccgtcccctaggcacgcgttcgccggcgctcaagccctctcccagatcgtgtcggccaacctcgacgtcggccctctgcccgctggtggccagcgctcgccttga

SEQ ID NO: 17282 - DNA, 447 bp, Zea mays
  Peptide Sequence Number=SeqID_59061
atggagaagccttcctcctcacgcgcgccgcacgcctcgtcagtcgtcagtcgtcgcagcgcgggcgaagcagaagacggcgaactccgctccgcccgacccagggctcggacttgggctcagccccagaagacgacgaactccgcttcgcccgacccctggggctcggactccgccctggcctcagccgtcggtctccgcctcgcccgacccaggggctcggactcgacctcggccacggaagacagactcgacctcggcttcggaggagcttacacatcacccaacctagggcgcaaaccagccacgtcaacaggaggcgccatcatcaccctaccccgagctgactcgggccacgggaacaagaccggcatcccatctggctcgctaagctttggaagacggcaaactccgctccgcccgacccagggctcggactcgggctaa

SEQ ID NO: 17283 - DNA, 357 bp, Zea mays
  Peptide Sequence Number=SeqID_59062
atggccggatgggcgagcagtggaggtctggaggacgagcggtggagggatggcggatgggcgggtggcggcgtccgcgtccggcgtgccgcgtgtggtgcctggtgcggccggccggctgggagacagggagagagcaggcgagagcgagacgcgtcgccggcgtgtggtgtgcggctggcggcgtccggactccggcgtgggcgcgtggcggcgtgtgatcctgtggtgcggtgggcgtgccgcgtgcggtggtgccgtgcggcaggcgagacgggtcgggtcgccatgtttttcttacatgggctgggcctcactgattatggattggagttggagctagccatactgcagtga

SEQ ID NO: 17284 - DNA, 630 bp, Zea mays
  Peptide Sequence Number=SeqID_59063
atggcgctgggccccaactccccgtcgtcctccacctcctcctcctctccctcgtccgccgccgccgccgcctcctccccgtcgccgcgccagcagcacccccacgcgcccgcgccgccgtcgcccacgcccaggcccgtgccgcgcatcatcgacaccacgcccttccccaccaccttcgtgcaggccgacaccgccagcttcaagcaggtcgtccagaggctcaccggctccgacacgccgccgccgccccacaagcccgtcaagagctacccccaccaccacggcagcgggcccaagaagccggccttcaagctgtacgagcgccggatcggcaagagcaacctcaagatgatcgcgccgctggcgatggcggcggccgcggcgccgcctgaggcgctgtcgcccagcgtgctcgacttcccgtccctggcgctccggagccccgtcacgccgctgctgcccgaccccttcaaccggtcgcagggcgcggaggaggacgaggaggccgccgagcgcgcggccatcgcgcggaccggcttcttcctgcacccctcgcccaggggcgccgagccgccgccgcgcctgctgccgctgttccccgtcacgtccccccggatggcgcagtga

SEQ ID NO: 17285 - DNA, 867 bp, Zea mays
  Peptide Sequence Number=SeqID_59064
atgatgcggcctgtggagcagggtccatggccggcggcggtggagcacgagaggggcgcggtggatggtgccacggcgagcgcatgggacccgtcagcagatggggaggtggaggcacggctgggcgggctgattgacggtgcgcgtgcaggagagctcggtgggctagcagccagcacgacggctcaccggcggcatgacgcagacgatgaggcaaagcgcgacatggcacagggtgagctcgccgggacgaggtgggagtgggaggacgccatggagcatacctacacggcagcggcgagcagacgtcgatctggcggcgcgacgagcagctccagagaggcgagggcgagcagcatagtgctgatctggagcgtcatgggcggctgggcgagcggttttggcagacagcacgagaggtgggctgggggcgcgctgggccaaatggccgagatggtccagggcaggggcagcggctgcggttgcgcagggtgggtcgagggggagggtgcgctgctgagctggggcgtggtgggccctacgtgccatggccacgcctgggtcgtcacgtcgctgtgggcgagctgtgaaggctgtcgcaccgagccagcgcgccgctgcgttggtaggtcgtgggccgccgagccgaggctgccgcgctgggcagatgagctggccacggatcgtgctgctccgtcgcgccaggcaatcgagccgaacgaccactacaactctgaggggagaggagagacaggcgtgggagatagtcctgggatggtcggacgcgcagggagagagggcgtgctcgtcggggaaacttggaaccgccaacgacgtgagcaggaaagggaatcacaatggagatag

SEQ ID NO: 17286 - DNA, 354 bp, Zea mays
  Peptide Sequence Number=SeqID_59065
atgggcactgcgcagcagcacgcaagcagggaggacaccgagtcgcgagccatggcgaggatgcttaaaggcgtctgctgcagtacaccatggggagttggaggagtggctgctggagctctgagtgccggccatggagagacttcttgcagccatggagcagagggggcgctgggaggggatgagctgggcgccgagtttttgaggagggagaggggtggcgtgggagagggaatgggtagagatgcagtggatctcgggtgcctagaggccgacagcaatggaggcttgggcgagctcggccatggggctcctgcacgcagggaagaaaaagctccctgctgccctgcctga

SEQ ID NO: 17287 - DNA, 450 bp, Zea mays
  Peptide Sequence Number=SeqID_59066
atgggcaagagcaagaaaagcggaagttcatcgcaccattccggtgacaagcggaagcgcgagccgactcctccctcggaggaattcggtgattctgagtactcagaggaggagttctcctccaagtccgaggggtcgccagtccacgcctctcccccggagtcgttcgatgactcgaatgattcccaggggatcgtcgctgaggtgtggacatacatccgggccctcgagcgctctgggctcgagggctcggatgagtcggaggtctcctcggacgaggagaactcctctgactcgtccgaggaggggagcggcggtgacggcgacgacgagggcgatggcgacgacggaggcgacaacgatggtgacggcgacggcggcaagggcgatgacaaaggcagtagtggtagcggcagcggcaaggccagtggcaaagcgcccctggcttag

SEQ ID NO: 17288 - DNA, 699 bp, Zea mays
  Peptide Sequence Number=SeqID_59067
atgacggctcactggcggcatgacgcagacgatgaggcaaagcgcgacatggcacagggtgagctcgctgggacgaggtgggagtgggaggacgccatggagcttacctacacggcagcagcgagcagacgtcgatctggcggcacgacgagcagctacaggaagacgagggcgagcagcaaggtgctgatctggagcgtcatgggcggctgggcgagcggttttgccgggcaaacagcacgagaggtgggttgggggcgcgctgggccaaatgtccgagatggtacagggcgggggcagcggctgcggatgcggttgcgcagggtgggtcgagggggagggcgcgctgttggatggggcgcggtgggccctacgcgccatggccacgcttgggccgtcgcgtcgctgcgggcgagctgtgaaggctgtcgcgccgagccagcgcgccgctgcgttggcaggtcgtgggccgccgagccgaggctgccgcgccaggcagctgagctggccgcggatcgtgttgtgccttcgctccaggcaatcgagccggacgaccgctacagcgctgaggacagaggagagacaggtgtgggagatagtcctgggatggtcggacgcgtagggagagagggcgtgctcgtcggggaaacttggaaccgccaacgacgtgaacaggaaagtgaatcacaatggagatag

SEQ ID NO: 17289 - DNA, 225 bp, Zea mays
  Peptide Sequence Number=SeqID_59068
atgagtggggaagcggaccggccctcgcgttgtggcttggtgctaggcatggttaaatgcggtccttgctcgggtgaggtcagagaaagaaaggatgttggaaaagaggaaaaaggagaaattctaaggttttgtgaccgttggcgcacaaaccagggtatgtttgcactggaccacttgggtctaacgtctacttcgacttcaacattcgactctagcggctag

SEQ ID NO: 17290 - DNA, 336 bp, Zea mays
  Peptide Sequence Number=SeqID_59069
atggaatcgaatggtctgaggttatatccatactatctgatagtgtatggcaccatctttgtgccacgtggcgggcttagcgccgcactggatagtccgacatacagaaccaggcggttcatgggaggcctagatggtctaagattatacctggaccgtctagtcggagtcgagaccttaggaacccctctacgaggtgccagaccatctgcggttgggcatcagaccatccgttatggaacagataactacactcttctgtgcgggtacgcggaccatttacgtgtaggtggtggaccatccacgatggggcagagggcttcacgtagaacctag

SEQ ID NO: 17291 - DNA, 240 bp, Zea mays
  Peptide Sequence Number=SeqID_59070
atgtggaggtcaatgaagcatgtcatacctctgcaggtcgatgaaggtgcgccgccaaaatacaggtcaatgaagcctgccatacctctgcatcatgtgctacaaacgatagtgtctctgtcgcccaagaatccaccgcagaaatcatctttcgcgctgtcgcagctccggaagttcgtgtcgtacgaacgcaacatccagcgggccttcgctccccagtcggcggcgctccctggctga

SEQ ID NO: 17292 - DNA, 150 bp, Zea mays
  Peptide Sequence Number=SeqID_59071
atgttgacacattttttgaaaaacaaggtcaaagttagagaggtcaagcttctatctggactaaaaaatgaacttagaatctcacacattgagcataacgaagttcttatgaagatcattttaaatgagcatgtcaagtcattgaggtga

SEQ ID NO: 17293 - DNA, 234 bp, Zea mays
  Peptide Sequence Number=SeqID_59072
atgaagatgagggctcctgtcgtggcctttgctgctcttctcatgccgctgctggtggctacaagagcacatgaaggaatcaggctggacatgctgttacatgatgtgatcaacagcagcaaggagggggacaagctaacgacgggcgagccagcgccgagccaggaccgttcttccgagtcgggcgacgggtgcggcgtctacgacatgggagggaagcggtgctccctctag

SEQ ID NO: 17294 - DNA, 378 bp, Zea mays
  Peptide Sequence Number=SeqID_59073
atgccgaggccaggggccgcgtccgcccgtcgccgctgtgggccaggggccgcgtccgccgctgctgtggttgtgggtggctggggaggtggagcagaggcggagggagaggtggtgagggcgccgagcgcagagacggaggaagggaggaggccgagcgcagatccgagcgcagatccggagggaggggcaggacagggaggagtgggagacgtggtgcgcggcgtggagctccacgaggcaggggtggccgttgatggcggggagagggaaggagggtggggatccgcggggcgactacggcagaaccgtgcacccctacaagcagatgggccacaagcagatgggcctcctgcgttgtcaacaaatacaagttaa

SEQ ID NO: 17295 - DNA, 735 bp, Zea mays
  Peptide Sequence Number=SeqID_59074
atggttgattggggcaaggggtggaattgtacctttctgtattgggaaggtctacagttttcctttttagtgcattaccccatcctctttcatttggaattgaaaatccaaggacaaacctgtttggctgcacctgaaattggaaatcaatattccactcactttcctaacctgaatctgaagctcacgagagattcctacctcctgaagacggaaaatgattcctctcccccacctgacgcctcgtccgtccgtcctgactggttctgcaccccttcaggtactcaggaagaggcgacggaggcgtacgacatcgctgcgatcaagttacgcgggctcaacgccgtcaccaacttcgacatgagccgctacaacgtggagagcatcctcagcagcgacctcccagtcgggggcggagccaccgggcgcgccgccaagttcccgttggactcgctgcagccggggagcgctgccgcaatgatgctcgccggagctgctgctgcttcgcaggccaccatgccaccgtccgataaggactactggtctctgctcgccctgcactaccagcagcaggagcggcagttccctgcttctgcttacgaggcttacggctccggcggcgtgaacgtggacttcacgatgggcaccagcagcggcagctatctgaaaccaggtggtaggcctaggaagaagctatctgaaagggaaataggcattaaaccttttcctaaatga

SEQ ID NO: 17296 - DNA, 1038 bp, Zea mays
  Peptide Sequence Number=SeqID_59075
atggctgacgaccagcaaccgccgacgcagcgcatatggttcccgtactggaccgcgcctgcgcctgctcatggtcctcggccggccgcccgcccgcagctgtcgaggcgggaatctcgcccggcgccgcaggcatcgccgcctcctacaacagcatccacaggcgctggcggtggtgtccctgctccaccggcccagccgacgccgctgtcgagcaggccgtcgccgccgcccgcccgcgctccgccactctcgcccatcggagagcccaatgctagagcgccggagccgtcaccggtgccggttgccaaacagcacaggccgccttctcctcttcgtcctaattatatcgcgcgtgatgttcctaagcagaaagacatcgtcgttccgcaagagaaaactatccaggaaccggcgctcgtagcatccaagacgccagccaaggccccagagaaagagaaagaagacaaggagaaaagggaggaggagaagacgaaggagaaagacaaggggcacaagatgaagaaggagaaggatcacgaagagaagcaggagaaggataaagagaaggaaggcggccagccgcacaaggagctcaaggcgggcgtcgccgacatggtgcgcaagctcggcactccggcaccgtcgtccggcggcggccacgagcgcgctggctcggcggcggccgaaggaacgaccatcatcacgctggccggcgagaacaagggcgcgtccatgaaggtagacggcagcgccgtggccgacggcagggcggacgcggccggcagcaaggagcgccgcggccgcacgctcgacggcagcgccgtcgtcagcgggacggagcgggcctggggcggcagagggttcacggctttcgtcaacagcaacgtgcaggtcatcaacaactcgctgctgctgcagagctcctgcaacggcggcggcccgggggtgcacctcaagctgtccaccaaggccaagaagaaggacggcgagggagccggggggaagagtggctctgctgctgcccccaaaaaatga

SEQ ID NO: 17297 - DNA, 345 bp, Zea mays
  Peptide Sequence Number=SeqID_59076
atgctggtaaaccacacaacgatactcgatggaccaagtgtgtcgatcgaaggcccagcacaacaaggtgtcgagagcgtcgaggaaatgacaacagcaagaagcataataagtgatgggtcgtgcgatccatacttatggctcttgctcctccaagagctccatgctgtggctcgaactgccaccatcgtcgtcatgtccgtctgcgctagggtctcctctagcaaccgggattccctggggtggtgcagggggcatctctggcagatagggccttcacaggcagctgactgggggtctgccactaacacaactagaactcatcgtagtcctgaaactccttaa

SEQ ID NO: 17298 - DNA, 426 bp, Zea mays
  Peptide Sequence Number=SeqID_59077
atggcgcttgtggccagtcagttcacacggttccacaacaaccaccagaaacgacgacatggtgggtcaaaagatggatgcttcaactacagcaatcctgaccactacatcgctagttgtcccaagaagggcaggcaggaggatggcctgcgcgaccaccactctggtcattgcaagggcaagcgggagaactcctccaataagtacaagtttaagggaggattcgataaggaggcgctcaagaacaagtacttccaaaaggccaagatcaaggagcataccttcctcaccttcctcagcgacctcaaccaagacaccgatgatgcaatgtcttcctctagcatcatggagactgacaggcgagtcgaggacaagctgaacagactctacttcctcattgaaagttgcctagaggggcatgaatag

SEQ ID NO: 17299 - DNA, 159 bp, Zea mays
  Peptide Sequence Number=SeqID_59078
atggcgagagtagtgtgtaccctctgtggcaagaggctggacggtggtgtatctgtgctctcggtgaagaagcgacaaacttttgttgcttctgttctaaggtggtatcaaaagatgaaaaccaggagtaaagctgcgcgaggaatggatcctccatag

SEQ ID NO: 17300 - DNA, 303 bp, Zea mays
  Peptide Sequence Number=SeqID_59079
atggccgagcccccttcctccctggccgcccagctcactgtccagggcgcccagaaaattttagcagcgagctccacggccgatctgcgcagcaagctgcacgccgcagcagcatgctccttcgcctcgcgcgttgagtgctcgacgaatcgccgcagcgagccacgccctccggcttcgctttggtcgcccatgcgcgacgacgcgttcgtcttcacgccacatgtgcagcaaccacgacggagatttgatatggtcttatatgagcgttatcgcagcccaataattattggaagcgagtag

SEQ ID NO: 17301 - DNA, 433 bp, Zea mays
  Peptide Sequence Number=SeqID_59080
atggcgggttgctcggccttccacgacgaggtcaggacgcgaatggggactgaggagggggcgatcagcagcgagaagccatcgtcgcactgcatctcggccaccacggggctgacccagtccatcaccatggagccactggcccacgactccgtggaggatgcgagagagcggacagcagagagcgggggcgcgagagaggagaacgggggcgggggcgggggcggcggacaacagagagcgggggcgagcgcggagggagcgccatggatggaatgctgggggaggcacggtgggggcgcgacggtttcgcgccatggatggaagtactctcggatctggcgcggtgggggagcggctgccatagaaggactcgcggatctggcgcggagggagcgcagaggaatgcgcgacccggcgccatggatggaat

SEQ ID NO: 17302 - DNA, 744 bp, Zea mays
  Peptide Sequence Number=SeqID_59081
atggaccatcagctgttcgacgaccccttcgggagcagcatctcgtcgctggaggcggaaatcttctccgccgccgcccagctgccgccgtcgccgccgtggccagacatcgacctcgacgacgactacgacatccacgacctctccgcgccggccgccaacgccgctacgtcctcgggcggcggctacggctccggcggctccggcggccacaggaagctcagccacaacgcgtacgagcgcggccgccggaagcagctcaacgagctctactcctccctccgctccctgctcccggacgccgaccaaactaagaagctgagcatccccaccaccgtgtcccgagttctcaagtacatcccggagctgcagaagcaggtggacaacctggagaggaggaagaaggagctgaccaacgccaactgcaagccgggagttctgaaaaccaccaaggccgtaactcccattgtttctgctacctgcctcaacgacacggagatcatggttcaggtcagcctgcacagcgatgtggccgccacagctctccctctctccaagtgcatcaaggtgctagagaacgaaggccttcatctcgtcagctcatcaacctactcctccgcctttgagaacaagacattctacagcctccatcttcagttccaagctccgaatcctcaagcaagaggtgtcactggatcactgagcatcagtagaatcagagaacgaccacaacagacaaaataa

SEQ ID NO: 17303 - DNA, 324 bp, Zea mays
  Peptide Sequence Number=SeqID_59082
atgtgcgacagcggagttctggaagacggcaacgccggcggaaggtcaggcccttctttttggctatcgggacatgcatggaacattctggacggcgccggcgcacaaccggcacttgcactaccggaacgcttctcgaccagagatgggcgggcgccggagaaggtgggcgaggcgacgacgtggcctgggtgttcgtcagagatggatggaacgaagcgagtggtgggcggcgagtggtgggcggcgatcgcaaaaccatcgacagcgaaagccacccaaccaaccggacttgatgagcgccaccaccaaaccaacgactaa

SEQ ID NO: 17304 - DNA, 189 bp, Zea mays
  Peptide Sequence Number=SeqID_59083
atgcggtctagtgacccatcgcggaccgccgccaccacccacctcgcagaaccgaatctaagctggaacgattccgagtacaatccgacacaaacaaagaagatcttatattgtttggtgaccatatgggcgctaattaacaagaaccactcgagaaaagctcggatggatgagtggaagacacgctga

SEQ ID NO: 17305 - DNA, 708 bp, Zea mays
  Peptide Sequence Number=SeqID_59084
atggtcgccctccaaaggggtcaccctccttttaaggacggtcctccctactcgcgcccccagctgtcacgggctgagtcttctccaacacactccaaggtcctcccctacggcgtgggggctgggtcccacacgtcatgcaagccaactcagggcagaagaagccaaaccgccgcgcgcggtgcacacaaccgcccaacggttacaagcgaccctccactttttgcccagaccaacgggcgaaagggtgggcagccatgcaggcggcatgcaaccgcgccaagtgggcgcgctcctccgactcccaacacgcccgacatagaggcccaggcccacgcgtcgtgcaaccggtgcgccgtttgctacgtgagaagcaggcgacgcttccccttcgccaaaatgaacgcgtccaaaaagggaccgggaaagggggataccccgaaaaggatccttccccgagaaggaaccaggctccgagcccccctactgattagaggttcgaaggctggccccccagaagggttcaacagccgcttcagatcgcgtgggccctacacccactactggtcaggggttcgaaggccggcccctcgaaagggttcaacgaccgcctcaggctgctcgggctccgcgcccaatactgatcaggggttcgaaggctggcccccgaagggttcacaaccgcctcagacgccgagcgagggatga

SEQ ID NO: 17306 - DNA, 369 bp, Zea mays
  Peptide Sequence Number=SeqID_59085
atgggggctcccgcgcgggaagatcgggtctctgttgcgatcattcgctcgacgatgtgggccgttcggaacataagggagacaacttttgtgcttcacaagctgtctatggccaaggctaagcgataccttgatgatattattgctcacaggcagtcaattgtcttccggagatactgtggcttggttgtggacaacctctacgtttcacttatccaggtgaacctagcccagaagcagcacagacacatagatacgtacatgtcctcaccttgccacagtgagctgttcctgttagagaaggaagatcccatgaagaaagaggtaaggaaacgggtgaagcgctcggagtctaggtggggccggtga

SEQ ID NO: 17307 - DNA, 267 bp, Zea mays
  Peptide Sequence Number=SeqID_59086
atgcaggcggcgtgcaaccgcgccaggtgggcacgcccctccgacttccaatgcacccccagcatggaggcccaggcccacacgtcatgcaaccggcgcgccggttgctacgtgcaatcaattgcaccgccactcgcaccactaccgcgcctcctcgactgtggaaccagtaccgcgactcgaggcaaccctgcggaccgggaaagggggataccccgaaaaggatccttctccgtgaaggaaacaggccccgagcctccctactga

SEQ ID NO: 17308 - DNA, 219 bp, Zea mays
  Peptide Sequence Number=SeqID_59087
atggctaggaggaccgctcccgcctccctcccctccttctccctcacgcccgactccctcgctgtccctttatcctggatctcgtcatggacgctaccgcgaccaacggttcgacggagtaggcgccacacgctgcgccacaggacggagcccgtccccacccgacatcggccacctccaccccgagcccctccgagaagtgccaaaggttcacaatag

SEQ ID NO: 17309 - DNA, 780 bp, Zea mays
  Peptide Sequence Number=SeqID_59088
atggccgagctcgtggacctcatcaagcgccccctcgaccggtggcactacggcgtcggcgccggggcgacggacagcgacgacgggcggcggccgtacgcgtcgtgcgccgtggtcggcaacagcggcatcctgctggcgcgggagcacggcgcgctcatcgacggccacgacctggtgatccgcctcaacaacgcgcccgcgggcgcgggcaggtacgcgcgccaagtcggcgccaggaccggcctcgccttcctcaacagcaacgtgctgagccgctgcacgaccgccggctgccggcactgccgcgcctacggcgaccgcgtgcccatcctcacctacatgtgcaacgccgcgcacttcgtggagcacgcggtgtgcagcgcaggcgcgtcggcgccggtgatcgtgacggacccgcggctggactcgctgtgcgcgcggctcgccaagtactactcgctgcgccggttcgtgcgcgagacgggccggccggcggaggagtggggcacgcggcacgaggagggcatgttccactactcgtcggggatgcaggccgtggtggctgcggcgggcgtgtgcggccgggtgtccgtcttcggcttcggcaaggaccccggcgcgcgccaccactaccacacgctgcagcggggcgagctggacctgcacgactacgaggccgagtacgagttctaccgggacctcgaggcgcggccggaggcgataccgttcctgcgggactccggcttcaggctgccgccggtcgtggtctaccggtga

SEQ ID NO: 17310 - DNA, 114 bp, Zea mays
  Peptide Sequence Number=SeqID_59089
atgaagttgaagaaccacaagtacctcccatcgtgcattgacatacaggacatcggctggaaggagtacaaccataacttccctgggagatcaggacaccgtgccgtggtgtaa

SEQ ID NO: 17311 - DNA, 987 bp, Zea mays
  Peptide Sequence Number=SeqID_59090
atggaagcaggcgccggggaagcagcaccaagcgcgccgcgcagactgaccctgccgtggaaggtgcggctcctgctcctctgcctcgatgtcgtcgccggtctctcgatgcgtcgcgacggcaccatcaaccgctccatcttcaacctcttcgaccttcgtgccaccgccagcacgcgcccggacaggcagggcgtccggtccgccgacgtggacgcgtcgcgcggcctgtgggcgcgcgtgttctggccgtcgccggagtcgtccgcggccccgctcccagtcgtggtatacttccacggcggcgccttcacgctgctctctgcggcctcctgggcgccgtcgtcgtgtccgtcaactaccgcctcgcacccgagcaccgctgggcccgccgcgtacgaggacggcgtcgccatgcttcgatacctcgcctccgcgggtctccccgacagcgtcgacgtccccgtggacctctcccgctgcttcctcgccggggacagcgccggcgccaacatcgcccaccacgtggcgcagcgctggacgacggcctcctccccgccgcggtccatccccgtccacctcgctggcgccatcctggtgcagccgtactttggcggcgaggagcggacggaagctgaggtcaggctggatgggaacgtgccggtggtgaccgtgcgtggctcggactggatgtggcgggcgttcctgccggaaggcgccgatcggaaccactccgccgcgcacgtgacagacgacaacgccgacctggcggacggctttccgccggtgatggtggtgatcggtggcttcgacccgctgcaggagtggcagaggcggtacgccgacgtgctgcggaggagggggaaggaggtaagggtggtggagttcccggacgccattcacactttcttcctcttccccgagctcaccgatcatggtacgctcgtggaggcgatgaaggcgttcatacgcgagcaacgcatctga

SEQ ID NO: 17312 - DNA, 162 bp, Zea mays
  Peptide Sequence Number=SeqID_59091
atggcctttcgatgttttcaagctctgctcagcaacagccttgagatagcagaaagcaaggaagggaacacccgtgaggcatatagaagcatgaagaaggactacaccagaaagctgaagaggttggtctggctcccatcaaaagactctagaagcatttga

SEQ ID NO: 17313 - DNA, 228 bp, Zea mays
  Peptide Sequence Number=SeqID_59092
atgacgtggcaggggcaccggactgtccgtttcgccctattcaccccccctctaggcgactatcagcatttcagaaatcaaggatgccagacggacaaggaagacgatcctccaccaccgctacctgccttagggctagataatctctccaacatcgagaaaatatccctggctgaccttgataagctccttgaagggtttggggatgcattaggaggcgacgcttag

SEQ ID NO: 17314 - DNA, 141 bp, Zea mays
  Peptide Sequence Number=SeqID_59093
atgggtaccctggggcgcgcgatcttcacggtgggcaagtggatccggggcacggggcaggccatggaccgcctcggatccaccatccagggcggcctccgcgtcgaggaacagggacctgctagtgccagatcaggttga

SEQ ID NO: 17315 - DNA, 540 bp, Zea mays
  Peptide Sequence Number=SeqID_59094
atgttggagctcgagaccctgagcctctccaagtgcgctgaccaagacacaagattcctagatgcccagggcaggaatcgcgacttacgtcttctcgacattcctgaccgcgtcctcgtggcattggctattgtgcagctgcatattggtagcgacctacatagtgccatcagccttctgaagggtttgtcgtttactctcctcccatgcatcctctctgttgggatgaggggaggtgagccataccacactttcctcgatgggttatcaatggcgcttggtgagataaaaatgggtaattcgagtgagaccctggttttggggtctcaccaaagaaaggggcccttggtgttcactccatttcgtaggcaagggcaactagaagggtatcctggttcggagagctatgtcacgtgcttcatcgagctgatccagcgtgtcttggaggctcaggtcattcctttcatccatatacgccttcacctttggggtgccatactcaagattgatggggaggaccgtcggccccataagccatga

SEQ ID NO: 17316 - DNA, 228 bp, Zea mays
  Peptide Sequence Number=SeqID_59095
atggtcaagaccaagcagtctgaaggccttgtatctgatctcgggttgacattcgatagactgaaagcaaacaacatcaaattaaatcctaaaaaatatctcttcggcgttccgaggggcatgctgctgaggttcctggtctccgaacgggggatcgaggcaagccctgagaaggtcgccgccatcttgaacatgggactaatagaagaccttaaaagggtgcaatga

SEQ ID NO: 17317 - DNA, 1038 bp, Zea mays
  Peptide Sequence Number=SeqID_59096
atgtcgtccctgccgtggatggtgcgcatccaggcagcagccttccaggtggcacaacgtagggacggcagtatatggcgccctcttctcttcctcggcgacctcaagacagccgccagccgcgccacgcccagcccggacacctcggaggtacgatccaccgatatcacgattgacgtctcccgcggcctctgggcacgcgtgttctgccccacggcgatcgctgacgatgctccagccccgctccccgtctttgtctacttccatggcggcgggttcatgctcttctccgcgtcgttcggcccctatgacaccttctgccgccgtctctgccggaagctccgggccgtcgtcgtgtccgtgaactaccgcctcgcccccgagcatcgtttcccggcagcatacgacgacggcgtcgccacactccgctacctggacgagaccccgaccccactgctggccgacatcgtaccggcccctgtcgacctcgctagctgcttcctgatcggcgatagctcggggggcaacatggttcaccacgtcgcccagcgttgggcgtccatgtcgtcggcgacgtcgttacagcctccactgcgcatccgccgcctccgcctggccggtgccgtcctcatacaaccgttcttcggcggggaggagcgcacggaggccgaggtaaggctggacaaggcgtgccgcatattgtcggtggctcgtgcggatcgctactggagggagttcttgcccgagggagccagccgagaccacccggcggcgcgcgtgtgcggggaaggtgttgagctcgcagacacgttcccgccggcgatggtggtgaccggtgggatcgacctactcaaggactggcacgcaaggtacgtggagacgttgcgtgggaaggggaagctggtcagggtggtcgactacccggacgccttccatggcttctacgtgttcccggagctcgctgattccggcaaactaatcgaggacattaagctgttcgtcgacgatcataggactaaggcctctggttccgactag

SEQ ID NO: 17318 - DNA, 489 bp, Zea mays
  Peptide Sequence Number=SeqID_59097
atgcgtcatccatccgctgctgcgtctcctccttcagcgccgccaggactgtctctggagcagaacagggtgtgggtggttgcaagcgggagcgagccggtcgaggagagagcgggaaaggggcggatgagcatggaggggctgccggatccaggcaacgaggaggagcgcgggcaggccagagctgaggaggttagcggtgggggtacagagcagatggcgctagggctggagtgctggagaaatggaggagatggaagggcgtacctgcgaagacgacgatgcgagctgatggtggcggtggagggcggggttcaaaccctaaaggccaacacgtatggtcacgggattgcagtagcttcttcaagacgcggtgcttcggcggcttctggacggtccgttgtggcacggcttcacccggaagcgtggcccacggacgcggcccaagaagttgcacgtttgggaacgctcgacagcttctggtggtag

SEQ ID NO: 17319 - DNA, 312 bp, Zea mays
  Peptide Sequence Number=SeqID_59098
atggcactcggcaaaagcgccacctttgctgagtgcctcggccacgacactcgacaaagaaaggttccaagggccctaggcatagttcctttgccgagtgccagagccaaggcactcggcaaagcctccacctttgtcaagtgctatgtccaaagcactcagcaaagaaaggctttaggggacctaagcatagttcctgtgccgagtgtcagggggcgccactcggcaaagccacctttacctagtgccttggccctagcactcgacaaactaggtttctttgctgagtgcaacactcgacaaagtggctag

SEQ ID NO: 17320 - DNA, 375 bp, Zea mays
  Peptide Sequence Number=SeqID_59099
atgggcaagagcaagaaaggtgggagttcctcacaccattccggcgataagcggaagcgcgagccgactcctccctcggaggacttcggtgattccgagtactcggaggaggagttctcctctgagtcagaggacgtatggacctacatccgagccatcgagtgtgccgggctcgagggctcggatgagtcggaggtctcctcgaacgaggagaactcctcgaactcgtccgaggagggtggcggtgacggcgatggcgagggcgacgatgacgacggaggcgacgacgatggcgacggcggcgaaggtggcgacaagggcggcagcggtgacggcgagggcggcagcaagggcagcaacagggccagtggctag

SEQ ID NO: 17321 - DNA, 372 bp, Zea mays
  Peptide Sequence Number=SeqID_59100
atgaacaggaagcgtggcgacgaagctctcgccgagccgatcacgacgatattctgggttgcctcgaaagatgaacggacagagagaaacttctcgccggagttgtcgctagagttaggttctaggatggagaaaccagcgtttatggcggcgacaccggcggacgcgaagaccgaggccgccaagatggacctcctcgaggacgacgacgagttcgaagagttcgagatcgaccaagaatgggatgagaaggaagaaggcaatgaagctgtccagcagtgggaggatgattgggatgacgatgatgtgaatgatgatttctcgctgcagctgaggaaagaactggagggaagcaacgcccagaagagctga

SEQ ID NO: 17322 - DNA, 960 bp, Zea mays
  Peptide Sequence Number=SeqID_59101
atggacgccgcggtgcggaaggccgcgggcgccggcatcgcgcgcgcgccggcgctggtgctagcgctggtggcggcgggggcgttcctgatctcctacaacttcttcaccatgctgttccacggcggcggcggaataggcgcggcggtgaccgctgggacgagggaccctgtggtggccatgccagcgtggatgcgcgcggcggcggacaccgaggcgcgacggcggccgttccatgtggcgctcacggccacggacgcgccctacagccggtggcagtgccgggtcatgtacttctggtacaagcggatgcaggcgcggccgggcggagaggccatgggcgggttcacgcgcgtgctgcactcggggaagcccgacgggctcatggacgagatccccaccttcgtcgtcgacccgctgcccgctggcaaggaccacggatatgtggtcctaaataggccgtgggcatttgtgcagtggcttcagaaagcaaagattgaagaagagtatatactaatggcagaaccagaccatatatttgtgaaacctctaccaaatttggcccatgacgatgacccagcagcatttcccttcttttacattacaccatcagaacatgaaaaaattatcaggaaatactatgctaaagaaagaggtcctgtcacagatatcgatccgattgggaattctcctgtgatcattaagaagccaccttttgatacaaagctccagaatacatttataatccacttcacttatggatgtgactactcactaaagggtgaactgacctatggtaaagttggtgaatggcgatttgacaaaagatcattcccagataggccaccaccaagaaatcttacattgccccctcctggagtaccagaaagtgtggttactctagtgaaaatggtcaatgaagctagtgcaaaccttcctcggtgggatgatggaatataa

SEQ ID NO: 17323 - DNA, 297 bp, Zea mays
  Peptide Sequence Number=SeqID_59102
atggctctactctatgtaaagctacccacccatctcattcctcatgacttgccaaactatcatgtgtcctcttcaagctggactatatgtttttggcttccatttggtacagcccatgtgttccggtgcaagggtgaaaagaggaggttctactggggtgatctgaagatggccatatgttccgacttccgagttgttggcgaagacagacccatcaatgatttatcgtggagtgcactaaaatttaacacgcctttaagagccttgcagtgtgtgccgcgttggacagaagtatag

SEQ ID NO: 17324 - DNA, 237 bp, Zea mays
  Peptide Sequence Number=SeqID_59103
atggtgacgtcagcagacgataactgttgtggatgcaccgacattgctgtagtggaggctgggcctgacgttgcgacgatagccgggtgcaccatgacccgtgcgatgagcctctatccctcatatgaagaagaagaggctcgtcctgtcgagggcaaacttggtgccgccatcgacgaaggttgcgagcggctccgtgttgttgcaagagtcataggcggagcttgggaggtttga

SEQ ID NO: 17325 - DNA, 210 bp, Zea mays
  Peptide Sequence Number=SeqID_59104
atggaggagggggcgacatacctggagcgtggagagcggatgacgtctgggcggtctggcggctggagcggctgcgtctggcggctgggcgaactcaccaagttcatcaaccagtgcaacgaaataaaagctgcgaatcttgctagcaaagagggcggtgacctcaacatagtgaaggcggatggtgaggaatctaaatcaaagaaatag

SEQ ID NO: 17326 - DNA, 555 bp, Zea mays
  Peptide Sequence Number=SeqID_59105
atggcgctcatcatgctcatcggtgacagcagcactacgtgccatgccgtgtggcatcttgctcacaccccgtcccccggacattctcctgtcgtgccgaagccgcctatcttgctcgtgatccatgtggtaccgaacaccgccgcgctgccccctatgccggctgcagtacccaccgtcatgctaaaagtgacgctgccgccaatgcccactgtcgtgccgaaggttggcgcgttgccactaatgcccgtcgtcgtgcctaaggcctgtgaagatgccagtggagtcagtgagccagaaactcagatgtacgcacgtgcataccttggaggaccaagggacgctgaaattctgaagctgaagcagctcttagatgagaaggctgaaaaaaacaattctgcagctactgggtttccttgcctagcgcctgaagctgtcctagaaaattcaactccattgtcacctaaaagaaagacaccattttcccacggcaagggaataggacaacagagattcggagtgctcatatgctttctttgctgcttcaatctttag

SEQ ID NO: 17327 - DNA, 759 bp, Zea mays
  Peptide Sequence Number=SeqID_59106
atggcgaagcttgggacgcgaagacgggaccgaggcgggcagacggcggagggggaccttgggcggaccgaagaccacttcggcgagcaataccctccgcgatgggggataatctggcgcaccgaggccgacatgagcttcgaagaaaggcgaggggaggttccttacctagaggcggcgcacggggcagcttggcacaacacgggggacttcgattggccagacgacgaggaatcgcggggcagggcccatgattggctcacagtgaccatcaccctcaaccaagctcggtctgcggccttgcccaaggtaaccatcagtcgtggtggcccttccaagggagccaccacccacactagtggtgttttaagggaaggacaacacgaagacctacgcggtccactacgtcgacctactgctaggctccacattatgaaggctcagctcgtcggccacgtcacaagcccatggagtctagggaaggtcatggcagccggtagccccgagcttatggcatttggggtaaccgccgatgacctcctccaagtgctgcctttggctaccgccaaggcagaaagggatactacttaccctttcgtgtctgaaggcaacaacaatatgccgacaagtaacccattcaacatggatgctacaggcgcagtgctgttgcataggataggcatttttggaacaagtaacaggtacgaccccacctacgggctcgtcgcctcacctgagatgggcctgaggcctctattg

SEQ ID NO: 17328 - DNA, 174 bp, Zea mays
  Peptide Sequence Number=SeqID_59107
atgacgaaggtctatgcttgccgaaggtgttcgaaactcaaaaagtggaaaacacaaacaaatctaagctccggtgataaagctgagcgtgaaagggccacgattcaaaccccaagtagcatcgtgctcatttttggattttctttctcaagcgtgggaatcgtcgggctatga

SEQ ID NO: 17329 - DNA, 549 bp, Zea mays
  Peptide Sequence Number=SeqID_59108
atgggggtagatgtgccttgcgccattcaacatggtattggaaccattgatccagtgccacagatcacatcaccagcgatcttgaccgactggcgctgcgtgaacgctatcacggtggtgagcaagtccaggtcggcaatggtgcaggaaccatacccaaggctatcgcaattggttacaggctctcctgaacattctggcgattcttctactgatatggctgacacgtctctaaaaaccatgtcgggacccggtgttcaaacagaatccgtctccggaaccgcagaacccgctgggtcggtggccttggagtctctgccaacatacgtgcttcatcctaatattcctcctcaacagctggcaggccaaactccaccagaacgtgtaccccatgcaacagccaacgtggaccatgagaacatgcatgcaccagctacatctccacgtatagaggatgatctggttccatcatctacgccatctgatgctaacacaggccatgctcatccatatggcaccagacttcgccacaatctgcgtcaaccaaag

SEQ ID NO: 17330 - DNA, 366 bp, Zea mays
  Peptide Sequence Number=SeqID_59109
atggaccacatgggtcttagccacaggggatcaaggagaggtgggatcagatatgcagactcgataattcacggaggcaacacatggatgtgggctccacatgagatttctcctccacgcacatcatgggactatgggagttggcatacagcatgcaagcggagcccacgcgcggacgcaccccatgcggtttcgctggtgcagatcgcgcacaggcatgcattgcgcacaggcattttctccttgcagcaactgcaaccgcacagatggctcactggctggggcggcgcacggctcgccggagccgaggccggggcaggcagcgccggcgtagcaggcatgcacgggcaggcagtgcgcggctaa

SEQ ID NO: 17331 - DNA, 267 bp, Zea mays
  Peptide Sequence Number=SeqID_59110
atgacccagttcttcgagttccatgagattgaagaccctgagcatctatttggtgaaggcaatgatgccctgctgggccacctaggcagtggtcaatggggagtagctctctccgggcagaaagggaatcacggcttgtgggtaaaagatgtatggtttacaggtggtgacgaggatgatggttatgattatgcttatggtactggtaaagaaggtgtcgaggcggatctccaggagttccaggacttcgacgagttcgaggattag

SEQ ID NO: 17332 - DNA, 210 bp, Zea mays
  Peptide Sequence Number=SeqID_59111
atggcacgccaatcaggctttgaccccacctgcaggcttgtaacctcccctaaggtgggcgcaggggccactgtcggtaccctggaacaggggtaccccttactgaagtatgaaggcgcggacccccatgatcccccggatgggacccggacccgtctgagggcggtccggatcacccatggcaaggtcccgggatggagaataccctag

SEQ ID NO: 17333 - DNA, 594 bp, Zea mays
  Peptide Sequence Number=SeqID_59112
atgggtcaagaagaggagccaacttcttcaaatccatatgcttttgcatgcaatgaacacaaaaatatgaaaggcaagaagaaggctccaagctcaagttcctcaagtgaagaagaggacaaacgtgaagatggtgatgacgaagaagatgatcaagcatcaacctcatcctccgaggacgaagaaacagtctggcacattggaaaggttgaagatcttctctttaacattgacaagaaaaaacaaagaaaaatatcatgcttcgcatgtggggagaaggaccatttccgtgataattgcccgatttcggtcaaacccaagaagaggagcaacgacaaatcgcttacaagtatcaagacatgggatcattcttcaagcgaagatgatcctccaaggactcgcagccaccgctcttcatcatgctgttcatggtcatctcacaaatgccttattgcaagagatttgattgatgattctaacccttacaaccaagttgttgtaaagaatgttgttatagacacatgtttcgaagaggtttctttggaaaatgagttgttgaagcaagaggtggctcgccttagcaagggcctgtag

SEQ ID NO: 17334 - DNA, 279 bp, Zea mays
  Peptide Sequence Number=SeqID_59113
atggctccaaagaaagcgaacactagggtcaactccaccttggacgaggccacgaaggcatccctcattgtgaagaaaggcaaagtcacctcaccaacacaatccaccactagcgctgaaaacgccaccaacgcgactgagcataaaacaacaaactaccttggaccaaaggccacctcaccccaaagggaagcatcaacatctgcagctccaaaagcatgtccaaagagcctctctcaaacccaaaaagcctcttcatcaagccaatgtgtggcctaa

SEQ ID NO: 17335 - DNA, 492 bp, Zea mays
  Peptide Sequence Number=SeqID_59114
atgggttggctatggcatcgtcgcctagcacatgttgggaagaagaaccttcgtaagcttctaaagggcgaacatgtattaggactaataaatgtttgttttgagaaagacaaatcttgtgtagattgtcaggcaggaaatcaagttggttcaagtcatcacccgaaaaacatcatgacaacatcaagactgctggagttactgcgcatgaacttattcggtcccattgcttatcttagcattggtgggagtaagtatggtcttttaattgttgatgactatacacgcttcacttgggttattttcttgcaggataaaagtgatacccatgtcaccctcaagagattcttaaggagagatcaaaatgagtttaacttaaggatcaacaagattcgaagcgacaatagctcagcgttcaagaacatggaggttgaagagtaccttgaggagaagggaatttgtaatatcccaaaaaaagtcgccaaaggttga

SEQ ID NO: 17336 - DNA, 306 bp, Zea mays
  Peptide Sequence Number=SeqID_59115
atggagggagagagaagaggaaatggtcgcggcggtttctggctcctgacgtggctcggcggggtgcaggccatcaggatcgcgcggtgcttcttggttgggctcctagcttggcgcggtcggcggctcggtcgttcctggcggcacagcggcgtgcttggcgcggtcctaggcactgcagcgcaggcgcggggaagggcgcggggctgcgcggtcggtgtcggggctcggggctgggcgctgctcgggggctcggctgggtgggatcggcttctggcggcgcggtttggggaagcagagaggtaa

SEQ ID NO: 17337 - DNA, 1098 bp, Zea mays
  Peptide Sequence Number=SeqID_59116
atggggaacaagaccggcgtcccatctggctcgccccgggctcaagcgctcctccgacgggccatgacgccacatggacaagggctccaacacctctccgatagccacatcgacacggggttttctgaaaaaggacaatggctctctgtatctcatccttatcctttccccacgattccttctctcctctcttgcgccgccgctggcccagcgcggccgccgtgctccttctccactcgtgcttcccaagctgcttcgccggaagcaatgcgagggccctgccccggtggaggcgtctcggcgtcttttgccccgagcttcaacggctcccgcgccatgatctggtatgagttgctgaattttccccctttttctcctcctccggtcaaaacaaacccttttgagatctcgcaggccggcaacagaatttgctatgctagccaggcggttgaattgctgcccactttgtaccctgaaatcgtggtccgagacgcacggctcgaggactgctgggaagtggctgacactcactgcagctcgttctttcctggttacaagttcccgttggaccttgttctccggattgatcgttacattgctctcctctctggattttcagttccacccggctgcatgaggacttgccttgtggccgtcaattctaattctgtaaatagtagtttcaacatcgagtgtggagatgctacagatgccaactttgagaaatacaatctcagtagaggctccgtagctggcattcttacacttgatacagtggcagactatcttccgagaaggggacccctgaagcagagaaggacaggtattgcgtatatagcaaacgtcgcggtgcggaaggaggagcgacggaaagggatcgcgaagatgttggtccaagaagcagaggctcgggcaaggagctggggatgccggtcgatggcactgcactgcgacgtaaacaacgtggccgcgctacgcctgtacagaaaccaaggcttcaagtgcatacgagtgccggaaggagctaaatggcccgaacccaagatagctaaaggagcggagtacaacttcatgatgaagctagtgcccaaggcttga

SEQ ID NO: 17338 - DNA, 1005 bp, Zea mays
  Peptide Sequence Number=SeqID_59117
atgaagccagcggaggacgaggatgcgccggcgacggcggcagcgcagacggtctggtacgaccccatgacttcgccgcaggcgccggcgccgcagcagcagccggcgatagaggctgcgatgcggggggcctcgccgtcggtgagctccaacgcgcggcctctcagggtgtacgccgacggcatctatgatctcttccacttcggccatgcgcgcgcgctcgaacaggccaagaagtcatttcccaacacctacttgctggtaggttgctgcagcgacgagatcacccacatgtacaaaggaaagaccgtcatgaccgaggacgagcgctacgaatcgcttcggcattgcaagtgggtcgacgaggtcataccggacgctccatgggtgatcaaccaggagttcatcgacaagcacgacatcgactacgtcgctcacgacgcgctcccatacgctgacacgagtggagctgccaatgatgtctatgaatttgtgaaagccatcgggaagttcaaggagacgaagcgcaccgagggcatctcgacgtcggacatcatcatgaggatcttgaaggactacaaccagtacatcatgcggaacctcacccgcgggtacagccgcaaagatctcggcgtcagctacgtcaaggagaagcagctgagagtcaacatggggatcagcaagctacgggagaaggtgaaggagcaccaggagaaggtgatcgagctgcttcgcggctatttcgaggcagagcttcgcgtgatccgaaaaactctgacaccgagtgtgctgctgcgtgcgcagttccacagcgcggcgaagatcgctgggaccaaccctgtggagtggatggagaacgcggaccgctggatcgttggcttccttgagaagttcgaggaaggctgccacatgatggaaactgccattaaaggtcggattcaggaggggttgaagcggcaaggcaggtcggagtcaaacctttctggagaggagtccgactcgtag

SEQ ID NO: 17339 - DNA, 336 bp, Zea mays
  Peptide Sequence Number=SeqID_59118
atgcctgcccgcctcgcctgtcagtgtataagaaggttgtcgcctccaaacctcgtgtttcttgaggacctcccgcctgtgtttgctgccatcatccgtggattcctgtttttggtgggtttctttgtcttttgttggtactcgatttattcatctctggcagacactgacaggaaagcctgcaagagcttcgacgacttcgacatctcctccaaggccaagccggatgaagtgcacaatcatccatttggaaatatggctgaaacaactattgcttctatggtgtatacttcggtgactgcatcacaacctgtaatgcatcaaactatgggctag

SEQ ID NO: 17340 - DNA, 204 bp, Zea mays
  Peptide Sequence Number=SeqID_59119
atggagtacgtacgcgttgcttgtcgaacttccaaattccgccgacaaaaatcacagcgcagccctgcacgtatgctcattgtaaatgaccatgcatgggaaattaaggaagaaataatatataggaaaaagatcgtttggttgttgctccacagtactgccgctgaagaagataccggtatcgataccagtgatgttacatga

SEQ ID NO: 17341 - DNA, 591 bp, Zea mays
  Peptide Sequence Number=SeqID_59120
atggggagcgcccgcgttgcctttgtcttgttgttggaggagcgcaacctcacggaggttggcacccttcagccgtcgctcggcttcaaaggattttcatcaggcagcccggctgcattccctcaccaatggtcacccaggatggtggctgccatcgtcggtgccaaggtggtggcagccggagaaggtttctccgccgatgagaccgtcggcgccacccgcggactgacctccggctctttggctttgatagcttgtcctcgcccctcgagtggggacgtggacgagggccttgtcgcagcagcgtctgtcatgaggtcatcgctgctgctgtttagccgccgggagcggaggtcgttgtcgctgctgcagtggtcggcggcgagccaactggagcttgtcgtccgcaggccctccgatgtggagaaccttcggctgctctgcgatgagccggagccggaggcagcggtgtcagcgtggacagaggcggagtcggctcgaggagaagcttcgtcggcctgggagcacatggcctccctggccgaggaggtgcagcagcggcggctggagcttggccaggtcgtccgctag

SEQ ID NO: 17342 - DNA, 186 bp, Zea mays
  Peptide Sequence Number=SeqID_59121
atggcgatggaagcggcggccggcagaggatctcatcccgtagaagcgaaggaccgatgggaattagatgggccacctgtcccggcccatgagcgagtcatcgttggatttaaacgcatggtgcatggtcccgatgaggatgaggacacaccggccaggcaacatgagtataaattgtctatttaa

SEQ ID NO: 17343 - DNA, 300 bp, Zea mays
  Peptide Sequence Number=SeqID_59122
atgcccgaccctgggctcggtgccacggtgttcgaccgggggcgggtcgtttcagggttgactgagttcttccttctccttcctttcttctctattggatcattgtgtttgtgtggtggtgttgataatgcactcatcaatgaggagattgcaaacataaggtgtggagtcgggagaaagtggtcgatgacaaaggtgaaggtcatgtgggtttgtgtcgatggacccgaagcggtgaaggaaaattgttggttcttgactgaggaactagagaagccaagtgaccgttacgatggctaa

SEQ ID NO: 17344 - DNA, 315 bp, Zea mays
  Peptide Sequence Number=SeqID_59123
atggctcctcgcagcgcctacgtgcccgtgtgccttgttgccctgctcctgctcgccagccttagaccgtccagcgcgcggctgctccggccgccgatggggcgcgacggcgcaatcgatgtggctatggaggtgaaggacgccgtcgtcgacaagtgggacccttacccccacgtatgtcgtctaaaccccataggtgggtcccagagctctacatgtaccgtctggacccccataggacggtctcggacctccccgtatgccatcaggacccccggcaaggggcacatgacttcaagccagtatgcgctctaa

SEQ ID NO: 17345 - DNA, 177 bp, Zea mays
  Peptide Sequence Number=SeqID_59124
atgaagcctggagagaggtttagggtctgtttggttgggctgtggctgtggaaaaagttgttgtgggctttccatccaaaagccactaaaagcaggtccagtggtgctttcagttttgcactgcgagaaagtcggcttttagaaaaagctgctttctggatccagccctttggttga

SEQ ID NO: 17346 - DNA, 1467 bp, Zea mays
  Peptide Sequence Number=SeqID_59125
atggcggcctcttcgtcgatccaacgaggcgagagacgaggaaggtgggggagccccgagcgcaccgtggtgtggactgaacccaagcccaagccggcgaggaaggtcgccgtggtttactacctctgccaccgcgacggccacctcgaccacccgcacttcctggagatggagctatcccagcaccagcagtcccactcctcccgccctgctcccggcctctacctccgagacttcaaggcccgcctcaacgcgctccgcggcgacggcatgcccggcatgtactcctggtcctccaagaggagctacaagaacgggtacgtgtggcaggacctcaccgaggacgacctcatccaccccgcccacggcaacgacgagtacgtcctcaagggctccccgctcctcctcttccctcagccaccgccgcagcaggaggatgccgacaagtgggccggccgtcaccgcaagaactggagctccttcgacctgggggactgcgatagtaagctggtcgtcgtggcccaacaccaacagtctgcggccacgcgggtcgaccgggacgacgccgacccgtcgtcgacggagctggccatcgacgagatctcgccgccgccgtcctccagcagcccagacgagccggagagctgcggcagggaggtcggcgtggtcgccggcgggcggatgtgggcgtcggccgtgctgatgcagatcttctcctgcgggtccacggcggccgtgaggcggggccgccacgcgcgcacccgctctgaccttgtgatgtcaagtgcgagcaacaggcgggccaagaaggaggcggatgcggacgcggacgcggacgcgtcagcaagagcggctgaatgcctgtcagtgtcaggcgtcgtggagcgggactacttcagcggcagcctcattgagagcggcaagaagcgcggcggggatgacgcccttcttctcaagcggtcatcctcctgcaacgccgacaggggcgccgcgaagctgaagttgccgccggtgccggcgaaggaggtccgtcccgggcgccttgcctcccgaggaagccccgcgcccaacaaaaggctcggactcgggctcagccccggaagacggcgaactccgctccgcccgaaccagggctcggactcgggctcagtcccggaagatgacgaactccgctccgcccgacccatggctcggactcgggctcagccccggaagacgacgaactccgctccgcctaaccccagggctcgggactcgggctcagccccagaagacgacgaactccgctccacccgaccccagggctcggactcaggctcagcccctgaagacgacgaactccgcttcgcccgaccccagggctcggactcagccctggcctccgccgacggtctccgcctcgcccgactcaggggctcggactcgacctcggcctcggaagacagactctacctcgacctcagatga

SEQ ID NO: 17347 - DNA, 483 bp, Zea mays
  Peptide Sequence Number=SeqID_59126
atgcatggaggttgttgggagtccggcggcacaagggttgcatctcagaccaactggtgcacagaggcaagcatggaggttgttcaatggggaatggcgcgcgcgggtgtggatgcgcggatggcggggttcagcggcggttccagggacggcacgcgcgggtttggcggtggtttctgggaatggcgcgcgcgacggattgtgcggcgacaggtgtggatttccgtcgcggtcgtggtcgggctcggggatggggcgtcggcgctcggggatggagatggcgcggccgcgaggtcagggcgtggcggatttctgggcgcggccgcgaggtcggcgctcggggctcgtcggcgctcgaggacggggatgctttggtgcttgggacggggatggcggctgcagggtcgggctgcggggtcggcggggatggcagctgcgggatcggcggatgcgtctgcggggtcggaggtgaaagtcgcctag

SEQ ID NO: 17348 - DNA, 285 bp, Zea mays
  Peptide Sequence Number=SeqID_59127
atgaagtcagagctgctacgtcaggggtggtggcttggcaacgatgacataaggcgaacccccttcttcgtggacttgattgtttcacaggcaacgtcgagttcctttggtcatgcgcaacctgtcttggagagtcagagcttctcgtcccttgtgaggttagcgatacttacagatttagctgttaccactagtctagtatgcctaggcatcaacagccaattcagcacccactttatttgtagcaacaatcgaacgctcagcatgagcccgtttgctggataa

SEQ ID NO: 17349 - DNA, 1359 bp, Zea mays
  Peptide Sequence Number=SeqID_59128
atggactcggatcaggactccctctacgaatggttcgtcctcgccccctccttgtccgacgacgacgagcgtgccatcgcgctctcctccggctgcaccacccccaattcctcccgcgtcgtctccggcaccgactccggctccgacccggagcccgaccacgccgccggatcctccatgtccaagctcttcctcccctacgccgccgccgacgaccccgacgacgccgagggcgtgtacgcgttgtcggacgccgaggacacggacgcgaccccgcctccatcctcgccgctgcccaggccgctctcgggcctcttccaccacacgatggacggggacgtcgcctacgccgccttcgaccctgtccaccccaccgcagcgcctctgcgcggcggcggcggccaccacgatgccaagcagccggttccggaccccaccttctccgccttctttgatgagcccgtcgtcgcgctcgcctccaccaggggcctcctctgcctccgcggcgcctattccgccgcatactacgtcgccaacccggccaccttggcccgcgagcgcctcccagcccccgaacgcgaccaccgagcccagggcgaccccgccgtcgtcatcgttttcgacctcgacccccgtgacgctgaccctgagcgcgctgacggcagcggcaaggggttttaccgccactaccacatcgtcgtcgcgttccccctcgccgagggcatttacgccttcgagtccttctcgtcgagggcttgggcgtggagattcggcaggggggtcggcagcgccgaagccgtcctgccaagctctggggtcggcgcactcggctgcgccttctggcgcaccacaatgggcccgttcctctgctacaaccccttcgcgcgccgcgcggaactcgtccccgcgcccgtcgaggtgatgcagtggccctactgggaactcggcgagatggagggcacgctctgcgccacgtgcatggacgcccgcgtcgaagtcgtcgtcgtcctccgcctcaacttcgcgcgccgcgccacctccggcgccatctcgtggactctggctgggtacttcgagggcggctgcctcaggggacgccaagacgtcaccctgctccgctcgcagggtaaggccgaggtcgtcatgtgggaccccagctccgagacggtggtggccatggacctcgagggccgcactacacgcaccatcaggttcatccctggcagcgactactgcgacgatttcattccctacgtcagcacgtttactgccgtctctggctttggcaaacgggctcatgctgagcgttcgattgttgctacaaataaagtgggtgctgaattggctgttgatgcctag

SEQ ID NO: 17350 - DNA, 1461 bp, Zea mays
  Peptide Sequence Number=SeqID_59129
atggaggagaggccatcgtccgaggcaggcgcgggcaactcgagggccgaggacgacttcaggagctgctgcggggatgaggaagagtgggaggacacggaggagtcgttcacggccggcgtcaccaagggggagctggacgaggcctctgtgcgtctcttcttcaagggcgtgtcgagccctgaggcggaggggaagaagctgtctgggatcggagtcgtcatggagaggtcgcccggggtgcctgttcttaaggtgcagaagaagctggatttctatgtggaggagctcgtggctgatcacctcgccctcatggatgggctgcttgtcgcactgcagaatgggatcaggaagatcttcgcctttactaattcggagaagctctactttcagatagcagaagctgaaattcttgaagaccagcttttggtagctctaggacacaggattcttgaactggtggataagttggaagactttgatttgatattgcttcctagctttgaactagagaggcccttgcagttggctaaagaagctataggcatcagatatctgtctccctacgaggttggtacctgcccgatttgccgtgaggagaaactaggttctcagatgatcaaggcaggttgttctcacacatattgctataattgcctgactgggtatgttgaagagaagctgctgacctcgaagctgcctataaggtgtccacaattaaggtgtaaatacattatttccgctagtgagtgcaactcgttccttccagttagcagctatgattccctggagagagcatttgcagaagctggcacctcaggaatggaaagattttattgtccctttccaaactgttcagtgctgttagaccttagtcagcacttctctagggcaagttcatcaagccagtcagatctcagttgtgtcgagtgcccagaatgccatagagatatatgtatcaactgtggagtgccgtggcacatcatgatgggctgtgatgagtaccagagcttgcccgctgaggaaagagatgctggagacctatctttgcatcggcttgcacagaacaataggtgtgggcacgagttctgctactcctgcggtgctgactacgctagcggcgttcaaacgtgccaatgcgtgttctgggacgacgaagccatggagccctcctccgccgcacggtccacccaagcagcgtccgagatctgggcgtgggacacatttgactgcatgccgaccgccgtggagggatactcggagcaggagagagcgcagctggcactcatccagaggttcctcgccggggggttcagcctgggtgagaacccctgccagtcgccgccccgctgcgccgactcctacatcgtcgacaccatgaaggacctccaccagctcccatggctcgagcggttcgtgtcggtgatcagcgacacgtacaacgatgactacatgcagtga

SEQ ID NO: 17351 - DNA, 540 bp, Zea mays
  Peptide Sequence Number=SeqID_59130
atggccgagctccggccgcgccgagccgcaggccatccgaccgcgcgcgagggaaaccagggagggagggacgagggaggagagggaggcgaggcttaccacgggacgggggtcgagcagacggacacgacggtggcggttctgggcgacgagagcgatggggagaggagaaagaaacgtcgtgggggagagggagatgaacagggggtgactccggggcttataggcggggccccacatgcagcggcgggcggctgccaaaccgcctcccgcaccaagcagggtgagcgcgccgcgcccacgcgctggcggctggaccgcgccgagttgggccgccgcggctccggcccaagacgcgaaggggaagggggggagggagaagcaggccgcgggaaaaaaacggcggctcagccgctgacgcctggccggcccacgacgagaaaaagggggagggggaaagggcaggccgtggctgggctgcgccagggaagcgggcccaagagaggggggtttggggtttttttcttattttctatttag

SEQ ID NO: 17352 - DNA, 498 bp, Zea mays
  Peptide Sequence Number=SeqID_59131
atggaggcctactgcgacgaagtttggcgcctggaagacaagttctatgggctggagctcaaccatatctctcgacggattgtacgctcctgccaagggtgtcaattctacgcgagacagacgcacctgcccgctcaggccctacagacaatacccatcacctggtcgtttgccgtgtggggtctggacctcgtcggtcccttgcagaaggcacccggaggcttctcgcacctgctggtcaccatcgacaaattctccaaatggatcgaggtccgacccctaaccagcatcaggtccgagcaggcggtggcgttcttcacaaacatcattcatcgctttggggtcccgaactctatcatcaccgacaatggcatgcagttcactgggaagaagttcttggacttctgcaaggaccaccacattcgtgtggactgggccgccgtagctcaccccatgacgaatgggcaggtggagcgtgccaacggtatgattttgtag

SEQ ID NO: 17353 - DNA, 963 bp, Zea mays
  Peptide Sequence Number=SeqID_59132
atggtgggctgctctaggggctccctccccacctggatgaccgccgccgccgcgcgggtcgacctctcgggcggcgtaacgccttcgcaccagggcccatcctcttcgtccccctcctcgggtccctctccggccgcgggggcggaccaggagctcgggatgtacgagcgcgcgttctccgctgccggcgccgccttcgtctcagctatcatcgtcaaccctctagatgtcgccaagactagattgcaggcgcaggcggcaggggtgctgtacaaccagcctgcccagatggcggcgctcggccctgatgcgcatttccagatcctgtctgaattccgatgctctccttcgtgcacacgtggtcttgtattaggaagtgagccagtttgtcctcctgactgcttccagtacaaggggacacttgatgtattcttgaaagtggttagacaggaggggttcgttagactatggagaggaacaaatgcaggcttagcattagctgtacccactgttgggatatacttgccttgttatgatatattccgcaactggattgaggatttcacaagaagtaatgctcctggcttgacaccatatgccccgctagtagcaggatctgttgcacgctcgttagcatgtattgcttgttctccaattgagctcgcaaggacgcgtatgcagatgcgaagaaaactacttggttttgttggagaagaaggcaatgcaggtagtgtattgggagtgaattttgctgctggttttgtagcaggcagtcttgctgctggtgctacatgccctctggatgttgcaaaaacaaggagacaaatagagaaggatactgagaaggcaatgaggatgactacaaggcaaacattagctgagatatggaggtttgaaccctacatatggctcagtcaattgagcaatatgcttttaccatgttgtcctgctgtaccccaatag

SEQ ID NO: 17354 - DNA, 507 bp, Zea mays
  Peptide Sequence Number=SeqID_59133
atgaggatcaggttcaagatgatgaaaatgaagatcaagaggatgagccacctcaagaggaggacattgatcaagggggagatgacaacaaagaagacaaggaagaggatcaagaaattagatgtggggcgcaaacccactgttcccctttccccgttcgctgggctcagctcaatctcaacggatcgccatgaccgtcgggtcgttgcaacggccgcagctgggcaaccgatcacccgatttgcgcacgccgaacgcccgggtcacgcgcagcttagcacctcgtaccgcgtcgtcctcttcaaaaccgggagctggcgcctgtttcgcagagaacataggcaaccattagtgccgagctcggggaggaaaattgagagccgccgcgaggggaactcggaagtcggcggcacccaggccttcgtattgcgcccaacgtcctctgcatggccgaagaagggaggtggtggccgtgccgccttgaattcgccaccgacgctgctctaa

SEQ ID NO: 17355 - DNA, 273 bp, Zea mays
  Peptide Sequence Number=SeqID_59134
atggcgctcgacacggcatccagggcttcaacaaggaggttgctgcaatgcggcccgggtgggaaccagtggctcatccaccggtcacaaggcttgagggaggagggtgaagttcacggccaaggcgcgacgcggaaagggaatggcggggcagtgagcgcgcaacagcggagtgcaggcggcggcggagcatctaggtcaggcttcggttttatagtctggcgcagggacaagctcgaccgactaaactcagggttgaggcgagatttctga

SEQ ID NO: 17356 - DNA, 1290 bp, Zea mays
  Peptide Sequence Number=SeqID_59135
atggacatcaagtgcgtcattttataccatctgattggttcgatggggaggtttagggagcttggtccgtccgaaacggatcccgtctccaaaggtgcgtggcagaagcgattcttcagcgtcgcgccgccggcggcgctggtcttcttcttcgtgctgatattcgtcgccggtgcagccgtcacgctagatcataaggagagtcgtgtgtccgtattgcagttgcagccaaaactagtgactgcagcagcggagatgaggcctccagcgacgacgagcgagctgcgcgcagggccagcagaggaacccgacatctgtgaggtcaaagatggcagcgaggcgttgccgcggggcatcgtgcaggacaagtccaacttggagatggagtcgatgggtggcaaccctgaacgtgaggagaacggcagcggcaggcggtcgaaaagcctcctcgccatccccgtcggcatcaagcagaaggcggtcgtcgacaagctcgtctccaagttcccggacaccaagttcaccgtgatgctgttccactacgacggcgaggtggacgggtggcgagacctcgagtggtcgggccgcgcggtccacgtcgccgcgcgcgaccagaccaagtggtggttcgccaagaggttcctgcacccggacctggtggcggagtacgactacgtcttcctctgggacgaggacgtcgaggtggacagcttcgacccgctcaggtacctgcgggtcgtgaggaaggaagggctcgaggtctcgcagccggcgctggaccgccggtcgcagatccaccacgggctcacggcccgcgcgcggcggggcggcggcgtccaccggcggtactacaagacgaaggggcacggcaggtgctacggcaacagcacgggcccgccgtgcacggggtgggtggagatgatggtgcccgtgttctcgcgcgcggcgtggcggtgcgcgtggcgcatggtccagaacgacctcgtctacgcgtggggaatggactacaagctcggctactgcgcgcagggcgaccggcgccgcaacgtcggcatcgtcgatagccagtacgtgctgcaccggggcatccccaccctcggcggcggcggcggcaacggcaacggcaagccttcgttctccgcttccgcgtcagcgttgggggcagaccggttagcggtcaggcagcggtcctacaccgagctgcaggtgttcaataggaggtggaagaaggccgtgtcggaggacgggtgctggactgacccttacccgaacacggcgaccaccggctga

SEQ ID NO: 17357 - DNA, 768 bp, Zea mays
  Peptide Sequence Number=SeqID_59136
atgggtagacgggtatgggtagttccaacccgtacccgtacccgtacccgtctacccaacgggatgacagtctcctcagctgatgatgacccgagggatgttggagttatgaccagagaagaactgaaactagatttttcaaaatcagatacgcgtaacacagagaatgctgaaattactaaaaggagaagggtgctctttcgggagaacatacctgttgattccaagctctgtgcaaagacatctttgctatattgctataaaagatctacaagggcttctgttttctcactggaacaacttcaatgggataactttgctgatagttttgaggtaacatctcaaaaaatggatgttcaggtttacgatcctttttttatcttgcgattctcaattcatactcttcacatgggttacattgaacctgctcaatttgcccgattagggcttcttgcaatcacacttgttagtatagcatctcctgatcatgaattaaggatgttgggctacgagtgcctaggaacattcaaaaaatcccttgagagcattccattatttccaaccttattgcagagcagttttgtgcattttaaagccgaacgtttgtggatgcttcgattattatctgctggatcaaatctagctgatgatgctaaaatatacaagagaggaagagtattagaacttgctcttgccttctgttcttcacctatttcagattttgaatcgaaggttttagtccttaaggtgttgaagaagtgtgtttaa

SEQ ID NO: 17358 - DNA, 438 bp, Zea mays
  Peptide Sequence Number=SeqID_59137
atgtggggcttggggcgcccagccgctcgcttcctctccctctcttttttttctttcaacattgagcacattaattattcaaagaaaaagaagttggagcatccaacagggcattatctcaaacaaatggtgtgcatccagaacaagaactctgctcctacaggagagatccaactctggacgtgcgcaaggggtggacaggcgacggtgtcgaaggggtggccaggaagttggcccgtgggaggaggaaggagaaatttgggaggaaaggggaggcgcgttggtacctcgatggagaaggatgaggaggtggtggcgctcgccaacagaggtgcggtgatgcggcagcggtggagggagctggccgatggagccacgcagagtagggagcggaagaccgtcgagcgcggcggcgagcacaggctcgcccgggcgtag

SEQ ID NO: 17359 - DNA, 579 bp, Zea mays
  Peptide Sequence Number=SeqID_59138
atggctaatgtcaaaatgaagctctgccaaatcctccgctttgtctacgagaagatggtgcttgacgacatagaaagcagcagggagatgtgctttcataggcgagggctagcattgcctgatttagcaccattaggagcaaaaatgttgattgatggtatttctgaaagcgattatcttttgatgctccggaaccaattttccttagttggaaataaaatatttaactatccagattttctttggcagaatacaactaggccaagaatgataaagggcgcaaatggaatcctcttaggcagagttcaagtaatcagatcaaattacgagagagttttcaacaggactggttactccttttgcaaacaattggcatacgggatccttagcggtgaaagggtgccttcatcgcttcatctgcagacgtctccctcatttccctggatgaacatcggtattacggagtattggatgcactgctatgtttgtgtccttcagtgtgcaccaaagagctttgatctgcagtttggatttacgaacaagaactcaccagctgctgatattttcagagatacatga

SEQ ID NO: 17360 - DNA, 1194 bp, Zea mays
  Peptide Sequence Number=SeqID_59139
atgccagtaagcctgcaagaatctgctgcatttaccattcttggggattgtgtccgacacccccctaaagagttagaaggatactgctttaataaattggagcagctgcccttggatgcaaactttgttcagaaagaacattttggcacgagaagaaacaatgtcatgattggatcagttgggaatggggatcagggtccaagttatgatcataggagatggggatgcgattgttgtgtgttggatggttttctggaagtttgcagaaagtctgcagtcaaagagggcagttgggtgcacttgtattggaagtttggagagaactttaagagcaacctgaatcaagttccagttcttcaccatttgtatcttgatggccaacagattgaaaacaatcgttgccatgtcatactgtatgaggttccgaccattggcagaaaccatttctcactgggtttggatgcaccccgtacgttgaatgtttctttcaaaaagccaaattggataaatgatctacaaaagcaaccatcatttcttgatttggattcaattgttttggcgcttaattgttcaaatgcagctagactgccggacactcaggaatgttctactacatgctcaggggcttatttcatctttgcatctgtctgtcaaattctctactggccaattgtcttccaagatgcttccttaagctccactgtgaatgttgaatatgcacacaaagctgcaattcggaagcatgctttgtggtcaagtatcattgtggatctcctgatgggttttgtccttggagcagcattcttattaaatacagagactatttgtatttggactattgctctcgtccaccacatgacagaagcaatcttgagatccggttgtgtgtggctgatgggtgttccagctggatttaagctgaatacagagttagcagagctcttaggcatgatttctcttaatgcagttcaaatttactctaccctttggtttttcgttggaggctacctgagacatataattcaaggcattgcagtctctggaattattttaggacttacagctccagtttcattctttattgacattatccagcttgctacgttgcatgttaccatccttcactggttaatctcatcgttatattcaagacaaattcagacagtagcatcattgtggcgtcttttcaggtaa

SEQ ID NO: 17361 - DNA, 312 bp, Zea mays
  Peptide Sequence Number=SeqID_59140
atggctcaaggccttttggaaaggaaatgggtggatgatattagggcccccctcatagtcccagtgattcaagaatatcttcatctatgcccgggattgaggatcaacatcgttggagacttgatgggtctggatcttagtaaccaggttcccggatcgatgggatcgaggaacgggaacgtgttagcaaagcaggtggatcgtcggtcaaatgaaagagcaagccattaccctgtaatgcagtctgaacatagaaggcccactcagaatagttatgaccgtcaagaacgatacgacaatggcagtgactga

SEQ ID NO: 17362 - DNA, 207 bp, Zea mays
  Peptide Sequence Number=SeqID_59141
atgggaggctctggggagatcgagataggcgttgacccgttctcgtcggcgcccatgacgaactgcccagctgacaggcgcagatgcttccacgtaaccgtactgcgggtttatggctccaagggaaaatatctgagtcagcgggatgggagcaagagcaccaaccaccaagtcatccacgagaaactggagaacgtcttcccttga

SEQ ID NO: 17363 - DNA, 393 bp, Zea mays
  Peptide Sequence Number=SeqID_59142
atgaaatcccgtgtcataacaattcacttgctagattggcagattgctatgactgcttatttgcactcaagaaaacatgcccacattcggtcctcgacacagttcagcagagatgctggctctatgcccaaggtgtggacaggaaaggaggacataaaagccataactaaaactgttcgctcagttaatttaactcaaaagttttcccttgaaattcaagttgattttgagaagtatgaagggatgattaaggtcatggagaaggtggtaatacagttaattctatggagctcactggaggagcactaccttttgccagttgcttgcaagaatgtaattggaatccgatgtgcttcatggcgcatcgtatcctccattgagtatagggaataa

SEQ ID NO: 17364 - DNA, 672 bp, Zea mays
  Peptide Sequence Number=SeqID_59143
atgacgttgttgctcgtcgctgagcatcttcgcgccctcagtgctgccaaggagccctctctatccctgatggcgtcccaaccgttggtaatatctccgcctcggccatgggcattgcaaccctcgattcaatctctcctcttcgatctcaggccgatcgtcggcgatgatgacccagcctccctctccacgtccctgctccccaactcatacaggaattcacaagagcaatatggtacaccaatgccacacattggacaaacaacagttgaagttgatcttttgaattatggtgtgatagaaggtgatgaatcatgtaaacatttctctgaactaaaagtcttacatccatggatgatcaaagatggcatgaatcttacaaaggaacagagattagagaaaattgagtcacaaaaacttgaaaaatatgaagccaaaggtgacaagagacatgacttgaaagatgatcaaagtgtacaggaagaatacataaatgcatattatgaggccttgaggaaaagttggaagaggaagaagcaaaaagcagaatgcagcatgaaggcaagatttttgtccctgatgctcaaagggaacgccaagttgacaataaatacaagcaggatgatgatgaagaaggcattgaatagtaagagcatcaacctacagttgtag

SEQ ID NO: 17365 - DNA, 324 bp, Zea mays
  Peptide Sequence Number=SeqID_59144
atgagcgtggagctgcatctcagacgctcaggggaggcggcgactgctgcaggtcccgggcatcacgaggtgaggcgaaggcgtgttggtggggagtgggaggttgctcatggctcccggacgaggctggcgatgttggacatgtgtggcatgtggcggatgcggatggggcgcgaggttggcctgcgcgacattcggccgctggcggcggatgcggatggggcgaggagaacggatgaggctggtggcgttgatgcggctggggtttggggcggggtgtgtcggatggggctgctagcggacagtgtagatttgatgatatag

SEQ ID NO: 17366 - DNA, 1728 bp, Zea mays
  Peptide Sequence Number=SeqID_59145
atgggtcgggtggcgcctcataggcaggcaccattaaaagtgcctcatagatggaagaagtttgcctcaatagcgagccggtattttgatatggttgatgagtatgagggtgacggtgagggtgagggagactgcagtgccgtggaacatgatgatgaaactggttcaaaacattcaaagaaagaaccacctctgccgaccattggtttggagttcgattctttcgacgaagcttatgacttctacaatatctatgctaaggaacagggttttggcatcagagttagcaattcgtggtttagaaccaaaaagaaagagcgctatagagcaaaacttagctgcagtagtgcaggttttaagaaaaagagtgaagccaacaacccgagacccgaaacaagaaccggttgtcctgcaatggtagtcattaggcttgtggactctaaaaggtggagaatagttgaagtcgagcttgagcacaatcaccaggtgagtccacagatcaaaaggttttacaagtcccataagaaaatgattcttgcagccagaaaggcacgaccgccagcagaacctgtaacagaaatacataccatcaagttatatcgaactgctgccatggatgctgtgtctaatggattctcaaatgtttctgaaagggagggtattcatcaaccagatcactctaaacatctggaacttaaagagggcgatgcatatgctgtttataatttcttctgtcgcatgaagttgactaatccgaatttcttttacttgatggattttgatgacgacggtccgttgaagaatgtcttctgggcagatgctaggtccagggccgcttatggttatttttccgacaccgttgcaattgacacaacatgcttgacaaataaatatgaacttcccttgatttcttttgtcggagtgaaccatcacgggcaatcagtgttattgggatgtggcttccttggacacaagtcagtggagtactttgtctggatttttagagcatggcttaaatgcatgctagggcaccaaccacaagttattgttacggaccagtgcaaatccttgcaaattgctgtttccgaggtttttccgaaggctcgtcattgtttttgtttgtggtatatcatgcagagagttccagagaagttgggaggattgagaggatttgaagaaatcaaaaggcagttgaataaagcagtctataactccttaaagataatcgagtttgaaacttcctggactgaaatgatcaagaagcacggactcggcgataacaagtggctccaaactttgtacgaagaaaggaagcaatgggtaccggtttacctaaaggatacattttttgccggaatgatcccaatccgagaaaacgagagtttaaatgcatttttcgatggttatgtacataagcatacatctttcaaggaatttgttgacaagtatgatttagctctttataggaaacacctaaaagaagccacagcagatgtgcagtcaaagaactcaagctttgaattaaaaacaagatgcaatttcgaggtccagctttctaaagcgtacacaaaagaaatcttcgataagttccaatccgaagttgaggggatgtactcttgcttcaacacaaggcaggtgactgcaaacgggccaataataacatacattgttaaagaaagagtcgaaatcgaaggaaatgagaaggaggcatgctttgaacgttcttaa

SEQ ID NO: 17367 - DNA, 546 bp, Zea mays
  Peptide Sequence Number=SeqID_59146
atgtcgacaactcttctagtgaggttgaaagacaacaatttgctcgagcattcttactgtgaggtggctttaatatcaaaatctgactggtttggggttaaggtgttcacagatgggcaataccaatttcgggttaattcccaccttgatgacttcaattgggtgttgcgacttctaaggaaggcaagatctgctatttttaacctgctccgctgtaacctagggaggcaaggctggaaggcaagatctgctatttttaacctgcttcgctacaacccagggaggcaaggctggtgcaagaaggcaagatctgctatttttaacctacttcgctacaacccagggaggcaaggctggaaggcaatatctgctatttttaacctactccgctacaacccaggtaggcaaggctggaaggcaagatctgctatttctaacctgctccgctacaacccagggaggcaaggctggaaggcaagatctgttatcttcactgatctgctctctgaggaacacgacctgtataatgaacctaattatgtctaa

SEQ ID NO: 17368 - DNA, 2274 bp, Zea mays
  Peptide Sequence Number=SeqID_59147
atggcgggaaacgattggataaacagttacctggaagcgatcttggacgttggtccagggatcgatgaagcgaaatcgtcattgttgctgagggagagaggtcatttcagcccaactcgttacttcgtggaagaggctgctgctacgaggggtcctaaggagaggaacacgagactggagaatatgtgctggaggatttggaatttggctcgaaagaagaagcagttcaaagctactggtaccaggttaaaccaatccgaccggtcggctggttcaaacaacattggtgctggatttggtgttgagtgcttgagggggaggaagttcaacgcaatgctaagcgtcaccttgaacgtgaaagaggccgcagggaggcaactgctgacatgtctgaagacctttcagaaggagagaaaggagactttcccggtgatggttcagctcatggcgatactgtcttcctgcagtcttcatggtttgttaaggggtgaaaacatggagcttggtcgtgattctgatacaggtggccaggtcaagtatgtagtagaacttgctagggccttgggcacaatgccaggaatttatcgggttgatttgctgacaagacaagtgtcagctccggatgttgattggagttatgctgaaccaacagagatgcttacgccaagaactacagagagctcaatgcaggagcttggtgagagcagtggtgcttatattattcgtatccccttcggtccaaaagataaatatatacccaaagaacttctttggcctcatattcctgagtttgttgattgtgcacttagtcacatccgacagatgtccaaagttctaggtgagcaaattggcggtgggcaaccagtctggcctgttgctattcatggacattatgcagatgcgggtgattctgcagctcttctttctggggctctaaatgtgccaatgcttttcactggccactcacttggtagagataagctagaccagatattgaaacagggtcgacaatcgagggacgaaataaatacaacttacaaaatcatgcgacggatagaggctgaggagttatctcttgatagctctgaaattgttataaccagcactagacaggagatagaagagcagtggcgcctttatgatggctttgatccagtactggagcgcaaacttagagcaaggatcaaaaggggtgtcaactgccatgggaggtttatgcctcgtatggttacattaataatgggaaaccgtgataatattgatgaaatgtctggcacaaatgcaactgtgcttctctcgattcttaaactgattgacaagtatgatttgtatggccaagtagcatatcccaagcaccacaagcagtatgaagttcctgatatttacgggctagcagcaaaaacgaagggtgtttttattaatccagcatttatcgagccatttgggcttactttgatcgaggcagcagcatatggtttgcctattgttgccacaaaaaacgggggtccagttgacattcacaaggttcttgacaacggtgtactagttgatccccacgatcagcagtctattgctgatgctcttctaaaacttgtttcagacaagcaattgtgggcgaggtgcagacagaatggactgaaaaatattcatcagttttcttggccggagcactgcaaaacatatttgtctcggatagccatgtgcaaggcaaggcaaccacagtggcagagaagtaatgttggctttgaatatccagaaccgaattcacctggtgattctttgagagacatacaagatttatctttaaacttaaagctatcactggatggtgaaaagaatgaaggaactggaactttcgataattctctggattctattgatcgaaaaagcaacttggagaatgcttttctaaagttatccaacggaattataggaggtacagaaaaggcaagtttaatggagaaagcagaacaaaatgttagtggtagtaggtttccggttttgaggtcgaagaagtacatttttgtgatagctgtggattgtgattcagtctcggatattcctaaaataattaagacaatcatggacgtagcaggaaaagagaattctattgggcttatattatcgacatccttgtcaatatctgagggtaacacccaagctgaaaaggaggtttgcaacaattgccaagatggctactctgtgaacattgcaaagttaggcatcctagggaatgtggaaagttggctggggatgtttcaaatatgggtctaa

SEQ ID NO: 17369 - DNA, 383 bp, Zea mays
  Peptide Sequence Number=SeqID_59148
gaatcgaggccgaagacaagctcaagatgatgaagtatctgaaccaagtgaggccgaaaacgatcatggctcaaacattagtgaccgaaagagaggtcgacgacatcatggtcaacgagatcaagaaagatccgaaagtttatttggaatgggggaagaaaattgaattagtgttcgaatgccacaactattccgaggccaagaaggttaattcgaagaaagagcccctattgcactataatttcaaaaagagaaggtttgaaatgattgaaagagagggcaccgtcgagtggctctggttgaatcattctctatgggtaatctgcccaaatcttgagacttttgagactattgagactcttgctactgagattgataattag

SEQ ID NO: 17370 - DNA, 270 bp, Zea mays
  Peptide Sequence Number=SeqID_59149
atggcccaattgttagcatttgctagaagtgaggccttcgccccagggagccgcgtcacgttcggcaccctcgacttccttgccaccgccattggcgaactccgcttctccgccccagcattcccaccgccaccggaccaagcccggtgtctcgaggctgagaggtcgtggccgaggaaggtacatgaccaactcgctgagagcagcgatggtgcacaatacttcctcattctcgggcagaacatggccacagtggccatgatgctctga

SEQ ID NO: 17371 - DNA, 738 bp, Zea mays
  Peptide Sequence Number=SeqID_59150
atgggatcccacctagagctggcagtgaccggagcttgtctggtcgtggttctgttgagggatgacgacgtgtatgtaatgaaccttggggatagccgtgccattgtggcgcagcgatgggacgacgaagattgcttgattggaagcatgtgggtggaggacattggtgtgggcttggagaccgagacaaggatccctgggtattcggcaattgggctcgaggcattgcagctgtcgactgatcatagcacgagcattgaagaggaagtgcagaggatcagacgcgaacatctagatgatgatcaatgtgttgttaatgatagagtgaaaggtcgtctaacagttacccgtgcatttggtgctgggtatctcaaacagagtttaattgaggagctactctcccgtgctgcaaagaaagctggtaagcttattgtgtggtcttcttcttccaagcccgacgctcctaggaccacaccgtccaagccctcgagcgaatctgcgatacgcaagtggtggcgcagcctcgcgctcgccctgctcgccgccgcactggcgatcacggtggccgcgctgcagcagacgacggagcacgcagacaccaaggagcggccgctgctgcgggtggaacgaccatcgggcatgaaggcttctgtctacgcgggtcgactcggcggcgccttaactttggtggtgctgagagtgactaattttggtgttgacagtgacggcgcaacatga

SEQ ID NO: 17372 - DNA, 333 bp, Zea mays
  Peptide Sequence Number=SeqID_59151
atggaggcccaggtaaagaagaaggtgtcgaggcagatctccaggagttccaggacttcgacgagttcgaggattaggctagcgacctcccctagtcagctgcctgtgccagaattcgcagtctcagcaaacgacatcaaggatcctacagccaaagctattgctcttagcagaaaattttactctgaagtttggttgaaaggtggccgagaaataacagacgaggctattaggaaaaatgaggaagaatctcatactgctttagaagaagcaaagaaagccgaagaagccactgaacgtgaaaggcttataggtatgtttgtcgtgatttag

SEQ ID NO: 17373 - DNA, 228 bp, Zea mays
  Peptide Sequence Number=SeqID_59152
atggaggcgtttccttcggtatttgctgtagctgacgcatacgacgccgcgcgagcagctgcagcagaagctcattcggcggccaccattgcggagaaggaggcaatcgctgttgtgcagcctgtaaacaaagttgtttcgacccttagcaggacggcaggacctccaggggtggctatatttgagttctcgattatagaattagcttctaccggagacacactgtaa

SEQ ID NO: 17374 - DNA, 504 bp, Zea mays
  Peptide Sequence Number=SeqID_59153
atgccgcccgtctccgcggcttcccccgtggcggcatcgggcattaccgccgcagctgccatgccttcccccacgacggtgccgagccgggcagagtgctccgtcgacctcaagcttggcgggctaggtgagtttagggcgacggacggcacgaccacgaaggagccggcgactgcaatcgcagcgccgtccgccagcccaatgaagtgcccgcgctcggggcccgacggcggcggtggggcgcagtgcccatcgtgcgcagtggacggctgcaaggccgacctgagcaagtgccgcgactaccaccgccccacaaggtctacgaggcgcactccaagacgcccgtcgtcggcggcggccgcgagatgcgcttctgccagcagtgcagcagtgtttgtttccaccagagcttatcaagagcatcagcacctgaaggtagtatccttgtgcaatttagtcaccatgaaaatgaaagaaaacacctacaccacatttttgaaatag

SEQ ID NO: 17375 - DNA, 687 bp, Zea mays
  Peptide Sequence Number=SeqID_59154
atggtgcgcaggaagaatgtgtcagcgccagggggaggagacgacgaggaccctccttgcccctttaggcaggaaggccgcaagaagcggcgtttggatagagcagcccaagtagctcttgcagcgacagcagcagcagagcaggcagagagaggtggaaaactacagatatcatcagatcagattggctaccgggtccgtcatctcgcgtctcgaccccgctcctccgcaccttctacacccgccatagctaccactccacctcccacttcgctagctccagttgctcctgagccatccaccacttcagccatacctaccaactccaccattccctcttccattgttcctcctcccgctcccatctccgctccacccattccaccagcccgcttccgggaacgagacgagactgaggtgcgaccattggctgtcgatccttgtctgattgatcttcagcgtgctactgtggcccggatagctctacaagcgcatcggcttttggatctccctgcttttctgctagcagccggtgcgaattccgagggcacatctattcctgatgatgatgatgatgattttgggatcccgccaccgcctcctatgcctccacgctcacatgatcatgaggcacagcatgctcttatagcatctgagcaggctcgtcagtccgtgatccagcagtag

SEQ ID NO: 17376 - DNA, 375 bp, Zea mays
  Peptide Sequence Number=SeqID_59155
atgaaagaaaatgcaagaagaaggatcacactccaagttcctcaagtgaagaagaggaagaagaagaaagtgatgatgatgaagataatcaaccaacaacatcatcctccaaggatgaagaaacaatgtgacgtgtcggaaagagggggttggcgtcgtgaacgtgcattagctgttgaggtgatcatgggaggctcaaacattggagaagagagcattggtggtgatggaggtgatgcagctgctatcctagccataacagcatctgctggtggcagtactggtgctggtggttttgcttcatcggttgctttagatgctacctctctcactgaaaaggctattgcaatactgccccttgctctggctgcataa

SEQ ID NO: 17377 - DNA, 300 bp, Zea mays
  Peptide Sequence Number=SeqID_59156
atgatcccctaccactcgtgcttcgccaccgaaccaaccacccgaaaccggatcaccggtgaagaaccaccgtcagactccggtggccgggtttcctctcggccgacccccatcacccccctaacaccgttctcccccctcgctggcacgtgggcccgcgcccacggcaccgttagccgcgccgctccctctggcgggccgtgttgggccgcctgcccgcgtggccgcgcgcgcgccctggctaggccgaaatcccctccgggcccagagaagagggatccgatcctccggaatttatag

SEQ ID NO: 17378 - DNA, 450 bp, Zea mays
  Peptide Sequence Number=SeqID_59157
atgggggaaaaacttaccggtaatcgcacacgcaggagctctgcccacagaatcaggcggacccgcaactacgttgaggaattcccggcgcgacgcatgctaatcgagctcggtgaggccacgagcaccatcccggtgacgagctggagctccccaaccggttttcagggacccagcactggtgaccacgtgaatcacccgcggcgactcatctctctcatcccaatcgcgagctcacagcaggcacttgattcctttgttcctggcggcggcactctcctatctctctctgcgcgcacgacaacagacgcgtgggcatatagcccgcccaggtcgggctcgaccgggtcaggcatgcgcacgaccacgacatgcaccgcgtcatgcgcggcttctgttgaacggcgcgacgcgactgatccgaaaagtggagagggaagaagctcctga

SEQ ID NO: 17379 - DNA, 420 bp, Zea mays
  Peptide Sequence Number=SeqID_59158
atggtgtcgcgcgtccctgcgccctacttgttcctggccctcgcgctggctcgcctcatcgccgaattccagaaccagcgttgtagctcagctcgcccaaatcctagccatgattcccatcacgccctgtgtcggcatgctggcccgatgctgtcgtccttcttcatcctcatcttcgcctcgacctcgcgtggtgctcggccgtgcacagctgcttgtcatcgacgtccctacgagttgttggtcgtcgctcatgttcacctccatatgatgggtggtgtgggtggtaacgtcctggtgcgctattcatttggggtcgaggatgtgcttgaaccagagatattcaaagtggatgctggacgttcttgcaccgtggacacgttgaagatccatagcatattgcggtgctccattccgtag

SEQ ID NO: 17380 - DNA, 316 bp, Zea mays
  Peptide Sequence Number=SeqID_59159
atggtggtgacgttgagcttcgctgggaaatgccgaccatggcatagagaagacagggccgagctggagctgggaagccgcgcgaaaggggaaaaatggggcgagcgcatgggagccggagacctgagagcgacgtggagagaagcagagaggtcgagcgtcagggagagggccgagggagcaggatcagggtcgcggtgctacggcgctcggcaccggacttggggatcacgagaggcgccgagcagacgagtgcgtgaagagctggagcgagaggaaggagtttcgagcataggggcgcttaggatcaacgcgg

SEQ ID NO: 17381 - DNA, 141 bp, Zea mays
  Peptide Sequence Number=SeqID_59160
atgccagctatcccgttagcttcaccagagacctgtgaagctccccaatccttcagacccagcgcaccctcaccggaacccgaatcaccctcgccggacttcttccgttcaccggatagcgtggaccggcaaaatagttaa

SEQ ID NO: 17382 - DNA, 381 bp, Zea mays
  Peptide Sequence Number=SeqID_59161
atgttgagggaatccagggctgctgttttttttgatcaaagagctgggcgcagggaacttggaggctgtgggcgatggctggagatggtggactggtggccgacgttggaggaggctgacggcgctggggaagacgagcatccggagcaagtaggggcgagctcaaggtgctcctggcctgggcgtttcctggccgggcagggaagagcaggggatgccatgggagagagtgcagggctgctgctcaaggggaggtgccgagggagtagccgctaccccatgaatgggagaggctcgaccgcggatctccagacctggcgagcagagcatgtcgcgcagggagcagaggcgagcgccatggctgccagcggccaagagtag

SEQ ID NO: 17383 - DNA, 942 bp, Zea mays
  Peptide Sequence Number=SeqID_59162
atggcgccggcgacaggagaaggtcgaagggtgaggcgctgctgcgcatcagcgcgggcagggaggggtggccgacggggaggcggcaccactggacatgagccggggctttggcaacggctagcccgcgcgtggttggctgcaacgggacacccgtggttgcacgcccgcacgtgcacaggtcgatgggggcggggaaaggcctgccggtgccggagcacaggcgccaccgccgctggggagcgtccatgcctaggcgcagccgacggcgcagttggaggcgtcctggcagcatgtgtgcgtgcagcagcaagagaggccactagggaagttgctggcggtgggctgcagggggctgggccggcgactagagaagggagggaggccggccgccaacgaccgggacgccggcggggagggcccgatggcagggactggccctgggcagcgacggggaggggcagaggaccccccgcgtggccggaacttcccgcagagggagaggctggagacggagcccgcgtggacccgcagcaccgccagcgccttgcacggcccggcgggaaggcggacggggtgggggaaagaccgaaagagggaggcctcggcggccaggggagagtgccggcggctgggggccagaggctgacagccggctggggaaagggtggggggtgtggctgcctgcccagggagacagcagcggcggctgggaggaaggaggccgcccccgggagggaaggttgggcctcccaggggcagcaacgatggcaggcggcggctgggtgggagggagccggcggcggctgcagtggtaggagaggaggaagaaaccctaaacctaatcctctgataccatgtagaatagtgaagtgttgtattgataatagatggagtacaatatatagactcaaccctaaccctaatgagtcggcagcctaa

SEQ ID NO: 17384 - DNA, 432 bp, Zea mays
  Peptide Sequence Number=SeqID_59163
atggcccttaatcggacctggtcgcggggtataagaataagcgcgctcgcctctcctgtgactagtgcttggccatcaggaccgctagatgccgccaccatcccttctgctcggcgcaccccctctctggtccctcctcgcgtccgcggcatctctgctgcctcgccaaatctccaggttcccgatgcccctagactgccgcgagctgctccggtcgtgtgcggcctcggggagaacttgggggatcaccggaccacggcagcttggaactcgatgagttgcctcggttgttcgctgggccgtgtggatggagttggtgtgctagaatcaagaatttgtggggcggagcgcttgcaattcgtcgccggagttggcgctcagccggatacccgccctgaccgtggccagcctcgactaccacgtaagccgtag

SEQ ID NO: 17385 - DNA, 222 bp, Zea mays
  Peptide Sequence Number=SeqID_59164
atgccgaggaacccggaaccttctcaccagagtaagttgctccgccgtgaagccttgtggatcgtggtcaggatgtttggtcgcgcaaatcacgcatccggccaatcggagtttggggcgaccatcgcgccgattgcatgtctcaccggcgtgcgccgccgcatgccgcctgtgagggtgttgggggaggtgaaggattggctccggaccgttgatgcttag

SEQ ID NO: 17386 - DNA, 537 bp, Zea mays
  Peptide Sequence Number=SeqID_59165
atggcccttaatcggacttggtcgcggggtataagaataagcgcgctcgcctctcctgtgactagtgcttggccatcaggaccgctagatgccgccaccatcccttctgctcggcgcaccccctctctggtccctcctcgcgtccgcggcatctctgctgcctcgccaaatctccaggttcccgatgcccctagactgccgcgagctgctccggtcgtgtgcggcctcggggagaacttgggggatcaccggaccacggcagcttggaactcgatgagttgcctcggttgttcgctgggccgtgtggatggagttggtgtgctagaatcaagaatttgtggggcggagcgcttgcaattcgtcgccggagttggcgctcagccggatacccgccctgaccgtggccagcctcgactaccacgggcccagatcggccgaatcgcgtggctccggcgaggatccgccgtgacctcgggcggcgccgccgtcgctggcagagaattggggaaaacaccctggtcgtccgatcctcgttga

SEQ ID NO: 17387 - DNA, 432 bp, Zea mays
  Peptide Sequence Number=SeqID_59166
atgaagaaatcttccaagaaaaaaatcgccagagactggggctttgcagggaattgggcgcgcggagccggattcatgcagcggacaatcgaagtggcgaagaatctatggatttctgcaggggggcgcagtgggaaagtgtgggggctgagactggattattttggaggtgggaggagcgatgagcgaagcgtggttaatttagctctgaaagcatggattctggcgtggaggtggaggagggtggtgccgtctgccgtggtaagaggatattgtgctcctttatccacccaacaaggaaccctaaaagacactctaaaatttagagtctctgcttcagccgctatatgtagagaaatactgttcgtcctctatccgcaatcaaagcgctacgacctgacacttgtgcacgtgacgaccactgttgattga

SEQ ID NO: 17388 - DNA, 318 bp, Zea mays
  Peptide Sequence Number=SeqID_59167
atggcgaccaaagcggcttcggttttttttccgttggcgaaatgcgtggaggaagcgcgccagatgggagtccgcgcggagctgtggtctccgccgcggtcgctgcatcggttgggggaagaagcttctgcgggtgggacccagccgtcagcgaaaccagagaagagaagcaagccgacggcggggaaaaagtcggatgggatggatggtcaccatgaatatgctgatgtaattgtggacgttactccacaactcatcacactcaatcaaagaatcaaatcagacaagtatcataagaacaagcattcaaacacatag

SEQ ID NO: 17389 - DNA, 576 bp, Zea mays
  Peptide Sequence Number=SeqID_59168
atggaccagaatatataccttacgattgataataatatagtcattgggcatcgtaccctgcgcgcggagcccagcccagagcccaccgtgagctcaacgacgcccacgcccggtgccggtgcaaaccaaacgccaactccaatctccaactccaagagcgaagaaaccaatacccaaacccaaaggttcgtccgcattgtcggccagccagctcccactccactgcccgttccgttctgcgctcgtcatcgtcggggccggccgggcaagccatcagcggccgtgatggtgatggcgccggcgattctgctggcagtgctagtgctcgcggcggtggcagcggcgacggcgtcggcgttcgccgtggcgtccaacaacgcgacggtggtggccgggaagctgaacgtgcacctggtgcctcactcccacgacgacgtcgggtggctcaagaccgtcgaccagtactatgtcggctccaacaacagcatccagggcgcgtgcgtgatgaacaccctcgactccgtggtggacgcgctcgccagggatcccgcccgcaagttcgtcgtcgtcgagcag

SEQ ID NO: 17390 - DNA, 291 bp, Zea mays
  Peptide Sequence Number=SeqID_59169
atgaccgtatgtgagggagaaaggtaccgccgccacgaaagccgcgcctcgacgaaattggacaatccgggggcaaaatctatgggtaggaaactcaccggggcggcgttagggcgtactccgacggcaccaccatcacgcggagagctctgctcgccgtggctcgccgtcgggaggttgatgacaacaggtggccgttggattaaaatgaacggctgtgatcaattgctgtgtcgcgattcagctggatcgtttgggaccatggatcacaggatagagggacgagattag

SEQ ID NO: 17391 - DNA, 418 bp, Zea mays
  Peptide Sequence Number=SeqID_59170
atgggcaggggcaagaggggcaagggatggcctcgccgcgctgatggcaagcgcaagcatcctccaagtccaccctcggaggattttggtgactcggagtactcggaggaagcttcctctgagtatgatcggtcgcctgtccccgcatcccctgtggcgtcatccgaggactcggacgactccatggggctgtccacccatgccgggcttggtgggtcggatgactcagaggaggtggaagactcatccgactccgaggagtggagcggtggcgagggtgatggcggcgaggacaacggcagcagcggtgacgacgacggcaagggtggcgatgacagcgacagcgaagatggcaggggcgatggaaagggcgacgataggggcgatggcaagggcgatgatagtggcaagggcatca

SEQ ID NO: 17392 - DNA, 275 bp, Zea mays
  Peptide Sequence Number=SeqID_59171
aagagtgacaatccacagcggctcggatcctggtgcctgctgttcctccacagggcaacggaggtgatgctgacgatagcgacaactttccacgaccacctcacaggaaacgttaacaacatcaacgaaggctctgtttttgggaaaaaggaaggggtgttccaccatcggacaactatccttatagctgaggaatacttccctaccatcatttcgagcttcaagaagttcaacgactcattcatggagcaatacgagggctactccaggatgtg

SEQ ID NO: 17393 - DNA, 180 bp, Zea mays
  Peptide Sequence Number=SeqID_59172
atgccaatcaccaaggtgcaattacccaacgacgccagcaagttccacggacgcagagacgtcgagttggaggacgatgcagcgatgagggaggtcgagtcagtggcggacctacagggtaaagaaggtgtcgaggcaggtctccaggagttccaggacttcgacgagttcgaggattag

SEQ ID NO: 17394 - DNA, 429 bp, Zea mays
  Peptide Sequence Number=SeqID_59173
atgcaggaagggtgtaaagcctatctcttggatgattcagctgcttcactgttgatgaggtgtcatacatgcagtaaaggtgtgctggactttttccctgagcttccaccttgcgtggtaaacatgcagaattctggatcactgattggtctggacattaggaattcaggatcaggcgagagaagacagaagaggatcactatgatgtacgctcgttgccttgttgcggcgttgctcggctccgtgctccggctgatcgctgatggagtgacggttgttgaggcgtcggcacgtcgctgcgtccgtgcgtcgaccaagcactcaagcagacagccaccggccagacagcagatgcagatcgctgatcggcgatcgcagcatgttgtagtcgcaacgccgaatgagaaacggcggaagcggaacagatga

SEQ ID NO: 17395 - DNA, 375 bp, Zea mays
  Peptide Sequence Number=SeqID_59174
atgtccctgctcgaccgcggctggaccttgcagcctcccacaggtgcatcaccgtgccgtcgctgcccgcctgtcaccgaggctggcctggctagccgcctcagtgagccaccgagccaccccgacgtgccccgctcggctccctgcgcgcataggcctccgcaggtcacacctccatcccacgtccggtcggctgctccctattgctttgctgccgccatgaattttggagaagatgatgaggaggataatgatggtttttatgattatgattatgcttatggtttctggtattctttccatttggaaagagtaaagaaggtgtcgaggcagattctccaagagttccaggacttcaacgagttcgaggattag

SEQ ID NO: 17396 - DNA, 2604 bp, Zea mays
  Peptide Sequence Number=SeqID_59175
atgcgcgaggcctccttctcgtccgcagccgtcaagaccaccatcgagcagtcgctcccgtcgccctccgccgccgccgtcgtgtccaccccgactgtcgccgcgactacgcctgtggccccgtccccctctccgttcccgcgagtcggcccaaccaacgcctacatcaaccctcgcctcgctgccgccgcaggcgttggcggcggcagggacgacgtacgcaaggtgctcgacgtcatgctcaagccggcgcgccgcaacccggtgctggtcggcgacgccgggccagatgcggtgctgagggaggcggtacgcaggatcccgacgtctgactcccatgctctcgccggagcgaaggtcttgccgctcgaggcggacctcgccaagctcgccggcgacaaggccgccatggcggcgaggatcggggacctgggcgcgatggtccagaggatcctcgctgaccacggcgccgtggtccttgatcttggcgatctcaagtggctggtggacgggccggcggcagcagcgtcagaggggggcaaggcggtggtgtcggagatggcgcggctgctggggccgttcggaagccgtaaggtctgggccgtcggtacagccgcgtgcgccacctacctccgatgcaaggtctaccacccaaccatggaggctgattgggacctccaggccgtgcctatcgcccgcagcgcgccgctcgccggcgcagctctcaggcctggaggcattggaattctgggcaactcagtggggatgttatcgcctgctctccggcctatgccggtgacgccaacggcactccgatggccgccaggggcagggagtgaccatcctctgaaggctaagcctgctatgtgcctgctttgcaagggtagttatgaccgtgagcttgccaagctgctagcggagcagaaggaaaagccagcgtcaagtcctgaggccgctaagcctggtttgccacactggatgcagcccagcagggatcaaccgcagaccaaggagcaagagttgaagcagaatgaggctgccgaggagcttgagaagaaatggcatgagacctgcgcccgtacccacagcaaccgtactgtggcgccagctctctccctgccgttggctgccttagctccacgcccgcctgttgagcccaagctacaacctgccagcggtggtgttcccacccttaagatgaacaccaattggaaggagcccgagggtacccctacgtctgagcttcgcaagagcccgccaggcagcccggtgaagactgacctcgcgcttggtcccttggatcctgatgctaccatggagaaagaccagaaggaaaactacacagaagggctaactgccatgcaaaaggctaagatagctggaatctctgatatcgagtctttcaaaaggctcctcaaggcgctcacagagaaggtcagctggcaatctgatgctgcctcagcaattgctgctgctgtgatacaatgcagaactgctagtgggaagcggcgaaacatcgggacaaggggcgacatatggctcctgttcgttggtcctgaccaggcaggtaagaggaagatggcgaatgcgttgtctgagcagatggtaaatgctgaaccagtggttataaactttggtggcgactcccgctggggcaaggatggtaacggacggcctaatccaggtttctgggggaaaacctcgctggaccgggtcactgaggcagtccggcagaatccatgttcagtgatcgttctcgagggcatcgatcaggtggatgccgttgtgcgcggaaaaatcaaccgggcaatggatacgggccgcctgccggactcccggggccgtgaggtcagcctcggcaatgtcatcttcgttctcacaacggattggttgcctgaggaactcaggagaccgaagtttgacacaccgctccaagacgaaggaaagatgctcgaggcagcacactcggattggcagctagagctttctatcggggacaagcagcagctgaagcaccaagcggattggctgtgcaacgatgctcgcccagcgaaggtagctagagaactgtctggcgggcacggtctgtcgcttgacctcaatctagcggtaggggcgtcggacgacacagagggctcgcggaactccagtgacctctccgtggaacaagagcaggagaaagggcacgtcgcggtcaagtgttcgacgccagcccccgacagcgacctgttgaacctcgtcgacgatgccatcgtgttccggccagtcgacttcgcgccgttcaggaaggctgtcacagactgcgtatcagcgaaattcgactcggtcaccaggggcagcagctcgttcagagtcgacgaggacgccgtcgaccggatggctgccagcgtctggctcacggacgagaagctcgaggactgggccgaggaagtgctcacgcccagcatcgaacggctgtggcgcaacgtgaagcgttgcagcggccgtgctgttgtccgtctcgcagcagtcgcggtcacagcagacagggcgatgccgaggtggggtggggggcgagaaggacggctaccggggacggtgccgatcgccgttgacggcatgtag

SEQ ID NO: 17397 - DNA, 519 bp, Zea mays
  Peptide Sequence Number=SeqID_59176
atggctaacaactgcctgcacgtgttgccctggatggagaacggcgaggaaggggtccaagggtccaagggtctagtcccctttcttgggttggcttcctccttttataggccaaagagggggttggacagcgttggcttccttaaggagccacggggcgatggcctagtctcgatagatcatgagtgcgccgcaggcccaggggtttgcgggcccataaatgtgtcgcagcccgaggagttcataggctatgagtgggaggcggaccacacgcctcttatgtggctcgtcaggcgcagtcaatgcgaccggtcacttatgacgggtgcttccagggttaacgttagtggaccgtctttgggaggctttttggctttcttcgggcacccggttcccatgtacccgacaaaaatggaccctcgatcggtcggggcggtctcggttgagatccatggcattatacgcggcagagtagaggatgttgagcccactacctccgtctacgagcactttggatag

SEQ ID NO: 17398 - DNA, 441 bp, Zea mays
  Peptide Sequence Number=SeqID_59177
atggaggagatgacaatgaaagagagtcaggaggtggggactctggggctggtggagagtcaggaggtaggggacttttgtgggagatgctgggcggggacttggatctacaaaacgtttatgggcacaggacactacaagcagaaacgttacaagttgccgaaaaatgggtcttatgatctcaacgctcgttacatgtttgaatataacacggatgatgttgttgtggatgcaatatactatgcctggattcaggctataaagtcatgtgggcttcccctgagttcgacgccgttttttgaaaggaacatgggaaaccgtggaaccgagatgttccacaactacgacgacgatggacacgtgcacttggctaagagaataacagcatatcaggagcaaatggttgagcgtcatgggcaggactatgaccggaagaactaa

SEQ ID NO: 17399 - DNA, 390 bp, Zea mays
  Peptide Sequence Number=SeqID_59178
atggagaatatgcgttatgctgaggagctcgtgagggagtttctagttttcaggggtttcacaagtatcgaagagtcgacattctcgttggagcacccgtacaagggtgccactccccttggtccgtgtaagaaaagtgctctctacgagctggttcttcgccgctctgcctcctcggcagcggcggccagcagcctgcacagcggcaagatgagtacattgtctgaagaggatcagcaggttttggtgactgaggaagagtttcctgaggtgaaagtagacttccagctgctcataggcacagctaatggaggaattaaagcttggaatgctgatgcaaagagagttgtttgcgacctgagtacatctagaaactttccaaggttataa

SEQ ID NO: 17400 - DNA, 720 bp, Zea mays
  Peptide Sequence Number=SeqID_59179
atgagggaccgggaaaggggatatttcgaaagggatccttctcagcgaaggaagcgggcctcgagccctcatactgatcaggggctggcccctcgaaagggttcgacaaccgccccagagcactcgggctccaagcccactactgatcaggggttcgaaggctggcccctcggaagggttcgacagccgccccagagcactcgggctccgcacccactactgatcaggggttcgaaggctggcccctcggaagggttcgacagccgcccagagcactcgggctccgcgcccactactgatcaggggttcgaaggctggcccctcggaagggttcgacagccgcccagagcacgcagagtgagggatgactctgggtacgtccgttacatggccgaggctcgggctacgctcccgagtcacttcgccctttcactgaccgacctgacaggaaaacagcgccgctcgccccgctccgactgctgtgccacccaccagggtgagactgacaacagccgagttcagcctcgggcgcaacaggaagctccgcctcgcccgaccttaggcctcggcctcggaaggaggtctccgcctcgcccgaccccagggctcggcctcagcctcggccttgggaggaatcgcgtcctcgcccgaccccggcctcggcctcaggagaagctacgagggaacaagaccggcgtcccatctggctcgccccggtaa

SEQ ID NO: 17401 - DNA, 387 bp, Zea mays
  Peptide Sequence Number=SeqID_59180
atggaagacgacgaggcctcggcgtcgcctcccctgccgtggatgcagaacaagtcggccgcggccatcgaggcctcgtcgggcccgctttccgccgtggcctcccgcctctccgcccgctcccgtgcgctcccctcgtcccgtgacttccacttctacatcaacttaccggcattcaaatcctcagtcggcgctgtggccgccaaggccgacgcgtccctcggcgtgctcggtggggcttcgattctcccgatgcggtctgcgtcgagggagggcggtgcgtggacggcttcggggctggtggtcaggatcggggagtgggactttagcatcggatcagacggcttagatcgtagaaggataaaacgggcggctgagatcgtctaa

SEQ ID NO: 17402 - DNA, 1344 bp, Zea mays
  Peptide Sequence Number=SeqID_59181
atggaggcggccgcctccagcctctcgacgctgctttccaccttgcgcgtgaacgggccctggacgccgccgggaacctgggagtcagtcatacctgagagcggtgctgctcgcgtctctcaccttggaggacgccctcgcctgcagccgatctacgagctcgcatcggttactgatgatgctttgattcatctggccttgcatgcgctgtatggtgtcaaaacatcgttagatgagattgaggagctttcagcactgtcttcctcaaatccggctgacaggacctctaaccgtgtcccaaatgtgtggttacgttcctcgagcaccacatccatggggagtattctcaaatctttccgctcgacaggtcttgcggtcttcttcctttgcaagtttgtgcacttttatcttttccaaagtcgagaaatgaactgtgcaagtagagaagttcacgaacatgaagattctggagataaagacactaagcagcatcagccttacactctagtaaaccaagcatttgcagcagcagttaataaggtcctcgaaggctatttctgttcattgaatactttactagcatcaattaggcttaggcgttcagtgggccaatctggtatagcttccaagatttcaaatggaatgagttgtgatcccacttcagaggtcactcttctggaagtttatctacacaccgaggagttaagaaggcatgttaaatcccttggaaatatttgtttccctaagtttgcaggtcttacattgtgccaggagggtttgaatactgatgcaaatgtggagtttgagaatttcccacggggcaccgatttgctttcctatttgtatgtccatattcgtgatgctgatccagttcactatggtcttttgaagtatcttttcattcgttcctgtgagccatactttaacttcattaagtcatggatttaccgagcttctgttgatgacccttatgaggaatttctcattacacaaactgaaaataagggtgctcaaggaatctcttcagacataacagatgatttcatcctcttccccttaaaggagatatgtcatcctcttttgcgtactgggcagcagcttcaagtgctcatgaaccttctaaagtattgcaatctggctgctactgaaggagatgtttatccctctcgtaatatcattcatatggagggggttctcccgtggtttgatacaccaattgagtcttcaatgaattcatttacattttcaaaaagtgctatagaggcattaacatgcaaaagggatgctatgtacaagttgatgatggagaagctccaacattttttctctaatgttgaggtctag

SEQ ID NO: 17403 - DNA, 387 bp, Zea mays
  Peptide Sequence Number=SeqID_59182
atggcggattcaacgggaacgcggcgatctctccgagcaattcgcggcgccgcaacagacgtgactcgcctatatcgccgagccgcgggtccccctctcttccccttcccatttgcgctacacgcgacccgtgagatagagcaccgagaggcgaatttgggcgggattgaagtcgctgcggggttctgcttcctcgccggcgtccaacttctcgaggcagcaccagagggtggcgcctgggcggagggattgggtgcgggccttgggcgccgtgtagtgttccgagctggggctagcgccgccgccggggtgagcgcggcggagctgcggctggaggtgggggacgtgtggtggaccgtccgattttgtttgggcggcagagattag

SEQ ID NO: 17404 - DNA, 387 bp, Zea mays
  Peptide Sequence Number=SeqID_59183
atggcggattcaacgggaacgcggcgatctctccgagcaattcgcggcgccgcaacagacgcgactcgcctatatcgccgagccgcgggtccccctctcttccccttcccatttgcgctacacgcgacccgtgagatagagcaccgagaggcgaatttgggcgggattgaagtcgctgcggggttctgcttcctcgccggcgtccaacttctcgaggcagcaccagagggtggcgcctgggcggagggattgggtgcgggccttgggcgccgtgtagtgttccgagctggggctagcgccgccgccggggtgagcgcggcggagctgcggctggaggtgggggacgtgtggtggaccgtccgattttgtttgggcggcagagattag

SEQ ID NO: 17405 - DNA, 1017 bp, Zea mays
  Peptide Sequence Number=SeqID_59184
atggccgacgagcagagcgggcttcccctgcggaggtggaggccattcttcggcgctttcgaggcgatcgacggcgtgatcgaggcatgcggctacccgcgcgccgagtatcgtgacgtgcgtggcgagatcgtcgtgctgctccgcggcgccacggatgacggcgtggccgatcagctctgcgccgtgctcgacgacgtcatggtcgaatccctcaagacgctgctggtcgcgcccgtcccgcacgacctgctggcgtccaccgagctggcgaggaccgtcggcgccctcgggagccacgggtcgtcccggatccggagcctcgcgcgcgacgtcgtgcgcgggtggagggtagccgtcgaagcctccttcgccactgctgtagcggtgaagaagaaactcgacaatctctctgctgatcagatcccgctcccgcgcgctgccgtcgacaaggtgcacgtaccgtctgccaagatgcttcccgctgctgctgaggtacacaacaagaagccggacataccaccagcaaagatgatttccaccgccaccgccgccgaggcacataacaagaggccacacgtaccaccagcaaagacgcttgctgccgccgttgccgaggtgcacaacaagaggccacaagtaccaccagcaaagatgctttccaccgccgaggaacacaagaagcagcattatgtaccgccaacgaagacgcttccgaccacatcaattctatcgaatcaacagaagaacatgagtgagaccaagaaaccggtcgtcgctgagagcgagaagatagaggctacaaaacgcaagctacgggagagttaccaagaagctgatggagtcaagcgtcggcgcagcatccagaccattaaggaggaggaggggaagctgttagagcagaagcaatgcaagaatcatgcgtcccatcgtatggagagaggcccagtaggatgtaggactaggacctcgtcaggcgtcagtcgttctaggcctcctccttctcacgtgctttag

SEQ ID NO: 17406 - DNA, 772 bp, Zea mays
  Peptide Sequence Number=SeqID_59185
atgaacttgttgaaagttctgcagcacaacggcgggccctggctcagggcgccgacgaacagcgtgcggcgggcacaggtgctgacgaaggcgatcgacggcgtgattgaggcatgcggctacccgcgctccgagtttcgggacgtacgtggcgagatcgtcgtgctgctccgcggcgccacggatgacagcgtggccgagcagctctgtgccacgctcgacgacgtcatggtcgaatccctcaagacgctgctggtcgcgcccgtcccgcacgacctgctggcgtccacagacctggcaaggaccgtcggcgccctcggcaaccacgggtcgttccggatccggagcctcgcgcgcgacgtcgtgcgcgggtggagggtggccatcgaagcctcccgcgccactgctgtagcggtgaagaagaagctcgacagtctctatgctaataagatcccgctcccgcgcgctgccgtcgacgagaagaagatgcttcccgctgctgctgaggtacacaacaagaacccgcacgtaccaccagcaaagacgcttcctgccgccgccgccgaggtgcacagcaagaggctacaagtaccaccagcaaagatgcttcccaccgccgaggaacacaagaagcagcattatgtaccgccaacgaagacgcttccgaccgcagcaattctatcgaaccacgagaagaacatgagtgagaccaagaagtcgtccgtcgccgacaacgagaagatggtggctacaaaacgcaagctacgggagg

SEQ ID NO: 17407 - DNA, 585 bp, Zea mays
  Peptide Sequence Number=SeqID_59186
atgtctagggccgcgacgagcagtgaggccgtaggaggcgaggggcgaggcgaagaggagggggactggaatggatgcgggactgcggcgagcagcgaggcgccgaggcaggccacaccgacgttgataggccgatcggtgttgtttccatccgactttaatagtaaggaaatctccagttcttgcacccgatcgtccaccgttcgcatacgtcgcgctgcgcttgctcgcatacgccgaccctacccatccgtcggcccccgcctgtaccacggccgacgagcagagcgggcttcccctgcggaggtggaggccattcttccgcgctttcgaggcgatcgacggcttatcgaggcatgcggctacccgcgcgccgagttccgtgacgtgcatggcgagattgtcatgctgctccgcggcgccacggatgacggcgtggccaccgagcagctctgcgccgtgctcgacgatgtcatggtcgaatccctcaagacgctgctggtcgcgttcgttccgcacgacctattggcgtccaccgacctagcgaggaccgtcggcgccctcgggagccacgggtcgacctag

SEQ ID NO: 17408 - DNA, 300 bp, Zea mays
  Peptide Sequence Number=SeqID_59187
atggatttaccgcctgccaagatgcttcccgccgctgaggtacacaagaacacgcacataccatcagcaaatatgcttcccgccgctgaggtacacaacaagagaccacacgtaccaccagcaagtatgcttcccaccgccgaggaacacaagaagcagcattatataccgccaccgaagacgctcccgaccgtagcaattctatcgaaccaacagaagagcatgagtgagaccaagagaccggccgccgccgagagcgagaagatggaggctacaaaatgcaagctccgcgagggttaa

SEQ ID NO: 17409 - DNA, 1146 bp, Zea mays
  Peptide Sequence Number=SeqID_59188
atggccaacgagcagagcgggcttcccctgcggaggtggaagcctttctacagcgctttccaggcgatcgacagtgcgatcgaggcatgcggctacccgcgcgccgagtatcgtgacgtgcgtggcgagatcgtcgtgctgctccgcggcgccacggatgacggcgtggccgagcagctctgcgccgtgctcgacgacgtcatggtcgaatccctcaagacgctgctggtcgcgcccgtcccgcacgacctgctggcgtccaccgagctggcgaggaccgtcggcgccctcgggagccacgggtcgtcccggatccggagcctcgcgcgcgacgtcgtgcgcgggtggagggtagccgtcgaagcctccttcgccactgctgtagcggtgaagaagaaactcgacaatctctctgctgatcagatcccgctcccgcgcgctgccgtcgacaaggtgcacgtaccgtctgccaagatgcttcccgctgctgctgaggtacacaacaagaagccggacataccaccagcaaagatgatttccaccgccaccgccgccgaggcacataacaagaggccacacgtaccaccagcaaagacgcttgctgccgccgttgccgaggtgcacaacaagaggccacaagtaccaccagcaaagatgctttccaccgccgaggaacacaagaagcagcattatgtaccgccaacgaagacgcttccgaccacatcaattctatcgaatcaacagaagaacatgagtgagaccaagaaaccggtcgtcgccgagagcgagaagatggaggctacaaaacgcaagctacgagagagttaccaagaagctgatggagtcaagcgtcggcgcagcatccagaccattaaggaggaggggaagctgttagagcagaagcaatgcaagaatcatgcgtcccatcgtatggagagaggcccagtaggatataggactaggacctcgtcaggcatacggctatgggtggtcgacgttctcgttgttcacccctggtctgagcgtggacgtcggggtcgcggtggcttcgacacgctcgtcctcttcgtggcgttgggtgccattgtcggagctgtcaggcggttcctcaaccggaacaatgatgactatgacgacgacttctaa

SEQ ID NO: 17410 - DNA, 255 bp, Zea mays
  Peptide Sequence Number=SeqID_59189
atggagtatttggctgtttatttgcaactgtccctaactatttcactgaacgacaatacattgttccttcccgtcatatcacacacggagaaggaatcgccttacagctccaacaatggcgcccagcgccacaaagaggacgagcgtgtcgaagccaccgccgaccccgatgggcacgctcggaccgggggcgaacaaggagaacagcaaccacccgtagtcgtatccgtaggcgccgaagaactagccccgtag

SEQ ID NO: 17411 - DNA, 99 bp, Zea mays
  Peptide Sequence Number=SeqID_59190
atgggagacctcgtctcaggtcgcatgaggagggcaatctgcgggcaggttcactcaggtatccgcacgttaatccttattccattttccatcttgtga

SEQ ID NO: 17412 - DNA, 420 bp, Zea mays
  Peptide Sequence Number=SeqID_59191
atgggtcaaaaggagccaacttcttcaaggccatatgtttttgcatgtgatgaaaagaaaggcaagaagaaggctcccactccaagctcctcaagtgaagaagaggaagaagaagaatgtgatgatggtggatatgatcaaccctcaacatcatcctccaaggacgaagaaacagtccgacgcgtcggaaaggttgaggatcttctctttaacattgacaggaaaaagaaaagaaagagaggatgcttcgcatgcagggaaaagggtcactttagggacaactatccaaatatggctgaacccacaaagaggaggagcaaaggcaaggcgcttacaagtttcaaaacttgggatgactcttcaagtgaagatgaacctccaaggacacgcaaccaccgctcttcatcacactcttcatga

SEQ ID NO: 17413 - DNA, 357 bp, Zea mays
  Peptide Sequence Number=SeqID_59192
atggcgctggttgggggtgcggtggaggtgggtgatgagcgtgggttggcggtgttgagggctgctgggtggctggttgctgcggaagtagcggaagaattggaagtctcggatcgacgtgaccgtgataccaggttgtcaagggccttagagtctagggaagggggccctcggctacgtaggtcgtaccctcggtccgtcttctccggtgaggttttacccctcttccgaaggcttgagagttgtagggagaatggaggaaatgactgtgttattgcctttatcacaaaggagccagctacaaggctttatagcctacggtgtaacagaaaggggaaactaatccctctgatttag

SEQ ID NO: 17414 - DNA, 219 bp, Zea mays
  Peptide Sequence Number=SeqID_59193
atggatccagagcaccccgcgaccactttggaagatgagctgcagacctgcgcgagctggaagagaaagggagggcgcggccaaaggaacttcgcgcgcagccatggaagggagaaactcggcgcggcagagagctccggcggcgagggtgagctggaaccagggcacccgagcaggaagcggaagggagctgagggagataggcgcgcagaggaatag

SEQ ID NO: 17415 - DNA, 264 bp, Zea mays
  Peptide Sequence Number=SeqID_59194
atggcgatgctcgacggaggatgcaacaccgttgatgcaggagcagacttagacgtactcccttcagtcctccttgagcagcaggtgggcttagaggtggagtgtcgtgatgagaccaactcctgcggattcgacaataggtggggggaggaagaaggggtaagattctatggtcgtcttggggtcggcaggccacccaagacggatctaggtgacatagagtcaaataggggtggaggtggatatgctgaaagctataactag

SEQ ID NO: 17416 - DNA, 207 bp, Zea mays
  Peptide Sequence Number=SeqID_59195
atggatatactccggccactaaactactccgaccaccgtaccaagctagtcacggatgcttcggatgagtttgccggagactgccgcttcacgaccttacgccacgtgcctaggcacaagtaccgcatcaccgtgactcgcttaagccatccgatcatcgccggggagctcgccacggtgtattccacgaatcccctgcgccaatga

SEQ ID NO: 17417 - DNA, 264 bp, Zea mays
  Peptide Sequence Number=SeqID_59196
atggcccaactcaccccgcctccgcgccagtctcctgccgcccgggcctgcatgacgttgttgaccacaatcgtcactgcaaagcgccgcctcggcttcccctcaaccccgcgggggctcggagtcgaccaactgtgcaggaaggttcgctggaaggtgaagatcgagatggtgagggattttggagctcaggaggtctcagtggctccgaaattgctcgtcggagatactctccaccgcggattcgtcccctgttgcggttag

SEQ ID NO: 17418 - DNA, 267 bp, Zea mays
  Peptide Sequence Number=SeqID_59197
atggccaagactgtcctcgctgctagccttggtgagaccacatttactagtcttgcaatcttctactcttcattatatggttgccggaatgaggtttttgggcgggatttgagattttggcgtggcccagcgatggcgccgccatggctggtgaccgctccagcgactggctggcgcagtgagagggtaaggaagtgggaaaagatcctggccgtcggacagctaggcaatggcactgattttatccggtgttccggattgaagtag

SEQ ID NO: 17419 - DNA, 324 bp, Zea mays
  Peptide Sequence Number=SeqID_59198
atgccttggaactctccccccttgacggaatctctcccagggcgagttctagggttcttcgcggagaagaagaccctctacgctatcttggaccatccggccttaagcgcggaccgtccggaagcgtgcagaggaggatatgctcctgcgcccatgtcacggactgtccggccctgtgacgtggaccatccgtccctccgcaaagaacgccgccagactgtttgttccggtgttggcgctgacctaggcgccaacacacttttcggcgactgcgctggggacaaggttcacaggatgcaagaattacttggactaaggaattga

SEQ ID NO: 17420 - DNA, 120 bp, Zea mays
  Peptide Sequence Number=SeqID_59199
atgtctaaagatgaccataatgatacacttatggaagtccaacaacagttagaaggacacgctgctacaatcacacaaataaatgctacccttcaagcattgaatactactttgaatgag

SEQ ID NO: 17421 - DNA, 479 bp, Zea mays
  Peptide Sequence Number=SeqID_59200
gaattggaatcggcgccgttttaatgcaagataagcaacctattgcttattttagtgagaaattgaacggtgcacagttaaattactcgacttatgacaaagaactattggcattagttcgtgcacttcaagtatggcaacattatttgctgcctaatgagtttgtcatacatacagatcatgagtctcttaaatggttaaagggacaaggtaaagataatgtagttgcagatgctttgtctcgacgatatgctttaatgactacattgaatgctaaagtcttagggttatgcataccaaagtgttccatgagagacttattgattcatgaagcccacagtggaggtttaatgggacattttggagtggccaagacactagatatcttgcacgaacactttcattggccacatatgaagaaggatgtggaaaagatgatgctacacatgtggcagacttattctttaaagaagtggtaa

SEQ ID NO: 17422 - DNA, 498 bp, Zea mays
  Peptide Sequence Number=SeqID_59201
atggcgttggggtatctcgggatggccaccccagttttgtctctagtgtcatttcttcctgaccgagttaatccgtatgcagtcggtgccaaacagtctagtggaggcggcatagatcggctgtgcggctattcatcttcgaggggcatggtcgaggagcgccctcagaggccccttagagctgggtttggggcattcttagggacgaagagaagaggactattgggtctattgttgtcatatcgattctttgcgaccaggggtcacacttgtaggagtgatcgggaatacctctgccacacggtggcccctcttatggcaagggagctacctttgtacaagatggtcgctaacgcccctctggagcgtacacgactaggcgcgccacccccaagcgatgtggatatcgcctgttggctcagagaagccatagaggttcgtaaaggcctcgaccccttggctgatgggttctgcgacctctgccttcctaccctctaa

SEQ ID NO: 17423 - DNA, 540 bp, Zea mays
  Peptide Sequence Number=SeqID_59202
atggagtcttcggcgaagacaaggcttccactctgctctaccggtatcttttacccttcgccgtcactctacatcactctcacattgggcaccgacttccaggctctctacggggagctggatgagatgagtgacgacatcgaaaaggtgctgcaggtcaatctgcatcagttttcgatcgtgcgtcgcaagcttgagtcgcttgtggggacgtcggtaggtaagttcggctttccttatgagcagaggagagcgtgggagcgcttggctactgatctccaggcgaagaggagcgaggccgccaatgcctgcgcccacaccgaatcaatccagaaggcttacgaaagtctggctgaagtggcgaaaagagacgaagagacggtcgcccttgcccgccttgagtgcgtgaaggttaacttccgcctccatgtcctggagcaagggaaggaggttgcaaaagctcagatcatggccctggaggaggtgagcaaccgagtaaaggatgggtggggaggtgcttcatgcctctctaagaggtaa

SEQ ID NO: 17424 - DNA, 243 bp, Zea mays
  Peptide Sequence Number=SeqID_59203
atggtcgaggcttcggaacccttcggtcggaaactgacagatgccctgttcagtggcgcccctaggagggatgctcctcattatcgagcctatagcgaagttgctagaaaagaagcccaaaacacgagcatcaagctcacagggtatatgtctgctggtgttttgggaggctccaacgccttccgagtgttcgtcgtcagctcccatccggagcttggggaagtgaacgtcgagaacgtgtaa

SEQ ID NO: 17425 - DNA, 677 bp, Zea mays
  Peptide Sequence Number=SeqID_59204
atcctgggcccgcctcaataattggtgcaatttcctctggtctattggattctgagaggccaattctgcatgacacctcatttaatgtggcggcttttgaggaggctggcggttatcagaggttaggccagggcccagaaagtctttgtgctgatgcttcaggacgggcctctgtgccattttctcatgtcccgcatgtcccggatgttcctgctgataatgctgcacaagtcaggaatccctgggatattatcaaatactcactgcaagcaaaaccaccatgctttaaggtgtactctagaagaagagataccgtgcctgtgcaatcccaggaagtgagctcgccatccccgacccccttgcaagaattcagtcagcacatttctaaagccattaatggtttgctgagtcctccgccaatccccaaacgcagaaagaagaccctactaagaaatttcaggcctaggagatccaggagggtggccaagtttccacctgagctaggatccgaagcagcagcctctgtctgcaagaaattgggattctgtgatgatcatggcattatcactctggaagatgctagcaaatatgttgtcttattcaattcaccactctccagggagcacatcgctgccttggcagcgctgttcggatgggatacatctgagctcgcataa

SEQ ID NO: 17426 - DNA, 825 bp, Zea mays
  Peptide Sequence Number=SeqID_59205
atgggcatgaagaagggtgtgctgatgctggctctcgggctcgcgatggccgttacctcgtcggccgtcgtctacaaggtcggcgacgcctctgggtggacgatcctcggcaacgtcaactacaccgactggacttccaagcagaacttccgtgtcggagacaccataggcaagtgctcagacgaatgcatgtgtttttcttttgggatcgatcggtggtcagacgaagtgttggtctctttacaggagttcacgtaccccccgggcatccacaacgtgctggaggtgaacaaggccgactaccacagctgcaccaactccacgccgatcgccacgcacacctccggcgacgacaagatcgtcatcaagagccccggccaccgcttcttcatctgcggcgtgcccggccactgcgccgcgggacagaagctcagcatccgcgtcctcaagacgcgctcctctgacgccccttcccctgcgcccgccgcgcgctcagcctcggcggcgtcgcccagccccagcggcagcaccagcaccgatccgagcgggcgccggcgcctcggcgtcgccgcctgcgtcgtccacggacagcacgcccgacgcgacgaccaccaccgcgcccgcgcccgacgccaatggcgcgggggtcagtgcaggccaccgggccgtcgtcgctgccatggcactggcggcggccgcctccatggcgatgctgtactagatcaccaagcactcctcaccccaagtggccgtgagcatttgtctacatgggattcttttgttatacatgatgcctatatgtggatattttcttgttacatttaa

SEQ ID NO: 17427 - DNA, 144 bp, Zea mays
  Peptide Sequence Number=SeqID_59206
atggcgaccgcgctcaagtcgttcttgaacagccccgttggccccaagaccacccacttctggggccctgttgccaactggggcttcgtcgtcgcgggaataggccacactctaaaacagacaagaccacttcattaccagtag

SEQ ID NO: 17428 - DNA, 645 bp, Zea mays
  Peptide Sequence Number=SeqID_59207
atgccgctggggtcgaccctctcgccgggcaactcggcgacgtggacgtcgcccaacagtaccttctcgctcggcttcacggcgtccgcgtcctccccgtcgctcttcgtcgccgccatcacctacgccgacggcgtgcccgtctggtctgcgggcaacggcgccgccgttgacttggggagctcgctccgcctctcgtccaacggcgacctccagctcgtcaacggatccggggccgtgctctggtcctccaacacggtgggccagaacgtgtccgccgcggccgtccaggagagcggcaacctcgtgctcaaggacaacctcggggcagcaacgccgccacagaggagtggtcggccgtggcggaccagtgccagctacaacggcacgtcgccggtctgcgggtgcccgtcgctcaacttccagctgcgcgtcggctgcacgcgcaaggtcgagctcgccagctgccccggcaactccaccatgctcgagctcgacaacacgcagttcctcacctacccgccggagatcaccacggagcagttcttcgtcggcatcaccgcctgccgcctcaactgcctctccggcggctgctttttcgcgaatccggctcccaactttttcaataactgcgagcctgtatag

SEQ ID NO: 17429 - DNA, 1230 bp, Zea mays
  Peptide Sequence Number=SeqID_59208
atggggggtgggcccatgcaagagggagttaaacaacttcaaagcgcaaatgaagttgggacactgggtgcctcgtcggaagcaaaatgttgtggaaccaaagtgggtgttccgcaacaaccaggacgagcacggggtggtgacgagaacaaggctcgacttgtggcaaaaggttatgcccaagtcgcaggtttggatttcgaggagacttttgctcctgtggctaggctagaatcaattcgtatcttgctagcatatgccgctcaccattctttcaggttgtttcaaatggatgtgaagagcgccttcctcaacgggccaatcaaggaggaggtgtacgtggagcaaccccctggcttcgaggatgaacggtaccccgaccatgtgtgtaagctctctaaggcgctctatggacttaagcaagccccaagagcatggtatgaatgccttagagactttttaattgctaatgctttcaaggttgggaaagccgatccaactctttttacaaagacatgtgatggtgatttgtttgtgtgccaaatttatgtcgatgacataatatttggttctactaaccaaaagtcttgtgaagagtttagcagggtgatgacgcagaaattcgagatgtcgatgatgggcgagttgaactacttccttgggttccaagtgaagcaactcaaggacggcaccttcatctcccaaacgaagtacacgcaagatctgctaaagcggtttgggatgaaggacgccaagcccgcaaagactccgatggggaccgacggacacaccgacctcaacaaaggagactccgactatgctggatgtaaggtcgataggaagagtacatcggggacgtgccaattcttaggaaggtccctggtgtcatggaactctaagaaacaaacttccgttgccctatccaccgctgaggccgagtatgttgccgcaggacagtgttgcgcgcaactactttggatgaggcaaaccctcagggactttggctacaatctgagcaaagtcccactcctatgtgataatgagagtgctatccgcatggcggaaaatcctgttgaacacagccgcacaaagcacatagacatccggcatcactttttgagagaccaccagcaaaagggagatatcgaagtgtttcattctcgaaggaggattgaaagggaaaaggtggacttggaccatgaaagacttccactgcactccgatgagagg

SEQ ID NO: 17430 - DNA, 669 bp, Zea mays
  Peptide Sequence Number=SeqID_59209
atggaggatgacgaggacatatgggcaaacaccgccagcagccccagcgcgtccccaccgcagcccgtggcggcgggctcggtctccacctgcagcgccttcatctccacgcagctgagcctcaactcccgcctccacctcctctcctccgccgcggccgggggcgggtcctccccggtccgcggcggcgcctacggcgcggacggtgtccgccaccaccacatggctctcggcggtggcttccgcaatgccgcggcgtcccaggggtccttctttccgtacaacctcgccggcgccggcgccgatgtcgcgcccttcgacggcggccgcggcgtgctcgaggacgacatgtctgtcggcgccgccgcgtccggcacctgggctggcgggggcaccgaccggcggaagaagcgcatgatcaagaaccgcgagtccgccgcgcggtcccgcgcgcgcaagcaggcgtacgtccgcgagctggagacgaaggtgcagctgctgcagcaggagaacgagagcctccgcgtcaagtacgacgagctttggcgagggggaaagccagtaatttcgacgatagggaacaaaaaatggatcgaattttgggacccctttgcttttctgaaagatggaacagaaggcaaacaaatcctgactattgggaggatctaa

SEQ ID NO: 17431 - DNA, 1185 bp, Zea mays
  Peptide Sequence Number=SeqID_59210
atgatgcagccgcatctgccctccccggcgaggctgggggctcacagcctcgtcgccgtcgctcccgcccaatccggtccccttgaatcccacatcctcgccttcacacgtgctgcccccaaccctaaccacctcgcccgtcgctgctaccgcttcctggccgccgctttccgcgcgcgcaatcgctgctcccagcttatatcgtcgctcgcttccaacctcttggaactctcggcgaaccgcgccgcgtggatctcagcgtaccgaggatcgcttcccaccttcctcccatcggcgtcctccgcgccgccgctcgcaaccccgatctcctccaccaaggacgcgctctctcttgtcaccaccctgcagacgcagctcttcgaggccgtcgccgagctgcaagagaccctcgatctgcaggatgcgcgcgcgcgccttgtccgtgaggcgcgtggcaaggatgctgcgctgctagcctttgcgaagaagctgcatgaggctcaccaagtacttgaccgcctcgtcgacgactacgctgactaccgtcgcgatcccaaacgcccgcgtggcgccgctgctgctgacgatcccgagccggcgtcagagggcgacttcggcacgtccctccactccagccttaagcttgatgacatcctgacctacgcgcaccgcataagttacacaacctttgctccgccggagcatggtgctgggttgcctctccgtgttagcctgccacctgtaccacaggagaatcagatgagagcgtcgcagctgtatctgtttgctgatttggatgtaggggtacccaagaagccattggatgcgaaggacgggatcgcggcagaagtggaggttgcgccgctgtatgaggcaccacaggaggggccgtcgaggctaccaaacaccttgccacccatgttcccgaaggagctaaagccgccgccgggatggaagcctggtgatccgatcacgctaccacttgatgagatactacctggtatcaagggtgaagagcgggaggcacaggcccctgtgccgcaggcacctgtttcagtgcgaccagtggcaccaatgggaccagagacaatacaggtcaagcctgtgcagcttgattttgggagcagtagtagtgacgagtacagtagtgacgttgggagctcagaagaagatgatgaggattag

SEQ ID NO: 17432 - DNA, 1431 bp, Zea mays
  Peptide Sequence Number=SeqID_59211
atggacggcggatcctccacaccggcgagccccccaccgacggtatccgcgtcggcggcgaatatggaggagtaccggaactggaagaagaacgcggcggtgctttacgacctcgtcatctcccacccgctcgagtggccatcgctcaccgtgcagtggctcccatcggagtcctcggcccgcagccaccggctcgtcgtgggtacgcacacctccgacgaggcccccaacaacctcatggtcttggacgcggtgctaccgctcccacctcgcctcgctgcagccgtcgctgcctcgggcggcgccgtcccgttcccatccgtatccgtctcgcgcgtggcgccacaccgtggcgaggtcaaccgcgcgcgctgcatgccgcagcgtccctatacggtggccaccaaaacgtgcgtcgacgaggtgcacgtgtaccatctcggcgatgacgacggcagcgggaagagcggcgccgaagttgtgctcaaggggcatgaggcggagggttatggcttgtcatggagcccgatgaaggaggggtggctgctgagcggctcgtatgataagaagatttgcttgtgggacatctcctctgggagtggcgctcctgttctggatgcacaacaggtgtttgtggctcatgaggatctcgttgaagatgttgcttggcacctgaaggatgaacatatatttggatctgttggggatgactgtaagttgatgatgtgggacttgcgtacaaacaaaccagaacaatctattcttgcacatcgaaaggaggtcaactctttgtcattcaatccattcaatgaatggatattggctacagcatctggagacacaactatcaacctatttgacatgcgaaaactatctagaagcttgcatacttttgacagtcatgaggcggaggtgtttcaggttgaatggaatccaaatttggctactgtattagcttcatctgccgcagacaagagagtgatgatatgggatattaataggattggcgatgagcagtcagaggaagacgcagacgacggaccaccggagctgctgttcgttcatggaggccacacagacaagatatcagagctgtcgtggaatcctagcgagaaatgggccattgccagcgtgtctgaagacaacatcctgcagatatgggagatggcagaaagcatatactgtgatgacctctccatgcagtcaacagaatcggatggacagacatttgtagcagagaacgctagaacctcgacctggaaagaagtcaatcatggtgcgtgccacatcgcaatcattcgcgtcgcctggctgtcaggcaggcccccattgctcgaaaagatggaggaggaaaaggttgtccgccactggtatggtactgacgagcgctcaaggctccatcagccatatgcatgctccaagcatgattga

SEQ ID NO: 17433 - DNA, 756 bp, Zea mays
  Peptide Sequence Number=SeqID_59212
atggcggcggaagcagcggcagcggggaaggagaagatgcggacgctagtcagcagcgacttcaagaagttcgatgtggaggagtctgtggcgagggaatcgctgattatcctgaacctgatggcggactgcgacgacagtgacatcccggtcttcaacgtcaacgccaatatcctcgacaaggtcatcgcgtactgcaggaagcacgcctcggcgccgcgcgccgatggcggtgatgcggagccaagtgctgcgagtaacaaggcctcagcggacgatctcaagtcctttgatgctgagttcgtcgatgttgacctggtcaccctcttggagctcattaaggctgcagactacctggagatcaatgggctgctggacctgacctgccaggccgtcgcggacatgatcaaggggaagactccagaggagatacgcgagacattcgacatcgagaatgacttcacacctgaggaagaggctaaattcgactaccttcagcatgctcaagctcgccaaggaggccaacagttcgactaccttatcccaccgataggaatggacaagtgcagcgtgaacagcgtggacagcggcaacatacacaaggcgggcatggtgatgaacgggttgcccatcagtgtgtacacatcggagacgttgagcgcgtgcgccgtgtcgtgcacgctcaagtgggacgtggccactgtcatggagtacaaaggcctacccctgcagcaggtcgtcgactactatgtcagg

SEQ ID NO: 17434 - DNA, 747 bp, Zea mays
  Peptide Sequence Number=SeqID_59213
atgaccatgagtggccttgcagactgcagtgccggccatggctgtggagcagtgaagaatattctgcacttgtcggagcaaattccccgacagccatcagcacggcctgcgtggctgtcgctccaccgcaaagccgagcaggaggcgacgaaaccaactgagggtgcgtgtcggatggcgaggccgagggaggaggagctcgtggaggccgcgctggtcgcggcggccgcagcgctgatcgtgtcgggcgttaagaggctggtggcgccgcccgagcccgtagctccgtggtggtggcctgcgtcgctctcggtgccgtctcccgcgctgttcctgctcctcaacgtcatcatcgcgtctatcgttgtggcgtccgtgcagccgcggcggggaggagcggcagcttcggcgtcgtccgggggagccatcgacgacgaacgggaggcgcggggagacgccgcgaagaggaggaggagcaagagcaagagcaagagcaagaagcggacggcggccgaggccgccattccagatggctgctacatggcgctggtcgttacgggcgagccgatagagacggcggcggtgatggaggaggtggcggcagcagatgaggatgcggccgccgaggtgaacaaacgggctgaggagttcatctcggcgttccggcaccacctcagggtcgactccttctcgtctactacaacccggcgaagcaacgctagagcggcggcaccatgctctatctag

SEQ ID NO: 17435 - DNA, 261 bp, Zea mays
  Peptide Sequence Number=SeqID_59214
atggcttatcatctgaagtcaaagaagtgcatcggatcaacagttccacaagaagaaaacccagaaccaggaaatgccatagtagaaatgatgttcaatgataatgtgctcaaaataaatgtaaaaagatgtgtacgcttggcaatcaagctaaggaagaagtacttgtacaaggtgtgctggatcagtattgacctgaagtatggtacatgtccaagatccggcattattcaggattgcaagatgaagctgtggaattaa

SEQ ID NO: 17436 - DNA, 849 bp, Zea mays
  Peptide Sequence Number=SeqID_59215
atggaggagatcgctgccttggcctgggcgtgtcacttggatgagctgctgctggagtgcgatctcatcggcaagacaccaatggtatatctcaacaatgtcgtcaagggctctgtcgccaatgttgctgctaagcttgagattatggagccctgttgtagcgtcaaggacaggatagggtacagtatgataaatgatgctgaacagaagggcttgattactcctggaaagagtgttttagtggaagcaacaagtggaaatacaggcattggtcttgcctttattgctgcttccaaaggatataagttgatattaacaatgccttcatcaatgagcatggagagaagagtcctactcagagcttttggtgctgaacttgtccttactgatgctgcaaaagggatgaaaggggccgtagataaggctacagagattttaaataagacacccaattcttacatgcttcaacagtttgataaccctgccaaccctaaggtacattatgagaccactggcccagagatctgggaggattcaaaggggaaggtggatatactcattggcggaattggaacaggtgggacaatatctggtgctggccgtttcctcaaggagaaaaattctggaattaaggttattggtattgagccttctgaaagtaacatactctccggtggaaaacctggtccacataagattcagggaattggtgcaggatttgttccaaggaacttggatagcgatattcttgatgaagtaattgagatatcaagtgatgaagctgttgagacagcaaaacagttggctgttcaggaaggattactggacattgttttgacatatcattga

SEQ ID NO: 17437 - DNA, 1821 bp, Zea mays
  Peptide Sequence Number=SeqID_59216
atgccccaagtgaagtccagctacgatggcgccggcggggactacattaagtggatgtgcggcgccggcggccgcccgggcggcgccatggccagcctccaccgcggggtgggctcccttgttcgtgacatcagcgacccctgcctcaatccctccccagttaaggtatcaatactccatgccggtgacaatgccaatgtatctgttgctcccttgtcagtgacattggctgacacccccaaccggtgccactacaccgctttatttttccatgacactattgagacatcatgccttgtttacaatagcatttgtgctgcttatagaatcactgatcacttacaacatttattgcggcataagatacctcgcaggggaaacagaatgctgaaaccagaaagatggcacgcgtgttttgacagtgacgggaaggctatatgtttccgtaaagcccttaagttcattgtcttaggaggtgtggatccttctattcgagcggaagtttgggaatttcttattggctgctacaccttaagtactacagcggaatataggggaaaactaagagctgctcgaagggagaaatatcgttatttaattaagcaatgccagagcatgcatacaagcattggtacaggtgagcttgcatatgctgttggatcaaagctgatggatgtcaggaccttgcccaaagaaactgaaggtggagaagtcagcacaagtcagcaagctgaacatgaagtgccttgcagtttagcagaaaattcgaatttgatttatggttctggttgcacaacgcggccccataaaaggaaaatttgtagtaaatcagctgaaacagttggtttcaatcaacataatgataactctagaggttctggagattgtgatgtcattggtgaaccaaggtatgacagtgatgccttcatcgattttccttccctaactggtacaaacttggtcgcaaatggtgacggggatagcaatggagttgaagaaaatccttgcaatttcttggtctctgaacatagagtaaggccccatgatgaacacatgcacagcttccagatcaataataacatagatctcataatagagtcaaatacattctccaatgatatatttcgacctagcagtagtgactcagccatctttcactcagatgcgtacaagcatgatagatggttagacgatactggctatagtgaagaaattatagattccttgaggatatctgatgcaccagaatcagatttagttgatggaatgaaatcaaatggttcaatagctgacaaagatagagtctctgaatggctttggacactgcatcgaattgtggttgatgtggtgagaacagatagccaccttgatttctatggagaatcaaggaatatggctagaatgtctgatatacttgctgtttatgcatgggttgatccttccactggatactgtcaaggtatgagtgatctgctgtcaccttttgttgtcatatatgaggatgatgcagatgccttttggtgctttgagatgctactgagaaggatgcgtgaaaatttccagatggagggaccaacaggagttatgaagcaattgcaagcattgtggaagataatggaactgacagatgctgaattatttgaacatttttcggcaattggtgctgaaagccttcattttgcttttcggatgctgctagtcctttttcgtcgagagctgtcctttgaggaatcacttatcatgtgggagatgatgtgggctgctgattttgatgaagaagcagtcaggcatttagaagagaactgcctagaaccattgcta

SEQ ID NO: 17438 - DNA, 643 bp, Zea mays
  Peptide Sequence Number=SeqID_59217
ggctaagggcttgaccgcttgtggcagacggatagaggaattgaaggagcacgtgccagtgggcagggggagaggagaggaggaggaggaggagctcgtagcggaatcagatcagatggtgcgtcgccagagcagagaaggccggggcctgggctggcctgcgtgctgcctcggcttcctgctcaagctgctcgcgttcctccaggccttcgccgccgtctccgccctcatctacgccgcttggatcctctcccgctgggcgcgccaccaccagctccacctccgcgaccttctaagcccggacctatggttcccgtcgctcgtcatggcggcggggatcttctactgcctcctgctcctcgcgggttacttggcagctgagatcaacaccggatgctgcctctgcttcgaactgccagaggaccgcaccggcgagctccacaacttactctcctttatccacaataacctcgacctatgcaaatgggctgctcttgccatcttcgccacgcaggcactctcgcttctcctggctatgactttacgggccatgctatctgcccggaccatggactacgacagtgatgaagactttgtggttatacggaggccactcctggttgcccagcctcctgcaccttag

SEQ ID NO: 17439 - DNA, 393 bp, Zea mays
  Peptide Sequence Number=SeqID_59218
atggctgatggtatagattccctctcgagggacctagccaacaccagcattgcacctggagcaccgtcggtggcaattgcgtcaacttttctggaaccaccctccggtatgggaagcaccagttccccacgttattggttcctgtatgcacgcgatgaaatgctttccgagagctcagagggttatagcgctcgtgacgagggctatgacccaacccgagaatgcctccatatcgactcagatatccccgacgaaagagatcacctcggcatgccactggaagatgaccagcctccaccacgcgttcgagaagcaaatggaaccgagcggggcccagacccctcttgggagccacgtggctcatctcgagcaactctgggagctacacgataa

SEQ ID NO: 17440 - DNA, 276 bp, Zea mays
  Peptide Sequence Number=SeqID_59219
atggtgatgttctcggttacctcggaagatgaacggacgaagagaaattccttgccggagttgtcgctagagtttgggcgggagtcaaactttgacaagctggtcatagcggcttatggctgcgagcttaactggtggccgactattgtagcttggatgacgatggtgctgctgcgaggctttggaggagatgagtctatgattgatggcttgaggtgttctagtgacatgtatttatataggctgggagatttagttatcccaattcaaatctga

SEQ ID NO: 17441 - DNA, 300 bp, Zea mays
  Peptide Sequence Number=SeqID_59220
atggctgagagggagtgcttcgatgctgctgacaccgctatcgccatgcgctgggttacaggtgtaccggaggcgcatgctgcggctgggtcaacgcactgcgcaatcaagggtaatgaccttatcctcgtattcctcatcttctttgctctgtgtggctatgtcgaattggggagggatcaccagagcaggtggattgggatcgcctgggagggcaccactgtcgaagcaagcgccgtcgtggtcagctcggtagaggaagaagagccgataaccgttggatgggaaaaggacgtctag

SEQ ID NO: 17442 - DNA, 450 bp, Zea mays
  Peptide Sequence Number=SeqID_59221
atggctgtgcgggaggtcttcgggggagcagaaaggcaccacgactccggcaattgctcgtcggagtaccttcaaccacaccggaccgccaagcgctgtggtcgacctccttcgaccccatctccgcgatggccgtcgtgggctccttgccacgcagagagggagtgcttcgatgccgctgacaccgctatcgccatgcgctgggttacaggtgtaccggaggcgcatgctgcggctgggtcaacgcactgcgcaatcaagggtaatgaccttatcctcgtattcctcatcttatttgctctgtgtggctatgtcgaattggggagggatcaccagagcaggtggattgggatcgcctgggagggcgccactgtcgaagcaagcgccgccgtggtcagctcggtagaggaagaagagccgataaccgttggatgggaaaaggacgtctag

SEQ ID NO: 17443 - DNA, 750 bp, Zea mays
  Peptide Sequence Number=SeqID_59222
atggcggcggcgaacctgctgtcgcgctcccttctccccaccccaaacactatccgaacgagccaccccaccccgcggagcccagccgtcgtctccttcccccgccgccgtgcccgcctgtccgtgtgcgcctccgtctccatggcctccccgtccccaccgccacagcccgcggcggccggcgtgccgaagcactgcttccggcgcggcgccgacggctacctgtactgcgagggagtgagggtggaagacgcgatggcggctgccgagcgcagccccttctatctctacagcaagcttcagatcctccgcaacttcgccgcttaccgcgacgctctccaggggctccgctccatcgtcgggtatgccgtgaaggccaacaataacctccccgtgctacgcgtcctgcgtgagcttggctgcggcgccgtcctcgtcagcggcaacgagctccgactcgccctccaggcgggattcgaccccgccagccgccccactcccaactccctcctcccagccacatctccctctctccctgctggctccctctctcctgtgccggtcgctgctggagcctttggggccgtcgccgctctgctgctggaggagctgcgtcacacgctctgctgctggaggagctgcaccacgcgctctgctgctggaagagcccccgtgccactgctggaggagccgctgcaccactgttggagccgccgctggcctctcccactcgccttaggtgcggcgtaa

SEQ ID NO: 17444 - DNA, 981 bp, Zea mays
  Peptide Sequence Number=SeqID_59223
atggcgacgggcaatgttgctggcggtggggatacaaccccatcacacccgccacgacgacgacttgcaatggggcagatccggttgggaaggtggacagaggccgctgacggggccttgatggcgagttccgatctggatcttcggctacgaaacatacccccaacagaaggttctcttagatacaagattggtcctcttaggtgttggcctggaggtttgtgcctatctaggtcaataggagatcaagatgttggtgaatttattgttccagttcctcttgtgaagcaagtaaagctgtctactgcgggaggccgacttattattgcaagtgatggtgtttgggatgcattatctccagaagtagcttttaactgttcacgtgaacttcctccagtgcctgcagctgagcaaatcgttaaaactgctgtgcaatcaaaaggactgagggatgataccacctgtattgttgttgatataatagcagagaaaaccaacccttccatgccacttcctagaaggcaaccgggaattggtgtcttcaaaaatatgtttggcaagaaaaaatcatcggattcatcatcacattcccatgcagatagagaatatatggatccagatatcttggaggaaatatttgaggatgggctggattctgaataccctgttcgaaatatgttcaaactcttcatatgtgccgtttgtcaaatagagttaaagccaaaccaagggatatctgtacatgaagattcatcagaacctgggagcttgcgtcgctgggatggtccattcctttgccagagctgtcaggaaaagaaagaagcaatggagggaaagcgtcgttcacgagaggtggctgctgcttatagctctcatcccaagcgaggagcatgtcttgtcctcagcaaggttcttgctgaggaatgtaggcagctctgctcagcccttgaccttgatggcacatacaggtttaaagattaa

SEQ ID NO: 17445 - DNA, 3127 bp, Zea mays
  Peptide Sequence Number=SeqID_59224
gtcttcaccgaccccatcaggcgcgggcatgcggggtcctgcacgcacggattcttgcggcctcggcctgcccctccggggtcgcctcggcgacgcgctcgtcgacctgtacggcaggtccggccgcgtgggctacgcctggcgcgcgctggcctgctgcaccggggctccagcgtcaagcgcggcggcgagctcggtgctgtcctgccacgctcggtcagggtcccctcgggatgttctcgatgcgttccagcgtatcaggtgttccattggtagcacgccggaccagtttggcattgcggtggttctgtccgcgtgttcgcggctgggtgccctcgagcacggcaggcaggtgcattgtgacgtgctgaagagcaggttctgctcgagtgtcttctgtcaggcgggtctggtggacatgtatgccaaatgcggcgaggtcgacgatgcaaggaggatgtttgatgggattgcttgccctgacacaatatgctggacaagcatgattgcgggctaccatcgggttggacgctaccagcaagcgctagctttgttttccaggatggagaagatgggttctgtcccagaccaggtaacgtgtgttaccatcatttccactcttgcaagcatgggcagattgggcgacgctagaactctactgaagaggatacggatgacgagcacggttgcttggaatgctgtcatcgcaagttactcacaaagtggtcttgacagtgaagtgtttggcctatataaggatatgaagaaacagggattgatgccaactaggtccacttttgcgagcattctaagtgcagcagccaacatgacagcgtttgatgaaggtcggcagatacatgcaacggcagtaaagcatggcttagatgcaaatgtttttgtgggcagttcactcatcaacctgtatgtgaaacatggctgcatctctgatgcaaagaaggtgtttgacttctccactgaaaagaacattgtgatgtggaatgctatcctttatgggtttgttcaaaatgagctccaagaagagaccattcagatgtttcagtatatgaggagagctgatcttgaggctgatgattttacatttgtgagtgtccttggcgcgtgcattaacttgtattcacttgatttaggtaggcaggtacactgtataacaatcaagaacggcatggatgcagacttgtttgttgctaatgcaatgctagatatgtactcaaaacttggagcaattgacgttgcaaaagcactattcagtctcattccagttaaggatagcgtatcctggaatgctcttatagttggacttgcacataatgaagaggagggagaagctatcaatatgcttaaaaggatgaagttctatggtatagcactagatgaggtttcttttgcaactgcaattaatgcctgttccaacatttgggctattgagactggaaagcagattcattccgcatctatcaagtacaatgtctgctcaaaccatgctgttggcagctctctgattgacctgtattcaaagtttggagatgtagaatcttctaggaaggttttggcacatgtagacgcaagcagcatagttccaataaatgcgctaattacaggtcttgtgcagaacaatagagaagatgaagccatagagttatttcagcaagtgctaaaagatggtttcaagccgtctaacttcacatttacaagcattctttcggggtgtactagacctgtcagttcagtaattggtaaacaagtccattgttacacactgaaatctgctattttgaatcaggatacttcacttggcatctctctggttggaatatatttgaagtgcaaattgcttgaggatgcaaacaaactcttagaggaggtgccagatcacaaaaacctggttgagtggacagctactatttcagggtatgctcaaaatggttacagtgttcaatctttggtgatgttttggagaatgcgcagttatgatgttcgttcagatgaggccacattcactagtgttctgaaagcttgttctgagatggcagctcttacagatggaaaagagatacatggcctcattgtaaaatctggttttgtttcctatgaaactgcaaccagtgccctcatggacatgtactccaagtgtggggatgttatttcttcctttgaaatcttcaaggaattgaaaaacaggcaaaatataatgccatggaactccatgattgttggttttgcgaaaaatggttatgcaaatgaggcacttcttctcttccagaagatgcaagaatcacaaataaagcctgatgatgtcacactccttggtgttctgattgcttgtagccatgctggtttaatttccgaaggcttacatttcttcgattctatgagccaagtttatggtatagtacccagagtagatcactatgcatgtctcatcgatctacttgggcgtggtggtcaccttcaaaaggctcaagaagttattgaccagttaccattcagagctgatggtgtgatctgggctacataccttgcagcatgtcaaatgcacaaggatgaagagagagggaaagttgcagcaaagaaacttgttgagatggaaccacaaagctcatccacgcttgctcagcagggatttggtcggtcgcttcgcctcataggcttgctcggcaaaggacctggtcatccgctccgcctcacaggcttgctcggcaaaggacctggtcgtccgctcctcggcgcagggttgctcgacaaatgggccggaaggaggtcatgggtctacttcggtgcaggaatccctcgcctgaccgccatcgcagcaaaatcaacccaaggacctccttacactgaccactcccctactgcccttgcccctttcggttaccaggatgattcttcaaatcctcgtgacttcactgctagtcgtagcaatacaagcaaacatgggaacaacattgtggcgagggaggtggttctcaccgagggagaaggcgggttcgaggacggcccacggcgcgagcgacactacggcggcaagaaggtcgacgacgagaaatttcgaagccccgagcctccaatccagtccaggaagcccaaggagaccctccccgcatcttga

SEQ ID NO: 17446 - DNA, 483 bp, Zea mays
  Peptide Sequence Number=SeqID_59225
atgggtacggtcacgaggtgctgcgtgggcgacgaagctccggcggggaactcggatggtgagcacgaactccggcgaggctccacggactctgacgacgacgtgcggatgcggacggggcgctcggctgctggcgcggtcgactcgggcttccactcgtgtgcaggggcgcggcaggagcggcgtggtcgtgtgaccggatcgcgcgtccacggggccggggtcgggcgtccatggcggtgcggcttggatgcagggcgctgctccggcgtcctggtgctgggttcctgtgttggctgcgcaagagagaaggagagaacagaggagaagagcggcggctgggagcaggatgtccagggcacggcgacggcttggcctggcagctgcgcgtggaagagcaaggaagaagagagagagtggatggcggctgggagagggaaccaggggagcgacgctaggttaggatgggggcggctgctctaa

SEQ ID NO: 17447 - DNA, 711 bp, Zea mays
  Peptide Sequence Number=SeqID_59226
atgggtacggtcacgaggtgctgcgtgggcgacgaagctccggcggggaactcggatgtgggcgagcaaggagcacgagagagaaagggagcttgggaggaagagagctcgtgcgtcggtttttatagggaggaagagggagagggagagctggggagggggagaaacggcgaccaaagtcttcaaggcaccattgatggcgtgcatcaatggaggggagagtggggatggggtaaaggccgagttgatgctccattaactcaaggagacaaacggacgggagctcggtgcgggcacaggctcggggtcgcgcggtcgctgcgcagtgctcgggtcgcctggatgcgtggctgcgcgggtgggcgtcggtttgcggctcggcagcaaggttgctctgctcggtctccaggggcgcggcaggagcggcgtggtcgtgtgaccggatcgcgcgtccacggggccggggtcgggcgtccatggcggtgcggcttggatgcagggcgctgctccggcgtcctggtgctgggttcctgtgttggctgcgcaagagagaaggagagaacagaggagaagagcggcggctgggagcaggatgtccagggcacggcgacggcttggcctggcagctgcgcgtggaagagcgaggaaggagagaggaggagagagagagtggatggcggctgggagagggaaccaggggagcgacgctag

SEQ ID NO: 17448 - DNA, 324 bp, Zea mays
  Peptide Sequence Number=SeqID_59227
atggagtcatcacggcagccagaccatggttcgtcggtggcggccattctctccctcgatctctcctctactggattgacggcgctctgctgcacacgatggactcggtgcttcctctatggtcaaggggacgaggacaccgtggtggtggcgggggaatggagtccgcgcacgcagaggctgatgttcgcagcgagtttcgtggcgttctgttgcgagtttgttgcgaggcgcgcgactacaggatctctggccatcgcggagctgccgcaacggcgtggagaggatgactccgtcgcctcggccccacatgcaagagactag

SEQ ID NO: 17449 - DNA, 465 bp, Zea mays
  Peptide Sequence Number=SeqID_59228
atggataacgaagaactcaaagacgtgggcatgaagtatttacaaccaactctcgcgcatgtagaagacaagaggttgcacactttacccacgagtcgtgatctctttttgcctcgggtcgatcaaaccctcaaacactaccaagacaacccagaggccccaccagtcagagctccaacggtcagaacccaacgccccgctgacgtggctggcgcaccggactgtccggtgcgccatgcgacagacagcctcccaacgaccacttttggtggttgggaggctgcatgcagcaaggagaccagcctcagcaacgtagagatagctgttagagttcatgatcctggggctccggataggtatgatgctcctcacaggacagtctacatgcagatgttcattcttctttggagttcacttcatcttagaatgcatacatttcaggtgtcgcgttacgtcatggcttga

SEQ ID NO: 17450 - DNA, 1194 bp, Zea mays
  Peptide Sequence Number=SeqID_59229
atggagctctcgctcctcaaccccgccgcgacgcaccgccaccgcggcggcctcgccggcctgcccctcgcgcggcgctccgtggtccgctttcgcgtgtccgcctccgccgcggccgcggcgccgcccaagtcctcaggccccaagaagcggggcaagacggagatccaggagacgctgctcacgccccggttctacaccacggacttcgacgagatggagcgcctcttcaacgccgagatcaacaagcagctcaaccaggcggagttcgacgccctgctacaggagttcaagacggactacaaccagacccacttcgtgcgcaaccccgagttcaaggccgccgccgacaggatggagggcccgctccgcccagatcttcgtcgagttcctcgagcgctcctgcaccgccgagttctccggcttcctcctctacaaggagctcggccgcaggctcaaggttccttcctgctcctttcttcgtgcatttcctcgaccgcctggttcttgaacaaggggctgtctgacttcaacttggcgctggacctggggttcctgaccaaggctaggaagtacaccttcttcaagcccaagttcatcttctacgccacctacctgtccgagaagatcgggtactggaggtacatcaccatcttcaggcacctcaaggcgaacccggagtaccaggtgtaccccatcttcaagtacttcgagaactggtgccaggacgagaacaggcacggcgacttcttctctgccctgctcaaggctcagccgcagttcctcaatgactggaaggccaagctctggtcacggttcttctgcctctcggtgtatgtgaccatgtacctgaatgactgccaacgcactgcattctatgagggaattggtctggacaccaaagaattcgacatgcatgtgatcatcgagaccaaccgcacaacggcgaggatcttccctgctgtcctagacgtcgagaacccagagttcaagaggaagcttgacaggatggttgagatcaaccagaagatcattgccgtcggagagtccgacgaaatccccctagtgaagaacctgaagaggattcctcttgtcgcctctctggtgtccgagatcatcgccgcctacctcatgccccccatcgagtctggctcggttgatttcgccgaatttgagccccggctcgtttactga

SEQ ID NO: 17451 - DNA, 771 bp, Zea mays
  Peptide Sequence Number=SeqID_59230
atggccactctggcgacggccgcggcggcgtggacaagggaggaggacaaggcgttcgagaacgcggtcgcggccgccgcggcgcccccggacgacgggccgccggatgatgggtggttcacggcgctcgtggccagtgtgccggcgcggacggcggaggaggtgcggcggcactacgaggcgctggtggaggacgtggccgctatcgaggccggccgcatcccgctcccgcgctatgctggagaggagtcgtccgccgcgacgcccgagggctccggatccgccgcctccgcgcccaaggacgctggaggaggaggaggaggcggtgggcaccgacgcgaagaacggaagagcggcgtcggcgttgacgtggggaagagtagctctaaggctgagcaggagcggcggaagggcatcccgtggacggaagaggagcacaggttcctagcagatctccacgtgttctcgccttcaaaagcttacacctttttggtgggtgcaggttgttcttgctgggtctggacaagttcggcaagggcgactgccggagcatctcgcgcaattcgtcatctcacggacgccgacgcaggtggcgagcacgcgcagaaatacttcatccgtctcaactccatgaacgggccgggccgtccagcctccccgacattccaggtgaccggcgaaatgccgccgcgcacccatcacggcggccaacacgggggaggatacgatggtcccggcatgaactgcgtcaccacctgctgcgcgatgcat

SEQ ID NO: 17452 - DNA, 99 bp, Zea mays
  Peptide Sequence Number=SeqID_59231
atggcgttggagttcgccatcatcgtggtttctcgtcgtccggccaaccggagtcccctcgcgtcgtgccaagctaccccgtgcgccgtctctgggtaa

SEQ ID NO: 17453 - DNA, 1626 bp, Zea mays
  Peptide Sequence Number=SeqID_59232
atgctcctccacctgcttccgctctcctgccccgcgccgccgttccacctgcgcaggacccggcggctcgccgcggacgccgcgggtccggggccggcgacaggaccaggacacgggggttcccgggggacggacgtggagcccggagacagctccgcgaaggcgccgcggccgcgatggcgacgatcctcaagcggctgggagcggaggcttctgctctccgaggcgcctgcggcggcggagggagacagtgaggaggaggagcagggacagttccccaagcgttgggccatcgtcttcctctgcttctccgcatttctactctgcaacatggaccgcgtaaatatgagcattgctattctgcctatgtccgcagagtttggttggaacccacagactgttggtctcatccagtcatctttcttctggggctacctcctaactcagatagctggagggatatgggcagatactgttggaggaaagactgtccttggttttggtgtggtttggtggtccatagctacagctcttactcctgttgcagcacatcttggcttgccatttcttcttgttgtgcgggctttcatgggaattggtgagggggttgcaatgcctgcaatgaacaatattctttcgaaatgggttcctgtatcagagaggagcagatcattgtctcttgtgtacagtggaatgtaccttgggtcagttacaggacttgcattttcccccttgctgatacataagttcggttggccatcagtcttcttttcatttggatccctagggcttgtttggttcacgacatgggcaaccaaggcatatagttccccacttgaagatcctggaatcagcgctgcagaaaagaagcttattgctagtcagagcacagcaggcgaacctgttaaaacaattccatggagattaatactatcaaaaccacctgtttgggcacttatagtttctcatttctgccataactggggaactttcattttgctcacatggatgcccacatactacaatcaggttctgaaattcaacctcatggaatctggccttatctgtgttcttccctggttcaccatggcggtttctgcaaatgttggtggttggattgcagacacacttgtcagcagaggagtatctgtgacaactgttcgtaagatcatgcaatcaatcggattcttggggccagcattttttcttactcaactaagccatgttaattcgcctgccatggcggtgttgtgcatggcttgtagccagggaactgatgcattttcgcagtctggtctatactcaaaccatcaagatataggccctcgatatgcaggtgtactgcttggtctttccaacacggctggggtcttagcgggtgtatttggcacagcagcaacaggatacatcttgcagcatggttcttgggacaacgtattcgagttatcagtagtgctttatctggtagggactttgagacgatttgaagcatatggaattatggatgagttgagcgatgcacccgttccgagcatgccactgtatattgtgttgagcataggtatcatgtacagcatgcccgacgtagataaaaacaaggaaacctggggatgggggtactactaa

SEQ ID NO: 17454 - DNA, 285 bp, Zea mays
  Peptide Sequence Number=SeqID_59233
atggggaagaagcagagagtggcgaatggaagaggaagaacagagatacgacaggtgtttatatacgtcgactgcttcctctcgttcttacttgggctaccattcgattacaaggccggatcacttgacccactgtggcccaattactctggagtttggcttcctttggcgcttcagcatttccggtctcccgccatgctttttctcctcagcacttcactttttggcgtccacagcatgcctcctctggttgctgctaacattttcctccatggttacggttga

SEQ ID NO: 17455 - DNA, 759 bp, Zea mays
  Peptide Sequence Number=SeqID_59234
atggcgccccgcacgctctgtgacgacggcggctctcagcccccttacggaagcaagaggacgtcagcaaggactcgacagctccgacagctgtccttccgccaagctccagcgctcctccgacggccacgacaccacacgaaccgggtgccaaaacctcttcggctgccacgatggcatggtggtaccatcatactttctggtcctggtggtccagctgttacaccacaaacctcagagctgaaaacacttgatctcttgaattgtgtagactgtagagtgaaggtccttacaccaaatgttcctgatattgtggttgctccacctgatgatgatgagcacacatattatgtttggaggctatactcatttgctcagattgttgaggttcttacagaatccttgacactcaaggagacctggactccaacaaaggttgctcggcttatgcaacaaaggattaccgctgaagctctgaagactcttctaaacattcccttattattgctaactccaacgcattcttctctgcagacagaagttgaagacagattgaaatttctgtcatgcagtaccgtgaatctcttgaggagcagggtctgcgaaactcggatgagattgagaggaaggttgccagtcatcgaaggcgtcttcagtcagtcagagtatggtttatccacttcaactgatggcgtgctaacagcaggcggtcttctggtgtgtaagaaggcccagcaggaaggacacctgcgtatttga

SEQ ID NO: 17456 - DNA, 162 bp, Zea mays
  Peptide Sequence Number=SeqID_59235
atggcggcggttgcccaagagcgtgcgcgacggcggacccccggccggtggctacggtggctgcggttccccgacccggatgcgcggtgggcgaggttccgagttggaccgatattaggttttttatcaattatgctacacggttataaaggaaaaatataa

SEQ ID NO: 17457 - DNA, 1896 bp, Zea mays
  Peptide Sequence Number=SeqID_59236
atggagatcttccaactccagctgatgatcctgccttcgctactcacatgcttcttctccacactcctactcacacagctgatggctgcggcgggggcggaggcgacggtgaaagtgagcactaccccaatcttccctgagatcccactgggccaggctagaaaggacttccaagtgctgctgcgcgtcgaggcgccggcggcggttgtgcgtcccgaggcgcgcgtccccatcgacgtcgtcgccgtccttgatgtcagcggtagcatgaatgacccaactgcagtgccaccggagaggaggacgacaacgtcgaggctggacctgctgaggacggccgccaagttcatggttgacaaactcgaagatggagaccgcctctccatcgtagcgttcagcgaccgacccgttagagaacttagctccggcttgctatacatgaccgccgacggcaggagaaacgcaataagaagcgtggatcggctcgaggcccgcgccggcagcggcactgcccttgtcccggccttcgaggaggcggtgaacatcctggacgagcgggtgggagacggccgggaccgcctagggttcatcatcctcctcaccgacggcgagggcacgaccgtgtccgcgctgagcgagcggcgccgagaggtgatccgacgcgctctcggcaggtaccccgtccacgccttcggcctcggcgcggcgcacgatcccgaggtcctgctccacatggcccaagagtctcacggcacctactccttcgtcgacgacgacagcatcggcgatgtcgccggcgccctcgccgtgtgcctcggcgggctcagcaccatcgctgccgtcgagacgcgcgtcgtcctcaaggccgacgagctgaacggggtgcgcatcgaccgcgtcgacgccggtggctacgacagcagcgtcagctgcggcggaacctcgtgcgaggtctccgtgggcaacgtcctgtacgccggcgaggcgaagcatttcgtggtccacctgcacgtgccagctgctttgccatcgtcgtcagcaaagggcggttactactgcgatggcctcggcgcctgtgaccgttactaccatcatcgccacgagcagcacctgctcgccgtcgactactcgtaccgcaaccatcccagcgcgcgggcgatagagggagaaggacacgatgtatatgtgcggaggtcaccggcggtgctagacggcgggcggcaagctcccgctcctgttccctcgcccgtggtcctgcagcacatcgtccggtccgagctgctggaggtggtggccggcgtcgtccaaggtgagctgaccatcaacgacagagctcgtgccgcagacgtgttgcagctcaggtgggaggagttcgcagcgtgccaccagttctggggcggcggccatgacctgatgagcggcctggagaaggaggtgggaggcatggtgagcagcctcagggccggggtggcggcctacgcctacgcctgggtgtccagccaccagatgcagcgcgccaccagcatgggctcggccgagaaggtgaccgtcgagttcctgacgccggcgatgcggctcctattggaggaggcgcggaagttgccgcggtggtggaactggaaccccccgcacacgggctgcgtcgaccacggcttcgagatgatagaccggaggctggagctgtggtccaagatgaagcgcgacatgcagaacctcgggtcgttccaggagcaatcggcggcggcggtggacgacgagcagcagcgcatggccgccgtcttccaggaggcgtcgctggaggccatcgaccgcgcgatgcaccgcgacatttacctggctgtggtttatgcgagcaagcagaggcaatgccgccacttggtggctgcacagaactga

SEQ ID NO: 17458 - DNA, 270 bp, Zea mays
  Peptide Sequence Number=SeqID_59237
atggcatctctcccggggcgagttgtagggttcttcgcggagaagaagaccctctgcgctatcgtggaccattcgacactaggcgcggaccgtccggaagtgtgcaaaggaggatccactcctgcgccaggtcgcggaccgtctggtcctatgccgcagatcgtccacgcctccgcagagagctccgccaggcggttcgttcccgtgtttggcacatggatcggtgccaacacactttttggcgactccgctgggaacaagggtgtctag

SEQ ID NO: 17459 - DNA, 327 bp, Zea mays
  Peptide Sequence Number=SeqID_59238
atgccatgccacctcatgaacacagggctgaatattcttcggccaccaaagagcctaagagatgtagagcaggaggtggtggcattaataggacacatagcacacatctcggacatccctgagaggaaagctgacagaatgatgtcaggcaacttgagatttccacacacaaacttaatggagggctgccagacatggtggaaagaattagggatgaggaaatttgcaccatgctcactttacctcatcccgaaagccagggatttgaatccaataattcttgaagcgaaatggtcgagggcagcatggtcccacaaggctagatag

SEQ ID NO: 17460 - DNA, 1917 bp, Zea mays
  Peptide Sequence Number=SeqID_59239
atgacgatgaacgtcgtcgttgccggcgtcctgctcctcgtgctcggcggcctcaacaacccaccctcggtggccgccgatttctgcgacaatcttaaacaggtcgccgccactctcccaaagaacacctccacttcccccttgcacttcgccaccgccaccttcggccaagcgcccgacgtcgtgtacgcgctagcgctctgccgcggcgacgtcctcgacgacaccacctgcggcgactgcgtcgctaacacgttcgacaaggtgaaaccgccgccgccgcaggtctgctacccggccgcctactactacggcggggcctgcaggctcgtctactccggcgacaacatcctcgcgccccccaataccacggcagcgaacggcgatgacacgccgtacccgctatggaacatcaagaatatcactgccgccgacgccgacgacgtgcgcctcatcgtccgcctcgtccacgagctggtggtggagacggtacagctcgcggccagcacggcgccaaggcggttcgccacgggcgtcatggacagcggcgcgatgtttcccaaggtgtactcgctggcgcagtgcacgccggacctgtccgccgccggctgcctggcgtgcctccagcgtctcctgggcatggtcaactccaccatggccctgcgcatgggagcacagatccatgtcatccggtgttatttcaggtacgaggcgtatgcgttctacgacagcaagcccatgctgcaagttgggccgtcggcgccggcgccggcgccatctccgaacccggtggaacacaagaggcgtagcagcaagctgtgggtaattccggtagttgtggttcctctagcggcagtagcatttctctgcttcatcttctactccccttgcttcagaaggtacaggagaggcaaagcaatgaggttacaagcaggatcaaggcgtactcagggcttgcacggagacgaagaactagtctgggatgggaagaattcagacttctccgtgttccactttgaacaggtactggaggccacagatagtttttcagaagaaaacaaacttgggcatggtggatttggtgctgtctacaagggccagtttgctgatggattgcagatagcagtcaaaagacttgcttcacattcagggcaaggtttcacagagttcaagaatgaagtccaactcatagccaaactccaacacaggaatctggttaggctcttgggatgctgctctcaagaagaagagaagatattggtctacgaatacttgccaaacaaaagcttagacttctttatatttgatgaaagtagaagagctatgctagattggtccaaacttctagtgataatcgaaggaatagcacatggacttctttacctacataagcactcccggttgcgcgtcatacaccgagatcttaagccaagtaacatcctcttggacagtgagatgaaaccaaaaatctctgattttgggcttgcaaaaatattcagttcaaataacaccgaacggaacactacacaaagagtggtcggcacatatggatatatggctccggagtatgcttccgagggcatcttctcgatcaaatcagacgtcttcagctttggtgttcttgttcttgagatcctcagcgggaaacggaactctggcagcgaccagtgtggggattttatcaatctcattggatatgcatggcaactgtgggatgaggagaggtggattgacatcgtggatgcatcactggtaaacaagagccagtcctcagaaatgatgcggtgcgtcaacattgcactactgtgtgtgcaagagaacgcagctgatcgaccaaccatggcagatgtggtcgccatgctaagcactgagacgaccacagtcctggctgaacctaagaagccagcatatttcaat

SEQ ID NO: 17461 - DNA, 543 bp, Zea mays
  Peptide Sequence Number=SeqID_59240
atggaggcgaggatgatggcggagcgggaggcggagcgggcggctcgtctggcagatcagcagaggatggcggagatgttccaatacatgcagagccttggcgccacacaggcaaagtcccaattcatcggcatcgggatacattctctgccgcgtgtgctcgccctggcactcggcaaaaaggcacgctttgccgagtgccatacagagcactcgacaaagaacctgacaaagggacccgttgacggattctttgccgagtgctgggacgtcgtctaccggccagcactcggcaaagaggcactcggcaaagcgcccgattcccgtagtgagcgaggttgccaccctgcctatcgaggggtcactagcgcatgcgacgtggcagtcgggaggagcgggatacaaggtagaggaagcgaggtcggtgtttggagaagtcgtctacccgagacagccaaggccggggtcccctgtacgtcggccatgatgaaggaggacactgctaggatggaggggacgatctcagatcgccaggacccaaaa

SEQ ID NO: 17462 - DNA, 1275 bp, Zea mays
  Peptide Sequence Number=SeqID_59241
atggctctttcagctactgctgctgaaactcaaaataataaactagctactcacatgaatcaattgactgttagcttacaagattctagttcaccattgaagaaattgcgtcaaaatgtggaagctttatccagctcaagtgcagtttggtcaagaagtgctggagctccattatattgggctgaggtatactgtggtgggcaagcatcaacaggaagatgggtacatgttgatgttgtgaataatctcattgatgctgaacagaatgtagaagcttcttctgccgtttgcaagaagcctttaagatatgttattgcttttgctggaaatggagccaaggattggcacagaattgcacaaggcagagtgaattcagagtggtgggataatgttttggcgccactaaaacagatggaactggcagcaacaaacaactatgaagacatggaacttcaaaccagagccctaacagagcctcttcctaccagtcaacaggcctataaggaccatcacctttatgctctcgagaagtggcttcacaagaaccaaatttttcatcccaaaggtccagttctcggtttctgtaaaggacatcctgtttatccaagatcctgtgttcaaacactgcagtcaagacatggatggttgcgggagggcctgcaagtccgagaaaacgagttgcctgcaaaggtggttacacgtccaaagaggactttcaatgcccagtcagttcaatcaagtggcaacgaagatggtctaaaaccaaccttggaactatatggtgaatggcaactggaaccactgcaacttcctcatgctgtgaatggcgttgtgccaaaggttgcaaagagacttggcatcgactacgctcctgctatggtcggatttgattatcgcagtggtcggtgccttccagtctttgatgggattgttgtctgtaccgagttcagaagtgctatcctggaggaggaggctcaagcactctccagatggtatcagctgctctgctccattgtaacaaggcagaggttgaaggactcctacaaaacaccttcacacgggattggtaacgaaggcctgcccgaaaatgataatgtccatagaagcactctcagcagccgatcctcagaaagggaacctagttcaagcaaactgcagacagatcatgaccatgaccatgaatttccaaaggaagaccagagctttgatgaggagaccttcgtgaggacgaaacgctgcccgtgtggtttttctatccaagtagaggagttgtaa

SEQ ID NO: 17463 - DNA, 321 bp, Zea mays
  Peptide Sequence Number=SeqID_59242
atgaagaaagaagtcattggaaatgacttaggcttgcctatgacatctcgtataaatgttgttggggcttctaatggcagagctacaagaacagttgttatgacgcctgagtttagtccacgaggcagaggttcaagcagtagacctctaagcaacagatttaacaaccgtggttgtttgcaagctggtcgaggccgtggtcagttccagggccggggcagaggcagaggcagaggcagaggcaggaagcctgagaagactgcagatgagctggataaagatctggaaagctatcacgcggaggccatgaaaaccgattga

SEQ ID NO: 17464 - DNA, 138 bp, Zea mays
  Peptide Sequence Number=SeqID_59243
atggaggctgggcggtgggcccagactgccgacgcttgtggtagttgggcagcgcgggaatcagagatcaacgaccaagattacatcgcacgggcgcgggcgcgactgacaggcggggccagggcgtcagcgagctag

SEQ ID NO: 17465 - DNA, 3750 bp, Zea mays
  Peptide Sequence Number=SeqID_59244
atggcctggcttgaatggggggttgatcatagaagtcagggcaataagtattcaggaattcggtcatacttctgttttttgttacgaaaaaaggaggggaaagtcagtgccgaatgcatggtattgtgtagatctaaattacatatcattgttgaatctgtgttgcgtcatactgtacggaatacagacagggcaccgcgtagctcaggtcgtcgcaataatgttctttcatggatctctgaagttaaagacacatctaatgtgggcgtaagaaagaaaagggggagaagagcacctccatctgctaaaagattgcgtgataaaagggtggataaggcgattgaaagtgatggtgctgttgacagtgacagcgatgatacagatggacaggttgacaagaatcagcctagtgcacacattgaggaacatgttgatgggagaactggtgatgacttagcaacagcaggccactcaggcaattcttccaatggtccatcctcagcttcagaagaacaggaccattcaacaaactctaaagacaagctccaaaaagctagctctcaaaacacaaagaaggtttttggaaactcaacaaacggcaagcaaggtgcatctaatttggaacaggaatgtgcaaatgaagatgggtctcatgtgctagttgctgctgtgtacaaggatattgataatgaaagaagctctcaaaagattagggatgatgtatcagatgcacaactggatacagcttcatctgatgacaaaagttcagaagaagtcgaagacgtgaaggtttgtgacatttgtggagatgttggtgaggaggagaagctcgctgtctgtagcagatgcaatgacggcgcagagcacacgtattgcatgcagacgcggtattgcatgcgggtaatgatggaagaggttccagatagtgagtggttgtgtgaagactgccaaactgctgtagaatctgaaaatgagaatagactacaaaagtctcaggtgaaggctggcacttcaaaagagctttccttagaaggggagattaacaaacctgccattgctgcaaagggaagaagttcatctgactgtgaattgaaggctgggaatatagaaaacaaagagtcaaataccacaaatgagaggaatggcacagtcaaaaccaggacggaagaagatgctgtgacgacatcctcaactagagatattttttctgaaactggtggcttgtacatgggggctgactctagaaagagaatggaaccatcacacgagacattcgtgtctgatgctgacaaaggaaagcaacctagccatcaagtatcaacttcattggtggttaatgctctgaagaatcaggcaccacagtctcgtgatctaaactttctacacaaaatccttagttccttagagttcaatttatggtattatgttacttttagggcttgccctggtggcatgcaatcaaatgaaactgtagtccccaaagtgaaacagctattgaatgaagttcctcagaagccaaaatttttgaaggaatcttggtcctctattatcaataaaaaggaaggaccaatcagcatgactactaagtcagcgaccttcaaaaagcctaagccttgtgagccaacaaacaaggcaaagtcttccgtcttgtcacctgtcgaggagccaagggtgccgaatcagttggcgagccacaatgtaacaaatggtcagtgttctatattggggcctccctctgccacatcatcaatggttgctcctgttctaagaactgatagcacaactcagctgctctctacaagaaataacacagttgactcaaataatttaggttctgttcatctacaaggtggaaacagtgagctaaagaagcctcgtttagcaaaagtgccgggaagtatgatgctatctaatgctgaaagatccgcaggtgggattcttggttccggtgctcatcgagaagtgattcaaaattcagacccttcacatagggatgctaaaataaaggaccaaactggcttcagacagggtgcttctagcagcaatcggacaatccgttgccaaagatgtaatgaatatggccattctacacatttttgcgaagttgaaaaacttcgtttgtcttcaggaaaacctttgagtgagcgaaacttgaaggatgcatctgccaaaagaaataagacatccgaagttagtacattggcttctagtgaaaaaactccttccagagaaccagagcatgtcgtaaagtgtgctattaatcagaatctgataaatgggcctaatgatggtatacctgccccattcagccatgtaaagaagcactcattatcacctcgagctaatgtgtccatccctgggagcggagtagattgtagcaagcctaagttcaaaaataatgatccatctctatctggcacagcaggaatctttgttcataatggtcgcattatgccaaatgatcatagggatgaacctgctcaagggttttcagctggtgatgaaccaacgtcttcaactgtccctgagctgggctggatatggcaaggtggttttgagctgcagaggactggaagttcaccggagctgtgtgatggtttccaagcccatttatcatgttctgcttcacagttagtgctggacgcagttaagaaattcccttctaaagtccagcttgaggaagttcctcggaagaattcatggccaacacagtttcagaaaaacggtccaacttatgacaacataggtctttttttctttgctagagatgttcaaagctatgaaaatcactacagtaaattagttgagaatatgctgaagaatgatttagttctcagaggaagtgttggtactgttgagttgcttatattcccttccaatatcctatcaaagaacttccaaaggtggaatatgttgtactttctatggggtctattcagagttagcaaaaaagattcctctaacctcccatcttatctatccacaagtagagtagaacgaaattttaatgatgatctccaggccatggattggatgccatctacccattcattctcacagaacaggagtgatttagctgaaccggaccctgatttgttaaagtcaactaattttgaaccgagtttggaagccagtcgtgaggtgtgtttggatggagagaactctttgaatcaacttgtacgcagaagagctctagatgatcacctagattcagatgcaaaagcatgttcaacgattagcaatggtgccatgggttcctctgccatgtctatgcaaagaaaacatcagaaacctgattatccagaacatcaagataaaaagagggacacttttggtggtaatgttagtgaaagagatttcgatgtgaacacggtgccagttacttgttctgtctccttaactcaccttcaggaagaacctggtaagctgagcacagccatcgacctcatggatatagaccatggggttagcgcaggtgcactggatcgttcacatgcatcaggtggtgcaggtaaaagaagttttgagacggccgaagtagctgctgaagtacccgagcataagaaaactaagctggataataatgttgtgcctataagctctggtccacgcgagaatgcctgtacgaatgatggcaatagcgataaactgatgcctggaagctcaagcagtgatggcaagcgcgtgtttccacttgatctaaatgcagtgggggatgaggacatcgtaaatattccagccttcaggtga

SEQ ID NO: 17466 - DNA, 600 bp, Zea mays
  Peptide Sequence Number=SeqID_59245
atgggacacgagcgaaggagaagcatgtgggctagatcagcaaggaatgctggtgaccgccgctgcatgccggcggcttccccctcactctatttatcggaggaagaagattgccaccccaacctgttagcagctggcgtggggaagaagcagagaggggcgaacggaagaggaagaacagagagatacgacagttatcaatgtaccaatgggatatccagtacttcagtcttcagcaacctatcaggcccgctcccggccaacctcacatggacccaatggcatgtggtgtccagtggtcatgtggttaatggtatatctgcaccagttggttatcatccaatgtggatgaactttggaaatgacatggttgtggacaatggagtgcttgaagcaccacgtgctggtgctactgccagcattatgtcatatgagatggccatgagtccctcattagctatcggcagttcatatgctcttttcctatatggattctgtttatgtccgtggaatgagatgcattctgaggtatctgtactagctactaaatttgttttgccattttcgtttattcattatctgcggctcaagtttcagtga

SEQ ID NO: 17467 - DNA, 138 bp, Zea mays
  Peptide Sequence Number=SeqID_59246
atggccgtgcctgacttctgtgcgcgctggcgcgcatttaatgcgctgcagatcagcgctgacttttcgctgcaagtctcccgtaggagcttcttcgccttttacttcggcggtatcagtgtttatttttcgctgtaa

SEQ ID NO: 17468 - DNA, 522 bp, Zea mays
  Peptide Sequence Number=SeqID_59247
atgacgacggcgagcacgcgggctacgcagagaaaacagggcggctgggagcagttcgtgagggagacaggggagagactacgtctagagaaaagaatgcaggcaggggcaggcagggtcatgagcagccgcgcgtccgcgcgacgtgcgcgacgtgggcacagtcggtggcggaagacctggctggagtgcgcaggcagtgtggcgcgtgcggctggctactggcatgcggctgggacgcgctgcttgccgcggaatgggggtgcggcgtgggccgcaggcagaccgaggggggaggcgcgctgggccgcggggggagaaaacgacttgggccgcagcgaggagcgcgctgggcgcagcgcggcgcgagcgagcgtcccggaaatgaataaagaagtgaaaagaaagaggtacaagaaggttgaccagttcattgtagttgtcggcccaaatagtattaaggcgctcacagagcttggtgttgagccctctccggaagtggtccctcttcttctcatctga

SEQ ID NO: 17469 - DNA, 909 bp, Zea mays
  Peptide Sequence Number=SeqID_59248
atgaagaaggcctcatcactctccgagctgggcttcgacgccaacggcgcctcctctggcttcttccgcccagtgaccgacggcggcgtcacgccgacgtcgccgcaccaccgccgcaggctcaccaaggtgtcggtgatcggcgcgggcaacgtggggatggccatcgcgcataccatcctcacgcgcgacctcgccgacgagatcgcgctggtggacgcgctcccggacaagctccgcggggagatgctggacctgcagcacgcggcggcgttcctgccgcgcacgcgcctcgtgtccggcaccgacatgtccgtcaccaggggctccgacctggccatcgtcacggccggggcgcgccagatcccgggcgagaccaggctggacctgctccagcggaacgtggcgctgttccgcaagatcgtgccgccgctggcggagcagtcccccgacgcgctgctgctcgtcgtgtccaaccccgtggacgtgctcacccacgtcgcctggaagctgtcgggcgtcgccgggatgcccgtgctcaagacgctgcgggacagccacagcagcttcggcgaggaggcgctcgagggcatccgccgcgctgtcgtcgacagcgcctacgaggtcatcggcctcaagggctacacgtcctgggccatcggctactccgtcgccaacctcgtgtcctcgctcctccgcgaccagcgacgcatccacccggtctccgtcctcgccgcgggattccacggcatccccgacgaccaagaggtgttcctcagcctgcccgccaggctaggccgcgccggcatcctcggcgtcgccgacatggagctcaccgaggaggaggccaggaggctccgccgctccgccaagacgctatgggagaacacacagctcctcggactctag

SEQ ID NO: 17470 - DNA, 1359 bp, Zea mays
  Peptide Sequence Number=SeqID_59249
atgagccgcgatcgctacttccaccgcctcctcgacctccacctccacgccaacgacgacctcttcttccccttccctacccctgcctcgtcctgcccctacatcaccgcctcctccgcccaccaccgcttcctcctcgacgaccaccccttctacccaacctcctgcccgctcggcatcacctcccgctccccgatcgacgacaccttcgacctcgacctcctcctccccctccccctccacgccgccgtctccgcgcccccgtgcgcggccttcgacttcaaccccttcctcctcgacaccctcggccaccgcatctccgtcctcgagcgcgcgctcgccctcgccccaccccgccgcaagaagctcaagtggaccgccgaggacaggcccgccgggggccgcaacctcaagtgggaggccgagctcaggaccccgcacaccgacggcttcgaccgcaagtggaagtgggagtccaaggagtccgccaccggttccaccaaggtcaagtgggccaaggagatcaaggggaagggctgcctcgagccttggtccaactcctactccgtcgaggagacctacggtgaggatgaccatgccgacgacgacagggagaagaagaaacccactggcgtccagaagaaagtcaagggggaaaacaagcagcagcagaagaagcagggcaatgtggagatcgtcgagatcgaggacaacactgccggatgcgtcgccatcagaaaggcttttgaaatgaaccactgcaagggcaagaggaaggaactttccccacaggatgccgcactgctcatccagatgaactacagggcgcacctggcccatcgctcccaggtgctccgttgccttcgcgacctcgccgtcgccaaggccaagctcaaggagatcaggtccttcttctacaacatcacataccgccgccgcatcgcatatgacaatgaagagcgccagaggtttgctgagaagatcattgtcctgctactgacagttgatgcccttgagcaaatgacaaatcttgtaccgcttattctgatttatgattgttcacacaagaatctttttagcccactgagatatactcaacgttttatgatcaatgggtacaccaaggttccttgcaaattcaaggttatcctgaagaagaagaattgtatcatctgcatattgaagggaccggactacatggtccgcaacgcaaggaggtccatgctggaggagctggaggggatgctggagatcgtggagcctcagccgccggggaagccgaggacgcttagccgcaggaggttcgatctcccagaaggcggagccatcgaaaaggagacgagggaggagggcaagtga

SEQ ID NO: 17471 - DNA, 1209 bp, Zea mays
  Peptide Sequence Number=SeqID_59250
atgcattccattctcagcgatgaggtggggttcttgcacccaacacaattctgctcactagattgcgcccgagatggtgactccgcttcacaatctacagagttccattgcgcaagatacttctggtgcagagaccacaagcttgccatctccgccgagatcctccccgagctttaccatgctgctcgggatgcctactacaacgcaagggatgccccactatcgcgcactaatctcatgaggcacaccaaggcactgctcatactttgtcctgacctactcactgcatggaactccaggaaaatggtgctatcagcgttgtatgatttcacaaagctcaaggatgaactgcaattgtgtgccttgatcctttcctactctccaaagaacgagagcacatggagccatagacaattcccatctatttgggactttggagctgattttgatataataaaactaaactgcatggagtttgaaataactgtctgccacaggagatgggtgataaaacaagttgctgagcaacatcaagatatgttggagcttatagggaatgaatccatactggtcaaagagatagcagagtctttgctgcttgcgctactagacaacttctttgggaatgaagaggattcccttagttgggagtcagatatttgcttgctatggaaggaggagcttaggtgggatgagatgctgatcaaacgctaccaggggagagagttcttgttgggcggtcgttatggaaccaccggtcggttcctttcacacttggtggatacaacacttgcaaaagatgaaggaaactggcccgcaacgacatcccagatggatatgtttgtcatccaggagatacaactgctgtcagagtgcctgcatgatcctgtggatgagtttgaggagtcgcgtgtccaagcagagctttcagcgctctacattatgtggataacaaaggcaatcagcagctggttttacccagcttcttgcttatcacaagtcccggatgtgaaggggaagctggaagagaggttgcattttgcctccatggggaggctgaaggacgtgctggcaggagcctgcaggccagagaagaggttttggatgaatttgctcaacctggctgatcaatccagtgacaagtgcgactcaaagatgccgtacgtccgcagcagacaggcaggccgtgatgatgctgagaataactaa

SEQ ID NO: 17472 - DNA, 177 bp, Zea mays
  Peptide Sequence Number=SeqID_59251
atggcgccccgcacgctctatgacgacggcggctctcagcccccttacggaagcaagaggactgaccccccgggttcgaaacgccgacagataggtatcgttgatgctggatccaacaactcagatttaaaaagagacgtggaccacctcagcgtggacctttgcgtcagcccttaa

SEQ ID NO: 17473 - DNA, 255 bp, Zea mays
  Peptide Sequence Number=SeqID_59252
atggagagaccgacgtcgcgtctcttctatcttcgcttcaagccccaacccccatacattatatggtatgtcgatgaactcatatccagagcaaataccaacactatcgtccttgcttggcagatcgacgcccctggacatggtcgaactgtacgagcttttgcccggacagtccggcccttatgcagaccgtccgactttccctgccggacagtccaggacctgtaccagggctaccgtgtggcgctccaataa

SEQ ID NO: 17474 - DNA, 669 bp, Zea mays
  Peptide Sequence Number=SeqID_59253
atggggggtgtagcagagtgctacgtgtctagcggagagagagctagcgccctagggcgacgtgggggctcctccgaagctgaggtcgagtctgtcttccgttgccgaggccgagcccgagcccccgagtcgggcgaggcggagatccgtttggccgaggccagggcggagtccgagccctggggtcgggcgaggcggagtttcgtcgtcttccgggtcttagcccgagtccgagccctggggtcgggcggagcggagttcgccgtcttccgggtcttagcccgagtccgagccctggggtcgggcggagcggagttcgccgtcttccgggtcttagcccgagtccgagccctggggtcgggcggagcggagttcgtcgtcttccgggtcttagcccgagtccgagccctggggtcgggtggagcggagttcgtcgtcttccgggtcttagcccgagtccgagccctggggtcgggcggagcggagttcgccgtcttccgggtcttagcccgagtccgagccctggggtcgggaggagcggagttcgctatggcgcctttggcaaggcctgactgcctgtcagactcactctgtcgagtggcactgcaatcggagtggcgcatgcggcgctgtccttctgtcagactggtcagtggagcggtggagtga

SEQ ID NO: 17475 - DNA, 724 bp, Zea mays
  Peptide Sequence Number=SeqID_59254
atggccgggagcgtgcgtggagggatgaggcgcggcgcgagaaagaagacagctgggacggagagcaccaacaccagcctgagagtgttgaggctaccgaagacggatccatcgaaagcactcgacgcttctaggcctgtccttagaaatgcagcatccaagtccggccctaggcgccatgggaaactccacttcgcccgaccccagggctcggactcgggctcagccccggaagacgacgaactccgcttcgcccgaccccagggctcggactcgggctcagccccagaagacgacgaactccgcttcgcccgaccccatggctcggactcgggctcagccctggaagacgacgaactccgcttcgcccgaccccagggctcggactcgggctcagccccggaagatgacgaactccgcttcgcccgaccccagggctcggactcggactcagccttggaagacgacgaactccgcttcgcccgaccccagggctcggactcgggctcagccccggaagacgacgaactccgcttcgcccgaccccagggctcggactcgggctcagccccggaagacgacgaactccgcttcgcccgaacccagggctcggactcgggctcaaccccggaggacgatgaactccgcttcgcccgaccccagggctcggactcgggctcagccccgaaggacaacgaatgtaacaccccaggtgttactcagg

SEQ ID NO: 17476 - DNA, 513 bp, Zea mays
  Peptide Sequence Number=SeqID_59255
atggctccactacagagaaagttgggaattgtcgcctgcgcacgcttactctgcctcgggcctccatcgccgatcggggcaatacaatcagtgacgtggcaatcatctgggggcagggataaaatcacaattacgactaaaggagatcttctaaagataggaactggagcagcaaaccatgtagacagaagaaaagctaaaggactacatgttgaagtagtaatagttactgcagtactgcacacactgcatctgattttacttgttgtatgtgatattatagttaatcatgattcaactgagctgacagtttatgccattgttggttgcaacaattgtaggttctatactttgaagattttgtaccttcagggatctcaacaagaaagataccttgtgaggaaggcactcaagtgtgctctatctcacttgaaagcagaccatgcaggagattttcttagttgccatggccagagagttcaggctttcaacaaagcaaacagccatacgtga

SEQ ID NO: 17477 - DNA, 486 bp, Zea mays
  Peptide Sequence Number=SeqID_59256
atgggaaacgccgggtggtgccgtcgcacgggacacgcgtcacggcgctccgcgtctcagctcccaaccgcgctgcccgtccgccacgtgctgccgcggctctcggtggaggacgcgtgtccggcgacccggcgctcgcccttcgggggcccgcgggaagcgccgcgcactcggcgcccagtcaccggcgtcaatgtcatcatcatctttgttcggcttgtttcggtaattcggtgcttcccgcaggttggccgcgtgatcgctgacggggaccgggacgccgcgctgcgtcagggcgcgccggcgggtcgacacgtgtggcgccggatgggcgccacgggcgcggagatcgataatatcttggggtacgtgtcgcgccaccattggccgagggcgatgtctccgttcgcctttttgtgctttgagacttttcagaggcgcaaggagaggatccaggtgtacaacgggggtgtagcagagtgctag

SEQ ID NO: 17478 - DNA, 666 bp, Zea mays
  Peptide Sequence Number=SeqID_59257
atggtgggtggatccgtcgagatcctcggttcccttgcgatagaagcggatggcgggcggcacgataggcgagaggtagagtgggcagggaaacacgaagggcgggatggcgggtggggaaacgcggagctcgacgcgagaggggcgggtttgcagagctgggccggccaagatcctcgcatgtctgcgaggagagcaggctggaggttggcaaggctcacagcgaggagatcgagctggtggttgcctggttggtgcggagctcggccgaccgagatcgtcgcgacgaggaggatggaggttgccgagcgcatcggggacgccgtggatcctggagcgcacgaaccggcggtagaacccctcgaggtcctcctcctccgacacagagacgccgtcgagggtgaagtcgcgacacccgtcggcgtcgccgcgcacggcacggccgtcccgccccacgcgaactccagcgcggatgagacacccgaggtgaggttccggatgcggccgatcacctcgaccgggtgctccgtggcgccgccgccctcgtcggccctcctccaccgccatctcccgtcgcgtccaccgtgtgctcagcaggcgatggagtcgccaccaggtgtcgcggcatggctggaggcggagcagaccgccccgtcttcgccctag

SEQ ID NO: 17479 - DNA, 1356 bp, Zea mays
  Peptide Sequence Number=SeqID_59258
atggcggtggaggagggccgacgagggcggcggcgccacggagcacccggtcgaggtgatcggccgcatccggaacctcacctcgggtgtctcatccgcgctggagttcgcgtggggcgggacggccgtgccgtgcgcggcgacgccgacgggtgtcgcgacttcaccctcgacggcgtctctgtgtcggaggaggaggacctcgaggggttctaccgccgagctgtctatagatgttcttacatgtttgcaatttgcgtgctagctgtgttgagcatattgattaagcttggcatccgagctccccttcgtttcaccctggtcctctgcttggcatccgagctcacaccgcagcatttcggtgggtccacggggtacgaccacgacgacggtggcggccgggaagcgttggactccgtcttcgccgacattgttggcgcggaggctgccattgtgcgcccgcagttcttctccggtacccacgccattgcctgtgcgttgtttgcgcttctgaggcctgggcatgagctcctggcagtcgctgggcccccgtacgacactttggaggaggtgattgggatcagggggtcggccaatgtagggtcactcaaggatttcggagtgacgtaccgagaagttccgatgcaaaatccaaactgcatggtgatggttgataattgctatggtgaatttgttgagatatcggaacctgcaatggtgggagcagacttgattgctggaagtttgataaagaatccaggtggaactattgcgccttgtggtggttatgttgctgggaaggagcatttagtcgaagcagctgcagcccgtctatctgcacctggccttggggtggaatttgggtcaacacctggccatgttatgcgtgcgctgtttcaaggcctgtttcttagtccgcaaatggttggagaagcagtaaaaggaggtttgctcattgcggaagtcatgtcagccaagggatacaaagttgaaccacttccgagggttcctcgtcatgatattgtgcagattgagatgacaataacaaaagcgaaaattggagtagatccctcaggatgtgtcgaactagcaaagcatgtcagattgaacaaccctaaccttgtgttgtctggtttgatgataattgggatgcttgattactcctcaactccgaagaatttcaaggcactagccaactgtcgggaagatgtgtgcaaggagcttggaataccggaagagcagctcgaactatttgtggacatgtcatctgactttgaacaaacaattgaaatgggaagcacaaatgtaagagttgggtcaaccatatttggtgcaagagaatacccaaagaactag

SEQ ID NO: 17480 - DNA, 330 bp, Zea mays
  Peptide Sequence Number=SeqID_59259
atgacattttttgttgaaacgaggataaagtactcaaagactggtgtatttagcgtaggtctcagtgacagggaacagttttgtgctcttttatcttatagtgagcttttagaccgacttggagatacacatcaagccgaaggcgcacaaaaccgatggacaaagaggatttcagacagggacggtgtaaatggtctccaagacgaagaaaaagacgtacacaacacatcagtaaagagccaaaggttaaaggcattttggcgtttctcgtcgctggcaactactactgaagaagacgcaatgctcggtgctgataatatttcccactag

SEQ ID NO: 17481 - DNA, 2175 bp, Zea mays
  Peptide Sequence Number=SeqID_59260
atgaaagagtccgaccagctcgcgacttctttcattacgcccttcggcatgtactgctacgtcaccatgtcattcggcttgaggaatgcgggcgcgacgtaccagcggtgcatgaaccatgtgttaggcgaacacatcggtcgcatggtcgaggcctacgtcgatgacatcgtagtcaagacaaggaaggtttctgacctcctctccgaccttgaagtgacattccgatgtctcaaggcgaaaggagtcaagctcaatcctgagaagtgtgtcttcggggtgccccggggcatgctcttggggttcatcgtctccgagcgaggcatcgaagccaacccggagaagatcgcagctatcaccagcatggggcccatcaaggacttaaaaggcgtacagagggtcatgggatgtctcgcggccctgagccgcttcatctcacgcctcggcgaaagaggcgctccttacaaagccctcttggtctacgtcgccgcgaccactcaggtggttagcgccgcgattgtggtcgagaggcaagaagaggggcatgcattgcccgttcagaggccagtctacttcatcggcgaggtgttgtccgagaccaagatccgctacccacaagttcagaagctgctgtatgccgtgatcctgacgaggcgaaagttgcgacattacttcgagtctcatccagtaactgtggtgtcatccttccccctgggggagatcatccagtgccgagaggcctcgggcaggatcgcaaagtgggcggtggaaatcatgggcgaaacaatctcgttcgcccctcggaaggccatcaagtcccaggtgttggcggacttcgtagctgaatgggtcgacacccagctgccgacggctccgattcaaccagagctctggatcatgtttttcgatgggtcgctgatgaagacgggagccggcgcgggcctgctcttcatcttgcccctcgggaaacacctacgctacgtgctacgcctccatttcccggcgtccaacaatgtggctgagtacgaggctctggtcaacgggttgcggatcgccatcgagctaggggtcagacgcctcgacgcccgcggtgactcgcagctcgtcatcgaccaagtcatgaagaactcccactgccgcgacccgaagatggaggcctactgcgatgagatcgacgacacgcccgagcccgaggcaccctcggcacagcccgaggcaccctcggctcggcccgaggcgccctcggttcagcccgaggtaccctcggcccccgagggcgaggcactggacgtcgaggaggagcagagtggggccacgcctgatcgaaattggcaggccccgtacctgcaatatctccgccaaggagagctacccctcgaccaagccgaggctcggcgggtagcacgacgcgccaagtcgttcgtcttgctgggcgatgaggaggagctctaccaccgcagcccctcgggcatcctccagcgatgcatctccatcgccgaagaaggcgcccggggctactcgcacctgctggtcgccatcgacaaattctccaagtggatcaaggatcaccacatccgggtggactgggccgccgtggctcatcccatgtcgaatgggcaagtagagcgtgccaacggcatgattctacaagggctcaagccccggatttacaacgacctcaacaagttcggcaagcgatggatgaaggaactcccctcggtgatctggagcctgaggacaacgccaagccgagccacgggtttcacgccattcttcctggtctacggggccgaggccatcttgcccactgacctggaatacggctccccgaggacgagggcctacaacgatcaaagcaaccaagctagccgagaagaatcgctggaccagctggaagaggctcgggacaaggtcttactacactcggcgcggtaccagcagtccctgcgacgctaccacgcccgaggggtccggtcccgagacctccaggtgggcaacctggtgcttcggctgcggcaagacgcccgtgggaggcacaagctcacgcccccctgggaggggccattcgtcatcgccaaagttctgaagcccggaacatacaagctggccaacaatcaaggcgaggtctacggcaacgcttggaacatcaaacagctacgtcgcttctacccttaa

SEQ ID NO: 17482 - DNA, 135 bp, Zea mays
  Peptide Sequence Number=SeqID_59261
atgaaggagctgagagcgcgcaagatacccttcacgatcagacggtacttacctgatggaagctatgaagactggggagtagacgagctcattgtggaggactcctggaaacgccaggacggtatagctgcatga

SEQ ID NO: 17483 - DNA, 1950 bp, Zea mays
  Peptide Sequence Number=SeqID_59262
atggaggttgattcaaatgcttgtgatgatcctattcccaatattagagatgataatattagtttacttgctaagattgaagaattgaatgtctctcttgctagccttaaaaatgagaatgaaaaattaattgctaaggctaaagacttagatgtttgcaatgttaccatctccaatcttaaaagtgaaaatgacagtttgcatgctaatattattgaactaaaatcttgcaaaccctctacatctaccgttgagcatgtttccatttgcactagatgtagagacattaatgttgatgctattcatgatcacctagctttaattaagaaacaaaataatcacatagctcaacttaatgctaaaattaatgagcatgacttagaaaatgaaaaatttaaatttgctagaagcatgctctatagtgggagacgccctggcattaaagatgacattgacttccaaaagggagacaatgtcaaacttaatacccctcctaaaagattgtctaactttgtcaagggcaagactctcatgcctcaggataacgagggttatattttgtaccctgccggttatcccgagcacaaaattaggagaattcactctaggaagtctcactctggccctaatcatgcttttatgtataagggtgagacatatagctctaggcaatcaactcgtgctaaattgcataagaagaaaactcctgttgcatcaaatgattctaacatttcatttaaaacttttgatgcgtcttatgttttgactaacaaatctggcaaagtagttgccaagtatgttgggggcaaacacaaggggtcaaagacttgtgtttgggtacccaaagttcttgtatctaatgtcaaaggacccaaaatcgtttgggtttatgcatccgggggctcaagttggatcatcgatagcgggtgcacaaaccatatgacaggggagaagaagatgttctcctcctacgagaaaaaccaagatccccaacgggctattacattcggggatgggaatcaaggtgttactgcctttagaagaagtgatgattcaatagcatttaagggagtgttagagggtcagctatacttagtagattttgatagagctgaactcgacacttgcttaattgctaagactaacatgggctggctctggcatcgccgactagcacatgttggaatgaagaatcttcacaagcttctaaaggaagaacacattttgggactaacaaatgttcattttgagaaagacagggaaaaatctcatacccaagagaccttaaagggattcttgagacgggctcaaaatgagttctacttaaggatcaagaagataagaagcaacaacgggatggagttcaaaaactcacaaatcgaaggcttccttgaggaggaggagggcatcaagcatgagttctcttctccctacacgccacaacaaaatggtgtagtggagaagaaaaatagaactctattggacatggcaagaaccatgcttgatgagtacaagacctcggatcggttttgggccgaggcgatcaacaccgcctgctacgccatcaaccggttgtatctacaccgaatcctcaagaagacgtcatacgaactcctaaccggtaaaaagccaaatgtttcatattttagagtctttggtagcaaatgctttattcttgttaaaagaggtagaaaatccaaatttgctcctaaggctgtagaaggctttttactaggatatgattcaaacacaagggcatatagagtctttaacaagtcctctggactagttgaagtttcttgtgacattgtgtttgatgagactaacggctctcaagtagagcaagttgatcttgatgagctagatgatgaagaggctccgtgcgtcgcgctaaggaacatgtctgttgggggccttcggcttccgaaggtcctcaaaaacataatttga

SEQ ID NO: 17484 - DNA, 3300 bp, Zea mays
  Peptide Sequence Number=SeqID_59263
atggcgatcactccacagaccatggtcctcctctccctgctgctgtccttgtcgtccctgcccattgccctggcgctcgcggaagcgggagccgagagcgaggacaccgcggctctgctcgccttcaaggccgcggccgtcggcagcagcagcggcactagtggcgccgtgctcgcgtcgtggaacggcagcggcgccggcccgtgcacctgggatggcgtcaagtgcagccgcatcggacgtgtggtggcgctgaggctgcgctccctcgggctctccgggacgctctcgccggccgtcggcaacctgtcgtcgctgcgggagctcgatctgagctccaactggctgcgcggcgagatccccgcgagcctcggccgcctgcgccgcctccggacgctcgacctcagtgtcaacaccttgtccggcgcggtccccggcaacctcaccgcctgcaccagcctgaggtacctaaacctcggcagcaacaggctcagcgggcacgtaccggcggggctcggcggcgcgctggcgcggctcgaggtgctctggctcaccaacaacagcgtcacgggggccctcccagcgtcgctggccaacctgacgtcgctgcgccagctcggccttgggctcaacgccttggacggcccgatacctccggagctcggccgcaacatggcgcgcctcgagtacgtcgacctctgccacaaccacctgcgcggcgagatcccggcgccgctgtacaacgtgtcgtcgctggcgagcctcgacgtggggcagaacgcgctgcacggaggcatccctgccgggatccacgtgcagctccctcggctgcggtatctggccttgttcgagaaccatttcagcggggcgatccctcccaccatctccaacctcacccagctcgtagagctcgagctgtcagagaaccggttcagcggcctcgtgcctcgcgatcttgggaggctgcaggatctgtggaaactgctgctggacgacaacatgctcgaagcgggggacaaaatggaggggtgggaattcatggagtcgttggccaactgcagcaagctaaatcttttcggtctgggtggcaacgatttcaccggagatcttcctgcttcggttgctaagctctcgacaacacttgagtggctttacctagaaaaccttgcgatctccgggagcatcccctcggagatcggaaacctggtcggcctgaaagtacttgttctgacggatactgacatctcaggagcaattcctgatagcatcgggaggatggagaacctggttgagctacacctggacaacaatagcctgtcggggccggtaccgtcatcggtggggaatctcaccaagctcatgaagctatcggcgagcggcaacagcctgggaggatcaatcccgaggaatctcggaaagctcaccgacctcaccagccttgatctttcaagcaaccacctgaacggctcgatccctgaagaaacattccagctgcagtctctttcgctgctcctggacttgtcacacaactccctctccggaccactccctcccaacgtcggaaggctggccaacctcaacacgctgagactgtcaggaaaccagctgtccggccagctaccggcaggcatcagagactgcgtggttctggaggagctcctgctggacagcaactcgttccagggaagcatacctgaggctctaggcgacatcaagggcctccgcgtgctgaacctgaccatgaacgggttctccggtgcgatccccgacgcccttggtagcatacgcagcatgcagcagctgtacgtagcgcgcaacagcctctccgggccgatcccagccgacctgcagaacctgacgtcgctgtccgatctggatctgtccttcaacgacctgcaaggcgaggtgcccgaccgaggcttcttcagaaacctgcctcgctcatcggttgccggaaacgaaaacctctgtggcggaatgcctcggcttcgcctgcatccgtgccccacgtccgcttcggggaagaacagtcggagcaagaggtggccgccgctgaagcatgttgaaatggctctggcgacagtgggcgcagtcgtgttcttggcatcattattagccgcagctactcagctcgtcgtctgtaggagccgtaaacaaaggcggcagcagacgaagaggcagcccctaggagccccagcagcgaccggagagcggtacgagagggtctcttacaaggagctgtcggaggggacgaaggggttttcagacgccaacctgctcggaagaggaagctacggcacagtctacaggtgcgttctcagccgtctcaccgacgatggcggaagaaccgtagccgcctccgccgccgccgtcgccgtgaaggtgttcgacctcgagcggtccggatccacgcgaagcttcgtggccgaatgcgaggcgctccggagcgcgcgccaccgctgcctcgtaaggaccatcacgtgctgctcgagcgtggaccgccaggggcaggagttcaaggccctggtgttcgagctcatgcccaacggcaacctgagccgctggctccatccgagcccgaacgaggccgaccccgagagcacgctgagcctgatccagaggctcgatatcgccgtggacgtcgtggatgctctggactacctccacaaccactgtcggccgccgatcgttcactgcgacctcaagcccagcaacgtcctcctcgcccaggacatgagcgctcgggtcggagatttcggcctttccaggatcctgtctgactctgacagcgcgtgcagggccaaagccgccgatccgaactcgagcagcgtcattgggatcagaggctccgttggctacgtccctccagagtacggggaaggcagcggcgtctccaccctcggcgacgtttacagcctaggcatactgctgctggagatgttcacaggacggagccccacggacgacgcgttcggagactcgctggacctccgcgggttttcagaggccgggtttcctggcaggatactggaaatagcggacccgaacctatgggcacacctccctgacactgtcacaagaaacagggtccgggagtgtttgcttgcggtcattcggctcgccctgtcctgctcaaagcgccagcccaaggaccgaacgcccgtacgggatgcggccacggagatgcgcgcgatcagagacgaggcgtacctgatgatgcttgccggctctgtggtggtccgaatggaaggggaagtagtgggaggagcagtggccccatcattgacgtcccaaagctag

SEQ ID NO: 17485 - DNA, 243 bp, Zea mays
  Peptide Sequence Number=SeqID_59264
atgggctgcgcgggagtgaagggatggtgggccgaaatcgttagtctgcggcccaggttatcctccacaaattacaagttgggtattacaaatcctaccccccttaaaaataatctcgtcctcgagattaacttgagttggtgcttatcctttcttgatgaggttgataatcttcggtctccttcttcggtctccaatcttggtgtctccatctatgtgaacctattgggattgtatggctga

SEQ ID NO: 17486 - DNA, 1818 bp, Zea mays
  Peptide Sequence Number=SeqID_59265
atggcgagattcgtgggcgcgacatatgcgcagggcggccacaaatccgcaggtggttcggccatgggtgagaagataaggctgatcgagtggtcccacgcgtcagtgacttgtcgtgaacctggcaacacgggcccgcaagatagggtcggggtggcaccaattgagggaaaattgattcaacatcgtctgagatggtttggacatgcccaaaggagacctctcgagccggtgcatagaggggttttagaacaggttgataatgtaaaaaagacggttctgcttgtaccagtggttcctcacggggttcttcagctgggctctttagatacggttttcgaaagtgcagtgttggtggcactcataaaggacatgtttcataagatttgtgatgcttcggtttctcatgcttctttatccactgggtctgcctactcaaataatttgagtctaccaactgcaaccctatcaatcaatcatccagatgttaacttgatatatagttctgctcagatcgtgaatgctgatcaccacagtttaacacatcccttcagtacatcggaaattccaatactagaagacatcactataggttcttacagaactattccaacaggttggcctaatggactgttgggcgataatggcaccattgggcatgaatattttgaaggcttttctctgacagatatggcacattggaaccaagagaatactcatggcagcactattgttgtaaatgatggtgcaatgctttcgaatacttcaattcattcagagtttcacggagatgtcatggtaatgtccagggaagaacatgagctcttcacgtggcgttgtaggctgaaacaagaacctacaagccctgctctccctcaactgaatgacaacagtgctgatctttatgtgcagcttgaaaccaacaattatgcggaattgttactagacacaataatctaccagactggtcatacatcaaacattgaatctgctccctcagctgagtctccaatttcatgcaaaacacaagttaaaaaagatcattcattgagggtcgatgaatcgccaatttctgatatcccaggtcgtcaagacctttcacctatatccataaatgaagggtttataagttgtgcaatgactgatggacgtgtggaaatcaacaagaccatacctgaagaatgcttagttgaaaatacgcacaggataaattcagctgaaatcaaaagaagatgcagaaaagttgagctccagagaccaagaccaagggacaggcaattaattcaagataggatgaaggggttgagggagcttattccaaatgcatcaaagtgcagcattgatgctctactggacaaaaccatagcatacatgctgttcctgcaaagtgtatccgagaaagctgagaagcggaggtgtcccatgccttatttctgctttgccgtgacgctgagacagattcagaatacattggaagacaaggaatcccacgatgagacaaagaagcaacttgaaaggtgcccactaagagtggaagagcttaaccagcctggccatcttctcatcgagctgcatgattcaaggtcgtttcgtgattcgttatttgcttgcttcatcctcatccagatgttgtgcgaggactatgaagtctttcttgagatggcacacgtgctgaagggtcttaaggtgagcatactgaaaggagtgctggagtatcgttccgacaagttttgtgctcgctttgtcatcgagggttcggatggtttcaaccagatgcagattctgtgcccgctgatgcatctcctgcgcaggagatga

SEQ ID NO: 17487 - DNA, 198 bp, Zea mays
  Peptide Sequence Number=SeqID_59266
atgaagctgtggaaggagacttccaggagttccaagactacgacgagttctaggcgtgggttagcggcaacccccagtcgactgcctgtgaaggccgcggttatctacgtttcttttccgcactttgatttattaaaaaggagatcgggtaagagttacgactgttcccaaccttgcctgtggctgttggaccgctga

SEQ ID NO: 17488 - DNA, 400 bp, Zea mays
  Peptide Sequence Number=SeqID_59267
actcaaactcttcgccttcgggaattctcggaagccggcgcgctataattcaccggactgtccggtgtgcaccggacatgtccggtgctccaaggaagctcggcctcctgaactcgccagcctcgggttcgcgcggcagccgctccgctataattcaccggactgtccggtgtgcaccggactgtccggtgtgccagcggagcaacggctccctgcggcgccaacggctccctgcggtgcattaaatgcgcgcgcagcgcgcgcagaagttagaatcgcccataccggtgcaccggacatcaaacagggcaccggactgtccggtgtgcaccggactgtccggtgcgccatcgcgcagaagcctccagccaacggtcaagtttggtggttggggctataa

SEQ ID NO: 17489 - DNA, 1901 bp, Zea mays
  Peptide Sequence Number=SeqID_59268
atgcggggcgcgcggctgggcggcgcgggcgctgggccgcgagagcgtgaggtggaccggggagggggcagcgggagggggcgcgcaaggtgggctgctagcgcggtgggctggagtggccaggtgggccgcgaggagcaggccgcggaggctggggagcgcggcgcgctgggcaaggggcttttggcacaggtcggcgctcccctgtcatcggattcgattcccctgctcaatttgccgccgatccgtggttcggatcttctcgccgctcggcgactgtcgcgccattttttctctcgatccgtctgcgagacactaagcgcttcgccgacggtcgaccctgctgacgccaccggcgccaggtggcttgtcgcctactctgatggtgaggacactttgtctgagagggaatctgttggagcaaaagatggacctgccttgcctaatgggagtggaaaggaggctcatgcaagcagtccatctgcggcgaataagaggaagcacaacgacttgggttctaatcaaatggaactcaatgaaccagggacgccaagttccagctcaggtgattccacatggagcataaatggtctcgatgactgtcaccaactctcattgtctagaaataagaacgacgactctgaacattcggttacttcagctggagttacagtgatcaggcagcctcgtggcgtcttgaggttaagaaagctggctcagaatgttagtactgagagttggactggtggtcataatacttcacaagctaatggagttcctaggtcttcccaacacccgaggcggaacaataagagggaatcaattccgtcccaggagaatagagttagtggtgatgaacctgtcagctgcttgaggactgagaatggtacttgtgatcaggataccggcaccaagttctgttccaaaactgagttcttagctgaaaagcagtcacatctttcaggcgaacccccaaaagctgttcatgttgacaagggtgtctatgattatgtcaaagacgatgatggtgatagtttggaagaaaatgctgcctggatgctctgttctttatcagataacaaatgtgctggatcaccaaggaagggaactgataggttgtcaaagagatctttttctcagaattcaaaccattttaagaattcatatgaaaaaatcaaggatatatgtagtcctgctaggttgctgcggaagcgtgatggcaaagttccgttcttgaagcgtcgtcagcgtcggcatttttatgaagtcagccctagcgatgtggatccattctgcattgttaaagagaggatcagggttttttggcctcttgatgagacttggtactttggcatggtcaaggaatataatccggtcacaaggttacatcatgtcaggtatgatggtaaggatgaagaatggatcaaccttcaaaatgagaggattaaacttctgtttttaccagcggaagctcccaataaatctaaatgcaccaactcaaggtcagcgtttgagtcgaagcatgaacagggtgacagagaagacatgcatagaagcggaagcaatacagagagttttgagtcaggtcccatcagctcatggttggctcgatcaaaccaagcaaaatctgctgcactttgtgacatcaacaagcaagatcacagtcattccaatactgttccagtttcatttgaccaaaaacagtgtcgtgcttctgatgccaaggaatctattgattctgcaccatgtagttcacttgcaaatgggggtgtagagagaaatggaaatgggaacaccttcaaggaaagcttcaatatcaatgttccaaaagggagttgtctaaagattccacaaaatgtacaggtcgaagagctcttccttcaatgggtctcttctctaag

SEQ ID NO: 17490 - DNA, 1446 bp, Zea mays
  Peptide Sequence Number=SeqID_59269
atggccgccgccgccgccgtcttctttccctccaccccgaatcctcggcaccgcctcgccgccgccgcccgccgccctccacccagcttcaccggcgccaccgacgccgtgccgctaccggaggacgaggactccagcgacgacgatgccgacgacgacggcgcgccacgcaggagcgggcgcagggaccggcgccgcgcggtgcgcgtcgcgtgggagaagctagtccggtggtcccgctcctggcgccgccgcaaccgcagcgacgtcctcgagaccacgcgcaaggtagactcgctcgcaccctctatgtgtgggcttgggagggtcgcttcttcctttgctggatctgatcgagaggggctgcatggcgagtctttgctttttcaggtggtggttctcgggggcgggtcgttcgggacggccatggccgctcacgtggcggccaagaaggccgatctcgaggtggccatgctgctcagggacgaccacatctgccggtccatcaacaacgcacatgtcaattggttggtaacctctgctgcctttgttttctcgatccatgagcttctggctttttactgcagcaagtacttatcagaacacagattgccagaaaatatcgtcgcaacaactagtgctgctgatgctttagcaggagctgatttctgcttccatgctgttccggttcagttcagttcatcctttcttgaaagtatttcaacacatgttgatccaaagttgccattcatatcacttagcaaagggctggaactcaatacccttcggacaatgtctacaatcatcccacgagcattgggaaatcgccgccaaccgtttgttgttctgtcaggaccatcatttgctgtagagttaatgaacaaattgcctacagcaatggtggtggcatccaaagacaacaagttggcaagttctgttcaacaactgttagcatccccaaatttgaggataagcacatcaagtgatgttacaggagtagaaatcgcaggtgccctgaagaacgttcttgcaatagctgcaggtatagtggaaggcatgagtctcgggaacaactgtatggctgcccttgttgcccaaggctgttcagagatacggtggttggcgacgaagatgggagcaaagccaaccactctttctggcttgtctgggtccggtgacatcatgctcacatgcttcgtcaacctttcgcggaatagaacagtgggactacgcctcggttctggtgaaaagcttgacagaatcatgggttctatgaatcaggttgctgaaggcgtatcaactgctggggctgtcattgcgttggcgcagaagtacaaggtcaaaatgccggtattgacagcggtggcacggataattgataatgagttaactccaactaaggcggttttggagttaatgaatcttccccaggttgaggaagtctga

SEQ ID NO: 17491 - DNA, 1656 bp, Zea mays
  Peptide Sequence Number=SeqID_59270
atgcgacagcagactccgtcagcaggggatgaagattatgatgaggacgaggtggcccaaattgagcacttcaactctcaagcaactactatactcctcacctctctaagtcgagaggagtataataaggtgcaagggttgaagagcgccaaagagatttgggacgcgctcaagactgcgcacgaaggagacgaggtgaccaagttcaccaagtgggaaacgattgagggggagctcggtcgctttatgctcaaccaaggagaagacccgcaagccatgtacaaccggctaaaaaccttggtgaaccaagtgcgcaacctcgggagctccaagtgggatgaccatgaaatggtcaaggttatacttagatcacttgtatttcttaaccccactcaagttcaattaatttgtggtgatccaagatataaactaatgtctcccgaggaagtgataggaaaatttgtgagctttgagttgatgatcaaaggctccaagaaaatcatcgagcaaggcgcctcctccacacccgatgtgcaacccgttgcattcaaggcaacggaggagaagaaagaagactctacacctagtagggtccccatcgacgcctccaagctcgacaacgaggaaatggcgctcatcatcaagagctttcgccaaatcctcaagcaaaggagggggaaggattacaagccccgctccaagaaagtttgctacaagtgtggtaagcccggtcattttattgcaaaatgtccattgtctagtgatagtgataggggcgacgacaagaagggaaagagaagagaaaagaagaggtactacaagaagaagggcggcgatgcccatgtttgccgggagtgggactccaacgagagctccaccgactcctcctccgacgaggacgccgccaacatcgccgtcaccaaaggcgtcctcttccccaacatcggccacaagtgcctcatggcaaaggacggcaagaagaagaaggtaaaatctagatcctccactaagtatgcaacatctagtgatgaggctagctctagtgatgatgaggatgatttattgacgctttttgccaacctaaacatgcaacaaaaggagaaattaaatgaattaattagtgctattcatgagaagggtgaactcttggacacccaagaggacttcctaattaaagaaaacaaaaagcatgttaaggttaaaaatgcttatgctctagaggtagaaaattgtgaaaaattatctagtgagctaagcacttgccatgatgttatttccaaccttagaaatgaaaatgccaaattaatttctaaggttgagaaatcaaatgtttgtaatgattcaattgacaatcttagaaatgataatgctagttcaattactaagattgaaaaattgaatgcctctcttgctagccttagaaatgagaatgaaaaattaattgctaaggctaaggaattagatgtttgcaatatttctatttccaatcttagagatgagaatgacattttacatgctaagattgttgaactaaattcttgcaaaccctctacatctactgttgagcatgttactatttgcactagatgtagagatgttaacattgatgctattcatgatcccattgctttgttaaacaacaaaatgatcatatag

SEQ ID NO: 17492 - DNA, 1830 bp, Zea mays
  Peptide Sequence Number=SeqID_59271
atggcgctcatcatcaagagctttcgccaaatcctcaagcaaaggagggggaaggattacaagccccgctccaagaaagtttgctacaagtgtggtaagcccggtcattttatagcaaaatgtccattgtctagtgatagtgataggggcgacgacaagaagggaaagggaagagaaaagaagaggtactacaagaagaagggcggcgatgcccatgtttgccgggagtgggactccgacgagagctccaccgactcctcctccgacgaggacgccgccaacatcgccatcaccaaaggtctcctcttccccaacgtcggccacaagtgcctcatggcaaaggacgacaagaagaagaaggtaaaatctaaatcctccacaaagtatgcaacatctagtgatgaggctagctctagtgatgatgaggataatttattaacgctttttgccaacctaagcatgcaacaaaaagagaaattaaatgagttgattagtgctattcatgagaaggatgaactcttggacacccaagaggacttccaaattaagaaaacaaaaaacatgttaagaaatgaaaatgcaaaattaattgctaaggttgagaaatccaatgtttatgatgattcaattgacaatcttagaaatgataatgctagttcaattgctaagattgaaaagttgaatgcctctcttgctagccttagaaatgagaatgaaaaattaattgctaaggctaaggaattagatgtttgcaatgtttccatttccaatcttagagatgagaatgacattttacatgctaagattgttgaactaaattcttgcaaaccctctacatctatcgttgagcatgttactatttgcaccagatgtagatatgttaacattgatgctattcatgatcacattgctatgattaaacaacaaaatgatcatatagcaaaattagatgctaaaattgccgagcatgagttagaaaatgaaaaatttaaatttgctcgtagtatgctctatagtgggagacgccctggcattaaggatggcattggcttccaacagggaggcaatgtcaaactcaatgcccctcctgaaagattatctaactttgttaagggcaaggctctcatgcctcaggataacgagggttacattttgtaccctgccagttatcccgagcacaaaattaggagaattcactctaggaagtctcactctggctctaatcatgcttttatgtataagagtgaggcatctagctctaggcaatcaacccgtgctaaattgccaaagaagaaaactcttactgcatcaaatgagcataacatttcattcaagacttttgatgcatcctatgtgcttactaacaaatcaggcaaaatagttgccaaatatgttgggggcaaacacgggggctccaaaacttgtgtttgggtacccaaggtgcttgtttctaatgtgaaaggacccaagaccgtttgggtttatgcatccgggggctcaagttggatcatcgatagcgggtgcacaaaccacatgacaggggagaagaagatgttctcctcctatgagaaaaaccaagatccccaacgagctatcacattcggggatggaaatcaaggtttggtcaaagattcattagactataacttgctttcattagaagaagtcggtgttcatcatccacacaagaacatcatgacgaccgacaggccgcttgagctacttcacatggacctattcggcccgatagcttacataagcatcggcgagagaaaaaatctcaaaccccaagataccttaaagggattcctgagacgggctcaaaaatga

SEQ ID NO: 17493 - DNA, 321 bp, Zea mays
  Peptide Sequence Number=SeqID_59272
atggtggccactgatgtgaaagcggatctggatgtcgattgtgtctctgctgggattcttggagcattattcgaaggctccaagcagaccctgccccccgggctggctggtcccactgtcaggagtcgcaccggacagtctgtctcagatctaggatctgctgtagaagctggagctggtaatgactctgacgtaggttgcggtgcaggatccgtcggagctggagcagtcacggacaccgtcacggcagcagtgacatctgctactgaatatctgtctatcgggcctgctctgctgccagatgagcctactgctgagtaa

SEQ ID NO: 17494 - DNA, 735 bp, Zea mays
  Peptide Sequence Number=SeqID_59273
atgaaggggcgtgtgaaccaaaagtcgagacacccctcgatcgacctctttccccgcgcaaaggctcaggggatgccctcgcaaaccacactgaaggttccggtcgaagatcaaatcgaacctattaagaacctcgagcacaaactttcgccttgcccaacactgagttcagcctcgggtgcaatctccgtctcgcccgatgctgggtttggcctcggctacctgctccacctcgaatcctgcggacggccactccaccgactgtggcacatgtcacgggatggctcaagcaacgcctcgaaaagacttccccttcgcccgagcagggctttgatctcgataaatgcagtaaggaatcacgacgtcaccccacacagggacgcagacgcaccccgtaagcaggcttttacacataccatggtgctggtacaacaactacggtatgggcaacccctcccccgggagcttgggcgtatggccaacccctcggcctctacctcggctctcagcaggaaatcaacaggcacaagtcaacaatgcagtgcaccgccacgtcggcttacaggacgccaagacatctccccttggaatactatgaccccaggcttcacagcatacatctcctacatgcactcaggtgcaagtaatataagcctcaccccctctattggaagtagggcattgcattgctcgaaccaggataaaactccttgtgtcaactcgcacaccatctag

SEQ ID NO: 17495 - DNA, 246 bp, Zea mays
  Peptide Sequence Number=SeqID_59274
atggcacaaacatctataacattcttaaaaactcggctgggagggaaagatcgccctctcggtaccgctctttggactttctcgttccaccacgaaatattgctttggttgctccacacctttgaggccaccttccgaatgcagttgtataactcaagttggcctatggctgtcaggtttactggattgcagatgcactggtgtcttgtatttgccacaataatttgtagcgatatgattgtctaa

SEQ ID NO: 17496 - DNA, 249 bp, Zea mays
  Peptide Sequence Number=SeqID_59275
atggtctcccattccggttatggtgggtacaagtgcggtcactacacgacggctgtcgagctaggtactcatctagtgtcacacccgattttggaaggtaaaccgaatgcgaaccatgtacgtgccaggatcagaactcacgtacactgtgcttacattgttggacatcatcacacaatgctcgaaataaatagcggaaaggtccttacggagaggtactcaggaaagagcctgagccccctaaagtaa

SEQ ID NO: 17497 - DNA, 393 bp, Zea mays
  Peptide Sequence Number=SeqID_59276
atgcctctgcccatcaatgcccgccctcgcacaggcgtggccgtggccatccaccgcctgaggcccaaccatgacctttgctgcgtggccgcccctgctcctaccagcgcctggaagagagaagtggacaaatttcctgcagttctcagaatttaccgggatacacttataactgttatgaaagcttcaatcaaagcaacagtagcggaattactccctgttttaactgccagaccaatagattctgattcagtaactggaggcagagctaccgatgctgacgctggaggccagtccttggcaaataagttgcggagtctttcatctgaaggatttgttcaacttttatctgccattttcaggatagtacagcgtaggagaactgcgcgataa

SEQ ID NO: 17498 - DNA, 354 bp, Zea mays
  Peptide Sequence Number=SeqID_59277
atggagcaggcggatggaggaggcgcttggctggaggaggaggcggcgcggtgcaccggctggaggaggaggcggcgcggcgcaccagctggaggagaggcggcgcgccgagtggaggggaggcggcgcgacgagtggaggagaggcggcgcggcactgcaggaaaggccgcacgactatattcgcgcgctgcaaagtgcaaaccctaaaaccctctacgcgcgcaaagccgccaaggcgccaaccctaaaacgtttttgtggcgtccgtggaggaaactggacgccatggcgacgcctaggcgcatttggcgacgccatactcatctcaggcatggcgagagcgacgccctaa

SEQ ID NO: 17499 - DNA, 267 bp, Zea mays
  Peptide Sequence Number=SeqID_59278
atggagcaagactttgagtgtgctggaaaatggggcaccggacactgtccggtgcgccagccaggcaccctccgaaccagccactctcgagaaattccaggtgcactccgctataattcaccggactgtctgtgcaaatgcagaagtcagagggcaccggactgttcgatgcagcaagatgacaaggcgctccaacggtcaattgctccgaaccctaacggttgcgctgatgtggcacgcaccagacagtgcacagtgactgtctag

SEQ ID NO: 17500 - DNA, 540 bp, Zea mays
  Peptide Sequence Number=SeqID_59279
atggccgagttcgatcaagcgctcttcctctatcttaacagcagccaggatcaagcatcagttattcaagatcaacctcaaactctcaacatcttcccttctgaaccaatgcatgtcgtcgagcctgctgcaccaaaggaatctatgggggctacgactaacaacacggcgtggaacaacgccggcgcaggcccatccaagcagccgccatccaaccttccgtcgaggacgacggcgactccggcagggccgcgaaaggacggcagcaaaccgccggcagccgtcaagagagaagggagcagcagcggtggcgccatgggaagcggcacaccgtcgacgtcgaaccaacaggagggccccaccaggacctcagacgccaagacgctgagaaggctcgcgcagaacagggaggcggcacggaaaagcaggctcagaaagaaggcgtacattcagaacctagagacaagcagggttaggctggcccatctggaacaagaggtacacagatcaagaactcagaatcaacactgctttttttag

SEQ ID NO: 17501 - DNA, 756 bp, Zea mays
  Peptide Sequence Number=SeqID_59280
atggagcacgcgaggtggcaggaggagcacggcaaggtgatgcgccacctgcgggcggcgctggaggcggagtacgccgcgacggcgacgacgccagcggcggcggcggcggacgcgcagctccggcagctggtggacgcggcggcggcgcaccacggtgcgctggcggagctgaaggccgtggcggcgagcgccgacgcgttccacctcgtgtccggggcgtgggtgtccgccgccgagcgctgcttcctctggatcggcggcttccgcccttcagagctcatcaagatagcggcccggcacgcggagcccctgacggagcagcaggcgatgagcgtctgcggtgtgcagcagtgggcgagggacgcggaggcggcgttggaccacgagctgcaagcgatgcacagctccgtgtcggaggccatctcctccgacgcggcggcgctgctctacccctactccgacgtgcccggcttcatggccaccatgtccctcgccatcagcaagctcgcctccctcgaagccttcgtcagacaagcggacgcgcttaggctgcagacgctgcaccggctgccgcagatcctgacggcgcggcagtcagcgcggtgcttcctcgccatcgccgactactcccaccgcctccgcgcgctcagcgaactctggcacacccggcaaggacatgagcgagcggcgagcacccaggcggccaggcccagccagacaccgccctaccaaagtagagacggtttactatag

SEQ ID NO: 17502 - DNA, 384 bp, Zea mays
  Peptide Sequence Number=SeqID_59281
atggtgaaacatagaaagttaaagaataagaaagatgagaacagaggggaacatgttggatatgtcctcagactcggtcaaggaaccgagctaggatctaacccatgtgccctgatcgggggtgcaaacctcctgtggttgtggcccccggtcacatgtgctgtattaacgaatataggggccgagatggaagccaactcttccacgctttcgacaaccctagccgccacacacccagaaaggggccaatttttctaccagcgcctaatgactgaaaatcgcccaaactccccagcaatgacacccgtggatcctaacagttctatgctactagtcaccgacgttcctccgcaaggttccaacgcgcaaggagaaacgaactag

SEQ ID NO: 17503 - DNA, 390 bp, Zea mays
  Peptide Sequence Number=SeqID_59282
atggcgcccgattcctgcggagctcgcgtcgcgcgacagttgaagattcgtcgcggcgataaactcggtcaacgcgcgtttattgcgcggaggtggggaagaaggacaggaacgaggtccaaccacagagcgcctgcgtccagtggccgacccgtgggtcccgcgctagtgccacaaatcgcggacatcggcgcggaggtggagctagggagcggatgcgcggatcacgcgaagcttgttacggtgaggttggggaagaacccgacgggcgggccctcgatgccagtggaaggaggaatcggtgcgcgtggtggagtccggtttactgaggaccggacggtggggcccaagggcagtgtgcgcggaagtgcaggtgacggctgggcctag

SEQ ID NO: 17504 - DNA, 786 bp, Zea mays
  Peptide Sequence Number=SeqID_59283
gaactcgccagtctcgggaagtcgcgaaggctgctccgctataattcaccggacatgtccgcacgcgcaggagtcagagtcgcccatactggcgcaccggacagtgaacagtgcatgtcccggtgcgccaccgggacatcaaggcgggcccagaagtcagaactccaacggtcagattccaacggcactgatgacgtggtgggggcaccggacatgtccgatgcattaattgtcactataattgtgggggcacccaggaacgggccgagcaagtttgcgagacagcggatgaccaagtctccagccgagcaagtttgcgagacagagcggacgaccaagtcccccgtcgagcaagtctacgaggcagagcggatgactaagtcccacgcggagcaagtctacaaggtggagcagatgacgaccaagtcccccgccgaacaagtctacggggcagagcggacgactaagtcccacgcggagcaagtgtatgaggtggaccagatgaccaagtcttcaaccgaacaagtctgcgagacagagcggacgaccaagtcccccaccgagcaagtctacggggcagagcggacgactaagtcccacgtggagcaagtctacgaggcggagcggatgaccaagtctccagccgagcaagtttgcgagacagagcggacgaccaagtcccctgcggagcaagtctacgagacggagtgtacgaccaaattcccagccgagcaagtctacaaggcggatcggacgactaaactctgccaaacacaatcttactga

SEQ ID NO: 17505 - DNA, 687 bp, Zea mays
  Peptide Sequence Number=SeqID_59284
atggcggccacgctggacggagctgccggatgcaggaagcgcaagcgcgcggcgcctggccttgccgacctgcacgacgacatgctcgagcgcgtgctcgcgcgcctcccaccggccagctacttccgcctccggggcgtctcccgccggtggcgcgccgcggcggagtcccgcagcttccgcgccgcctgcgcgcgcgtcacggcccgggacccatggttcctcatgctcgaggactccgaccaccaggaccaggaccaggacgagcggcggccgcgccccgccgccgtgttcgactccgccgagcgcgccttggcgcggtggcgtggcgcgccggtgccgctgcagccggtggccgccgcgagcgggctcgtgctctaccgcgacccgagcacgggtggcctcaccgtggtcaacccgctcacgggcgcgtcccgcgcgctcccgccgccggcgcgcgtggcgggcgcgctgcaggccgtcgccatgtacggctcgccgtaccgcgtggtgctcatcctgggcgagctgccggagctgtccacggtggcgtacgactcgtccacgaacgcgtggagcgagcaggcggcgctctcccgaaaaaccagaggtggagggcgccccgtccccgggagcgcgtcgcggaggtcggcgacggcgacggcgacgacacggtctacttcctga

SEQ ID NO: 17506 - DNA, 819 bp, Zea mays
  Peptide Sequence Number=SeqID_59285
atggcatggcaccgccaccgtcgcaggcgcaggcgcaggcacagcgtcgctgacaaaagcaaccaatgcttgctgttgctgcctgcgaacagcaggcaggcagacaggcccggcaggctctgcgccacacaggtgctcgccgggacgcctactcttctctctacgcgccctgcatgggtccggcggtccgccccggccgccgccccgccggcaccggcaccatcgatccttcctccgtcggatcgtcccggcgtcgcccggcgagtctcttgccgtcggccgtgctccgcagccctgtgctgtgaaggtgatacacactacaggaaaatgatatatttccgacggccactattatttccgacggttcctagggtaccgtcgaaaatagctctatttccgacggcccagggccagccgtcggaaatagctctatttccgatggctcacaagccccccgtcggaaataagcgtatttccgacggctggccacctaggccgtcggaaataagcatatttctaacggccgttaccccgcgcggccccctggccgcgcacacagccaacgcacacactgcacgcacacacgttctacactccacgccgccgccgccaggacccgacaccgccgccgccggccaccttcgccggccatcttcgccggccacctgcgccggaccttcaccggccatcttccccggccacctgcgccggacgccgttgtgccccgacgccccgacgcccgaagcgccgccgcctcgccgtccgaagcgccgccaccccgacacccactgtcgccgcgccttcgccccgaatcactga

SEQ ID NO: 17507 - DNA, 510 bp, Zea mays
  Peptide Sequence Number=SeqID_59286
atgaggagcaatagacgacgccttggaggaagaggaggaggatggggtggccagggcggtggtgtaagtgtggccgcttccttcgccgcgctgttgggctgtgtcgtggccctcgtcggcggcgccgccgggcagggcccccggcccccctccgactacaaaaccctcagcggcgccgctccacttgtggtggccaaaggtggattttcaggagtgtttccagattctagccaaggcgcctattctttcgcgatgatcaccagcgcaccggacacggccatgtggtgcgacgtccaactaacaaaggatggtgttggagtctgccttcgggatataaatatgaaaaactgcaccagtgttgatcaagcctaccccgagagaaagcggacctatgtcatcgatggtgtgcggaaaactggatggtttgtttcagacttcaccattgctgagcttcagtctgtttctcgtgagtacaacaataccactgcaagccttccattaaagcgataa

SEQ ID NO: 17508 - DNA, 291 bp, Zea mays
  Peptide Sequence Number=SeqID_59287
atgggcggggaaggagcccatgctgctggaggtgctggaggaggaggagaagctggtggcagagttggtcgacatggtgacctagagcccaccaccgagcatctagttgctgtgaagaaggtgttgcgctacattgtcggcacaataggctacgactatttgttggtacttgcttttctgagtaagtgtatccaacgggagagtggagagagtgtttgcaaagttcgacggggaatgacaatatctctgttaatctggccgctcaagggcactgtacgagggtatttatag

SEQ ID NO: 17509 - DNA, 1302 bp, Zea mays
  Peptide Sequence Number=SeqID_59288
atggtgctcggcctcaacaagctaacctgcgagggcatccacaactgttgttttactaaactgaattcaaataagactgatcatggagaacccttagttatctcacataatggtgctagtggagactacccggactgtacagacttggcctaccatagtgcaattgatgatggtgcagacatcattgactgtcctattcaagtgacaaatgatggagttcttatgtgcatgagttccactaacctgcttgacactacgaatgttcagagaacaacttacaactctctggtttctgtcgttccagatattcagcctcaaccaggaatcttcacattcaacctcacttggtccgacattaacagtaatgttttaaaacctaaaatatcttctccagtgagtggttatttccttgtaaggaacccaagatacacaaatcaagggaagtttttgaagttatctgactttctagcaatcgcaatggataaagacttgtctggtgtcatgatcattattgagaatgctgcatttttagtaaattcattgggaattgacattgttgattctttaaccactgccttaagtgctgctggcttcgataatcatcctaccaaggaagttctgatcaagtcaaaagatagtgatgttcttgtcaaactgaagcagcagaaaacaaaatgcaagcttgtttacactctaccctctggcatcggggatgcttctaattcctcgttgaaagacattaagaagtttgctgaatatgtagctgtggacagcaaatctgtttttactctaagctctgacttcatcataagacagaacagtcttgtgcaagatctgcagtcagcggggctagctttgtatgcagaggtgttccagaatgagtttgtagcacaaccattggatttcttcggagatgaaactgtggaaatcaattactatattcaatcatttaatttatcaggcatcataactgatttcccgaagacagtcagaagatataaaagaaacacctgtacagttctgggaaaggatatgcccagctacatgcagcctcctcaggctggttcccttgcacagtttctacaaaccttcaaaacccagcctccatctctgccaccaatgtcgacgctgaattcttcaagcgtggaggagccacctcttcctactgttgcgttaagaagtgtatctgatggtagtgcctcgggggcgaccaagactcctggcacaccttctgatgctccaacggctacagtaaatgctggcatgctacttgtgatggttttcacagctttgctaatctga

SEQ ID NO: 17510 - DNA, 1842 bp, Zea mays
  Peptide Sequence Number=SeqID_59289
atggctggcggggtggccgttggggtcgtggcgctgttcttggctgcagcttcatttggggctaatgccaacaccgactcgaatgatgtgaatgccctcaatgtgttctacacaaccatgaattcgccgccgcagctgacgaactgggtgtcccaaaatggggatccctgtgggcagtcgtggctgggggtcacctgctcgggttccagagtgacagcaataaagttatctgggatgaggcttaacggcaccttgggctacaacatgaaccagctcactgcactagttcagctggatatgagcaataataatcttggaggcagtgacattccttataatcttcctccgaatctccagagcttaaatcttgcagtaaataacttcactgggactgtaccttactccatctcccagatggttgcacttagggatttggatctatcatacaacacattctctggtgatatcccacatagctttaactccttgacaagtttgaaaacactttaccttcagaacaacaaatttaacggcacaatagatgttctcactgatcttcctcttactgacttaaatgtcgaaaacaaccaactcaccggttggatacccgataaactaaagggaatcaataatctccagaaatcatggaggttatcacagggacaagaccctgaacaaaatgaacctctcagcccttttgcttcaggacttaaacagatgaaatcgatcaaatctatcaaaatcgtatcaacaatgggaaaagaagaattgcagaagactgtttcgatgagtttgaagcctccaacaaaaattgacctgcacaagtcctttgatgaaaatgataccactaacaaggccatctcaaggaatgtaagcttgtcttccatcacaatacctgcatacacagtggcagaccttcagatggcaacgggcagcttcagtcctgacagttttatcggtgagggatcggtaggccgtgtttacaaagccaaattcggtgatcagaaggtcatggctgtaaagaaaataaacttctctgtatttccaagccatccttcagatttgttcattgagttggttgcaaacatttcaatgttaaatcatccaaaccttgctgagcttgctggttactgttcagagcatggacaatgcttgctggcatatgaattctaccgaaacggttctcttcatgatttccttcatctgaaagatgaacacagcaagccattgtcttggaacaaccgtgtcaagattgcgcttggatctgcaagagcattagagtacctacatgagacttgttcaccctctgtggtccacaagaatttcaagtcatccaacattttattggatggtgagctgaccccccacctctctgattctgggtttgcaggccttcttgcaaaccaggaattccaggaatcggatgagaactcaggatacagggcacctgaggtgatcttggctggtcagtactccctgaagagcgacgtgtacagcttcggagtcgtcatgctagagcttctgactggccggaaaccgtttgacaggacccgaccgcggcctgagcagtcactggtccgatgggctactccgcagctgcacgacatcgacgcgctggaccagatggtcgaccccgcgctgcaagggctgtacccgtccaaatccctctcccgcttcgccgatgccatcgccctttgtgttcagcctgagccggagtttcggccgccgatgtcggaggtcgtgcagtcgctggtgcgcctggtgcagagggcgaacatgacgaggatgcacgagagccagtcgcggcgccacggcgaatccggcggggactacgagttttga

SEQ ID NO: 17511 - DNA, 939 bp, Zea mays
  Peptide Sequence Number=SeqID_59290
atggtgttcatatctagaaggaaggaaattgatcaaggtcactcatttcaaaaaaggaagaaatttgaactgatcacgaggctctctcctccttcgtccacgctcgtctcctcctacgccagggcggggctgctggcggagtcccgcagggtgttcgatgagctgcctgctggggccgcggccgcgcgcaacgcgatgttgtcgtcgtatgcgcgaggcgggcgcgtgggcgacgcagagcggctgttcgcgggaatgcccgaccagagcgtggtgtcgtggaccgcaatggtgtcgggctacgcgcagaacgggaggcatgaggaggcggtgcgcacgttcctggacatgtgggacggggccggggtgcggcccaacgagctcaccgtcagcagcgtcctgcccgcgtgcgctgcgctcggggccctcgcgctggggaggaaggtggagcgctatgccagggggagagggatgctcaggaacgtctatgtcgccaacgccttggtcgagatgtacgccaagtgcggcagcatccaccgggcttggaaggtgtttcggggcatggggacgcagagggatctttgttcttggaactccatgatcatggcgtttgtcgtgcatggcctctggacggaggcgctgaccttgtttcataaactgaggatgacaggggcaaaaccagatggcattacatttgttggagtcattttggcctgtactcatggaggcttggtggatgaaggcaagctgcttttcaactcgatgagaggggagttcggtcttaagccaagaatcgagcactatggttgcatggttgacctgctggggcgtgttggtctgttaaaagaagctaacagtctgatcgcgagcatgccaatggagcctgacgccgtaatctggggagccctgcttggagcctgcacttccatggcaacttag

SEQ ID NO: 17512 - DNA, 840 bp, Zea mays
  Peptide Sequence Number=SeqID_59291
atgtcgaaaatggatgctcttccgaaggttgtggaagtgagttcactagaggtgggcgccaatataaatgatcttcagacgaaggtcatgaaggacataccttcatcattttatcgtataaacatgaatataaataagaaaattattttggtgcacggttctgccgatccctctgcccacccaccgccccctctgctccccgccatcaactcgacgccgagccgccaccaacgccgatcctgtgatccagggccccagcagcgcggccaccatcaacgcaccctcaatctgccatcctcgatccaccaactatgctccccgccatcaacgctcctcgatctctgctccgggcagacgcatcctccatggtcctcccctccgcatccgcatcctctgccatcgttctcccacccgtgtcatgctccaaccaatctccatggtcctctcccctctccatcctctctcgcctatcccttcgtcgtctctgttgcaataggagctgagcgcctcacacgacccaaagaagacgtcgacaccaccgcgccatgcctcgatctctgctttgggcagggccctcaccatgtcccacacgaccccaaagacgacactgacgcgcatatcttcgtcagccgccgccaccgcgccatgccccaatctctgttcacgccaccgcgagtatgtctcctcctcccaacggagttccccatgaggacgatagcatgggcaacagtgctcggccacattgtcttcggcatcgtggacttcccatcacttggcgctgtcagatgcgggagacgcagtcataggttgcgctcctgcacgccccctcctcctccgtaa

SEQ ID NO: 17513 - DNA, 276 bp, Zea mays
  Peptide Sequence Number=SeqID_59292
atggttaaagcctgcacatgccgtggcgcggatctggctatggctgttgggtgtttgctgggcgtggagcttcggatcacgacgcacctgctcgggacctcggcgggtggagattggatcggctgggtggtggattgctcgccgaacctcggattcatcctcaccggtcgctgtggtgcttcgcttggacacgccaaacaagtctggggcttctgcgggctggacttacgaccggggcgacaagaatttctcgccggggtcgctgcactgccgtag

SEQ ID NO: 17514 - DNA, 483 bp, Zea mays
  Peptide Sequence Number=SeqID_59293
atggcggtcaggcgagggattcctgcattggagcttcctataaactgtagcgggatcggcttcgtggggatgccgccggtgggctgcgtgccgtcgcagcgcacgctcgggggcggcctcgccaccagggcctgcgagcccaagcgaaacgaggcggcgctgctgtacaacgccagggcccaggagttgatcgccgccttcaacaacaacaactccgacgtgctggtcgtcttcctcgacatctaccgcatcctggacgacctcatggagcgcggggaggagtacggcttctccgagaccaccaggggatgctgcggcaccggcaccatcgaggtcacgggcctctgtgactcccgcttcgtctccgtctgcgatgatgtctcgcaacacgtcttcttcgacagctaccacccaacagagagagcctacaggatcatcgtcaacgacatctttctaaactacggacacgtgctcttctcatga

SEQ ID NO: 17515 - DNA, 276 bp, Zea mays
  Peptide Sequence Number=SeqID_59294
atgtttaaagactgcacatgccgtggcgcggatctggctatggctgttgggtgtctgctgggcgtggagcttcggatcatgacgcacctgctcgggacctcggcgggtggaaattggatcggctgggtggtggattgctcgccgaacctcggattcatcctcaccggtcgctgtggtgcttcgcttggaaatgccaaacaagtctggggcttctgcgggctggacttacgaccggggcgccaggaatttctcgccggggtcgctgcgccgccgtag

SEQ ID NO: 17516 - DNA, 349 bp, Zea mays
  Peptide Sequence Number=SeqID_59295
cggttacaccctcttgagggatccacatcacaacaagggtcttgctttcatggagaaggagagggatgcacaccacttgcgggggctgcttcctcctgcagttgtgcctcaagaactccaaggcacagcatcagtggtccttgcaggtttgttagcagcactcaaggtggttggtaggaccttggcagagcacacttatttattccttggtgctggggaggctggaactggtattgcagaactcattgctcttgagatttcaaaacaggagaagaggcgatgttatgaagagcgtgtaaatttgaaaatgaaagttagagaattgttggcttacattgatgtcagataa

SEQ ID NO: 17517 - DNA, 963 bp, Zea mays
  Peptide Sequence Number=SeqID_59296
atggagcacaagaaagctagagcagtggaggatcctgcccggttgatttgcgacgatgccctcaccgaggtattccgcaggctgcctgcccgtgcgctcgcggcctgcagactggtgtgcaagtcatggatgtccgtgctcacagatccacacttcatccatgagcacctgagccgtggccagcagaagctgctgctctttgcgactgacaggggaaacgacaggtcgctcgccatggtgctcgcggacaacaacgcatccatgtaccagctgtcaaggcccgcggcgtctcggagcgtcttcgtgcacaattcttgcaatggcctgctctgcctaggtgacagcacaggagctgtcgaggtgctgaacccaacgactggtgaatctttaatgttgccgatgccaatgtacacggcagggagcagccagttctcgtcctgcaattggcactgcttggggttttgcccacaaaaaagggaacacaaggtggtgcatttctatccaggagctcacaatgacccgttcaaggtacactgtgagatatacacgattggagtcggtgtctggagacaagttgggagctgtcatggtgctccgactgacagaggggtgcatgtgaatgggatggtatactatctgacaaagttccgctacattgcttcatcgcgtatcaactgcttgaatcttgagagcgaaaaatttgatgtgatgatgcttcctccacacaaatcttatggaggtcattgctctttggcagagcttgagggaaagctatgcttgttgattgtcgatggtgcattggaagtgttgaaggaaaatacttttctagtttgggtcatattcggggataaattggctaagaagcttgaaaaagatatttctgaaccacaaactccacaagaagtagaaagtcttcttactttgtttgcacagatatctggaacctttctgttcttgttatga

SEQ ID NO: 17518 - DNA, 489 bp, Zea mays
  Peptide Sequence Number=SeqID_59297
atgaccatctccgtgtcggcgagccaggacaacaactccttcgacctcgaatttgtggtgcccggcgacgagagtgccggtccaacgccgaagaggattgcgtggagcgcccggggcagccaacgttgtggccatggatgcgtcggcagtggaggccaaggctggagtgttgccaccgacgtcgctgttccgctcggccaccaggttctgcgtctcgcttctcaagctgatgaatcccaagacctcagtagcggccgaggccggggctacgcaagcgccgaggtaggtagcggcggcgagccggttccgtgtaaatttgcgtgtggaggtagtgacctgcggtcgcgtcgttttacagttgtggaatattctagagcgagaacctgcaggtcggttctcttccgtggagatgggatcgtatggctgatagaaataatgacgacgtggacatgctgtgaacgcttatttgctcccagctttaatatatag

SEQ ID NO: 17519 - DNA, 708 bp, Zea mays
  Peptide Sequence Number=SeqID_59298
atggcggcaacatttacgcccgccattgcgaaggagaaggacgcgctgacgcggacccacaactccaccgaagcccgcaaggattccgacggaatcccgcggaaggttgttagcacggccgagtttgggcccgcggaggaagacagacctgtccaaggggtcccactggcagcgggagtggcggagttgaagcgcggtgagagccgggtggtggatctggtgcgagggtcccgcgaagcagtgaggcaacatgggcgcgagtgtaggactgcgtggtgggtccatcaggttggcgtcgagttgtggaacgggacctgggacgcgcggctgacgagaggaccccgcatagcagagggctggaaaaaagaagaagttctagacacccctctaccaaaggagcatgatgaagatgcaattgctgctgttaagaacgcttacaggaaagcaattgtggaacgcaagttagtagaaggcatagaagttgggtcacacgtgatcaaaatgctatggaaatttcatcatgaactaccatacgcatggggcgagaagggcctaaatgagctatgtggcatgctgaaaacatcagagggtgacataaataaaaacgctggtagcagcggccatgggacgacagtcaaaagcaaacccaactttaagaagggtaaatctcaagagaagggcaaggctaaagatatgatcttcaagtaa

SEQ ID NO: 17520 - DNA, 219 bp, Zea mays
  Peptide Sequence Number=SeqID_59299
atgaaggacgtgctcaccaaagaagacgacctcgctagagccaagaggaaaaacatcgattggggtgaaccgttggtcagatcgatgaatcgaaagcaccgggacgaagctctcgacgagacaaacgcagcggtaccctcagatatcgccgacaacgcacggatcgggggcttcggcttcgggataaagcttttctctcgtgactggatggaaacataa

SEQ ID NO: 17521 - DNA, 147 bp, Zea mays
  Peptide Sequence Number=SeqID_59300
atgaacgtatgtgagctcacccttgttgtactcacaccccaggtcaagaacagaagagttggtttggaggttgacctttgggagatggctggtgcaaagaagatgtctttgctcaccgcccccattccgagcctccctgctagttag

SEQ ID NO: 17522 - DNA, 159 bp, Zea mays
  Peptide Sequence Number=SeqID_59301
atggagatgagactcagtgacaattctccagaaacatcagggatgagatctacacagaaggccgagcccaccagcacttatccaccatcatcagcaggcctagatcttcacctgcaacatggtgggataaaccatgagtactcgaatgtactcagctag

SEQ ID NO: 17523 - DNA, 525 bp, Zea mays
  Peptide Sequence Number=SeqID_59302
atgacgaaggtcagtgcttgccgagggtggtctaaaagggttcaccggaggtgggcgccaatgttgaggacttgttctcaaatgctacgaattaagaacaaggcaacacaaaccactaatggttatagtccttcgtccttcgaagcattattccctttaggatttaatgatcttcgaacgaagaggtgtatgggagtcgtgatcccttggcagatgggtaacataacttgtgggtacagggtacaacctctgcagagtgtacaactgagaagtaagttcaacggccccgtcgaacttaacattaagaacgtgggtaccgtcgaacttaacattaagaacgtgagtaccgtcgaacttaacattaagaacttaacattaagaaccgttgtttttaagttcgacggggccgtcgaatttttttcacataagttcaatggcacccacgttcttatggttaagttcgacggggccacgtggtcgttgaacttatgtgtcctgcttgggtctgcgaggagtgcacaataa

SEQ ID NO: 17524 - DNA, 492 bp, Zea mays
  Peptide Sequence Number=SeqID_59303
atggagttcgatagcacggcgctcaccaataacttaatccaacttgaaggccacgagggcgagatgctggagcactctaagcaaaaagaacagggagcattgatgccagagttgctggaacggcaggcgcaaggagctggggagtctattggtgttgccgagatggggctactactgctcctaagcatccatggccagaggagggagagagtatggagaaacgcgctgagtagggaagcacaaccggaggagctcagcagcagagagctgagcaaaggaagcgccagccggacgcttggccatgggagacgggaaggaggggcctcggctagggaggggcgaggagcaggggcgcggccgacaagctggagcaccagcgagcagcaaccaagagcagggcgcggcggccagggagctcggccaggcactggggctgggcgcgcgcaggagagatggagggaggagagaggagtggctggagaagatgactag

SEQ ID NO: 17525 - DNA, 354 bp, Zea mays
  Peptide Sequence Number=SeqID_59304
atggagaccccgccaggagcgatgacgtcggcaccggctgttgtcatccccgatgacaaccatgaacagagcccaagattgagtcccaatagccatctgggggaggctgttaagcaacttgagtttcagttaccttgtgggggcactagagaggatagagcgctcgagaggatacaggcagggaaggagaaagggccgaggactagggagaggagcgccgagaagcgccgtcggacaagacttgacagaggagctccagcgccgggagagaagagcgtcgggagaggagctccagcgccgatcggttctaagaaacggggcagtgagatggattgccgtaacaacgcgtactag

SEQ ID NO: 17526 - DNA, 192 bp, Zea mays
  Peptide Sequence Number=SeqID_59305
atggagaccgaagactggagaccatacctgcacgccggctgctggcgccgccgcgccggagatggaggaggggccgagcgggacgatgccgccgcaccggagatggaggaggcgccggagatggaggaggcttctactcacgtggtgggaattgggaaaaaggaagctgggctgggccactgggcaaagtga

SEQ ID NO: 17527 - DNA, 366 bp, Zea mays
  Peptide Sequence Number=SeqID_59306
atggatcgagctctgcgcacctacaggaacagagagaagagatggtgggggaaatggagaggggcgctggcttcttgctggtcgtggagcagggagaagaagagccagggagaggcgctggaaattttgggcgccatagttggagcagaggggcccgtgcctatggagcagggagggagctcgtccgcgccatggacgacagagggatggatgggtgttgtctctgctgccaagcctaaagggggcgcgcccatggggaaggaggacagggagcgccggccatggagaggctgctggcggccatggagctcctgcgcgctggggaagaaggctaggaggaagagagtggcagctaggaaaatttga

SEQ ID NO: 17528 - DNA, 726 bp, Zea mays
  Peptide Sequence Number=SeqID_59307
atggtgcctttggcagggcctgactgcctgtcagtctcactctatcaagcggcactacagtcggagtggcgcaggcggcgctgtccttttgtcaggccgctttatgctgatgggggttaccagctgagaattaggagtcttgagggtacccctaattatggtccccgacaattactttatctttgtgctagtagaccggacattatgcttagtgtatgcatgtgtgctagatttcaatccgaccccaaggagtgtcaccttgtggccgttaagcgaattcttaggtatttagtttctatgccttgcttcaggatctggtatccaaaggggtctacctttgacctaattggatactcagactccgactatgccgggtgcaaggttgataggaagagtacatcagggacatgccagtttcttggaaggtccctggtgtcctcgagttccaagaaacaaacatctgttgccctatccatcgctgaggccaagtacattgtcgtaggacagtgttgcgcgcaactgctttggatgaggcaaaccctccgggactttggctacaatctgagcaaagtcccactcctatgtgataatgagagtgcaatccgcttggcagataatcctgttgaacatagccacactaagcacatagacattcggcatcacttcctgagagaccaccagcaaaagggagatatcgatgtttaccacattagcaccgagaactag

SEQ ID NO: 17529 - DNA, 621 bp, Zea mays
  Peptide Sequence Number=SeqID_59308
atggtgaggagcatagggctccagcagggaaggtggtggctcggccacggcaagagcagggaaggggaggctggccgtcgaccttgggtgcggtcagggaaggtgggggcgtgtccgggtgcccagggagaagagcgccatggatcgagctctgcgcacatacaggaacagagagaagagacggtgggggaaaatggagaggggcgctggattcttgctggtcatggagcagggggaagacgagccaggggagaggcgctagaaattttgggcgccatggttggagcagagtggctcgcgcctatggagcagggagggacctcgtccgtgccatggatagaagagggatggatgggcactgtctctgctaccaagcctgaagggggcgcgcccatggggaaggaggacagggagtgccggccatggagaggatgctggcggccatggagctcctgcgcgctggggaagaagattgtcgaggttttagagacgcaagagatccaaggacaacagcaaaatccattaatccacctggatatgccatttaaagataaggttgacaaaaatgacgtcatgatgcctagagaaagagcatcggaaagactagaaatgagagattag

SEQ ID NO: 17530 - DNA, 429 bp, Zea mays
  Peptide Sequence Number=SeqID_59309
atggcggggagaaaggcgaaagtgacgggagacagccttaccggagatggaggtgccgatgaggctgcccacgcgagtgggatgatccatggtggagcaccagtggcggtgaacaattcaaggtgctccggccaccaatcttccctggagcgtccccgatcagcaacgaggaggctccccgaagctccccagccattccatatgcccggaatggcatcacaggcgaagctccatggtgcgaagcggacccgcggcatcactctgtcgccgggcaggcggcaatcttggcgcaagccacagcaacaacccaatgtttttgctggtttgttacgcgcctccattggaaccgcaacaagattcgggtgggagaaggtcctagcttgccaggcccggctgtcagggagcgtgggcagcagacgcggctggtga

SEQ ID NO: 17531 - DNA, 348 bp, Zea mays
  Peptide Sequence Number=SeqID_59310
agtgttacagtgtccttccttgttctattcacttgggcacccccggtcattgctagggccagatcccctggtgaggaggatgggggtgctaccgcacccgctgtcactgcctcaacaacggtcgctatttgtgtggtcgtagctaaggctccccctactccttgcggggaggttgtgacccccaccatcactgttgccgctaccgcctccgtcgcgactcgtgcagttgcagttgggagcactcttgcaccttgtggggatgttgccaccctcaccattgttgatgggcatatcgacgcttggtggtggtcggggcctgttgcgtcgacattgctgctttgcccctag

SEQ ID NO: 17532 - DNA, 246 bp, Zea mays
  Peptide Sequence Number=SeqID_59311
atgggcaaaaagacagttgatactagagaggcaaggtggtctaggcatgggcatgagtcattatggtggcacccaggtgtctcctatgtgggtctaccgcagacccctgagagggcatggcccattcgttgctacgcacagtcatgtcctgagccactatccaaggcctcttggcaatcgaagcgaagacccaacgatgaagaccctagagagaatgcatacttgacttgggctgaagggggctga

SEQ ID NO: 17533 - DNA, 1078 bp, Zea mays
  Peptide Sequence Number=SeqID_59312
atgcaggcggcatgcaaccgcgccaagtgggcgcacctctccgacttccagcgcgtccggcatggaggcccaggcccacgcgtcatgcgaccggcgggcaggagcagcggtcacgtcgtcagccaagcttacatcccatccgggggcagcgagagagccctctctcacggcgtgaagacgacgcgcccgtgttccgttcctcgaacggctcgcgcacgcgcaacgactgccccgcgaaccgcacgcctcgtcacattaactccgcggcgagacaggcggcgcctttggcaagagaagcaagcgacgcttcgccttcgccataatgaccgcgtcaaaaaagggaccaggaaagggggataccccgaaaaggatccttcactgagaaggaaccaggctccgagcctccctactgatcagaggttcgaaggctggcccctcgaagggttcaacagccgcctcagagcgcgtgggctctacacccactactggtcagaggttcgaaggccggcccctcggaagggttcaacgaccgcctcaggctactcggtctccgtgcccactactgatcaggggttcgaaggctggcccccgaaggtcaggcccgacctcaggcaccataggaaagctccgctcccgcccgaccccagggctcggactcgggttaagacccggaagacggcgaactccgctccgcccgaccccagggctcggactcgggcaaagacccggaagacggcgaactccgctctgcccgaccccagggctcggactcgggcaaagacccggaagacggcgaactccgctccgcccgacccgagggctcggactcgggctaagacccggaagacgacgaactccgctccgcccgaccccagggctcggactcaggcttggccccggaagacgacgaactccgcctcgcccgaccccagggctcggactccgccctggcctctgcggctctgccgaacgatctccgcttcgcccgacccaggggctcgggctcggcctcggcaacagaagacagactcgacctcagcttcggaggagcccccacgtcgcccgacctcggacgcag

SEQ ID NO: 17534 - DNA, 285 bp, Zea mays
  Peptide Sequence Number=SeqID_59313
atgggggaacgtgcacaggacttcagtagaaacgcttttagttttagccaggcccagcgcacgattaccgaactttacccacccgaccgacacagcaatgacgacgaaaaagtaggcgagacggcggactccagttgccagttggcagcgacaaaagcgagatgcgtgtgcagtggaagtagtggggttggaacggacgagacaacggaggatgacatgacatctgataccgtagccagacccgccttggtccccagatatcggcatatcgccttagcggcctag

SEQ ID NO: 17535 - DNA, 594 bp, Zea mays
  Peptide Sequence Number=SeqID_59314
atgaacattgactatccaggtatccttccacagctccacagaccacggcccacgggtgctagtggagctagtatcacttgcaccaacacgcgcagagtaatctattatagtatcatcacgcaggtgtccacgctggtcgtcacactcaaccatggctgctgccgctgcttcaccaggatccggaagaccgtgtgcaagctgcaagaaaccgaggacatccgggcgatttccttcgacgaggtgtccgggacggtgacgatctcgggagccttcgacccgctggtgctcccctgcaagctccggcgcaaggcgggctgtgtgatcagggacatccagctcgtggcggcagaactgaagctcacgccgcaacgaccagccatgccgtcgaaaccgcccgggccggctcctgctccgccgtgctgctgcggtatgtgcatatgcgggtgtggaggctacggctacggctacggctgccgttgccagttcgtggaccacccgccgtgctacgaagggctgccgttgaggcagtacccaaagatcgaggtcacctgcgactgcgaggaggcgtcgtctgcagcgtgcaagatcgtgtga

SEQ ID NO: 17536 - DNA, 270 bp, Zea mays
  Peptide Sequence Number=SeqID_59315
atgacacagcaatctcaggtccctaagctcctgcaaaaaaaggactttttcactgtttccctgtgggccatacacgcaagttcatactttacatgtaagcaggaaaaattgccaccaacagactcaagattacgaccagaccagagatgtctggagaaaggtgaatatgaaagggcaaatgctgagaagttgaggcttgaacagaaacagcggcaggatcctttggaggtattcgttggacatgtcaaaaccatatcaatcgatgtttga

SEQ ID NO: 17537 - DNA, 378 bp, Zea mays
  Peptide Sequence Number=SeqID_59316
atggacgggatgctcactgctaaggccaaagagcgctgcagcatcctcccggaggtcatcctcatcgtcgtctccggccaacccacacaaccgtcactcctcgttgcagtcgatctcaacagtttcatcgtcggagacggccatcgacccacctcggactcggactcccggttcctcaacggagtggaaaaggttcacactttagccaataaaaagaccaagtattgggttcaaacaaaggagcaagggacaaccgaagacacctctggtctggcgcaccggactgtccggtgtgccaccggacatgtccggtgcaccagaggactcagacttcgaactcgtcaccttcgggaatttccagaggcgactccgctataa

SEQ ID NO: 17538 - DNA, 519 bp, Zea mays
  Peptide Sequence Number=SeqID_59317
atggcctggccatatgggttcgcgtcggtaggcacgcagcagcagcacgccacgcgaacagcacgtaaaggaagggccgcaccgcgccgggagctagctgcgaccgactgcgaggtcgacgtcgactcgccgagcgccactgccagcgcgccgagagtgccgagtgcgttgcaagcacgcgtcaccgcgcaaaggaaaaatctctcccacgaaagcgccgcaggaaaggccgcccgcgagtgcgtcaccggggccggcccaaaggcgcccccgcgcccgctcgagggggttggtctgcgtcgtcgccactcgccacaaccgaccaacaaatccgggtcacccctcgtggtcgtggtcgtggtgcagcaacgcaacgcaacgcaacccagttcgcacttggcgctggcgatagatgccctgatgattcgcgctcgtatcgtatcgtactacggcctacggctacgggacgtcgtccacggccgatcagaagcgacggatatggagtcatcatcgaagtga

SEQ ID NO: 17539 - DNA, 219 bp, Zea mays
  Peptide Sequence Number=SeqID_59318
atggcccgttggcttctaaagtgcggcgccccggccatgcccggcggtggtgacgcccgccccaatggggactccttgctggaagaggactcgatccatctcctcggtgcagaacgcagcggcatctccatccatggcgaaacagggaagaagacaaccgtgaaacagggaaaagatactggagaagagataaggaaaaagaaacaggatgagagataa

SEQ ID NO: 17540 - DNA, 525 bp, Zea mays
  Peptide Sequence Number=SeqID_59319
atgaccgtgtcctcaaacgtgtcgtcatcggagaagacgattagtgatccgatagcggccatggagctgcagccagaccatactgttgaatttgggacttcaaggatttactcgggtcgcgtgcacgagattcaacgcctaggctattttgggaacggagttggccgggcgctgggggctgaagatgtccccaagttggaggagggttttgtctccgccgagaagccaggggcggcgctccccgcgggcacggcggcgccatcgccggaggcgaagggtgaggcggccaaatggcggaggggagttctcggcgggctggaggatactccggaacgcacgaatagaagctggggcgcggcgacgacgcgggtcgacggcagcggctctccggctacacaagaagtgctccggcgggacccgcctgtcaggcaccgagggcacgtgggcgcgggcgcccgcgcggatctgggcctaatgggccgacttgggctgaattggcttttctattttccagggaatttctaa

SEQ ID NO: 17541 - DNA, 345 bp, Zea mays
  Peptide Sequence Number=SeqID_59320
atggccgcggtatcgacctcaaagacccattccggggaaagggtgggccacagggaaaagctcgggggcaccttcgagctttgggatcacccgtcgctgtcttatttgctctccggagccggtggttgccgcggtgtcgcctcggtccgtgggccggtgacgccactgctccatagaagaagcgggtggctccggcgagccaccaccgcgtgcgctggagcgtccaccgttgggtcggccgttgggaaggagatggccttcgggccgttggaatcacaaacgacgatcgggattaggcggaacataccccttcgcctatctcgaatccgggtcgtggatgattga

SEQ ID NO: 17542 - DNA, 156 bp, Zea mays
  Peptide Sequence Number=SeqID_59321
atggcggatgtttggccttatcacacgatgcgtccctgttcacagcgcccagctccaacttcggttatggatggagggtcatcaggtgtggcagttcttatagtgcccagggacgagatttctacaatttcaagaccaaagcaaatccagttttag

SEQ ID NO: 17543 - DNA, 780 bp, Zea mays
  Peptide Sequence Number=SeqID_59322
gttccttatttccttgatgaagagacagggtgggcacttgaggttgatgagctcaagaaacaacttgaggaggctcgatctaagggcatcagtgtcagggcgcttgttgtcataaatccaggaaatccaacaggacaggtccttaccgaggaaaaccagaagaaaattgttgaattctgcaagaatgaaaggctcgttcttctcgcggatgagtcgatttctaaaggctactatggagaatgtggaaagcgaggtggttacatggagataactgggttcagtcctcaagtacgggaccaaatctacaagatggcatcgataaatctgtgctccaatatcaccggccaaattcttgctagccttgtcatgaacccaccaaaggctggggatgaatccttcgaatccttcaggttagagagggatggtatcctttcatcgttgggtcgccgtgcaaaggctttggaagaagcattcaacagtttagaaggtattacatgcaataaagccgaaggcgcgatgtatctgttcccacgccttcacttaccccggaaggcgattggagctgcccaagcagccggcactgccccagatgcttactacgctaaacgcctgctagaggccactgggatcgtcttcgtccctggttctggttttggacaggtccccggaacatggcacatcagatccacgatactgccgcaggaggacaaaatacctgggatagtatctaggttcaaggagtttcacgacaagttcatggatgaattccgtgattattga

SEQ ID NO: 17544 - DNA, 585 bp, Zea mays
  Peptide Sequence Number=SeqID_59323
atggagagcgcggatcgaggccacaatcccatccgcgtagctacgggcattctccagatctggatcgttgcacagcagggcaaacacaaaagggaagcaggtcgtgcagagcgccgtgcagtgaaccaacagtacgccgcattagctacaggaggggagagtgagggacgggacgtcgatgctgatgaaatcttccatgagccccgaccccaagtacttgcgcccagcccacatgcttcatgcccaagctcttcggccagaggagcccaaagagcagcagcaccgacaagaaacccaagggcggcaagcccaggcagcggccttgtgtatcctaaaatcacccccaataatccccaagaacgacaggattcgatttccgaaatgcaaaatcacaagcaaaaaggaatgaatcaagaacgtagggcgtggaggaagggggaagggggcttgcagagctcggacctctggttctcaaggcggagggagggcgtggatgaagaaggagcttgccacctgcggagctcgaacctttggttcttgggggccgattggcggccgcggcggcagttgcaaggtgacgattag

SEQ ID NO: 17545 - DNA, 507 bp, Zea mays
  Peptide Sequence Number=SeqID_59324
atgtccaggatcgggaactggaagtgggaggatcaccgtccaccgtcgggcgtctgcaagggcacgagcagcggccaggcggtgcttatcagcggctacagcgacggcaaaagcaagttcagcatgagacatgccagtgaggagcagtttagtcggttcttgctttatgaagtggatgcaattagaaaggcgtgtgccagcttggaagagggctaccttcctccagttacattcattgtggtgcaaaagcgccatcacacacgattttgtcctgaagatcattgttcacacaaacagacagatcgacgtggaaatattttgccagatgcaaaacctgaagaactggaaggagaagagttggaatctcagcttctagagcttgttgcagctctttcaatgcatccagtgcatgtcccaggcaacaagcaaccagctcgccctgcttcacagaaagctacagctaaagacgataaattggctgcactgcaagctgaaatggcattatga

SEQ ID NO: 17546 - DNA, 189 bp, Zea mays
  Peptide Sequence Number=SeqID_59325
atggataagaggaagaaactttataatattgttcaagagacaaaaggtgtgggcgtctccggcggcccgactatacgaagcgagggcgtatcggggctaaggacacgaaaggccaagcgcacagggcgtacggcagtaagcccgcctgcaccgcaccagaccgtcacccgcgacgtgcccatgtcatga

SEQ ID NO: 17547 - DNA, 1620 bp, Zea mays
  Peptide Sequence Number=SeqID_59326
atgaaagagtccgaccagctcgcgacttctttcatcacacccttcgacatgtactgctatgttaccatgtcgtttggtttgaggaatgcgggtgcaacgtaccaacggtgcatgaaccacgtgttcggcgaacaaattggtcgaacggtcgaggcctacgtcgatgacatcgtagtcaagacgaggaaagcctccgacctcctttccgaccttgaaatgacattccggtgtctcaaggcgaaaggcgtaaaactcaatcctgagaagtgtgtcttcggggtcccccgaggcatgctcttggggttcatcgtctccaagcggggcatcgaggccaacccggagaaaatcgcggtcatcaccaacatggggcccatcaaggacttaaaaggcgtacagagggtcacgggatgccttgcggctctgagccgtttcatctcgtgcctcggcgaaagaggcctgcctttgtaccgcctcttaaggaaggccgagtgcttcacttggacccctgaggccgaggaagccctcgggaacctaaaggcgctcctcacgaacgcgcccatcttggtgcctcctgccgccggagaagccctcttgatctacgtcgccgccaccactcaggggcaggcgcggatctgctcttcatctcgcccctcgggaagcacctacgctacgtgctacgcctccacttcccggcgctccaacaatgtggctgagtacgaggctctggtcaacgggttgcgcatcgtcatcgagctaggggtccgacgcctcgacgctcgtggtgactcgcagctcgtcatcgaccaagtcatgaagaactcccactgccgcgacccgaagatggaagcctactgcgatgaggttcggcgcctggaagacaggttctacgggctcgagctcaaccacatcgcccgacgatacaacgagactgcggatgagctggctaagatagcctcggggcggacaacggttcccccaaatgtcttctcccgagacctgcatcaaccctccatcaagatcgacgacgcgcccaagcccgagaaggcctcggctcagcccgaggcaccctcggcccccgagggtgaggcactgcgcgtcgaggaggagcggagcgggaaggcacccgggggctacacgcacctgctggtcgccatcgacaaattctccaagtggatcgaggtccgacccctaaacagcatcaggtccgaacagacggtggcgttcttcaccaacatcatccatcgttttgtggtcccgaactccatcattaccgacaacggcacccggttcaccggcagaaagttcctggacttctgcgaggatcaccacatccgggtggactgggccgccgtggctcaccccatgacgaatgggcaagtagagcgtgccaacgacatgattctgcaaggactcaagtcgcggatctacaacgacctcaacaagttcggcaagcgatggatgaaggaactcccctcggtggtctggagtctgaggacaacgccaagccgagtcacaggcttcacaccgttctttctagtctatggggccgaggccatcttgcccacagacttagaatacgattccccgaggacgagggcctacgacgaccaaagcaattga

SEQ ID NO: 17548 - DNA, 894 bp, Zea mays
  Peptide Sequence Number=SeqID_59327
atggcccacatccgcgagtacacactcaagacgctctcggagccggcggtggcgcccgtgtgcaccaggaaccactatgtccctggcttcctcttctccaacggtggcttctccggcaacctgagtcaggacgcaacagttctggggcgggtgcagctcttgctcagcgggatgaagcggcgcgagccgggacgccggcgacgccatcacgtcaacgctttcgaaaccgtcgccgtcccaccctcgctttccatctccatggctccaggtcctccacgcaataccggggcgaggcgccccgcgcgggcggcggcggcggcggcggcgcccagggcgtggctgctgcgcgccgtgttcggcggcgggggtgcggacggcggcggcggcgccaccgagtggtgccacgagggcgggctcgacgacaaggccatggcgaggctgccccggcgggaggtgggcgcgggcgaggcgctggactgcgccgtgtgcatcgcggaggtggcggccggggaggcggcgcgcgtgctgccgcgtggctccgctcccactccacctgcccgctctgccggtgcccccgccgtcgacgacccgcccgccgtggccacgcccgtggccgaccgggagtcccccaacttccccaccaacgtcctcttcttcggctcccaggacgacgtcagcaccggccgctcgcggccgcgcggcgcgctgcggaggcttgttgggtgtggcggcgcgtcgccgccgcccacgcagccgccgcgccgtcacgatcatcgtcagcaccatcaggaggaggaggaggaggacgcgggcggggacgtcgagatgggcctcgccgcttccggcgagagcagcgtgtcgcggcccgtgaagccgccgcagcccggttcctga

SEQ ID NO: 17549 - DNA, 612 bp, Zea mays
  Peptide Sequence Number=SeqID_59328
atggaggaaatcattgatgtaaagttggaattgaatttggaggtggataaagaggaaatgtaccgggaacaaaaagcacatgctaattaccttaaacaaaaagttttctttgatgatattcttgactatttgaactctcttgatactcacttgatgcatttggaaattgtgtttgagaggttgagtatcttggtcacattattagtgccaaaaggacctttacggatacagataaagttcaatgtatggtcgtgccagagcttaggcaaaaatttaggcccattttttgactcaggccaatcaatcaggcataaaattttgttatggcccggcccgaacccaactaggcctgacccacaaacacatatacatggcactaccatagatttaccaaaaggggataagaaaggatgttacgaggagaattcagtgttgaaacctttacctatttcggaaaagattttcaaactacatgttatgtcattgagcattgtttcagacaaggacaatgttttcattagtcacttttggcaagatctcctcaattattttgggactgacgctttcaacttcgtatcatcctcaagattgatggtcaatctgaagaagtaa

SEQ ID NO: 17550 - DNA, 1161 bp, Zea mays
  Peptide Sequence Number=SeqID_59329
atgcaagaggcagagcttcacgatttatcagacgatgccgattacgcagcgtctcaacaacaaggatcaccgagtataatgcggtgcgacagtgggaaaaaaagctcgtcaagtgaacccgagggagcccagattgtttatttgaaggataatgttacaattcatcctactcagtttgcctctgaacggattagtggaagattgaagttaattaagcaaggctcttctctcttcatgacatggattccatacaaaggacaaagtacaaatgcaaaactatctgagaaagataggaatctttataccattagggcagtgccatttgctgatgtcagatccatccggagacacactccagctcttgggtggcagtacattattgttgttctgtcatttggacttgcatttcctcccctttacttctataatggaggagttcgagagttccttgctacagtaaagcaacatgttttactcatgaggtcagctgaagatgctaatgtatttcttgttaatgactttcaaaatcctctgcagcgaactttgtcttcgttggaactacctagggcagtttccattgctagtgtgccatcaacacctgtttcagttggggagtcttcttcacaacaaaatgaagagaggactgatgtaagtgctagtgttcctcaatataatggaaggcagaggcagaaaggtcatgatcctgctcgagatatttcaattcaagttttggagaaattttctcttgtaacgaagtttgcccgggaaacaacttcacagcttttccgtgagactcatagcaatggttttggtcctttagagaggagaaactctaaccagtctgcccttgattacagtcacaaatcatctgagtataaagaggatgttcctgttcaaagccctgttgatccagatcctcttgaggtagcagtttgttccctttgtcaattattttcacttgctcttacacacttcaatacttgcacttacttatttgaagttgggaacttttcaacttctgtaccagggcagcctgataccaaccttatccttgttgaacagaaagtcccatttaggaaacacaatcatgttgaaaaaactgctatcaatgtggaggcttttgagctaatcaagttaagaatgtacagaaaggagccttag

SEQ ID NO: 17551 - DNA, 984 bp, Zea mays
  Peptide Sequence Number=SeqID_59330
atggatggagagggcccaatatttggtgtggttgaatattatttaaattccataacatttttgaattgtttcacttttggaaacagattttgtatttttgacaaactctcattagtttggggaaaaccccgacaaccacctctggggttggaagagtgggccacattcttggattctgaagggcgagtggtggatccaaaagctttaagaaaaagaatattttatggaggagttgaacacaaatttcgaaaagaggtctgggcaatattgttgggatatcattcatatgaatcaacgtatgcagagagggagtatcaaaagtctatcaaaaagacagaatatgaaacaataaaaaaccagtggcagagtatctctcctgaacaggcaaaaagatttacaaaatttagagagaggaaaggccttatagagaaagatgtggtaaggacagacagatcgctctctttctatgatggggatgacaatccaaatgtgaatcttttacgtgatattctcttgacctactccttttacaactttgatcttggttactgtcagctggtggagttgctagacagacctctgcacaaatatttcgagcagaatgactgcttgaattatttcttttgtttccgctggattctgatacagtttaaaagggaacttgaatatgagcaaacaatgcgattgtgggaagtattgtggacgcattatttgtcggagcacctccatctgtatgtgtgcgtagctatcttgaagcgctatcgagggaagataatgggagagcaaatggactttgataccctcttgaagttcatcaatgagttgagtgggcagattgagcttgatgcgatcctcagggatgcggaagctttatgtatatgtgcgggtgagaatggagctgcctgcatcccacctggaactgtaccttcattgccagttgacaatggtttattctatagtcagcaagatgatgaagtactgtaa

SEQ ID NO: 17552 - DNA, 492 bp, Zea mays
  Peptide Sequence Number=SeqID_59331
atgagggaaaatggaactgggcaaaaagacgcgggtgctacaatgctagggagagctgaggccgaggaactgtcgtctggtcaaaaagttagatgccttcagctttttgacattacacataggaagaaagatggatctcttatgacttctgaagctgtagaaattatggagaaactaaaggataaaaaggcggagtatgaagcggttgcttcgagtgatagttctgttaatgttgacgacattgataaccggattattactgaagttttgggtcctgaaagctcgcagcaatacatgccttcggggagtcaggctcaagctgaagttcagcggttaagagatcagatggctcaaatgcaatcgagctttgatcaacataaagcggaggcagcagtgaggaaagtggaggagagcagaaagtacaacgcactccagctacagcttcaaaatatgatgaagatgtttcagcagtcgcaaaatccgccatcttag

SEQ ID NO: 17553 - DNA, 159 bp, Zea mays
  Peptide Sequence Number=SeqID_59332
atggacttagaggaagccctgctagaggatagggtctcattgttcgtgggagacaataccggaatgctgatgatgatcgtggaaggacacaggaacaaaatcttcgcgaatgctcagaaagctgaaaatttgagttttcttgcgtatttgggaagcaag

SEQ ID NO: 17554 - DNA, 165 bp, Zea mays
  Peptide Sequence Number=SeqID_59333
atggcgcgcgctggaatcagcagggtcgatgacgtcgaagcagcgaaatcagcagggtcgacgagcgatcgattaggattcttcgtcccgccgcagcaggagttcgagtctacgaggcatctctcccctgtacccccattggaggcgcccccagcaccaccctag

SEQ ID NO: 17555 - DNA, 642 bp, Zea mays
  Peptide Sequence Number=SeqID_59334
atgcaggatgctgcacgacgtgcactttcacagtattgctcgttgttgaacggggtggctgatggtcttaacctgaagtattaccccaaccgctcgactagaagtactagaagtgtgattgtctccccagtaggtgaaggcaatcctaggttgaacagcacagtcaacctagtcgctgtgctgaacacggagctggaccacactcttaacgagctgagtagggctcgtgctgaaatcgcagagttgtgggcggagggcgcagagcgccgttataaggaatgtctgacaacaggcgacgaggtgggtggcatacccagcaagagcaacaagccccacaggatgaggcaacccagcagcagctgccccaccaccgccttcgatgacaaaagcacatatgttccttatgcagactcaagcagtgcaggcaattgggcagactctagcagccacgcaataagtgcagcagcaacctcaatcccaacattgatgaaccacaacttctcgaccatccaacatctgattgatagggctatcatgacagagaggaagcacaaggagatggaagaccagaagcgcaaaataagtggaccccagcctaggagcaatagttgctcccgtttctcaggcaactcatctcaatag

SEQ ID NO: 17556 - DNA, 162 bp, Zea mays
  Peptide Sequence Number=SeqID_59335
atggcttggtggtggttccccatgagctcttcaaaggagattgtgaagaggccgcggtgtctggccgtgcgccaccgtgcttcaggcggcaccgccgtggatgtccgcgaggaagatggcgtgcctcggaccgttcgatccagcacaggcgaacatgattag

SEQ ID NO: 17557 - DNA, 810 bp, Zea mays
  Peptide Sequence Number=SeqID_59336
atgtgccgcttcaacgtcggagtccccaaccatctagttttgatcggaattaacgaggggttcgacggcagacttaaccaatcgaagataaaacgaaataaaaaataccaccaaaacgacgccgttttgaaaccattgcctcgacatcaaacgacgtcggaccaccccccatgtgccgcttcaacgtcggagtccccaaccatctggttccgatcggaattaactaggggctcgacagcggacttaaccaggtacgaccgtacggagcagggggcgtggaggcgtgcgtggcagcggcgctggaggcccgttgttgctgctagggtttctggtcatgttgggctgcgttgggccgtgatagtgtctgggctagatggaggcaaggctagtatcttcgatctgcttcgctgtcagtacaggaaggcaaggtctgctatcttaagtctgctccactacaacagagggagacaaggctggtatcttcgatctgctccactacaatcgagggaggcaaggctgctttgtcaccaacatgacatcttgtcattttgttcaatcaatgcattcgacaacaaaatccaaagagaaagtctaaatttagactcttccttctcaaatttccaacctttaaacttggagatctacagtgctttatcgatgccccaagatgtcgcctaccctttcctgttggttcagatttcattatcagcgcttaacccgggcatatcctggtatgatcatataaaaacatctttgaattctagaggtgactcaacaaggtcttgcttcgtctttgcaatcaggtcataa

SEQ ID NO: 17558 - DNA, 201 bp, Zea mays
  Peptide Sequence Number=SeqID_59337
atggctttcgttgttgacaaagatattacaacaaggagttttgctagaacatttgctgacataaaattggatgatggtaaccaagatttagtgcctgtagactacgataatgaggaggttgaggagatgctgcaacttccaccattcccattcgcaattcttgccagagaggaaaagaaggcagcgaacggaaagaaataa

SEQ ID NO: 17559 - DNA, 1968 bp, Zea mays
  Peptide Sequence Number=SeqID_59338
atgggttccatggagcatccattgccaagtttgtctgttgagggtgctgtgagggctgatggagaaagttttgaagaaactgtctggcaacaagagtattctctttctaatggttcaagcatagctcctgggggtggctctggtggtactgtacttctgtttctgcagaagttgactcttggcaaatctgctagtctttccagtgttggaggctatggtagttccaaaggtggtggaggaggtgggggtggaaggattcattttcactggtcagacattcccactggagatgtttaccagccaattgctagtgtgaagggaaacatctatgctaggggaggattaggcagagaccagagtggtggtggagaaaatggaactgtgactggtaaaacttgtccaaaggggctgtatgggacattttgtgcagaatgtcctgttggtacttacaagaatgttagtggatctgatagttctctctgtcgcccttgccctgcttcacagcttccccaccgtgctgtttatgtttatgttcgaggtcttctcatcctcttagcactggtgcttagtgttgcacgaatgaaatttgttggtgttgatgagttacctggcccagctcctactcagcatggctctcagagagatcattctttcccattcctggagtcattgaatgaggtcttagaaacaaacagagttgaagagtcacagagccatgtccaccgaatgtatttcatgggccctaatactttcagcgaaccttggcatctgccccacactcctccagaagaaataaaagagattgtatatgagggtgcatacaatacattcgtggatgagatcaatgcaattgctgcttaccagtggtgggaaggtgcaatttacaccattctttccattcttgcttatccccttgctttgtcatggcagcaatggcgccgaagaatgagattgcaacgactacgtgagtttgtacgatcagaatatgatcatgcctgcttacgttcgtgccgttcacgggctctctatgaggggcttaaggtctctgcaactactgatttaatgctggcttatgtggacttcttccttggtggagacgaaaagagaacagaccttcctcctcgcctccctcagagatttcctatggctataatatttggaggtgatggaagctatatggctccattttcccttcagattgataacgtccttaccagtcttatgagtcagctggtggcccctactacttggtatcgactggtggcaggtttgaatgcacaattacgcctggttcgtcgcggacgtctgagatcaacatttcggcctgttcttcgatggcttgaaatgcatgctaatcctgctttgagaatccatggtgtacgcattgctcttgcctggtcacaggctacacctgggaattatcgccagtatggacttttggtgtattctgttgaagaggaaaatgaacctatatgcttgggaaataccaatggtggagtcaaaactgagactttttcacgtgtgaagaccactgacatgccaaatgaatctggttctccaagagaagatgtgcctttaacccaaggtcaccggagcagcgaaggttttgcaaggcggaagaggagttacagaggacttatagatgctaacagcttacaaaagcttgaagagaagagagatatattttaccttctctctttcatactccataacactaaacctggtggtcaccaggatcttgttggtttagtcatatcaatgctacttttaggagattttagcttagtgttgcttaccttcctacagttgtattcaatttcattggtggatgtctttctagttttgtttattttacctctggggattcttcttccgtttcctgctggtataaatgctttattcagtcatggaccaaggcgatccgcagggatgaaagcgaatggtggattttcccggttggactggtaa

SEQ ID NO: 17560 - DNA, 285 bp, Zea mays
  Peptide Sequence Number=SeqID_59339
atggcggggctggcggccgtgctggacttcgacatgctgtgcgcgtccgtggcgctgtcggcggagaggaggaaggccggcgcggcgctggcgggcgcggccggcgactgcggcggtggaggcggaggggtgcagaggatgtgggagggcgacgtcgtgctggattgcctagacgaccggcgaatcgcgctcgagacgtcctgctgttacggtaatggttctagttgggaggatcttgtcgtgttggttgagggaacagagctcggttgttgggcgtttcattga

SEQ ID NO: 17561 - DNA, 402 bp, Zea mays
  Peptide Sequence Number=SeqID_59340
atgcggagagccaatctcggatcttgcttccttcagagaacgagcgtatttagtgcattttctgctgttactttagtgtccaaaagttgtagtcttattgctgtacagggtactgagagcagtctggacgattgtgttctccatctcatatgtccttgctgtacgctgtgccaggaggctagaactttggagatgaataatgtccagtgtggtgtctggcatggccgaggtgataccatttgtttagggagcaacggtgcaggaaacaaggctttcgctgccctgaacaaggcctctctcgtgcctgtaaagtccccggggctgtgtggcatggatagatcgtcaagcgcagctgacgagcagcagccgcttgtcccaccggaccaactggagcaggtttag

SEQ ID NO: 17562 - DNA, 678 bp, Zea mays
  Peptide Sequence Number=SeqID_59341
atgaagttgttcatgtgcttcggcggtgcggcggcggcggtcgtgatcggcgacgacgaagcggccgcgcccagacaccggggcctgcgccgtggccgccggagcctgtcgttccgggggaagctgaagtttcttgcccgcgagaagaaaccgtcggcggcgccaccgctgggccagccaacgaagcggggggcggacgcagacaacgacgacggcgtctacggcgtgtccagggcgtcgtcggtggcgtcctcggcgctgctgagctccgcgtcgtcgtggccgctggactcatcggacacttcgtcgtcgtcgtcgtcgttgtcgcgctcctcgtccgcctcgtcctcgccgtcggtctcggggatgctttctccgccgtcggtaaagctgcggccgaataacaagaggcccgcgtcgtccccgtccccggcggcgggcgccgcggccgtggtgctgtgcctcctcatggtggtgcttttcggccgggtcggggccacgctgctcatgtccacggcgctctacctcttcccgcgacggtggcccgcgacgacgcgtaaggagagtacggccgccgtcgacccgctggacggctggagcgcgacgccggagaagaggaaggtggttatggagcggtgtgacgcggtccctggcctggagtggaaccgcaacaagtga

SEQ ID NO: 17563 - DNA, 111 bp, Zea mays
  Peptide Sequence Number=SeqID_59342
atggatctcagcactgaggttggcgccactagtcctgacgccgagggctccaatgagtatttggcaaaatcttgtgcacttcttgttgtcttggttaaaatactggcctaa

SEQ ID NO: 17564 - DNA, 558 bp, Zea mays
  Peptide Sequence Number=SeqID_59343
atgggcgtgcctgacctctgcgcgtgctggcgcgcaataaatgcgctgcaggtccaggtcccggtcggggctacctcctgggggttgttgccaactctttcaagtgtaaactactcgacgctagcagggtctcgttggaagctcacagccaccgtcctcgcggaatcctcccgggcggcttgccagcaacggtggccacctcaacccaaagttcgcctccttcacaaggatgacgaacaccctttccttcgaatgctggaggaagaggcgagccaccagctcatgcggaaggcggaaccacagctcagttcgctctccacccctgcaaggctgatgaacatccttgaagctgagcactggcggaagagcgccaacccccacgaggtcgcgctcctccagcaacaacaagaagaaggcgagatcggcagtgccatcgcgcaagaaacgaagagcgcgagctccccgacggtggatctttccaccgaacgccggcgtgctccatccaagcaggcggcacaccatgttgagcatccactctgtctgacatgctcgggatga

SEQ ID NO: 17565 - DNA, 1929 bp, Zea mays
  Peptide Sequence Number=SeqID_59344
atggccgggaggcgcccggcaccggtggccatcctccttctcctcgccgcggcattcgcccccatctcctccgccgttcgcccagtctccgacgcgcacagatccgctgccgtggagcttttcgccccctccgctgacggatccttcggcgatttggagagtacgtatgaggcggtgaggactttccagatactcgggctggagaactataagagtctgtctgggaaggcgtgcaagtttgccgcggagaacctggcttcccccggttccaccacgaaagatctgttccatgctgtccggatcagtggcgcgcttggatgcgctgttgatgccggcgtgtacgatggtgttgtggcgaggctcaaggcagtgattcaggatactaattccctgttggaattatactatcctgtgggaggtttgcttggcatcaaggaacaaggccataatgttgttctgtctgatgcagaaggtacattccatgccactaaggcacttagccaaagtgacgggagatggcgttatgacactgacagtgctgagtctagcacatttgctgctggtattgcactagaagcattagcaggtattgtttcactggcagatgcagcggttgacccatccatgatgggagtggttaaaaatgacgtcgtgaagctgtttgacaccatcaagagctacaatgatgggaccttctactttgatgaaaagcatgttgatgctactgaatacaagggccctataatcacatctgcttcagtggtgcggggtgtcacctcttttgcagctgttgtttctggaaaattgaatatccctgccgagaaaatacttggcctggcaaaattcttccttggtattgggctcccagctaaagggataacattcagtgtgaaaatgacatatggggcctgggaccataatctactgacatcagatgttttttttctgattactacacttctctgctccaattctctagcatcattctcctttttgtctcaggaacttcaatacgaccttgacaacaatgtccattacttggacattgctccattgaaaattgatgttgggaaatactcgatagtttttgagatttcacttcaggaaccagagcaggagactgtttatgctactggagggagaaacactgaaagtgtaattgtcacaggactgatcaaagttgacaaggcagaaataggaatctctgacaatgatgctggggccgtggagtctgtccaaaacaaatgtgttcaggtgttcttgaaattgaggcatgagagtaaggttgaacacttattcgtggtacctggctctgcaaggcagttcaaaattgttcttgacttcctaggtttggtggagaaattttactacctttctggaagatatgaccttgagcttaccgttggtgatgctgtaatggaaaattcatttctacgacctcttggccatttggagttggacctgccagatgccccagaaaaagccccacgtcctcctgcacaagctgttgacccattctcaaaatttgggccaaaggcagagatatcacatatattccgcgcaccagagaagaggccacccaaggagctctcgctagcgttcacgggtctcacgcttctgccgtttattggattcttgatagggtttctgcctgctccggtgcgactgatcgaggcccttctcctgcagctcgttcgtcttggagtgaacttgaagaacttcccgtccttgccaggaccggccgcatttgcctcacttttccatgctgggataggagcagtcctgatgctctacgttctcttctggatcaagttggaccttttcacaactctcaagtacctcggcttcctcggcatcttccttgtgtttgtgggccatagggctctatcctacctttcctcggtgtcgacaaaacagaagacggcatga

SEQ ID NO: 17566 - DNA, 894 bp, Zea mays
  Peptide Sequence Number=SeqID_59345
atgtctgggaagttaactgctgagcagttgacaaaattcacactctatgctgaatggctaattttgtccacatgggtgggattgggggacaactggtcctccctgatgcagtctgtcggagcaagcctcaagttagagaagttgaaagggcaaattcagtatgctgatgtatcattttcatatccatcaagacctacggtaccaattttgggaggcttgaatttaacactgaatccaaacgaagtagttgcaattgttggtcttagtggaagtggcaagagcactataatcaatttactacttagattatacgaacctacaaatgggcaaatactaattgatggtgtcccgctcactgagcttgatatcagatggttcagggaaagaattggtttcgtcggacaggaaccacgcttattccgaatggatatcagctctaatattaaatatggttgcccaagagatgtcagtcatgaagaagtgatatgggctgcaaagcaggcctatgctcatgacttcataatggctttgcctgatggttataacaccatcgttgatgatgctcttctcagtggaggtcagaaacaacgtgttgctattgccagggcccttctgagggacccatctatcttactgcttgatgaagccactagtgcgcttgatgctgagagtgaacattatgtcaagagcgtcatcacaaaagttagtcgagattcaaaggctaaaagaactgtggtaatcatagcacacaggctatctacaattcaaacagctgatagaattattgtgatggaaaatggtaatattgtggaggatggtaaacacattgatcttattgagaagggtggtctatattcaagattagccaggcgacaaaatgacgatctcaagtag

SEQ ID NO: 17567 - DNA, 534 bp, Zea mays
  Peptide Sequence Number=SeqID_59346
atgccgcctccggctgcgatgctgctccttacggcggcctcggggcctcccacgctgtcgctgaccctggccgcgaggcgggcgccgctccgggccccaagccggcggaggctgcgggcgctgcggccggcgaggatccgcgccgccgcggcgatcggtggcgagttcggcggcctcggccggcgccgcgtcgtcgtgggagagttcatcgagcgcctgcgcaacgttctgcccgggggcagttggtggcgcctcgaggacggcgatgaggccggggacggggccggccgcgcagaggggagcggtaccaccgccgtgtccgcgctcaggcggatgtgggccctcgttgccggcgacagattggtcatctatgtcggcttcgcgtccctcgtcggcgctgcgctttcggagatcgccataccacatctccttgcagcgtccattttctctgcgcagaatggaggcgcggtgttctaccgaaatgccaagcttctggttgtcctatgtctggtttccggggtgtttagactgtag

SEQ ID NO: 17568 - DNA, 492 bp, Zea mays
  Peptide Sequence Number=SeqID_59347
atgacaggaaaacagcgctactcgccccgctccgactgttgttccacccgtcagattgaggctggcaacagccaagttcagcctcaggcgcaacaggaagctccgcctcgcccgaccttgggcctcggcctcaggaggaggtctccgcctcgcccgaccatagggctcggcccccgcttcggcctcggaaggtggtctccgcctcgcccgcccccagggctcggcctcaacctcggcctcggaatgaggactccacctcgcccgaccccagggctcagcctcaacctcgacctcgggaggaatcgcgtcctcgcccgaccccggcctcggcctcaggagaagctcgccccggtaacaagtaatgatggctccccgcgtgcgtccatgacgacggtggttctcagccccctacggaagcaaggagacggaccccccggggtcgaaacgccgacatttggcgcgccaggtaggggcctgcttgagagcacctag

SEQ ID NO: 17569 - DNA, 558 bp, Zea mays
  Peptide Sequence Number=SeqID_59348
atggccatgaacgtgcagaaaatcgtggtgaagctggacctgcacgacaacaaggacaagcagaaggcgctgaaggccatctccgtgctcgtcggcatcgacgccgtgtcggtggacatggcggcgcacaagatgacggtgatcgggacggtggacccggtgcaggtggtgagcaagctgcgcagcaagtcgtgggcggcgcacatcgactccgtcgggccggccaaggagcccgagaagaaggaggagaagaaggacggcggcggcgagaagaaggacggcggcggtggcgagggcaagaaggaggaaggggacgggaagaaggacggcggcggcggtggcgacggcaagaaagacggcgagggcaagaaggaggacggcgacggcaagaagcaggacggcgagggcaagaaggaggatggcgatggcaagaaggacgacaagaaggacggcggcggcggcggcgcagaggagaagaagcccgccgccgcgaagcaacgagatgaacgaacggatggatggatgggagccagaaacagaaagagagggagagggtga

SEQ ID NO: 17570 - DNA, 603 bp, Zea mays
  Peptide Sequence Number=SeqID_59349
atgggctgggctcaaaatactgatgtctggattgcagcaggccgtattctagtcttcctgaattacaaatacggtacacaaaacgagatcatctcgattaaaaacagaatctcaattccgtttaccgttttgtatatcccgtttttgttccgttttcgtttttacatcgggtttgaaatcgatcgggacaaaactaacaaaatcggttatacgataacggtcggatttcgtttttacatcggatttcgttttttacatcggttttcgctcgaccgctgcataataagaaaccaactcaagcaaccgatcgaccgggtaaccgcagcctgtataatgcgagcgccgggatggggccgcggctgtggcgaccgtcgggatggggctgcggcgtcggcgatgcgcgccgccgagcgccggatggggccgcggcgtcgacaaccgccaggatggggccacggcgtcggcgaccgtcgggaaccacacgagcagcaggcgacggtggctgcgtactggattgagatgtggaatagaacgtggatagggtttttcttatcctgttctcgccgtactggaatagaaagtggggcatctgtaaggaaataa

SEQ ID NO: 17571 - DNA, 261 bp, Zea mays
  Peptide Sequence Number=SeqID_59350
atgcgacgggtacgcgcgatctggcgattcatctcccacgcgccgtggtccaccattcagtgggtgcgggtaactgttgagcgggtgcaggcgactgacgattcaccttcacacctgcagcactatataaatagacgagtagaggggactgttgacgaagatgcacatactgctgaagctgaagaagctgatcttgaggaagaaattgctgatgaagaggaagaccgcatccctcttgtcccatcaaagcccatccactga

SEQ ID NO: 17572 - DNA, 156 bp, Zea mays
  Peptide Sequence Number=SeqID_59351
atggcgacgccgtccacggtgtcggaccttctgcgcgccattcccgacaccccgacgccacacagggctcagaggcggcgactatcaaggaggacgggggttatggtgaagtccatggccaagtcgctcttcatacgccatgagcacgatgtctaa

SEQ ID NO: 17573 - DNA, 261 bp, Zea mays
  Peptide Sequence Number=SeqID_59352
atgccgtgcttcaccgccttggttgtacctcagaacgggtgcctgaagcaggacggtgaccgggtccaccacgggtcccggaacaaccgcatggggctgggtgacgggcccctcctccgtgtacccagtaataggtacctacggggagatgttggcctgctcccgcacaggctccacgacagccgcctaggggaggatgatagcctgctcatccacggcccccgcctcttctatcactacggggacgggagctacgactaa

SEQ ID NO: 17574 - DNA, 651 bp, Zea mays
  Peptide Sequence Number=SeqID_59353
atgcacatcaatgacaaagatgggtcttcttcaaagaagaaagatttgatacttaaagctagtcaagagaagggcaagaccaaagtcgtagttgaagaagagtcttcaagtgatgatgaccttgatgccagtattgccttgatgaaaaagaagcttttctctagtagcaaaagaaagcccatctcggagatggattgctataattgtggagagcttggccatcttgctcatcaatgcataaagcttaagaaaaacaaattcaagggcaagaaagatgatgaaagtgaagatgagaagaaggaaaagaagtttttcaagagaaatgatggcaaacaaaagaggttccacaaaagaaagggtgggaaagtatatattgttggtgattggctcaccgacattgaatccacaagtagctcttcctcaagtgaagaagatggtgaaaaggtcgtcgccgtcaccgtggatttctcttcaccaccaccatcaccttcatccactacacatctatgccttatggctaaaggtgaatggaaggtacaaaatgatgttactagtgaggttgagtatggaagtgatagtgatgatgaatatgcttcccctacctatgatgagctagccgatttgcttaaagaatacactcaaatcatttaa

SEQ ID NO: 17575 - DNA, 282 bp, Zea mays
  Peptide Sequence Number=SeqID_59354
atgtctagtgaaagtgacagggatgacgacaagaaggggaagaagaaggaaaagaagaggtactacaagaagaagggcggcgatgcccacacaactgcagaagctcgtggtaaactactgcgactggggagggagcagcaggggcatcagatgagtgcagtgtatgtcgttacaatttggaagttggaactgaagacaactatgctattgcctctagcttctctagggcattcctgcatggaaatttcatttctactagacagaaatgtgttatgggactag

SEQ ID NO: 17576 - DNA, 120 bp, Zea mays
  Peptide Sequence Number=SeqID_59355
atgacgaaggtctatgcttgccaaaggtgttcgaaactcaaaaagtggaaatgtaccttcggtctgacggaaagtaaaggtacaggcgtgatgcaaaaagtgaatgccaagtcagcgtga

SEQ ID NO: 17577 - DNA, 1230 bp, Zea mays
  Peptide Sequence Number=SeqID_59356
atggagttcgcgagctcttcgagtaggttttccagggaggaggacgaggaggaagagcaggaggaagaggaggaggaggaggaggcgtctccgcgcgagatccccttcatgacagcggcagcgacggccgacaccggagccgccgcctcctcgtcctcgccttccgcggcggcctcatcgggtcctgctgctgccccccgctcgagcgacggcgccggggcgtccgggagcggcggcggcgggagcgacgacgtgcaggtgatcgagaaggagcacatgttcgacaaggtggtgacgcccagcgacgtggggaagctcaaccggctggtgatcccgaagcagcacgcggagaagtacttcccgctggacgcggcggccaacgagaagggccagctgctcagcttcgaggaccgcgccggtaagctctggcgcttccgctactcctactggaacagcagccagagctacgtcatgaccaagggctggagccgcttcgtcaaggagaagcgcctcgacgccggcgacaccgtctccttctgccgcggcgccggcgacaccgcgcgggaccgcctcttcatcgactggaagcgccgcgccgactcccgcgacccgcaccgcatgccgcgcctcccgctccccatggcgcccgtcgcgtcgccctacggcccctggggcggcggcggcggcggcggcgcgggcggtttcttcatgccgcccgcgccgcccgccacactctacgagcaccaccgcttccgccaggccctcgacttccgcaacatcaacgccgcggccgcgccggccaggcagctcctcttcttcggctcagccggcatgcccccgcgcgcgtccatgccgcagcagcagcagccgcctccgcccccgcacccgcctctgcacagcattatgttggtgcaacccagccccgcgccgcccacggccagcgtgcccatgcttctcgactcggtaccgctcgtcaacagcccaacggcagcgtcgaagcgcgtccgcctgtttggggtcaacctcgacaacccgcaaccaggcacaagtgcggagtcaagccaagatgccaacgcattgtcgctgaggacaccgggatggcaaaggccggggccgttgaggttcttcgaatcgcctcaacgcggcgccgagtcatctgcagcctcctcgccgtcgtcatcgtcgtcctccaagagagaagcgcactcgtccttggatctcgatctgtga

SEQ ID NO: 17578 - DNA, 459 bp, Zea mays
  Peptide Sequence Number=SeqID_59357
atggtgtacatatttatgcaattcggtacactacgtaaaaagtctggcttgcggttcactggtggacgcatcttcgtgttcaagcatgggacgcatgtacgacaaagtgtgggctggccctcgggaggaaactccgcctcgcccgaggctggcctcaacctcggaacaaacttcgcctcgcccgagctctgcctcggctatctggtccctgcgaatcccgcaggaggccactcctttaactgtgtcctgcacaccaacaagccccagatcgggcttggccacgacctcgaggagacttcaacctcgcccgagcatggcttcagcctcgataacacaaatgaaagaacacccgacatcatcaggagtcgcagagttgacatattaccaagagcttttcgccatactcaccactactctaaccactatgacttggacaactttcccgtcaggtgggctcgg

SEQ ID NO: 17579 - DNA, 100 bp, Zea mays
  Peptide Sequence Number=SeqID_59358
atggcgccgcgtgatccagcagcacctcggatctctccgcccggtcagggcgtgctggacacttatcaaaatggcattggcgctgcccagtttactgcag

SEQ ID NO: 17580 - DNA, 1059 bp, Zea mays
  Peptide Sequence Number=SeqID_59359
atgcaacggaacggggtggtggaatgcagcgtgtgccgctcccgggtggtggtgccgagcccccggagcgtgtccagggcgtacgacaagcaccgcaacaagatgtcgtccaagttccgggcgctcaacgtcttcctcgtcgtcggcgactgcatccttgttggtctccagcccatcctagtgttcatgtcaaaggttgatgggaagtttcagttcagtcccatcagtgttaactttctgacggaggttatgaaagtcatctttgctgtcgtcatgctcataattcagtctagaaagcaaaaggttggagaaaagccacttttggcacgttcaaccttcatacaggcagcccgtaataatgtacttctagctgttcctgctcttctatatgcaatcaacaattacctaaaattcatcatgcagttgtacttcaatcctgcaactgtgaaaatgctaagtaacctaaaggtactggttatagcttttcttctgaaatttataatgagaaggagattctcagttattcagtgggaagctcttgctctattgcttattggaatcagcatcaatcaactccgaactgtacctgtgggcaacacagcatttggtcttcctgtcactgctattgcgtacatatatacattgatttttgtaactgttccttcagtggcttctgtctacaatgaatatgccttgaaaagtcaatatgacactagcatctatctccagaacttgtttctgtacggatatggagcaatattcaacttgcttggcattcttgggactgtcctattccaagggccagagagttttaatattcttcgaggccattcaagggccacaatatttctcatatgtaacaatgctgcacaaggcattctatcttcattcttctttaagtatgcagcttctgctgcatttttggggcattccttgaccattaattttctcctgggcatatcagtggtgtttatttcaatgcaccagaatagatgtgtcattttagaggctacatctaagttggccttcatttcaggcaagccatcggattggaactga

SEQ ID NO: 17581 - DNA, 1033 bp, Zea mays
  Peptide Sequence Number=SeqID_59360
gccatttctggatattggaaatttctctatgcccaaagtactgaaggaagctggctatgaggttttatatgaaccaaaagtgctggagctggaacctgagattctccgggacatcagttgggatctccctagttcagtagatggtaaagcaaagctggatgaagactgtcttgcctatgatcagcttgaccagtacccatctttggagaacaatccagttacatttgagctgagagacgagccagcgatcccgcagctgggaatcccgttccagacagacggggagttcgttctcccgccgcgcggcgtcgggctcgtcctcgtcgacctctgcaacggcttctgcaccgtcggcgccgggaacctcgctcctgttgcaccaaacaagcagatcagtaagatggtggaagaggccgcgaggctctctaagctgttctgtgatagaaacctaccaatatttgcattcctggatacccattatccagataagccggaaccaccatatccccctcattgtattattggtactggggaggaggactttgttccagatctggagtggttggaaaaggagccaaatgtgactataaagaggaaaagttgtattgatgggtatatcagctgcatagagaaggacgggtctagtgtttttgctgattggattggaaaatatcagataaaaactgtgagttgtcttgatacagaagatttcagagatagactttaccctattgtgtatgacttgggggggatcggctcaatgcaggtcttggtgctcgggatatgcacggacatctgtgttttggattttgcaagctcaactctggctgctcgaaatattgaccgagtgcctccattacaggatgtcgtgatttattcaggggggtgtgctacatatgaccttcctgttgagattgctactaatatcaaaggagctcttgcccatccacaggatctgatgcatcatattggactctatatggccaaaggaaggggtgcaaagatagttgacagggtggttattgaaccttga

SEQ ID NO: 17582 - DNA, 1347 bp, Zea mays
  Peptide Sequence Number=SeqID_59361
atgggcgaaacaatctcgttcgcccctcggaaggccatcaagtcccaggtcttggcggacttcgtggctgaatgggtcgacacccagctcccaacagtttcgatccagccggaactctggaccatgttcttcgacgggtcgctgatgaagacaggagcgggcgcaggcctgctcttcatctcgcccctcggaaagcatctacgctacgtgctacgcctccacttcctggcgtccaacaatgtggctgagtacgaggctctggtcaacgggttgcgcatcgccattgagctagggctcgtcatcgaccaagtcatgaagaactcccactgccgcgacccgaagatggaggcctactgcgatgaggttcggcgcctggaagacaagttctacgggctcgagctcaaccacatcgcccggcgctacaacgagactgcggacgagctggctaaaatagcctcggggcggacaacggttcccccggacgtcttctctcgagacctgcatcaaccctccgtcaagattgacgacacgtccgagcccgaggcaccctcagctcagcccgagaaggcacccgagggctacatgcacctgttggtcgccatcgacaaattctccaagtggatagaggcggtggcgttcttcaccaacatcatccatcgctttggggacccgaactccatcatcaccgacaacggcacccagttcaccggcagaaagttcctggacttctgcgaggatcaccacatccgggtggactgggccgccgtggctcaccccatgacgaatgggcaagtagagcgtgccaacggcatgattctacaagggctcaagcctcggatctacaacgacctcaacaagttcggcaagcgatggatgaaggaactcccctcggtggtctggagcctgaggacaacaccgagccgagccacgggcttcatgccgttctttctagtctatggggccgaggccatcttgcccacagacttagaatacggttccccgaggacgagggcctacgccgaccaaagcaaccaagctagtcgagaagactcgctggaccagctggaagaggctcgggacctggccttactatactcggcgcggtaccagcagtccctgcgatgctaccacgcccgaggggtccggtcccgagacctccaggtgggcgacctggtgcttcggctgcgacaggacgcccgagggcggcacaagctcatgcctccctgggaagggtcgttcgtcatcgccaaagttctgaagcccggaatgtacaagctggccaacagtcaaggcgaggtctacagcaacgcttggaacatccaacagctacgtcgcttctacccttaa

SEQ ID NO: 17583 - DNA, 561 bp, Zea mays
  Peptide Sequence Number=SeqID_59362
atgtcggtggcaggcgggagcagcggtcacgtcgtcagccaagcttacgtcccatcctggggcagcggcgcctctggcaggggaagcgagcgacgcttcgccttcgccataatgaccgcatcaaaaaagggaccaggaaagggggataccccgaaaaggacccttctccatgaaggaaacaggctccgagcctccctactgatcagaggttcgaaggctggcccctcggaggggttcaacagccgcctcagagcgcatgggctccacacccactactggtcagaggttcgaaggtcggcccctcggaagggttcaacggctgcctcaggccactcgggctccgcgcccactactgatcaggggttcgaaggctggccctcgaaggtcccggaagagggcgaactccgctccgcccgacccagggctcggactcgggctcagtcccggaagacggagaactccgctccgcccgacccagggctcggactcgggctcagccctggaagacggcgaactccgctccgcccgacccagggctcggactcgggctcagtcccgtaa

SEQ ID NO: 17584 - DNA, 264 bp, Zea mays
  Peptide Sequence Number=SeqID_59363
atggcggcggcctcaccaattcacggcacggttggaggagctgaaaaatgctgcctgcctgctgcaagaggcaccaacgccaggcgttacgtcttcgttttttttgggggagaaatgagatcgttgcctagccagaatacagcgctcttacgtggtgacatcaccgcacgatttgacacgtacgacgtcgcgaaaaggaaccaggccctgctcacgagttatgcaaccaatctaacgtctcgttcttcacgtgctaataattag

SEQ ID NO: 17585 - DNA, 237 bp, Zea mays
  Peptide Sequence Number=SeqID_59364
atggcggcgacgtcgctgcttggtcagtggggaagacaatgttgtggctgttggatgagaggctcacggcatagattagaagagaaggatctaatcctggcctctggatttagatctgacggccagaatggcatcatacctcttcggcctggtattcttactaaagagaccctgctatttttacaaatgaacccgcggtccataagcactatagggagatttaatctatgcccctag

SEQ ID NO: 17586 - DNA, 405 bp, Zea mays
  Peptide Sequence Number=SeqID_59365
atgcccccatcggatctcatcgagccatgcgtggcggcgccggtgatggatgcggcgttgctagccgtcatcgttgccaccatcctctcccacctcgacgttcgaccgtgtttgccactgctgcctgctagggacattgtggagggcgcctatgctgctagggtcgaggcccagctgtgcaggcgcatgcagccaccgtctgtaaacacctccacccctgtgttccctcctcgaaggaaggtcgatgcagagaaaaggaagcgcagcccgtctccgtcatcgtcctcttcatcgatttggtccatcgtcgtcaaggaagagcccgatcttctagagcgcggccagattataatagctgcaacatttttcttgagtgggaaagacttccacgcttctagagcctga

SEQ ID NO: 17587 - DNA, 330 bp, Zea mays
  Peptide Sequence Number=SeqID_59366
aaaccacgcgaaccgttatccacgacttcgggccgtcagatcaagactgggtggttcgaattcggcacgagaggtttagtctcctctggtcagctaggggtggcgctctccgcggacacggaggcgcagtcgccggaggttaggcagaccggggcttctagggcactgggggttggtctgggtagccagagaggttggggaggactcggcaagcactatggcaaggtctgggtgccgagaataggactaagatgggcagacggtggagggggatcctcgggcgaacccaaggttactctggcgagcaatgcccgtcgcggtgagggttaa

SEQ ID NO: 17588 - DNA, 372 bp, Zea mays
  Peptide Sequence Number=SeqID_59367
atgggtcagtcgacggagggtctagaagcatgcaagctccttgaggcaacccttggtgctgcccttggcgttcgtgcatatagccatggtcttgttgttggtgccgctatactcgacggtgacgtcatccatggtgacgccggtgcatgggatcttggcagtgcagagcaggctaacagcctccggggtggaggaggtgccggtgatgttcttgaaggtgacgtccttgacaggagaattccacaggtgcataaaggttcaacacaaaccaataaaatatcaaagttagggttcaaaagcaaaggagcaaaggaaccgaagggtgccctggtctggcgcaccggactgtccggcccaccaagtgatgattag

SEQ ID NO: 17589 - DNA, 489 bp, Zea mays
  Peptide Sequence Number=SeqID_59368
atggcgcaaaagagggacacaagaatgtcacttacccagatacggtgcttcgggcagcttggcacggcgcgatggggctctggttggccggacattgaagaatcacgacggcggcgagctccgacctgcgcaggggagaggtggagcgcaggtcgggtagaggatttaaggaaaggggaaacaatcgtgggttcccggtgcgccaagctcaggcaaatctcaccatggccaaagcgctggcagaagtccagcggcgacagcagaaaggtgaagcaacagcggggggcggcgctgcgactgggtgagtgcgggggcagggaaagagcgaatgtcgtggggacgtgggtacgctttgaccgcatgggcgcacgccatgggcacaggcgcgacagttgtaggggaggggatgggtctgacaataggggccgcgagtcagcgagggaacgtgcgggcgagcagggcgcagtgctgacggggcggtcccactga

SEQ ID NO: 17590 - DNA, 1071 bp, Zea mays
  Peptide Sequence Number=SeqID_59369
atggcgtgcacaaacaatgcgatgagagccttgttcctcctggtcctcttctgcatcgtgcatggtgagaaggaagagtcaaagggcatcgatgcgaaagcgtccgggcctggcccttgcaagggcgacgtgaccatccaggtggatggcaatctgctggcgaccacggacctaagccagtacaaggaccatggtaattggatcgagattctacgcgtggataacctggtcatcaccggcaagggaaaccttgacgggcagggcccagccgtgtggagcaagaactcctgcaccaagaagtacgactgcaagatccttcccaactcgctggtgatggacttcgtgaacaacggggaggtgtccggggtcacgctgctcaactccaagttcttccacatgaacatgtaccggtgcaaggacatgctaatcaaggacgtgaccgtgacggcgcccggggacagccccaacacggatggcatccacatgggcgactcatccgggatcacgatcaccaacaccgtcattggcgtcggcgacgactgcatctccatcggccccgggacctccaaggtgaacatcaccggcgtgacctgcggccctggccacggcatcagcatcggcagcctagggcggtacaaggacgagaaggacgtcacggacatcaacgtcaaggattgcactcttaagaagacgatgttcggcgtccgcatcaaggcgtacgaggacgccgcctccgtgctcaccgtctccaagatccactacgagaatatcaagatggaggactcagccaaccccatcttcatcgacatgaagtactgccccaacaagttgtgtactgccaacggcgcctccaaggtcaccgtcaaggacgtcaccttcaagaacatcaccggcacctcctccaccccggaggccgttagcctgctctgcactgccaaggtcccatgcaccggcgtcaccatggatgacgtcaacgtcgagtatagcggcaccaacaacaagaccatggctatatgcacgaacgccaagggcagcaccaagggttgcctcaaggagcttgcatgcttctag

SEQ ID NO: 17591 - DNA, 165 bp, Zea mays
  Peptide Sequence Number=SeqID_59370
atggagtatcacaggcaacaagctgagtaccagaagaagaaggacgagtattattcaaacctccaggcccataatcaagctctactctcgggatttcagacaccttccgcttcagttgccgcacctagagatgcgtctggtcaagacgacgcatcgaattcttag

SEQ ID NO: 17592 - DNA, 465 bp, Zea mays
  Peptide Sequence Number=SeqID_59371
atgtcacttacccagatacggtgcttcgggcagcttggcacggcgcgatggggctctggttgtccggacgttgaagaatcacgacggcggcgagctccgacctgcgcaggggagaggtggagtgcagatcgggtagaggatttgaggaaaggggaaaccaccatgggttcccggtgcgccaagctcaggcaaagctcaccatggccaaagcgctggcagaagtccagcggcgacagcagaaaggtgaagcaacagcggggggcggcgctgcggctgggtgagtgcgagggtagggaaagagcgaatgtcgtggggacatgggcgcgctttgaccgcatgggcgcacgccatgggcgcgggcgcgacagttgcaagggaggggatgggtctgacaatagggtccgcgagtcagcgagggaacgcgcgggcgagcagggcgcggtgctgacggggcggtcccactaa

SEQ ID NO: 17593 - DNA, 864 bp, Zea mays
  Peptide Sequence Number=SeqID_59372
atggcgctccacaagctctacgacgacggcggcccccagctctcttacggaagcaggacgacgtcagcagggactcgaccgctccaacagctgtccctccgccaggctccgccgcacctccgacagccacgacatcacgccagcagggtgcccagatctctccggctgccacattggcataaacaacgtgaaccgttatccacgacttcaggccgtcagatcaagaccgggtggttcgaattcggcacgaggggtttagtctcctctggtcagctaggggtggcgctctccgcggacacggcggcgcagtcgccggaggttaggcagaccgaggcttctaaggcactgggggttggtctgggtagccagagaggttggggaggactcggcaagcactatggcaaggtctgggtgccgagaataggactaagatgggcagacggtggagggggatcctcgggcgaacccaagatacggtgcttcgggcagcttggcacggcgcgatggggctctggttggccggacattgaagaatcacgacggcggcgagctccgacctgcgcaggggagaggtggagcgcagatcgggtagaggatttaaggaaaggggaaacaaccgtgttttcccggtgcgccaagctcaggcaaagctcaccacggccaaagcgctggcagaagtccagcggcgacagcagaaaggtgaagcaacagcggggggcggcgctgcggctgggtgagtgcgagggtagggaaagagcgagtgtgaggcaggggggaggggatgggtctgacaataggggtcgcgagtcagcgagggaacgcgcgggcgagcagggcgcggtgctgacgaggcggtcccactga

SEQ ID NO: 17594 - DNA, 591 bp, Zea mays
  Peptide Sequence Number=SeqID_59373
atgggttcccggtgcgccaagctcaggcaaagctcaccatggccaaagcgctggcagaagtctagcggcgacagcagaaaggtgaagcaacagcggggggcggcgctgcggctggcaactaatgggcaatgcaaggacgagagaaaaattataactagagagatgggtcagtcgacggagggtctagaagcatgcaagctccttgaggcaacccttggtgctgcccttggcgttcgtgcgtatagccatggtcttgttgttggtgccgctatactcgacgttgacgtcatccatggtgacgccggtgcatgggatcttggcagtgcagagcaggctaacggcctccggggtggaggaggtgccggtgatgttcttgaaggtgacgtccttgagaggagaattccacaggtgcataaaggttcaacacaaaccaataaaatatcaaagttagggttcaaaagcaaaggagcaaagaaactgaagggtaccctggtctggcgcaccggactgtctggtatgccaccggacagtgtccggtgcaccaggaccgtacaactccaaactcgccacctttgggtttctcaggtgtag

SEQ ID NO: 17595 - DNA, 930 bp, Zea mays
  Peptide Sequence Number=SeqID_59374
atgggaactgcaagagttcgcttcgtggtccttgttctgatctctacgtttctcagagtcagagaaggcagagccgcgacattcacgttcgtgaaccggtgcacggggacggtgtggccgggcatccagtccaacgccggaagctcgaggctggacacgacgggcttcgtgctgccgccgggcacgtcgcgcgcggttcccggcgccgtcggggtggacggcagcggcaaggtggtgtgcgcgacgggcgactgcgggtccgggtccctggagtgcaacgggcagaacgcggcgacgcctgagacgctggccgagttcacgctggcctccgcgggcggcaacgacttctacgaccccgcgggcggcgccgccaccggcgccagtgccacgacgtgcgccgcggccgggtgcacggcggacctcaacgagcggtgccccgcggagctgcgcgccgagggcggcgccgggtgccgcagcgcctgcgacgccttcggcaggcccgagtactgctgcagcggcgcctacgccaaccccaacacctgccgccccaccgcctactcgcagctcttcaagtccgcctgccccaactcgtacagctacgcatacgacgaccccaccagcaccttcacctgcgccggcggccgcgactacaccatcaccttctgccccgtcgccaccccaagcgtgaaatcgtcgagtggccctggagcggcaacaacgacggcggcaccgacaggcccgacgccgacgctgccgggggcgacgccgcggtcggcaggcggcggcccggaggggcagggcgtgatgctgggcgacaactcctggctcgccagcctcgccacgggcgacgcgtcgtccgcgccggcgctccgggccttgcccctcgcgccgctcctgctcgtcggcctgctcctgcttgtgctgctatag

SEQ ID NO: 17596 - DNA, 447 bp, Zea mays
  Peptide Sequence Number=SeqID_59375
atggcttctacaagtgatcaacggagcaatcaagggaatgaagataattctagcataggtgaaggtcatccaataacttcccctaacccagagaaagcgcccgcagctgcgaatcctgcagcagatgtccgctcgatccgtgaccgtgccgccgaatcccagccccatccggcgtcgtcttttctcgggtggcaggcgcgcggcaccgctagtcaaacataccccgtggccgcctggccgggctctggctcgcgcacgcccgtgaatccgccgaggcgtacccctagcctaccgaggccggcgggccgcgccaaaccaagccaagcgcaagcggccagcgggctcgtctaccgccaaaacgtgagccagccaaccagccatcgcgtggcgcgcggcggcggcgtcgaaaggtcgctgtgcagcagcagcccgccctgcatcgattag

SEQ ID NO: 17597 - DNA, 192 bp, Zea mays
  Peptide Sequence Number=SeqID_59376
atggcgccccgcacgctctatgacgacgggcggctctcagcccccttacggaagcaagaggacccgctcttcgccaataaggatatgcagatccttatggtcggcctcgacaccactggtaaaaccaccatcctctataagctcaagcttggtgagatcatcacaaccatccccgccatcggtgagccctag

SEQ ID NO: 17598 - DNA, 135 bp, Zea mays
  Peptide Sequence Number=SeqID_59377
atggaggaggctgggcatgagctccactccgttctgacttgccaagccgagtgggtggtgactatagatggccaaaaagcacgagacccgacagaggatgaagtttcatccgtctatggacatggatgtcattga

SEQ ID NO: 17599 - DNA, 330 bp, Zea mays
  Peptide Sequence Number=SeqID_59378
atggctgaagtgtcaaagcctattgaggggtctcctcctatcaaagctaggacagaaccggctgaagggccagaactgaaaaaagcggcagagcagccgaaggctctaagtccgttgcgtgagatggagctaccgaaggcatcaaggattcctgcaacgactcagagaaggagaatgaccaatgtactagacgttgtcatggaatctgtaagggtaccaactcctgcttcagcacctgatatagagggcgaagtcttaaagaaatctggcaaagctggcacatcgcaggctactcctgaggctggaccctcatctcccgctgaagcataa

SEQ ID NO: 17600 - DNA, 240 bp, Zea mays
  Peptide Sequence Number=SeqID_59379
atgaatcctcctctgaaacctccacctgctaggactgatgacatggttacagctcaaatgcgactactaccacaaatggccaacacgatggcagaattgcaggctcagctccgccaagacaggcagccgccaccacctctaccaccaccagcaccacccaaggataagcatcatgaattcatgagccataaacctcccacattttctagctctcctgacccactacaagctgacaactaa

SEQ ID NO: 17601 - DNA, 210 bp, Zea mays
  Peptide Sequence Number=SeqID_59380
atggaccccagcttctttcggagtttctacaaagggctggaagaattctggaggccatcttgttttggtgagaagggcaaagatgatgatgaggaggatggttatgattatgcctatggtaatggttgccttggtgcatctagctcagtgaaagagggagaacgtgtcaggcgatctccggagttccggacttcgagagttcaggattag

SEQ ID NO: 17602 - DNA, 225 bp, Zea mays
  Peptide Sequence Number=SeqID_59381
atggccgccgcgggagaatcaatcaactcaactgttgttgatttctcgccaaagtggaggaatcaccgcgacaccgtacttcgtcatagacaggacttcacagtgctcaaaccaccgattgagcgtagcgataccctttcagcccatgggatctggatcgtggataggggaatcgaggccgtggatgagaagctaccgtggttgattttggatcacggatcctag

SEQ ID NO: 17603 - DNA, 153 bp, Zea mays
  Peptide Sequence Number=SeqID_59382
atggacgacacagcgggcggtagagcagcgtcggggtcggtgtccgatggagcttcacgctgcggcgacggaagggagaggcagaggatcttctatacagaatccaacatacagttgtccaaagcgcttaaggaaaaagtgaggaaaaagtga

SEQ ID NO: 17604 - DNA, 156 bp, Zea mays
  Peptide Sequence Number=SeqID_59383
atggagttgcgcccaggcttacccgcggtaaagaagaggatattgccaagggtggggaagttacaaggaattaaagagatcaccaaggatgtgcaaaataaaatgtccgttcatggatcattaagaaacaagggtggtcaagggcaggttaactga

SEQ ID NO: 17605 - DNA, 963 bp, Zea mays
  Peptide Sequence Number=SeqID_59384
atggggcaccactcctgctgcaacaagcagaaggtccggaggggcttgtggtcgccggaggaggacgagaagctcgtcaagtacatcaccgcgcacggccatggttgctggagctcagtcccaaggcaagcagggctgcagcggtgcggcaagagctgcaggctgaggtggatcaactacctgaggccggacctgaagaggggaagcttctcgcagcaggaggaggccctcatcgtcgagctccacagggtgcttgggaacaggtgggcccagatcgccaagcatctgcctggtagaacggacaacgaggtgaagaacttctggaactccaccatcaagaagaagctcatctcccaggccgtgggcagcctccacccagacctgtactacaacattctggatggaggagccgccggagcacaggacctcgcggccgccggatgcgcgccgctgaacggggcggacagcgcgtcagcagcggcggcgcaagcagtgggcgtgacgacgacgcagccttctccttccatggcgcacgtcgaccccgcggcggcgtgggcggcggacttcggctcccagacgctcttcctccccggcggcgcggccgctctccagtacgccgccgccgtcgagggggagttcgtcaagcagtgccgcacggcggcggacgcctgctacccgccggagccggaggacggcggcggcggcgcgaggcagtgcaacaaccaggcagctgccgatgtcgtgacggcggcggtgcaaccggaaggcgccggcctcccggtgttccttgaacccaagtgcgccggcagtttcatgcccgagcctgctctggctccggtgatggacttcatggaagccatcctggggtcgacggcggcggcgtcggctgccagcgcttcgtctctcgacgacacctgcttctcggcgaacgccggcatgcagtcccactgttggattccctga

SEQ ID NO: 17606 - DNA, 283 bp, Zea mays
  Peptide Sequence Number=SeqID_59385
atggggctagatgaccgtcacaccgacttagaaggggcagacgatggtgacgtctctaacgacgagcccactgaagagggagaagacctacaacggtgcaacatgcaccaccgtaggaatcggcatcgcaacatccggcgtcatcatatcaccgacgagcagttgctgatccagtcagtctcacatgatgaagaatccgaggttggcgagactcggaagagcaggagcttcaccgacagaggaacaaccgataaaggaaccgtcatggcgcctaggaatggga

SEQ ID NO: 17607 - DNA, 387 bp, Zea mays
  Peptide Sequence Number=SeqID_59386
atggtgaggcacggcccaggcccagcccggcacgctggctgccatgcccgtgcccgcctggcccgttgcttgtgtcgggcttggaccgccaggcgtgcctacggtgatagcccgagcacgttaagcaaaccgggccggctaaggcccgttgctccgtttgttaaccagcccaccgcccaggcgcccaccctagtgctgtcggcgtttcgagaccgggggtccctaagccgacgagtgagtgtgccgcgtgccccagcccagatgggtcgagcgcgtgggcgagcgcgaaggggggaaagcgaggcggccggagacgggcgtgagagaggtggaaatcccgcggccttcgtgttcgtcccgcgcccaggtcgggtgcgcttgcagtag

SEQ ID NO: 17608 - DNA, 1566 bp, Zea mays
  Peptide Sequence Number=SeqID_59387
atgggggcggtcggtaatgcgtggctgctgcaggtcaaggcgctgtgccgctcacgggagtggtgccatggcatgcaggctggtggtctcgtcgtcgtcgtgcccttcgcgtttctgcatgccgcgcggcaggccgcagtagcaagagcgagtgagagagctgccaggtccggcggcaatgggcaaggcggcgcgctggttccgcagcttcctgggcaagaaggaccaggcaaccaccaaaggccagaggcggcagcaggaccaggctctgcctcctccggccagcgccaagcgctggagcttcggcaagtcgtcgcgggactcggcggaagcggcggcggcggcgaagccgccgccgcggtcgtctcgcccgacgcaggcaacgcggcgatcgcgcgcgccgcggaggccgcgtggctcaggtccgccgcgtgcgccgagacggaccgggaccgggagcagagcaagcacgccatcgccgtggccgccgccaccgccgccgcggcggacgcggcggtggccgcggctcaggcggccgtcgccgtcgtgcgcctcaccagcaagggacgcccgccgtctcccgtcgtcctcgccgccgtcaggatccagacggtgttccggggattcttggcgaagaaggcgttgcgcgcgctcaaggcgctcgtgaagctgcaggcgctggtgcgtggctacctcgtgcgcaggcaggcggccgccacgctgcagagcatgcaggctctcgtccgcgcgcaggcggccgtgcgcgagaggcgcgccgccctccaccaccagcccgtccggccgcgctactcgctgcaagagcggtacgcggacgacacgcggagcgagcacggggtggcggcgtacagcagccgccggctgtcggcgagcgtcgagtccccgtcgtacggctacgaccggagccccaagatcgtggaggtggaccccggccgccccaagtcgcggtcgtcctcgcgccgcgccagcgccccgctgctggacgcccgcagcagcggcagcggcggcggcgaggagtggtgcgccaacaaccccgcgtcctcgccgctgccgtgctacctgccctccgggccgcggcgcatcgccgtgccgacctcgcgccagttcccggactacgactggtgcgtgctggagaaggcacggccggccacggcgcagagcacgccgcggtacctgcaagcgcacgcgccggccaccccgaccaagtccgtcgcgggctactcgccgtcgctcaacgcctgcccgaactacatgtcgagcacgcaggcgtccgaggccaaggtgcggtctcagagcgcgcccaagcagcgccccgagctcgcctgctgcggcggcggaccgcggaagcgggtgccgctcagcgaagtagttgtcgtggagtcgtcccgcgccagcctgagcgccgtcatgggcatgcagcgcgggtgcggcccccgggcgcaggaggccttcagcttcaggacggccgtcgttggccgcatggaccgctcgttggaggttgcaggcagtgagaacgacaggctggcgttcttgcagaggaggtggtga

SEQ ID NO: 17609 - DNA, 573 bp, Zea mays
  Peptide Sequence Number=SeqID_59388
atggagaaaaaggggcctcaggccctcacagcaactgagctgaatgctgccgtgtacagatacctccaggaatcagcattcaatttcttctacgaggcaggcattggaaaaggcaacatacaggaaatgctcccgcaaggtgccttggtcagaatcatgcagaaaggtcttcagtccattgaacttgaagcaaattctgagattggcagcgatgaggagcaccacttttttgaatctctggacttaatgaccaatgatttagatgagctgacaaagaaaattaccagcagtgtgaagcatagttctgagcagaaaatcgatttagttgagactgacaaagcgcagaatattggtgctgctgagactaccacaacttataaggctgcacagaacagcaaacctgatgggacagctacgatggtcagaactcagccagtgaagcatacgaaggcaaaaaacatcagttctgctgagactatgcaaaagactggttctgttgagactaccacaagaccggggttgcctgtttcatggaaagtgaagaaatttagactcagaagacgaaaggattga

SEQ ID NO: 17610 - DNA, 513 bp, Zea mays
  Peptide Sequence Number=SeqID_59389
atgatcatgttcgggagtcttgagttcatgtttctcggcatcaagtatgacatggtactcctcccgcctgcccctcttgaggatagaggctcccgtcaccgcccttctcgtcgcaggaggcaaagatggagcagccacaatcgtgccccatgggacactttgtgcatagaagatgccgccgggcatgatgacgacattgagtctctctcaagggacttggccagcatcaacatttcacttggagtacctgcgccaacattcctggcaccgcctgctccaacgggggggtcaccgctcccccacgacatcgagcaaggggcgtcagcagcacctgccctccgactcatgggccaggaggagccagatgctccctggagagacatgggaggagacaggggagaaccgtccatgttcaacctgatccccttccaaccacgttttgacaccggctacaacgctcagatgtacgtcgggctgccattcccctccgggtgcctagactctgaggagtaa

SEQ ID NO: 17611 - DNA, 1002 bp, Zea mays
  Peptide Sequence Number=SeqID_59390
atggcactcaagcgcaaggcgtgtcccagcttggccgacgacaatcattgccttgctacggccaactgctttgcgccagcggcggccgtgggagcggtggcggcagtgcagcgggcacggaagcggttcgtcggcgtgcggcagcggccctctggtcggtgggtggccgagatcaaggacaccatacagaagatccgggtgtggctcggcaccttcgacacggccgaggaggccgcccgggcctacgacgaggccgcctgcctcctccgcggctccaacacccgcaccaacttctggccccgcgccgccgccgtccccgccgttgctgctgccatggcgccgccccaccaccagctggtggcgcctgcagcgccgtccgctctgccgtccaaggtcgacgacttcctcagttacgacagcaccagcgacgagcacggcgtcgtcgtgaagcacgaggatggggtccacctgctcccaagagacggaggacgaggcgacgaagggggaggtggtggtggcctgcaaggagccgacctgggcgacgtcgacgcggtagagatgcagccgctgcctacttatggcagcgagggcgccggcgagccatcagccgcgatccacgaggtcatgaagaggatgaagtacgagaggaagatctccgcgtcgctctacgcgctcagcggggtgtcggagtgcctccgcatgcgcgtcggcgacggtgacgaccacgccactgctgcaaagcacgagctggcgctctcaggcctgagggacgcgtgcaggagcaaaaggcagcagcaggaacaagagcaaagactagaagtaaaagacacggaaggtaacgtcgtcggccatgaggaatgctccagctgcagcaacagcttctcgtcggaagcaacgagctcttcgccggaagcagccaacaaccctccgccgcaggaggcgaaagcagtagacagcgacatgcttctctggagctcccttgatctgcctccgatctactga

SEQ ID NO: 17612 - DNA, 156 bp, Zea mays
  Peptide Sequence Number=SeqID_59391
atggtggcgctcgaattgaggatggcgcggtggcggtcggaggaaggaggcgagctcaatctggcgaaaagcggctttcaccgtggcagtgactccggtgatcgccgggcatgcaaccgggctacataccagctacaaatcgactatagtgactga

SEQ ID NO: 17613 - DNA, 366 bp, Zea mays
  Peptide Sequence Number=SeqID_59392
atggccgccgccgccacctcgtcgaggagcctcgccacggcctgcgtcctcgcggcgcttctcgtcggctgtctgctgcaggcggccgccgccgacgcgcgccgtctgcttggtgatgatggcacgacggcgatgcctccgtcgtcgtccgccatgcagggtgacggcgacgacacaccggtgtggcacgctgatgcccacaccatcgacgaggaggaggtcggagcagcaatagccgccatgggcagtgccgcagacatggagcagtcgaatgagaggctagacgggctggagcaacaaagcaggctggtgtcactgctggccggcatccgctcctcccccagcggcgtcgagagggacctatga

SEQ ID NO: 17614 - DNA, 1053 bp, Zea mays
  Peptide Sequence Number=SeqID_59393
atggtggcccacgatgtgctggagaagcgccgcagagctcaagcgagggaggggttcccgctcgagtcctctcccagcactaaggaagaggaggatgaagacgacgatgaggggatggaggcccgcgtcggcttcagccccgagaccaggctcagttctgcgccagcctccgcaggccctttcggcggcacaactcttccctcgcaggggccggtagcgtccctgtccggggcgcgagcatccatcgagcctgctcccatccctgccgaggcagaagaggcagaggtcgtggaggaagaagttgcgccccttcccgcggaagccatcatcgtccctgtgggtgcgccggtggggtcccctcagcggctgcccgctggagggaacacaggggaggggcctgtcactccccctcatgttgtcgtcccagggttcacggcggccccagctatcgccctgccctcgacccgcgcgcctagggttgcagatgaggtgaccactgtcccgccttcgtcgttggtggggcagctggggccaaggatccggaggacaaggcatctgtttttacctatctccggcaccaaacatcgggctgacacgccgatctttactgccaccaaggcggtgaagggcggcatggggacgtctgcgggggcctcgtcccatcccccctctatccaggagccatctcagcagggtgctgaggtggctgtgaccgttcctagggcaccggtcgagcccgacacagctgcggctgaggtggctcccgcgcgtcccatgtcaccggctggggccatcgttgtctcctatgaggatgaggcggaggttgcgctgtgtgccgcgacgcccatggtatccgacctcctacgcgatattcctgacacccccaaagctacgccgagctcgggggcggggcgcgcagagggggccaatacctcagaggggtggtggaaggtacccttccagccgctgcgcagcgacgcaattatcgtcgagccccctatcgcgggggttaccggtgatcttgtccgctgtaggccggatattcgtcagtga

SEQ ID NO: 17615 - DNA, 318 bp, Zea mays
  Peptide Sequence Number=SeqID_59394
atgccgccctgcaccgtcgtccccagccaagccactaccaagccccgagccctgacgacaccgaacgctaccccatttttggttgcttggagcttatgtgtgcatgtgatggttccatggatgacacccgtgccagatgcctactatgcttggtaccgacgctgggcttccgaaggaatcgatcctaaccataacttcgatggcgatgactacctcagaaaagccaaacaaatggaagctacgagtggccaaaagcctagcggcattgaagtgtttatggtgggccacaaaggaccagattctagtaaccacgagtag

SEQ ID NO: 17616 - DNA, 261 bp, Zea mays
  Peptide Sequence Number=SeqID_59395
atggcaggctctcctcttgttcgatttattgaagcatttggaactgcattttctagaacaacattttgtgttccgatcagtgagcaaatcagaacattcatccagatgaggactaacctgaaggtggtcgataactccggggccaagcgggtgatgtgcatccagtccctgagggggaagaaaggagcaaggcttagggacatgatcatcggatccgtaaaggaggcccagcatataactctttataaatcaactacatga

SEQ ID NO: 17617 - DNA, 1770 bp, Zea mays
  Peptide Sequence Number=SeqID_59396
atgccgcgagatcttcgcgcggtgacgccgtccccccccgccggagccgccctccgagctccggggccacggaacgcttcgtcccggatctctcggggtggctcagggggagctcgctcgctcttgcaacttgcaagtgggccggagctcctggcttcaggctccaccgcttcagttccaggctctggaaatcgcaatgctactctacctcgctcgccctcgagtggcttaggtgtgtgcgtttttggagctggtgactcccgctctgccaacaaaagaaaagaaaagctgcttggattcggagatcatacattccgaacatttctcgacgctgcacactggagctggcatttcggattcagccaatcactcccactgtcagcgtattcttccaaccccgagaggatggatcagtatgaggtgctggagcagattgggaaaggagcatttggttctgcactcttggtgaggcacaaggccgagaagaagaagtatgtgctcaagaagatacggctcgcgcggcagaccgaccgcacacgccggtctgcccaccaggagatgcagctcatcgcgacggtccggaatccgttcattgtggagtacaaagattcatgggtggaaaagggttgctacgtttgcattgtcatcggttactgcgagggaggagacatggctgaagctatcaaaaaagtcaatggaaaccatttctcggaggagaaactttgcaagtggcttgtgcaacttctcatggctctcgattatctgcacgcaaatcacattcttcatcgggatgtgaagtgctccaatatatttattgccagagatcaaagcatacgccttggtgactttggtcttgcgaaaatattgacttcggatgatcttgcatcctctgtggtaggaacaccaagctacatgtgcccagaacttcttgccgacataccgtatggtactaaatctgatatttggtctctaggatgttgtatttatgaaatggcagctctcagaccagcatttaaagcctttgctgcagaactgctgaagcacccacacctccagccatacgtgctgcaggtccagctgaagtccagcccctctcgcaccacgtccccaatctaccaagctctgacggacaaagtgaagaagatgacgttcgtgagcgacaccgccgattccgcgaggaggagggctgcgagacggagctctctggggagcgagaggaccgtgacgttctgcaagccatcccccgagcgcaactccgtcagctccacgcggagcatcaaggagtacacgacgacgacccagagtgccagggagctctctgtcggcagcagcctgcaggtcgacgacgaggtcacgagtaaggctgttgtgacgaagacggcaggcgttctacggactcccagcaagagccgtgctccggcatctaagacgttggtggcggctagaagccggctggatcctccgaagacgtcctatgccagaacgaaccgtgccgagttggactcaaggacgcctctgagcaagagcagcgcgcggacggcaaggagagcatccctcccgctggcggcgtacagagcacccagcggcggccgcgccggtagcttcctggagcagctggactcgccggacgtgtccgtgaacgcgccgcggatcgacaggatcgcggagttccccctagcctcgtccgaggagcccctgggcgcccatgaaacaagaagctgtcctgctccacgcctcccttcagcacccgggtccatcacgaaaggacaa

SEQ ID NO: 17618 - DNA, 180 bp, Zea mays
  Peptide Sequence Number=SeqID_59397
atgaccgcaatcacttcacccttcttattgatcgttctgacagatgacaacactatttaccccgttcagaccactgtgccaaccaccggggtaagactgacaacaggtggaagacgcattaagggattcggattgggtgttggcaatgcaagaggaactcaacaacttcacgaggaatga

SEQ ID NO: 17619 - DNA, 195 bp, Zea mays
  Peptide Sequence Number=SeqID_59398
atggcgcagagggtcttcttctttgcgaagaaccctagaactcgcccttgggagagatcccgtcgaggaggagagttccaatgcgtgctcccggatcgacaggccacccgaggagcgcagatcgtcgaggctctagggccggaccgttcgaccacttctggtgttcaacagaaggcctacgtaggatacgaatag

SEQ ID NO: 17620 - DNA, 366 bp, Zea mays
  Peptide Sequence Number=SeqID_59399
atgcagagaagagctgctcctgcagcagtgtcccggactgcccgcgctgccactgggaggacctccaggcggcccgatgacctattgcagacctactgggacctcacagagccgaacctaagatccttctcatcacgaggaggccctatggttcgttgttacaacgacatccttaggttggcttttgagagtttgtcggccagcgaccagcagaaatttgaagactataagaagaagctagagaaggaggtggagaggtggtacctctcgcacttcgggatggatcgccatcagaaggtcgtacaggtgagggaaatagagcatgtttcccagacgaacattggctacagcccttgctatgagtaa

SEQ ID NO: 17621 - DNA, 1242 bp, Zea mays
  Peptide Sequence Number=SeqID_59400
atggcggacggcggaggagaaggaggacctcctgcggcgtcggcggcgctcaaggaccaggggaatgagcagttcaaggcggggagctacctcaaggctgccgcgctctacacgcaggccatcaagctcgaccccgacaacgccaccctctacaggttccttccggcgcccccactcctgttctttctccgccgtgccggtggtaaaaaccctagttgcgcgtgcgcccatcctgcgtttggggaagctatggatagctgcggcctggcattatgggagcttccagccgtgtgttttacttttatcctggagatgtttctgtggcaccctcttgtcaccagtggcggagggcctaatatggctgggcaaccaaacacgatctcaaccaaagtcaacacatacgatgatttaagaacgagacgcaaccgagctgcagcattcctgcagttggttaagcttagcaaagcgcttgctgatgcagagacaacagtcaggctgaagccacaatgggagaagggtcatttcaggaaaggttgtgttttggaggcaatggagcgctatgaagaggcgatagctgcatttcagatagctttgcagcacaattcacaaaatacagaagtctcgagaaaaatcaagaggctatctcagttggccagggaaaagaagcgagcccttgatgtagagaacatgcgttcaaatgttgacattgcaaagaacttagaatcactgaagactgagttggctacaaagtatggagatgcagaaacagggcagagtgtcttttctttcattgttaatgtggtagaatcagcagtaaaggtttggcatgatacaggaaaagtagatccaagggtccattttcttctcgatgatcagaagaccgatactgaaaaatatgccccagtagttaacattgacaaggcatttgagtcccccaacactcatgctgagtgcttcacatatctgcggcaatacgcggagaattgttctgcgaaggctgcttgtatggtggcacctaagagcatcatctcctacccacaggtctggaaagggcaagggtcgaggaagtggaagcttgaccagagcgacgggttcttcgtgcaattcgaggcaccggcgctgaggaagatatggtttgtgccaagcacaaaagagaagggacggacattgtgcaggagccctgaggccttggacatcggcatccatgaagtgctcccccgtatattcaaggaggcagcttaa

SEQ ID NO: 17622 - DNA, 429 bp, Zea mays
  Peptide Sequence Number=SeqID_59401
atggcgcgggtccttatctcccctgcttctttcttcctcccacgccgcgcccctgtgctcgtcgcggtagactccagtcctcctctgccggcgctattccttggagctccagccgctctaggccgagcaggagcaggtgaggtgcggccgtgcggcctactcctgggcgggtggacgctggcgcagtgtcgtggacctgcagcctgctcctgggcgctgggcgggcggacggacgggggcgcggtgtcgtggcccgtggtcgtcgccgcctcgccggtgccgcggtgcgtccgtgcgccctggcggctgcttctccttaggttaggggctgacggtgcccgctgtgctggggctggtccgtatgggcctgttcctctccctactccctgctcctcgcgttgctgggccgcgaccggggctgcagcctag

SEQ ID NO: 17623 - DNA, 189 bp, Zea mays
  Peptide Sequence Number=SeqID_59402
atggcgcggtcggtccgagcccaaggtcgggcgaggcggagacttctcctgaggtcgaggccggggtcgggcgaggacatgattcctcccgaggccaaggttgaggccgagccctggggtcgggcgaggcggagacctccttccgaggccgaggttgaggccgagccctggggtcaggtcggtcagtga

SEQ ID NO: 17624 - DNA, 420 bp, Zea mays
  Peptide Sequence Number=SeqID_59403
atgggcaagggcaagagaggtcaaggctcacctcatcgtgtcggcgacaagcggaagcgcgatccaagtcctccctcggaggacttcggcgactctgagtactcagaggaggaggtgtggacgtacatccgctccgtcgagcgtgtcaggctcgaggggtcggatgagtcggaggtctcttctgatgaggaggactccttcggcttgtccgtggagcagagctgcgacgacagtgacgacgagggtagtggcggaggcggcgacagggacgacgatgacggcggaggaggcgacaatgtcagcggcaggggcggtgaaggcgacggcggcggcggcaggggcggtgaaggcgacgacggcggcaacgtcggcagtggcagcggcggtggcaaggccagtggcaaggcgccactagtttaa

SEQ ID NO: 17625 - DNA, 390 bp, Zea mays
  Peptide Sequence Number=SeqID_59404
atgaacggacagagggagcaggaggttcacgacgggagcagagaagtcggcacgcaggggagaacagcggccgagcaagagctagagcttcaccgacgtgccgagaggaaggctgcgcgcgcaggggagatgagcgccgagcgaacacaggtagatgttgagctcgcgcgcaggcctgagggacgcgcgcgcaggcagagccgctcggcagagcgcgagcgagcagggagacgcggcaccagagctggggctaggagcgacggacagagatggagcgagcagagggagctggggagaagaagaccgcacacgaaggataagcagcctgcgcgtgaaaaatatcaagcgcgcggcgttggggaagaagaggtgctcccacggttgaaatag

SEQ ID NO: 17626 - DNA, 111 bp, Zea mays
  Peptide Sequence Number=SeqID_59405
atgggtaggtcaggtacgctagttgatcgcgcgcggaaggcgagccaaatcgaccccaagcgcgggctactccgcatagtgaagctgatagatgaatctaaagatagataa

SEQ ID NO: 17627 - DNA, 192 bp, Zea mays
  Peptide Sequence Number=SeqID_59406
atggtcgactctgacaggagctatagtgagcaacagtgccacgcagaagtcagagctgcgaagtcagagggcaccggactgtccggtgccgcaagaggacaaagttccaaggtcgcccgagctccgaaccctaacggttgggtgacgtggcagcgcaccagacagcacaaagtacctgtccgggttaaatga

SEQ ID NO: 17628 - DNA, 336 bp, Zea mays
  Peptide Sequence Number=SeqID_59407
atgaccgtggataattatctattggatatgggtatggtggaatttggtatccgcaagtacggttatggatataataaggtatccacggataattttttcgcggtgttgaatgctaaaattgtagtgggcgggcgggtaacgggtatccaccgaatagcggatacccggtggatggacagcatggtactctcgtggctcaacgacaccatcaccgtcgagatacaggacatcgtccgcgaccaggtggacaccgctcgcaaggcgtggggcttgggcgctccacctcgatgctcagttccacctgttcgcttaggggcatctctcgtgggagagtag

SEQ ID NO: 17629 - DNA, 681 bp, Zea mays
  Peptide Sequence Number=SeqID_59408
atggtgtactgtagaagggttcacctgccagtaggtatcaccgtgctggaaaacaaccggctaaaaatagctatatcatctctaaagggctcggaagtaagtggagttaccaagaacccaggcatcactttctccatgttgagaaaaagcaaccgccttatctgcgttcgacaaagtgacatggtacaaggtgaaggaaacgacgagaatgacagtgctgctgctcaccccactgtgtctctcctcgcttcttcgataataactcggttacattatgcagccagggttcatggtgcacgcaacgcggctgtccagcttcaggggcaccgcttcgccggcctcttcgggctgcctccgtcggtgcccatcgccaactgcgccgagtttgtccactcccaggggagcagagatctgtatgccaaggtaggggaccagatgtatctgggtgccaagaggtgcaaggcggagggaggcgaggggaacctaaaccgaaaacccacactagagcagaccgacagcgatagcttcgacgagaacgacgggcagaaccagaagccactgggcaaggggaagaatatgacaccggcagagaccccccaaggactatgccatgtccatgacaggagagggcaggctactgacagcacaaatcacttctatgttatgctctgcaccacttag

SEQ ID NO: 17630 - DNA, 120 bp, Zea mays
  Peptide Sequence Number=SeqID_59409
atggggtcttcccatggtacagtaccccgagctgataaggacgccagtgcgactgctcttaccgccggcgaccgatttccgccgcgattcgtgccgccgccggtccaacttgagcttggg

SEQ ID NO: 17631 - DNA, 315 bp, Zea mays
  Peptide Sequence Number=SeqID_59410
atggggctcggccgcacggcgcaggacgtcagggtcacggcgtcggggctcctgggcgcggctccaacggtcctggtgtgggggagggcgcaactcagatggcctggcgcggtgcagggcagggcatcgggcctaggcggctgcgctcctggcagcacgggtttgggaggaaaggggagggaggagagagaggccaggtggggccggtttgcaagagaggaaacggacggggagaagacaaagagcggcggcggtggcttggaggagccaggggagggcgcgactggtttacttgggccccttgtggggccttag

SEQ ID NO: 17632 - DNA, 204 bp, Zea mays
  Peptide Sequence Number=SeqID_59411
atggggcagtcgctgttgttgcgaacaaggcacctctgtctctggtggatggcccccgctgtcagtctcgtcttcaacaccccaccaacaaaaaaaccgtgcgacagaagggtggcgccgcacgtggagcttgctggcgccggcaattggaggccactatgtgatgggggcatgcgcagggtctcctcgggcttccttggctag

SEQ ID NO: 17633 - DNA, 171 bp, Zea mays
  Peptide Sequence Number=SeqID_59412
atggcaaagatcttttcacctaagtcattatccgcgcgttcaccgagcacgaatcgtagcgccggtgaggatcgtggcacggggtcatcggcgggcactgtaccatggcgatccccttcagtgtgcctgacagagcgatttgaggaacgattttctccaattttcatgtga

SEQ ID NO: 17634 - DNA, 1074 bp, Zea mays
  Peptide Sequence Number=SeqID_59413
atggagcagaagatgtcgaaccatcgccaagctacgcgcccgagagggagtagacgagagacggcggaggcaggagatcgacggctggggaagacgttggcaaggaggtccagccgtccagctatggctctagaaaaaattgcctccatcgttcaagtgactccgttcaacgtgacgtcggactcatacgccacgttcatccagaacgtacgtgtagctctggccggcgcgaagcctgacacggtggtagggcccaaatccaaggtaagtcggccggtgctggccaaagaggcgtcgtcgtctggcctgcagccgccgaagtggatccacgtcgtgctcaacggcaagggcggcgccgcgcccacggtggccatccgcagcgacaacgcctacatcgtcggcttcaccaacagcaaggggacgtggtaccagctcagcaggacgggcgcccaggagaagctcgtcgacgacaaccccgtgatggcgggcttcgacggcaactacaacacgctcatcggcggcagcgacaagctgctgaccctgaacgtcgccaagtttagcgtggcggccgcggccgccacgttctggaaccacaaggccggaaacacatcatatggtgacgactgcggcagcgacgaggaagaagaaagcggcatgctccgcgctggcgacccgctgaaggtggcggtggcgaccctcgccgtggccatctgcgaggcggcgaggttcgtccccgtctccacggtcatcggcaaaggttggggcgagcaacgggtgagcgtcacggccaaggaggtaagctacatcatggactggggtgacctgtcccgcgcactgctcaagtggaagagtggcggttataaggacgacaagcctttccagccattcaagggtatcgggataaataacggggaggaagccttggctgtggtggcccttctgaagctcatgtcgggaagccagagcctgttggcctggctcaagtgcttctgggggcttctggtgaagaagctcaagcgggaggacatgaattacgagaagccaaagactgcagccatcgttaacccactttaa

SEQ ID NO: 17635 - DNA, 279 bp, Zea mays
  Peptide Sequence Number=SeqID_59414
atgacctgtgaattttgccgcggtgtcacccatgcctccatctccctcactgtatctctttccgacgtggtaggcatgcgcttgcgctgctatccgtggtcgggggtcgtctgttgggccgccatgcctataaatggagctaggagtcacggcgaggcgctcgctgttcttcaagtcggtgatgctcacccagcagctggtttgggtatccgccgtagtttttggccggaccgagcgacgggatggtcgacggcgagcacgtcgtggtcagggtcgtag

SEQ ID NO: 17636 - DNA, 340 bp, Zea mays
  Peptide Sequence Number=SeqID_59415
gagcctgcccaaaggaatagcaggaatagacctaaagtacttaacatgtagaaaagcacctagaaatgttgatgacctgacacagatcattgagaaagaatatgaggactacaaacctagcactcagaggaggcttcctctccatttgtaccttcctagagtcgacctcgtcctcctcatcgagatctctcaacagagcacctcttcgtggcttggagaaattcttgcgaacgtcgggtcagactccttgctagacgagctcctctccttcgacgactcctccatgaccacgaatggggatttggggcaaatcgaaatggggatttggcttctttgttag

SEQ ID NO: 17637 - DNA, 516 bp, Zea mays
  Peptide Sequence Number=SeqID_59416
atgccgcagttgctgaatgcagctgatgcaaaagagcgcacacttattggaacattgcagaagttcattaaggaacagaagctagaagaactgcccatttttgaagaagctaacaagcgaatggcacatttggatcagcaaagtgctgagagaaaaagaactgctgctgcagcggctgcggctgctcgaaaggttagtaagaacattgaggagcagcagaaaaggatacaggagctgatgcagcctgctaagagaccaaggtctgagaatgtgggaaaggatcttcgggccagaacgcccatcactctacctcctggacctggtgctttgaatggtccaagtgcgcaggcatcttcaagatcaaggctctattctggagatccccttgcggctgtctcccgatcatcagataagaagggatcgtcttacaagtattctttgtccactgtgttcaacaggattatccgccatgcagattgtactctcattgtcacaaaggagtgggactttgcttag

SEQ ID NO: 17638 - DNA, 204 bp, Zea mays
  Peptide Sequence Number=SeqID_59417
atggcgagagtagcgtgtaccctccgtggtaagaggctggatggtggtgtatctgtgctctcggtgaagaagcagcaaacttttgttgcttctattccaaggtggtaccaaaagaagaaaatcaagactaaagctgcgggaggaaagacgggtgaaacgctcttgggaaaggtaaggaattcagataccgaacttgtcaagtga

SEQ ID NO: 17639 - DNA, 240 bp, Zea mays
  Peptide Sequence Number=SeqID_59418
atggacttcccattgtacagtaacctgaagaagatcgcaggttcagtgtatctcaccgctggtaatcccacgccgcgatcctcaccggcgctgcgattcacgcccagtaacgcgcggataatgactcttggtgaaaagatctcgccgtggatgaagtcagagcactgtggtcgctctgtcgcctcatccacttgcgccacgacgtggccgcgcggccgtcgcggtgatgatcaccgttaa

SEQ ID NO: 17640 - DNA, 252 bp, Zea mays
  Peptide Sequence Number=SeqID_59419
atgatgcttcatgtgggaagggagttttcaaagaaaagaattgatggtggatccatcatggccgtgatgggttcaacatctaaaaagatgtacctctgccagaccaatcccagaaaggccaacacgcaatgggagtggagagatggtgagagtagcgtgtaccctccgtggcaagaggctggacggtggtgtatctatgctctcggttggcgtgaacccggtctgatcttgagaaactcggtggcgagttga

SEQ ID NO: 17641 - DNA, 423 bp, Zea mays
  Peptide Sequence Number=SeqID_59420
atgatgtaccccccctgcaacgtggtcggtctgagcccaaggtcgggcgaggcggtgactcctctgaggtcgaggttgaggccagccctggggtcgggcgaggcggagactgtcttccaaggtcgaggcggaggccgagccctggggtcaggcgaggcggagaccgtctgccgaggtcgaggcggaggccgagccctagggtcgggcgaggcggagactgtcttccgaggtcgaggcgggggccgagccccgaggtcgggcgaggcggatcttcctatggcgcatgaggctggactcggctgctgtcagcctcaccctggcgggtggcacagcagtcggagcagggcaggcggcgctgttttcctgttaggtcagtcagtggaggggcgaagtgactgcggtcacttcggttctgccgactga

SEQ ID NO: 17642 - DNA, 132 bp, Zea mays
  Peptide Sequence Number=SeqID_59421
atggcaagcggcggcgcgaacatcgaagggaactccggtgaggaattcccggagttgcagagtctaatccagcccgcgctgcagttgaggaccttccttacgacctggttttcaaacttgattcaaatttag

SEQ ID NO: 17643 - DNA, 1113 bp, Zea mays
  Peptide Sequence Number=SeqID_59422
atgacgggccacgccagcctgctgctgccggcgctcgccgccgtcctgctctgctgccccctcgcgcaatgcgggcagcagaactacacctccatgttcagcttcggcgactcgctcaccgacaccggcaacctgctcgtgtccagcccgcttctccaaccacatcgtcggccgctacccctacggcatcacctacttccaccgctccaccggccgctgctccgacggccgcctcgtcgtcgacttcctaggtgcgtttcgcaagcgttcggcctgccgctgctgcagccgtacctgcagtcccgcggcaaggacctgcgccggggcgtcaacttcgccgtcggcggcgccaccgccatggatccgcccttcttccaggagatcggcgcgtccgacaagctctggaccaacctgtccctcagcgtccagctcggctggttcgagcagctcaagccgtcgctctgcagctcaccgaaagagtgcaaggagtacttcagcaagtccctcttcctggtcggagagatcggggggaacgactacaactacgccttcttcaagggcaagaccctggacgacgccaagacctacgtccccacggtcgccgccgcggtcaccgatgccaccgagaggctgatcaaggccggcgccacgcacctggtggtgccggggaacctgcccatgggctgctcgtcggcgtacctgaccctgcacccgggccgcaacggcagcgactacgacgccgccggttgcctcaggacgtacaacgacttcgcgcagcaccacaacgctgtgctccagcggaaactgcgggcgctccgggcgaagtacccgcaggcgaggatcatgtacgccgactactacggcgccgccatgtccttcgccaagaaccccaagcagttcgggttcacgcaggggccgctgcggacgtgctgcggcggcggcgggccgtacaacttcaacccgaaggcgagctgcggcgtgcgggggtccagcgtgtgcgcggacccgtcggcgtacgccaactgggacggcgtgcacctgacggaggccgcctaccacgccatcgccgacagcatcctcaacgggccctacaccagccccaggctcctctga

SEQ ID NO: 17644 - DNA, 108 bp, Zea mays
  Peptide Sequence Number=SeqID_59423
atggctgggaaaaagctctggacgggacgccaaatttcaggaaggccaggggctctggcgcaaaagatcctaagacacagacgacactccaggtggactgcgggttga

SEQ ID NO: 17645 - DNA, 438 bp, Zea mays
  Peptide Sequence Number=SeqID_59424
atggccccaagggcacatttccctttcagtcccgtgcccacggccctgtcccgtcgcgccggccgccaccgccccgacgtcccaaggcccgcggcgcagtccggaggccaccgccccgagcccgccaccgccccgacgtcccgaggccgcggcgtagtccggaggccaccgccccaacgtcccgaggccgcggcgcagtccggaggccaccgccctgacgtcccgaggccgcgacgcggtccggaggccaacaccccgccgtcccgagcccgccaccgccccgacgtcccgaggccgcggcgcggtccggaggccaacgccccgccgtcccgagcccgccaccgccccgccgtcctgagcccgctgctccaccgctgtccctccctccggccgtcgtccctcccaaggccatccactccgacgccactcccgaggtaa

SEQ ID NO: 17646 - DNA, 264 bp, Zea mays
  Peptide Sequence Number=SeqID_59425
atggcctggaacttcgtggcgcggcggcatcggggtcacgactcggtgctggtggcacgcctggaagtggcagaggtcggcgggttgacacggggcacaggagttcggtcggggagggcgagcggcgtcctggcggggctctgctcggcggccttgggctcggtagagagagacgtgagggggaaggggagccagggcggcggcgaccagggaggagccagggaagtggcagctagggatttaagaagaaatgttattcaataa

SEQ ID NO: 17647 - DNA, 321 bp, Zea mays
  Peptide Sequence Number=SeqID_59426
atgtggctcctcctgaaccacctgctcttctcctgtggggaggtgtttttctcaatgtttggactgggcgccaaatctacagaaaaacaggggctatggcgcaagtgctccgcccgcaatcgcgaccgcacggaacagcgtaacgcggacgcctcacgaaccaggcccgccgcacaagaaatccccaactcctgcgctcaccctctctcattttctcgctctgcgctcgtcaatacggatcacggtggcgtgaacacaggcattaataacccctggacacggaacggagagcgctgcgcaggaagaagtggagctgcgtag

SEQ ID NO: 17648 - DNA, 381 bp, Zea mays
  Peptide Sequence Number=SeqID_59427
atggacgacgtcgtggccggggctgcccaaaatggagacgacgtcgacacattagggctgcgcagatcggatcgcacacgtgatgtggagatcgcggggctgctgctgctgaagtcagagacgacgacgtccaggcgagagcagattcagcaccgaccggcagagacagcacaacggcctgcacagcaaggtcgaagacgatggcttgacaatggcaacgtccagggtggactaatggaacagagatgtcgtggtgtggaagcagctggtgacgtctggggaaaaactatagagacggtgtccccgctgaagtccgaatggaggaggacgacgtccaagcgtccatacattgagaggagatacgtgacgagcaagatctga

SEQ ID NO: 17649 - DNA, 228 bp, Zea mays
  Peptide Sequence Number=SeqID_59428
atggccgcgcccacgtctgcgcaaatcccggccactaccaaggcgcccgacccctactcaaaccccctcccatccaatctgccatttcttccactcgcagacacccccaggccgccttcgctcgtgcactgcctcttcgcgagctcggaagactgccaccgttcaccgaattcgcacatccgttctgtcaccgcggttgaggccttgccgtgcccattgcctcgttga

SEQ ID NO: 17650 - DNA, 198 bp, Zea mays
  Peptide Sequence Number=SeqID_59429
atggagaaccacccgaaaaaacagtgctaccacaagggtggtcctccaagcaaaaacaccttcggcagtatgatatgcgaactgacacagcatgaaggcacaagccgaagctacaacccagaaagcttcggcataatgacgcgccttgagacaaagggtggcaccgacttaaagaggaaaagaccgtttagtccctaa

SEQ ID NO: 17651 - DNA, 213 bp, Zea mays
  Peptide Sequence Number=SeqID_59430
atggccgaagtagcgcagcagcgacggccggtgcagtcgtcggtgggtgctgggttgcgcgcacgcttgctgggccaatgggggtttagggattttgagcagggagacgacgttggggagggagcagtggcattggggagagggcggcggcatgggcgtgtgcaggacggtgaagagcggagcggtggctcggatttgagggcgaggacctaa

SEQ ID NO: 17652 - DNA, 243 bp, Zea mays
  Peptide Sequence Number=SeqID_59431
atggggccaccgttcctcaccgtcatcgtcatcgtcgccttcctggccaccactgcgcaggccgccgaccccttcgccttcttcgactgggtcgtctcctacatcaccgcctcccctctcggtgtcccgcagcaggtccgcacactcaactatgcatctcatttctcatccccttgcgcgcaactgcaatacagtttcgtctcccttcctgctgcgccgaaactatttagtattcggatctga

SEQ ID NO: 17653 - DNA, 501 bp, Zea mays
  Peptide Sequence Number=SeqID_59432
atgtctggagatcacgccaagagggagatcgtgatcagcgacaagcctgcgggctcgggaaagactctttcaagggagtccggcaacaagtacaaggaggaatcctcttcctccatcaagtcacataggaggggtgacaagaagaaaaagaagatgatgaaggtggtctactatgagaccgactcttcaacaccctccacatccggcatcgagtcgtccactacttctaagcgccatgagcacaagaagtataggtcctactcggctgtccagcctggtggcagggtggatggccaagtcactccaggaaccatgtcatccaagcagcatggatcaagcagtctcattagctgcgagaagcagacgattcgaatcgggtttttaaccttgcaagtgactgcacttgtacccaccatatccggaatgggagaccatgtctcaggacgcatgaggagagcagcctgcgagcaggttcactcaggtgagtttgaactaccatag

SEQ ID NO: 17654 - DNA, 459 bp, Zea mays
  Peptide Sequence Number=SeqID_59433
atggaccgcatccttctggagatggacaggatcctgaggcccaggggcacggtgatcatcagggaagacgtggacttgctggtgaaggtcaagagcctggcgaacgggatcagtagaaggactgtcaaatgggtcggcgcgagacgggacacaaaggggggagaacagcgaggggaaaccgcggccttcgtgttgtcctgcgcccagggcggctggggtaatgatggcccccctggcgacgtggctggtccaaacccgagtttgggcgaggtggcgactcctccgaggtcgctgagtccgagccctggggtcgggcgaggtggagttcgtcgtcttccggagctgaggccgagttcgagccctgggtcgggcgaggcggagttcgtcgtcttctggagccgaggccgagtccaagccctggggtcaggcgaggcggagttcgtcatcttccggagctga

SEQ ID NO: 17655 - DNA, 660 bp, Zea mays
  Peptide Sequence Number=SeqID_59434
atgcatatacggccagaactccagttatattatttccggtcgctgcagggaagcgtggtcctgggctcggcggtgaagatcgggacgtggggcggcgacggcgggagcccctgcgacatcacggtggcgccgcggcggctggagagcatcaccatccgctggggcaaggtcctcgactggatcgccttctcctaccgggaccagagcggggagctgcacaccgccggcccctggggcggcaacggcaaaggagagggcacggagacgatcacactggaggcctcggagtatgtaacgggagtggcctggtccgtgggcccgttcaagttcaagaacgtggagcgctgcatcacctccttcaaggtcgtgaccaacctccgcagctacggccctttcggccacggggtggacagcacgcaccacagcttgcccgtgctcgacggcagcgtcgtcggcatgttcgcccgcgcaggggattttctcgacgccatcggcttctacgttctcccagatgccctccctgctctaaaaccgacgacggaccctgctgaacaagaagaaaaagaaaaggattctggccatcaacagaatgggaaggcaaaatctaaccaagaagaaaacgaggactccaaaaacgagaaggataaacccttgtcgtag

SEQ ID NO: 17656 - DNA, 1074 bp, Zea mays
  Peptide Sequence Number=SeqID_59435
atggatctcggtgccaaacgcccggattctccacctgattctcctggaagcgcttcttcccactgcatcgtttcaacatggatggagaatcggctctacggccgcgtcgtgaggaagcgggtgattcctgcagtacctcttcacattccgcacactgctggagacaaacaaataggccctaataaaaataggattcgtgtgtgtgcattcatagaaagaaagggaaaggagattgtggtggaggtgtcagctgtggtggaggaggaggagaagcagcagcagcagcagagaaagggaaaggaggttgcgttggaggaggtgccactgcctgcagtggcggagtcttacgacgattcagatttagattcgggttctggttgggacttctacgaggaggagtactcggagaagaaggagcaagagaggaaggaaaagaaacctgcatggctggatacgctgctgagaaccaagttctgggacccgtgcaaggagcacgggtccaagaacagggcagaccagtgcatgttctgcctcaggtgctccaagctgagctgccctcgctgtgtccacgaccagcccggccaccgcctcctcaagatccgccgctacgtctaccgctccgtcgtccacgcttccgacatgcaggagctcggcatcgacgtctccaggatacagacatatgtcatcaatgcgagaaaggtgctgcatctgaggcccatgaacagatccaagcatttcaggcctcaagcagggacacctcgctgcataacctgcaggacctggctgcgtagcgcgcccaacttattttgctcccttacctgtgaggaggatgttgatgtgtcgcaagatgacttctcagggcccgaagctgagctccgctacaggagtttccaagtgcatatggctgaacctgctgaggagctgttgcctgatgaccctgaagttgagcatgagatcatgcctgcacaagttgagccgccaccactggcggcagccgccgccgcaaatcagaacgtgtcactccgcaggcgggcgcgcaagcaggcagcgccattgagggcgccgttcttctga

SEQ ID NO: 17657 - DNA, 636 bp, Zea mays
  Peptide Sequence Number=SeqID_59436
atggagaagaaaagggctggccgcatggcaccaatggcctcggcctccaaaaagccgttgaatccaaagcaggcgaggacgaagcgtgacgcggcagggtacttctctagaaaagcacggcatcagcaaggtgggggggctggggttccttattgcaggcaatcacgagctgcaaggaaagcaactgcatgcagaggcagcacctcccccgcctgcagagtggcggcaggttcagagaaccgggcgaaaaaattcggcatgacctcccctacaccatcgatcgatcatgaccaggtccgagcggagcgtatagttcctacatgctaccggcggcaccgtccggcgcgttcggacacgaccaggaggaggagcatcagtcacggcgagcggcggcggcatttcgcccggagcaggacagcagaccagcgtccacgcacgcacccacgcaggacggcaggagcagaggaggagagggctagagcacccccattgcattaccttcctctgagagagagaggagaagaaggagggacctccaatccaaaggagaggagagaacaatcccctccaaggaaacgcaacgcagtgaacgcaaatcaaatggacggggtgaacggaggtggaatggatgggtga

SEQ ID NO: 17658 - DNA, 228 bp, Zea mays
  Peptide Sequence Number=SeqID_59437
atggccgttggggaggctgtttgtcgatgggcgcaccagacaatcccggtgcgctaccgggacagtccagtgcgccacccggacactgtccggcgcgcactgttcactgtagcttttgcagacaaccattggcgcaatagccgttgctccgcatggcacaccggacagtctggtggcccactggacagtctggtgaattatagcggagtggcttttccagaaacctga

SEQ ID NO: 17659 - DNA, 426 bp, Zea mays
  Peptide Sequence Number=SeqID_59438
atgtgggcccaggagcatgatggattactcgccttaggaccggatctccggcctgaaattccctactatgcacgaaccgttggtggtagcgcctgggcgcctagacgccgggatgaccgaggcctaggcctggccaagccagagtgtcccatgctaagcaggcggtcgacgtcgtcacgccactacttcatggaccctggcgaggccgtggagctaggagggtggcacaacaactccctggccatagacaaagcgccaggcgtagcccttgacgccctggacgcctatgcaggggtgtgctgccgtgtagaacgcacagcagcagcaccaggcatagggcggctggaggcccgaagcgtggaagaggcagcttcctcctccaccggaaagtcctcggggatgaagtcgtggtgctcgatggtttga

SEQ ID NO: 17660 - DNA, 204 bp, Zea mays
  Peptide Sequence Number=SeqID_59439
atgccggtctcgtgcgtgaggagcactggctcagctcacttcggctgcgccttcccctacgtcagggcctcctcttcggctgcgaggaacctcgagccgctgagggcgatagccacgcaggcgccccctaccgtgccacaatattcgagtggggagaagacaaagattggcatcaacggtgagttcttttatatacagttgtag

SEQ ID NO: 17661 - DNA, 1161 bp, Zea mays
  Peptide Sequence Number=SeqID_59440
atgaggcggaagcagctcctgccgccgtggctgctggtcgtcctgttcttgtcgtggtcgtcggcggcgccagtgcccgcctcatccaccaccaccaccaccaccactctccccggtcaaatgcggcggcggcgctactacgactccatcttcagcctgggcgactcgtacgcggacaccggcaacggccccgtcgtgttcggctggcacgctctggccagccccgttatgcgcccgccctacggctccaccttcttcggccgccccaccggacgcaactgcgacggccgcctcgtcatcgacttcctcgctgagagcctgggcctgccgctggtcccgcctttcctgcaggcgcaggcgcgccacgggacggggagcttccggcgcggcgccaacttcgccgtcgggggcgccaccgccctcgacgccagcttcttccaccgctgggatccccccggcggcagcgtgttcccgctcaacgccagcctgggcgtgcagctgcagtggttccagtcgctcaagcgctcgctctgcgccacgcccaaaggcatgttgttgcgcagatcgctcttcttcgtgggcgcgttcggggccaacgactacctcctcgccatggccgcgacgagcctcgaacaagtcgggtcgctcgtgccagccgtcgtcaggaccatctccgcggccgtcgagaggctgatcgtggagcacggggcggcaaccgtggtggtccccggcgtgatcccggtggggtgcgcgccgccggtgctcgccacgttcgccgaccccgacccggcaggctacgacccgcggacggggtgtctgagatcgatcaacgaggtggccacccgccacaacgctctgctccaggacggcctgcgcgagctccgggccaggcacgccgccgccaccgtcgtctacgccgacttcttcggccccgtcatcgacatggtgacgtcgcctgccaagttcgggttcgacgaagacgtgctgacgctttgctgcggaggacctgggcggttcaactacaacaggcacgttttctgcggcgaccccggcgccagcgagtgcaaggacccgtcggctcgtttgttctgggacggcgtccacctgacggaggcagcctaccgatacgtcgccgccggctggctgagcgccataacgtag

SEQ ID NO: 17662 - DNA, 627 bp, Zea mays
  Peptide Sequence Number=SeqID_59441
atgccgctgccgccgctcctgctctgcgtctgcctctacctcacccacctcccccgcctcgcctcctccgagcccgacgccgacaaggcggcgctgctggcgttcctcgccggcgtgggccgcggcgccaccgcccgcgcgcgcatcaactggcccaccaccccgctcgcctgcgccagcccccggccacggccccggctggacggggtatactattctactactcgatccgccacgcccggcagcagcgctcacatcacatgggaattcaatgctgaccgtgccgccgtcactcctcccgttcagcaagtccagcagcgttcgtttcgttgctccacctccactcatcagatccatccacgcgagagaccgaggcaggcagccatgccgctgccgctgccgctgccgccgctcctgctctgcgtctgcgtctgcgtctgcctctgcctctacctcacccacctcccccgcctcgcctcctccgagcccgacgccgacaaggcggcgctgctggcgttcctcgccggcgtgggccgcggcgccaccgcgcgcgcgcgcatcaactggcccaccaccccgctcgcctgcgccggccccggaccgggctggacgggagtcacctgctga

SEQ ID NO: 17663 - DNA, 294 bp, Zea mays
  Peptide Sequence Number=SeqID_59442
atggcgcagtcgaccgttggtagcctgagagccgttggcgcactggacatgtccggtgcacaccggacagtccggtgcccccttctagctgttggctcgaccacatgtcccgcgcagatcgcgcggccgaccgttggcccggccgaccgttggctcaccggacagtccggtgcacaccggacagtccgggcacttgtgttggacactaaatcaccaaaatacttagaaatggcccaagggcacatttccctttcaatctccccctttttggtgatttatgccaacacaacataa

SEQ ID NO: 17664 - DNA, 885 bp, Zea mays
  Peptide Sequence Number=SeqID_59443
atgacgggttatattcacgcgtttttcatttttgccttctctccgaagctgatcagtggggagcatatcggggcactggcgatgagtgaacccaactctggctctgatgtcgtcagcatgaagtgcaaagctgagaaagtggacggtggctatgtccttaatgggaataagatgtggtgcaccaatggcccgtctgctcagacactggttgtttacgcaaaaacagatctagctgcagggtcaaaaggaataactgcattcataatcgagaaagggatgcccgggtacagaaccactccgttatcttcattggacatgattgaacctgaacgtgttcagtactgctcagaagttggacaaacttggcatgagaggaagcgacacgtatggtgtgagcttgtttttgagaactgctttgtgccatgcgaaaatgtcctcggtgaagaaggcaaaggtgtttatgtcatgatgtcagggcttgatctggaaaggcttgtattagctgcgggccctattggccttatgcaggcatgccttgatgttgtacttccatatgttcgccagagggagcaattcggccgtccaattggtgaatttcagttcatacaggggaaaatggctgatatgtacacttcgttgcagtcgtcaagatcatttgtatactcagttgctagggactgcgataatggcaaagttgatcgcaaggattgtgcaggagtaattctctttgctgctgaaaatgcaacccaagttgcacttcaggcaatccagtgtcttggtggaaatgggtacataaatgagtacccaactggtcgtctcctgagagatgcaaaattgtttgagattggtgccggtactagtgaggtcagggcctgcttagagtga

SEQ ID NO: 17665 - DNA, 138 bp, Zea mays
  Peptide Sequence Number=SeqID_59444
atgaccgagcggaccccgcgagtcagcgacgtgtgtgaacggctgagcgctggagtgcgggtcccaccgtacagcggttttgaatttgaattcaactatgaatataaattttgtgctcaaactaaaggaagatcttaa

SEQ ID NO: 17666 - DNA, 144 bp, Zea mays
  Peptide Sequence Number=SeqID_59445
atgcaggtgcgactcaggaagatgactagtgggtcccaccagccagcaagatctttcccccaacccaggcccgcgcacaagaatgtggagaccgcgaactgggctggcgcggatttcctcgtatcaaacgtgatccaatcatga

SEQ ID NO: 17667 - DNA, 228 bp, Zea mays
  Peptide Sequence Number=SeqID_59446
atgaagccagcccacgcaatcacgccatatagacgtgaaggcacaaactgggtgaaccgcagttcggtgttctacaactccctcgggaatcgaaagaacaagtctgcaagtctctcaagactcacgttgagaactcaaagagtttgtatttctgaattggcagccaaaaagctcgagtcgtcatctattacatggatacatatagcactagtggtcttttcagtttag

SEQ ID NO: 17668 - DNA, 342 bp, Zea mays
  Peptide Sequence Number=SeqID_59447
atgccgcactccgcggacgctatcgcgatcctcgcgtccgtacgcgttgacccgaaattggatcttgcctctgcacaattcccggtaaaacctcttctaccctactcgccgcatccattactacgtgtagcaccccctacgttaaggccttgtgcgcttgggcttgatttcgccctctccggtgaggtccgctgcagtgccaccatggtttgctgcgtcgcgcggtcggaggtagaagagcaaggatggccgttagatggggattgggcggcacagaatagatcaagcgggtgccaaatcgtaatcgatatgagccttaggatcaggatctggtggctttga

SEQ ID NO: 17669 - DNA, 567 bp, Zea mays
  Peptide Sequence Number=SeqID_59448
atgcccccgccccacgagtcgtccctgtcccaccgcctcgcgtcccgctattgcgctgatgcctccccaccaaaatctatacgccttgcgtcccgctatatgcgcccccgccccgacggccccctccgcgccatcctcgcctgcaagccctcgcgattccagcgtcgtcgtcgcgatgcccgcacacgtgcaccccctcccctcggtgtccctcgcttccacccaccccgacgcccccgcccccgtcttccccagccatgcaatgctcgcctcagccttcgcctcgatagaggacacacggccgctgcgcccgccctgctcgcgatggcgacactgtcgtcgtcgctttgctccagcttcgcctccctgcagagcgccttcttcggccacccctcgcatcatcacgtcatctacgccccggttactgttcctactgtctatgtgtttctgtatgggaggctttgtatggttatgagtgctctggagaagtctattatcctggatctacgaaatcagcagaatgtcaaggctcttgaaaatgcactggcttcacgttctatttgctag

SEQ ID NO: 17670 - DNA, 222 bp, Zea mays
  Peptide Sequence Number=SeqID_59449
atggccgcacttatacccaccatagctagcatgggagactccgtctcaggtccaatgaaggggaaagtctgcgggcaggttcaatcagggcttgccttcaaatgcgggtgcggcgggaggttcttcggcgacgagctcaggagctggttcccgggcttcttcctgttgtacctcttgctcttggatcaaggcgtactctccgtccgcgagattgcaatctaa

SEQ ID NO: 17671 - DNA, 303 bp, Zea mays
  Peptide Sequence Number=SeqID_59450
atggatcctaagagcaaggggattgtgatcaactataaggaaaaggagatcctcaacgtcgacgagccaaaaggtgacaatatcactgacttaggctcaaacaacaagaggaaggatggtaagaagaagaggcacatcaagaagatcatctactatgatagcgatgcctcctcttcttcaccaagggacgacgatgacgaagattcctcttcgaaaaagaaaacggaacatgaaaagaaagggaagaaggaaaagaagaactataggaaggtgaaaggcgaggcgcacattggcaaggaatga

SEQ ID NO: 17672 - DNA, 252 bp, Zea mays
  Peptide Sequence Number=SeqID_59451
atggataggccggagcactcgccgccgacgagctcgcccgcctgcgcatgtggaccggccgattgcggccatcacggtcgtcaagctgtacctcgtcatgaccgccaggacttcccggagccaaccccgcgcttcgccagacctccctcaccgccgtcaaaccaattttgccaggttctaaataatgtgaactacttagaaaaaatacaaaacctcctaagtgttgcagaagactttaaagttttgaattaa

SEQ ID NO: 17673 - DNA, 621 bp, Zea mays
  Peptide Sequence Number=SeqID_59452
atgtcctcttttcttgttgtgctggtcgacaagatcaaggagaagctggaagccgagtgccctggagccgtgtctcctgtgcagacctgctggccattgcagctagcgatgcggttgtcctggatgtcaaggttggattccaggaaggcgagcctggacctagcgaacagcgacatccccactgctcagcaggtcctcctcacgctccttgccaagttctgggagaagggccttgacgccactgacatggtggccctcgtcgatatatatgcatcacaccttccaattcctctgccaaaaccaccagtttatacacataacatagcgacgattacgtatgtagcatcccatacgatcgggttcgcaaggtgcgataacttccgtgataggatctatggcgtcttcgagatgacgacgtccaagtacagcccgtcgtccaaggcgtacctcgacaggctcaaggaggtgtgcccgcgggaaggcgacgacgatgacaacgtcagcgccatggacagccacacctccgccgtcttcgacaacacctacttcaagaccattgtcaagggcgagggcctccgtccttggctccgaccaggccatgtgtgtcagcactcaagctga

SEQ ID NO: 17674 - DNA, 1089 bp, Zea mays
  Peptide Sequence Number=SeqID_59453
atgggtagcttcgttaagctggcgaggagggcggtggagacggacgcgcctgtcatggtcaagatacaagaactgcttccaggggccatggatgtcatgtcgcttgcgcagggagttgtttactggcaacctcctgagtcagcaatggctaaggtcgaaaaaataattagggaaccaacgcttagtaaatatggctctgatgatggtcttcccgagcttcgagaagcacttcttgaaaagccaagtgataggaagcacatggagtccgtgggcgaggagatggagcagcgccgccgcgagctgcgcctcttcgccaacaccgccgcgagctgtccctcctccacctgcgtcgcgtcgtgctgcggcgaggagcgcatcatgttcacgctctgcgacttcgaggccttcaaggcgctgaccagcaactacctggggctcaaggaccacaagttgtactcgcaggtggaggaggggttccacaccgtcgccgcccgcatcagcccggccgggcttggcgagatcatgctagccaaccgcgcgtccccgagccgcgcgtccccgcagcttgatcaccaagctccagcatatttggagttgatgcctgctatcatcaatgcttcagaagttcagatgagtaactctgacgggctgacccttgttcggcaatttaattcctatcgccagcggggtcttccaacaataacagctacctatcctgctgtcattgacagcggtgtagagaattccataagccccaagaggcaccatggcgcctccgtcagacagaacactcggacatcaagcttctctataccgccccatggcggagctctagaggccaatggcgacgcgaaggacaacgctatgaaagacttcatgcgcttctacaacagcgtgaggttcgttgtacattcaagtgtacagttggttccgctcaagtgtacagttggttgcgcttctacagcagccccaacagagcttgtttcaacactgtccccacctaggaaattaaggagagctgtgaaaaagataactccaaaggagaagatccaagccatgtacaactgcaatttggttcctgaaatctga

SEQ ID NO: 17675 - DNA, 156 bp, Zea mays
  Peptide Sequence Number=SeqID_59454
atgggtttgaaaatcgagagtacggagtgtactttcacaagtcttacccatataaggaaaaagactctcaaggatatgctggcttttgggaatcaaggtgttaccaaggccctgactccctacttgcactcatggcatgttatctcatgtgattaa

SEQ ID NO: 17676 - DNA, 162 bp, Zea mays
  Peptide Sequence Number=SeqID_59455
atggccgaccaacgccccaagcggcacccggtgcgagagcttcaaatgaacgggtgctacccaagcagaaaggagcttggccacgccgtaatgcggccctgtggccaaatccaaagaaggcgagcaataccgggctcccccgccattgatttcgctgattga

SEQ ID NO: 17677 - DNA, 156 bp, Zea mays
  Peptide Sequence Number=SeqID_59456
atggagtgtgtggtgtgtgaggacacgcacaacgccaccctcatgctccgcctccgtttccacgactgctttgtgcagggctgcgacagatcggtgctgctcgacgacatggcgaccatggccgtggggagaagcaggcggcggagcagaacgtga

SEQ ID NO: 17678 - DNA, 1035 bp, Zea mays
  Peptide Sequence Number=SeqID_59457
atggcggcgctcctcgacgccggcctcttcggccccgcccaaacgctggggtgtttccttgtgtcgtcagctggtgcgggcaacgatgctggtatgtccatgaaggtggaaagcctggtccagcatggggatgctttgtatggagagaaagaattccgcagggcactgaatgcgtacaagcaagctatgcaatatagtagaagtatccctaggcaagcaacaagtaacaccagaagttcagtatccgtcacaggccggtcaccttctccaaactcttcaaatctcttatcattcaatgaaaatgaggtgaagttcaagattgctctttgccattctgctctatgtgagcaccgtgaagcacttcatgagatggaaggtattccttcaaaagtgagaacactgaaaatgaatatgatgttagggaagctttatcgaatatcaagaaatagccgtacagctgtagtctgttataaggagtgcttgaggcaatgcccttatgttttcgaagctatcacagctttggcggaaatggggctttcagcaaaggaattttctttattattttcacaagcaccaaatagaggaggcaagctatcgggtgacttcgtagacacacaacgttggtggagtcggtatgttgaggcgcagtgttgcattgcttcacatgattataaaggtggccttgacatatatctagaactaatgcaacgattccccaataatgtgcatatcttgttggaaattgctaagctacaaatatttcaatttatctggatatcctccatctttttggtgatgcgtcaggcctttgctatcatgggttttaaagcggaatcagtctcaacagtttgtgcctttgtggacaaaattgcagaccgcctaccaaactggaaggctgacttgatgagtagagcagggagaagaattctagtgcagcttgtcctcactagcatgacggtttatatggcaatggcaatcgatttccctcattgggccattgaagcaattgataaaataagaaaaggttttctctag

SEQ ID NO: 17679 - DNA, 165 bp, Zea mays
  Peptide Sequence Number=SeqID_59458
atgcctcgtacccgcgtcgatgagcgtcggtcagctcgcggctacgaccatgggcaggggcagcagccactgcgcgagtcggtgtcggggttggtgtcagacgaatacggggatgaggcgtctgctcctacaccctctgtcgagaatggggtggcacgaaggtga

SEQ ID NO: 17680 - DNA, 183 bp, Zea mays
  Peptide Sequence Number=SeqID_59459
atgattgcagtcttgatcgcggctctgctggggctggggctctgcgtcgccgtcgttgcggcggagaagaggcggcggctagtcggcgtcggcgccaccggcgacgaccacgcggcggcgtcggccggactaagccagggaactgtccaagtccaagcattaaatgagcgaatcatgaactaa

SEQ ID NO: 17681 - DNA, 363 bp, Zea mays
  Peptide Sequence Number=SeqID_59460
atgaaggtttctcaggaggtgagggaaacaacggaggcggaggcacgcaaaatctcgcttgcatatgacggtgccatcgccgcgcaaatccaggcggagacctccgttaaggagcggagcaccgagctccagggacttcgccagctcatgggcgaggtgtgcaaccgcctctcgcccccaccatctaccgaggtgcctttggctaagcggcttcgggcgcttcctaggcacgtggtgcgggtggtccttgaaggcatgtacctcaggagcagcatagccctaggtcagatggtctctcatttcgatgagattgatgtcatcatgatcgtcgaagtcggtgggtgcccacatcctagcccctga

SEQ ID NO: 17682 - DNA, 873 bp, Zea mays
  Peptide Sequence Number=SeqID_59461
atggcggcgagaggcgtgcaggcgccggcgccgcgacggccggtgacgctgcgggacttcctggagctcggctgcgactccagcagcgacggcttccgctcctacccgcgccgcctgctgcccctccctcccgacgccgtgctgcacctgcagcagcagcaggcgcccccgaccccgcgggcggaggccgcggccgcccagcggctgctcaggcggagctcgtcctcgctcgcgctcgcgctcttctcctcctccctccccggctccggctccggctccggcccagctggcgcgctcgccaggatctccagcatctccaggagcttctcgcggcggatcaaggaaggcttctggaggcgccgcgacgaggacgagggcgacggcgacggcgacgacgactacgacggcgactacttcgacgaccgggactcgtgcggcttcccctcgcctctcgtcagcagctgctccgcctccgactcggacgagtccgaggcggacgtgacgacggcgcccgagcgcaacaaagccaccgcttcctcctctacgtcgccgtcgccctccccaagctcggcggaccacgaccgcacgcgcacggacgccgccgttgctgacggggacaaggcggagacggcggcggtagaggacggcgactcgacgacgggtgcgcccagcacggtgggggacaagcagcaacagctcagccccgtgtccgttctggatttcgccttcgatgacaacgacggcgaggaggaagggagcgacgccggcaccagctgctcctgctcctcccccgccttccagttccagcgctgcacgccgccggcggtggacctccacgttttgaaaactatggtttgcctaaaaccacaatag

SEQ ID NO: 17683 - DNA, 270 bp, Zea mays
  Peptide Sequence Number=SeqID_59462
atgccaagaactgggttccggggcgacgcggtcgaggaatctgttccaactgctcgtgcgggccgtgtgcttgggagccaccacagcccagagagggacgtggtgtacgagaggagctggaggagtcaggaggaggagggaaaagggacaagtgggggcgcatttatgtttgacttctctgactacaaactccctgaaacgcagagcaattgccaccaagtcctcgggtacttctctgaacatcgacagctgctgaaatacaattcttga

SEQ ID NO: 17684 - DNA, 552 bp, Zea mays
  Peptide Sequence Number=SeqID_59463
atggagacggaggacagcgtcgggtgggacttcctcgactggctcggcccggacatctccaccaccatcttccagctcctcgacgaccccgcggacctcgcccgcgtcgccgccgtctcccgctcctggcgccgattcggcagatatgtccggaggccgccagcttcacccgcgcggtcgtggtggcccgattgccgccgccgccgccgccggcggcgcacgccgcgtgcgagtccagccaggtcgccgagtgcagggcccgcgatggggagcacgcggcctactccctacctcgccggcgcgctcgtctccggcaagcccgccacggacctcgtcatgcgctgcgtcggcgcctccagcaccgacaacttccccgacgagaccatcgagaacacgctcgtgccgcacgacatggttaacttccgcccctcctactggtccagcggcggcgaggacgaccccgatgtccccgagagcttgacctacacgctcgcctctgatctctgcgtcatcgaggagatcaggatacgcccgttcgaaggtgcgtgctag

SEQ ID NO: 17685 - DNA, 231 bp, Zea mays
  Peptide Sequence Number=SeqID_59464
atggagtcactttttggtgtggttttcgtggtgaaggagagggacggctggtccgaggaggatgtggtgtttcaagactcgcagtcggggaggtgctgcaaggctttatctacggctttcgcctgttggcgcaacaatcaccgcaagcgcgatgaaatcgcgtggccagttcgcccacctccgcaattgacgtacaaggggtcaagcagtctcattagctgcgagaagtag

SEQ ID NO: 17686 - DNA, 318 bp, Zea mays
  Peptide Sequence Number=SeqID_59465
atggggtcgtgcctgcccataaaaactaggaccacagtgatcgacttgttcctcaatgcgcctccatcaaaccagagagctcgtgacggagagagagagagcgggtcagcagaaggaaaccgagaggtgtacttgcgcattgttgtcgtgcctagtcccgccggggttctgaccttgggcctggcggaaggcgtggtcggaaccgagaaccagagctcggcggcacctcggctccgtaccacgcgggaggaaattgactcccgtaccgcaccaccgcaggttagtgccattgctcaatcctcaagttgggggtcctaa

SEQ ID NO: 17687 - DNA, 681 bp, Zea mays
  Peptide Sequence Number=SeqID_59466
atgcagacggcatgcaaccgcaccaagggggcgtaccctttcgacttcgacgcgtccagcatggaggcccaggccacacgtcatgacatgcggcacctttggcaggcgaagcaggcgacgcttcacttccgccataatgaccgcgtcaaaaaagccgccttagagcactcgggctccacgcccactacttgtcagaggctggcccccgaagggttcgacagcctccccagacgcagagcgagggatgaccctgggtacgttcgatacataaccgaggctcgggctacactcccgagcgccacttgcgccgctccgactgctgtgccactcgacagagtgaggctgacagcagccaagtccggcctcgggcgccataggaagcttcgcctcgcccgaccccagggctcggcccctgtctcggcctcggacgatggactccgcctcgcccgaccccagggctcggactcggcctcggctccggaagacgacgaactccgcctcgcccgaccccagggctcggcccccgtctcggcctcggacgatggactccgcctcgcccgaccccagggcttggactcggcctcggctccagaagacgacgaactctgcctcgcccgaccccagggcttggacatggcctcggctccggaagacaacgaactccgccttgcccgaccctag

SEQ ID NO: 17688 - DNA, 333 bp, Zea mays
  Peptide Sequence Number=SeqID_59467
atgacgaaggggtactccctcacttctaatctggagtgtccgctccacgatcaacggatctcccctcgtcttcctcctcaggtcgcccaggccatgcgacaggcgcagcagctctcgccagccgcggtggtgccccgccggtgtcccgtcaaatcgaacactagagctccactttcccccctacgatttgtgctatgcagagcggaccaacaagtgaaccaaagggtcaagaagctcaccgaagttcctgtcgaagcgaccttcgaccatggaggggtgcgtcttgacaattcctcgccgcctcgggcccagaaccgcatggtgagggcatga

SEQ ID NO: 17689 - DNA, 627 bp, Zea mays
  Peptide Sequence Number=SeqID_59468
atgggtcggcgcgagacagagcacgaagggggaaaaaaggagacaggcaaaaggggaacccgcggccttcgtgttgtcctgcgcccaggtcggccttgggtcgggcgaggcggaggctcctccgaggtcgaggtcgagtctgtcttccgaggtcgaggtcaagtccaagccccgggtcgggcgaggcagagaacgtcgtcccaggccaaggctgagtccgagccctggggttgggcgaggcggagttcgtcgtcttccgaagccgaggccgagtccgagccctgggggtcggggcaaggcggagttcgtcgtcttccggagcctaggccgagtccgagccctggggtcgggcgaggcggagttcgtcgtcttccggagccgatgccgagttcgagccctaggggtcgggcgaggcggagtccatcgtccgaggccgagacggggggccgagccctagggtcgggcgaggcggagcttcctatggcgcccgaggtcggacttggctgctgtcagcctcactctgtcgagtggcacagcagtcggagcggcacaggcggcgctgtcttcttgtcaggtcggtcagtggagcggcgaagtgactgcggtcacttcggctctgtcgactga

SEQ ID NO: 17690 - DNA, 477 bp, Zea mays
  Peptide Sequence Number=SeqID_59469
atggcttcccctgcgagcgacacctctgctcggctccctctcctggcagcgagctcctctgtaggcaccgacccacagcagcagggagcctccaatggcatttgtttccccaaggctcgccccgtcaacagccatcgacctcgtgcagcagccgcgacgccagttcgcacagccacgtggatctcccttgtgtcgtgccctcggcatgctcgatgtaatgccaaagcagcagcagcagcgacgccctccgttgcgtcgtgctcgctagatcgggcctcacgtcgtcgatctgcgcagcgtctgcgcgtcgtcgtcgaaacccgcggaagtaaatgcatggtgattgcgatctggagattagtggtttacgtatatgttgtgtctcggattgcgacgataataggcaagctgacgtgtatgttatttaacggctatgtcgttgctctagttagccaaattgttagatggtttggttaa

SEQ ID NO: 17691 - DNA, 243 bp, Zea mays
  Peptide Sequence Number=SeqID_59470
atggccggaggtggaagacgagcaggctgcatgcgtgagaaactggcggccaggaaaaatgcttctgcgctaaggaacagaggagcgacgcttaaagggtggctgcaacagggtgattggctaggaggaaacggcatcacccattggcgcagagactggacaaccacgcattggtcaagttgggcggcgcaggctattggtgcagaaaattggtggccagccaaaggccatggtgggcgatga

SEQ ID NO: 17692 - DNA, 948 bp, Zea mays
  Peptide Sequence Number=SeqID_59471
atggccacggcgacgaccctctctttcagcggcggcggcggcggcactaccctgctccgcgggcacgtggccttgacgtcggggcggtgctgcacgttcccgagctcgcggtggaggccgccgcgcttgtcggcctcccgcgcggatgactcctcgccggctccgttcgagatgacggtggaggacgcgctgaagctgctcggcgtcgcagagggcgcgtcgttcgacgaaatcctgcgcgccaagaacgccgtcctcgcctcctgcaaggacgaccaggacgccgtcgcccagccgcccagaggaatagagcgtttctttattgcttccttggtacctccgattgaagttgctaaatttagtactaagaaagtggcctggatcaatcgggaaatgtctgaaacgatgggggtcgaagcagcctatgacatgttgcttatgcagagcttatcacagcggagggctggaaaggttgctaataaccgcatccgctttgctgatgttaaacctgtaaagagtgcaggagctgggacagtcccacagtggatgcaggcaaccatgaagaatgcacccattacatttgagactccatcttcgagcagcttgggcatccagtcatgtgtttatggtgcactaatggttttcacctatgctagtggaagctcgacatctttgccgtctgcgtacagtagccctgatgtgccaggtaaggcggcattggtcactgtcgggggacttgcagctggtgcgactgtcggatctgcactggagaatttcctgcaggttgatctcgtgccctttctaggcatccactcccctgccgtcgttgtcagcgaatttattctcttctcccaattgctgggtcagggaaatgcttgttttccgcacaaggtggaagcagcagctgtgtatagcaaaacaatacgtgggcatctctgtcccttataa

SEQ ID NO: 17693 - DNA, 1722 bp, Zea mays
  Peptide Sequence Number=SeqID_59472
gaggtggctcttacgcacgaactgctgcgcccgctgctgccgccgaacccgagcctgcggagcctgcgcctcgactgcgctcgcctcgaggacgctgccatcgcctgcctcgcgcgcgccggcctgcacgagctcctcctcctcaactgcgacaacatcagcggccgcctgctctgcgaactgggcaccacctgcagagatctcagggtgctttctctcaactctcttggtgcacgtaggggactggtggtaaatttctctgatctacaggaattgctcaatggatgttctcagctagagaatctgagattggcacttgatttctcaacttttgatgaccccaactttggtcgtgtatgggcatctgcttctgaaaggctatcatctcttgagattggttatattcctatgacaatgttacttgaacttctggtagcagttacagaaggacaacaatgcatggattatgttaagacaccagttttctttcctagccttcaaaagttatgcctggctgtggatttcataaccgaccatctaattggttccatatcagtcgcacttccatcactgacacatctggacctgcaagatgcaccaattgtagagcctaattcgtcatcagatctcaccaatgctggtcttcagcaaatcaatccgcatggtaaactgaagcatatttctctcatgcgcagccaggaattcttagtaacatctttccgccgggtgaatgatctcggaatcctgttgatggccgacaggtgttcaaatcttgaaagtgtatgtcttggtggcttctcccgtgttacagacactggttttagggcaatcattcactcctgttctggtcttcataagcttcgggtttcccatggaagccatctaactgatttggttttccatgacattatagccacttctctttgcctaacccatgtgagtctgaggtggtgcaaactcctaactaatgttgggattgagagattatcatgcaacaaggatctcaatgtactggatctcagggactgccgcagtttgggtgatgaagctgttagggctctgagctgccttcccaagttgcagactttgacattggatgccactgatattagcgaccaatcattgaaatatctaggacttggaacatgccctctaacttccttgtctctgaggggttgtcggaagcttacaaacgattgtatcaccttattatttgctggtcatgtgaaacagagcctacagatgttggatctctccagaattccaagtatcacggatgatggtatcatgttattagcaaggagcagaactcctcttattgagctcagaatgcgagaaaatccgaaaatcggggatgcctctgtgatggctcttgcttccatgcaaatagatggtggaacctacggtagtaccttgcagctgctggatctttttgactgtggtgggattacaccccttgcagcacgttggtttaagaaaccttacttccctagattgcggtggctgggaattacaggtagcttgaatagggttatggtggatgcactgtctcgaagccggccattcttacatatggcttgccgtggtgaagaattagggactatgctctgggacacctcctctgactggtatcggcataatgacgacgatctcgacgagcttgaacagtggctcttggaaggtgaaccggtttcagatgatgacaccatcatggaagaatga

SEQ ID NO: 17694 - DNA, 672 bp, Zea mays
  Peptide Sequence Number=SeqID_59473
atggtgagagcaaggggcttgttctgcctcgtgtcgccggtccgcggcgaccccgccgaccgccgcagcagcgccgcgtgcatatgctgcgtgggccctcaccacaagccgtcgtccggcgctcccgacgccgacctgagcgcgaggctgccgctcaccgggtgctgcggcgcggacgtccgcggccggagcagcgccgcgcgcaccccgaggacgccgtgcacgcccaccgccaggcgcctctgcggcgtccgccctcgcacgccgcgccgcgggcagatgacgccgcgctttcggggcgccggccgcgacagcgcccacgctggcaacaacaacacaagtgcctacgacgcgcgcctcccggaggcggaggcggagacggagacgtgctccaacgacgagtatgcgctgctctgcagggagggcttctcccgggaggacgtggccgcggtcaccatccaggcctacttccgaggccacctggcgcggcgggcgttcatggcgctcaagagcctggtgaggcttcaggcggtggcgcggggcgcgttcgtgcggcgccaggcggaggtggccatgcaatgcatgcaggcgatggcgcggctgcatgggcgcgtgcgcgcccggcggatgctgaccaccaaacccgaggccgagcagctgttgcagagctga

SEQ ID NO: 17695 - DNA, 462 bp, Zea mays
  Peptide Sequence Number=SeqID_59474
atgtgcagggtgccgtgcgagtacaagcacaggaacctgtcggtgagggtgcaggagaagaggcgctccccggggggccctggcgacctcgccatcaggtttctctaccagggcggccagaccgacatcgtcgccgtcgacgtcgcgcaggtcgggagtcgggttattgctgaaacaacggagctttctgaagaagaagaaaaaaaggaggtgggctcgtccaactggaagtccatgacgcgccacagcggcgggccggcgtggagcacgaggcaggcgccggcggggccgctccagctcagggtggtggtgacgggcggctacgacggcaagtgggtgtgggcggagcgcgaggtgctgccgcggcggcggcgcgccggcgaggtctacgacacgggcgtccagatcaccgacgtcgccctggagggatgcttcccctgcgacacgcgcgagtgggagtga

SEQ ID NO: 17696 - DNA, 1047 bp, Zea mays
  Peptide Sequence Number=SeqID_59475
atggtgtggacggcggcggtggtcggggcggggctggtgtactggttcgtctgggtgatgggcgcggcggaggtgaagggcaagcgggcggtggatctcaagatgggatccatcacgcgggacaaggtgcaggacaagtacacgcagtactggtccttcttccgccgccccaaggagacggccaccacggcggcgtcggcggagaagtgggggtggggccagtccttccacttctccccgtccctccccggccgctcccaccgcgacgccacgcgcgtccacgaggagcgcgtcgccgacctcctcggcgccaggccgggccaccgcctcctggacgtcggctgcggcgtcggcgggcccatgcgcgccatcgccgcgcactcgggatccaacgtcgtcggcatcaccatcaacgagtaccaggtgaaccgcgcccgcgcgcacaaccgcaaggccggcctcgactccccgcgctgcgaggtcgtctgcggcaacttcctctccatgccgttcccggacgcctccttcgacggcgcctactccatcgaggccacctgccacgcgcccaggctgcaggacgtgtacggcgaggtctaccgcgtgctcaagccggggggactctacgtctcctacgagtgggtcaccaccccgctgtaccgcgccgaggacccggaccacgtcgagtgcatccacggcatcgagcgcggcgacgcgctcccggggctccgccgccaggacgagatcgcgtccatcgccaaggaggtcggcttcgaggtgctcaaggagcaggaccttgcgctgccccccgcgctgccctggtggacgcgcctcaagatgggccgcatcgcctactggcgcaactccctcgtcgtccgcgtgctcaccatgctccgggtcgcgcccaagggcgtctccgaggtgcacgagatgctctacgagaccgcgcagcacctcacccgcggcggcgagaccggcatcttcacgcccatgcacatggtgctcctccgcaagcccgccgccgccgcctccaccgaggaggccaactag

SEQ ID NO: 17697 - DNA, 263 bp, Zea mays
  Peptide Sequence Number=SeqID_59476
cggtgaagcgcaaggagcaaacaagtccaatcagctcgaacacgtcgcttaccaccttctcgaacacgtggaacgagatgtggcccacatacacccagcgccggacccccctgtgggtccgccgctgggtgtatgtgggcaacatctcgttccacgtgttcgagaaggtggtcagcgacgtgttcgagctgattggccccgtccgctccctgcgcctcaccgctgacccaggcacgagcaagcgcaggggctacacaaactaa

SEQ ID NO: 17698 - DNA, 312 bp, Zea mays
  Peptide Sequence Number=SeqID_59477
atggttctatcctctaatctgtatgactgctataaagtaagggattggtcctggtgtgtgcatgatgttattcttggtagccaaagacagcctgtagtgttgaactctcatgcctgtgaatgcaaaagttcagttctaggggttgatgatgacagtgacctagaactggagcttgaacccgatcccaacctgaccaaggaaactttatgtgaggcctctgcattagccaaggaaagagaggcacctgcttgtgtagcatttgctctgccatttttcaacaccttattttaccatgatcaaagaatacagtag

SEQ ID NO: 17699 - DNA, 330 bp, Zea mays
  Peptide Sequence Number=SeqID_59478
atggacgagctattcaataagctcaagtccaccaagattgaccaccagacttgctctaagattgagaaccctgctgcacccaccatgatcctgccggttcacgcggttccacaaaaaccgctagaaccgacggtgtggcgggtcgaaggatggtgcttcaactgcgataaccctgaccacttcatcgctagttgccccaagaagggcaaatctgatgctggcctgcacgaccactctagtcggcgcaagggcaagcgagaatacatctctgtcaagcacaagaccaatggaggattcgacaaggaggcgctcaagaagaagtacctctag

SEQ ID NO: 17700 - DNA, 357 bp, Zea mays
  Peptide Sequence Number=SeqID_59479
gagccgccgacaacccccgccgcctgtgctcgtggccagggtagctccgaccacctccgacgccgacccgcacaccgacgtgaccgtcgtgacctcccggacgtcactgaccaccccgccggagctctactgccgccggttaagaaaaatagaaaatgtgatttaaataatgaaccagagggcacccctatttttgttaggatacttattcaagactgtaaccttgctgacggagagtacgtcctcgtgccggagcaaggagctgctcaggaggtagccctagatccagcaccagagcctgcaccagaggacctgcctgccactgctttggaaggcaagccccggttttatgcataa

SEQ ID NO: 17701 - DNA, 492 bp, Zea mays
  Peptide Sequence Number=SeqID_59480
atgcccgcatggtacactccgttggagtgcgacggtgaaccccgccccactttccccctcctacaactgcaagcgccgcagcaacctgtggtaagagcggtggctgcaaaggcttttccctgcaacgatgaccaggtttatagaggtaggcgaagctgttcgcatcccgcagagcccggcggcggttggagctgtttgaggagtcgtgcgaagcgccaaaatcgcgcggctcgcggagaagctgcggaggatgcggtcctagaagatctacagggcgcgctcctgacgtgcggggccgcaagccagcgaaaagaagtaaagaacgtgcccaggaacgtggctgccaagtggggacaagcggtcagagtagcacgggccgagcgcaggggaaaactgggccactcaggtgaatccggcccaggcccgtgtgatgatcaaagagcgatgcacagcttgcctcagctgcaaattcccctcgttgcatttacttaa

SEQ ID NO: 17702 - DNA, 219 bp, Zea mays
  Peptide Sequence Number=SeqID_59481
atgagctcggcgcaggatccgttctacatcgtccgggaggagatccaggagtcgattgataaattgcaaagtaccttccaccgctgggagcaaactgcttcaaacacaggagaatatgttcatctgacaaaggagcttctgatcagctgtgaaagtatcgagtggcaggtagggaccaagtttttgacgatgccatttccgcgttattggtacatttag

SEQ ID NO: 17703 - DNA, 951 bp, Zea mays
  Peptide Sequence Number=SeqID_59482
atggagtcctccgaggcgggctggcactcgtttgatccgtcagtcgccgtggaggactccgaggcaatggcccagctgctcggggtgcagtactctggcaacgagcagaagcagccaacaacgccgacggccatggccatgtgctggcctggccaagaagctgacgaccagcactacagctcggccgcggcgtacccgtactgcacgcagatgcagcaacccgacccgggtgcaagtgcaagctgctacgactatgactactactatggcagcaacacgttcacgatcaccggcgacttcttcgtgccggaggagcaggtggcggaccccagcttcatgctcgatctgaacctcgacttcgagtaccaccaggaaggcgagggcatcggccacggcggcggcggtaacggtgaaacggcgccggtgtgcaagaggaggcagctggaggatcagaagaagggcgagaacaccacgtgcaccgtcgttccaaagaagaaatcgcgatccaccgcagtaccggcgcagaagaagggcaagaaggcgcacaaaggcgcgtgcagccgaggcaaccaggaggagagcaacggcggcgacgacggcaataataatgttgcacagccgcagcagtgctccgacaactactacctgtctgacgacgactcgctggagatgaccgccgcgtgcagcaacgtgagctcggcgtccaagaagtcgtcgtcgtcggcagcaggtgggaaggccagggctgggcgtggggctgccactgatccgcaaagcctctacgccagggtagatatcagcacgatgcttgaagaggcagctcaatacgtcaagttcttgcagctccagatcaagcttttgagctcggatgatatgtggatgttcgctccgatcgcctacaacggggtcaacgttggcctcgacctcaagatctctccaccgcaacaatga

SEQ ID NO: 17704 - DNA, 357 bp, Zea mays
  Peptide Sequence Number=SeqID_59483
atggcgcgcggtgctcgcttcctccttgttctcgcgctgctggtcgcgctacttgccgtcgtcttccagctttatcgcctcaggaagccgatgatagccctttgtgccgataatgtcgaggtagcagagtgcaagggcgttgcaagggcgtcgagccgtcgtcgaggtgacgtgcgtagcgtagccgtggtcgaggaagctatcgaggacgtcggagaagacaagccgcacaagtcgcgggcgctggcagatgagggtgttgatcccgagggcgacgcgtcaaaaaaccatggaagatgtgtgttccagcatctcaagggaccagcagagacagcctccgcgacggttgtggtgtag

SEQ ID NO: 17705 - DNA, 567 bp, Zea mays
  Peptide Sequence Number=SeqID_59484
atgaagagaaatctcatcggcgcgtcgcgtcatccaacagcaacagatcaggagtgtcacctgaggagatcaggtttgcgtcgcccaccgccagtcgactcgcgcgtcctcgacatcggcttcaacaacaccggcttcctcatcttcttcgacggtgcaactggcgtggcctgcaaccacacccgtcgttctgggttgcgagtcctcctgcatactgcgtcaacaccttgcgctggtgttgcacctgccctaggggtgacagccaccgtcgccggtctgcaccgcacttgtcatagagttcttcgccgacaaacaccaccatcgtgctccactggcaccattgaggctcgtttcctatgcgtcgtggctctcaccgtcgcgactccaggaacctcgatatgtcgctacgcctacctcttcgcttcgtccagcacaacctcgtcgccagcatcatcgtctcatcctcgactacttcgtctactccgctctgacaaccgtgcgttgcgccggcactcccgccatgctacaccacaaccgtcgcggaggctgtctctgctggtcccttga

SEQ ID NO: 17706 - DNA, 189 bp, Zea mays
  Peptide Sequence Number=SeqID_59485
atggcgacggaagggagtccaggaacagcacaattgatgccgtcaccatgggagcagggcggttccgagacaggggctaggagctggggaggcataatagaggaattcagggatctagacaagtcaagacaggtttacatcgaccgatcctttggaggagatcaacataggagatggcaaaaactctga

SEQ ID NO: 17707 - DNA, 519 bp, Zea mays
  Peptide Sequence Number=SeqID_59486
atgccgtggaggtcgagctcaatccctggcccgtgggtggcgctctgcttcatccggctctctgacctcctttgcatccgcgtgctctccacccaccgcggatcaccggcaatttctcgacagcgactgactccgccatggatccgcacgaacgtggccgagcaccttctcggctattcaaccggtatgactcctctccctggatttcgcattatcgtggttacctggtgcactgaggttagagtcggattgtggcttagggcgcctgcaatcgctcaccggagcaatcttccccgccgtgtatttaaccgttccgtggaccgagccatgccctcgatgatggcagaaattggtaagggaaatgaactcataacgttatccgttgggcggggagcgaatgaattagagaatggtgaacgggatggccggatttggggcgcgtcggtgatactccaccgtgcgggatggcgcgccgccgtggccacttcagtgggaagaagaatggacgggagtcgttag

SEQ ID NO: 17708 - DNA, 273 bp, Zea mays
  Peptide Sequence Number=SeqID_59487
atggcgatggccgcacagccacgttgctgggcaagtgggtatgacgaaccgactggtgacagggctcaagctcatctctttgctgagatcctttgtcctctgatgttacccacttcaccctgcacacgaatcgtaacgctgatgtggattgtggagcgaggatcaccgatggcagcaaaccaccaagtcgactatatcaaagttgttcccctacataccagattcaagtgtgtcatagagatcttggtcatatactcattggatcgaccataa

SEQ ID NO: 17709 - DNA, 990 bp, Zea mays
  Peptide Sequence Number=SeqID_59488
atggcgttggtgcggcgatgcctctgtggatccgaggaagactgcagagcgcttttgggcatggaaaatctccggctgttctcctacagagagatcagagcaggcacaaacaacttcgatcagagtaacaagcttggacgaggtggttttggaactgtctacaagggagttctaagagacggcactgaatttgccgcgaaggttctgtcctcggaatccgagcaggggatcaaggagttcctagctgagatcgagagcatatcccaggtgaagcacgcgaacctcgtcaggcttctgggctgctgcgtacagaggaaaaaaaggatactggtgtacgagtaccttgcgaacaacagcctcgatcatgcgctcaaaggagcagcagcagatctaccctggagcacgaggtcgggcatctgcttgggcaccgccaaggggctgagctacctgcacgaggagcacgagccgaacatcgtgcacagggacatcaaagccagcaatgttcttctcgaccgagactacctgccaaagatcggagatttcgggctcgcgaagctgttcccggacaacatcacccacatcagcaccgcagtggtcggaacgagtggatacttggcgcctgaatacttcgtgcatgggcagctgaccaagaaagccgacgtctacagcttcggggtgcttgtcctggagatcgtcagcgggaggagggtctcgcaaacgatccagtcggacatgttcccggcatggatgatgtaccagcaaggcaggctgctagagatcgtggacgcgagcatggggagctacccggagaaggaggtgctccggtacatcaaggtggggctggcctgcacgcaggccacgcccagcagccgccccacgatgcgccagagcgagtgggacacaaccagaaaagggacaacagaattagaggcacagattcccaagaaacgggggcatattctattacaagatgactacaacatactataa

SEQ ID NO: 17710 - DNA, 2421 bp, Zea mays
  Peptide Sequence Number=SeqID_59489
atgggaaccaatgggcatctcgacctcgacacgggaggccggcgcgctataattcaccggactgtccggtgtacaccggacggtgtccggtgctccaaggaagcgcggccttcggaactcgccagcctcgggaacgcgcagcagccgctccgctataattcatcggactgtccggtgtgcaccggactgtccggtgcatcctcggagcaacggctatttcggcaccaacggctacctgcgatgcatttaatgcgcgcgcagcgcgcgcagaaggcaggcgcgcccatactggcgcaccggacatggaacagtacatgtccggtgtgcaccggacatccaggcgggcccacaagtcaggagctccaacggtcagaatccaacggcattggtgacgtggctggagcaccggacatgtccgagagaatgttcaagtcgatggtttatttcgtgaacatctcaatcggggaggttgaggtgtggcccaagggccaggcgagcgcaggcctggccgtggcggcgtgggcgcgagatatccgcgttgaccgcctttccccgcccagcgagcggtgccctccgctggccgtcatgcacaccgtggccgtcgccgcccgatgcctcgtcatggagtccaggccgcccgtcgccgccgacgtggcgtcgctgcctctcgtcgacatgcacgccgcttgcctcagggacaacaagaccgcggttgttgcacttggagatgaagaattgcatttagttgcgatgacatccagaagaaacttgacaaatcatgcatgtttctggggctacaagttgccatttggtttgtataattcttgcttgaccatgttaaatctacggtgcctgggaatcgtgtttgaccttgatgagacattggttgtcgccaatacatcacggtctttcgaggacagaattgatgcacttcaaagaaagctgagcaatgagactgatccacagcgtagaaatggtatgctatcagagatcaagaggtaccaagatgataaatccatcttaaagcaatatatagaaggtgatcaggtctatgatgacggtaaagtgtataaagcacaacctgagattgttccaccattgtctgataaccagcaaacaatgacacgcccagttataagattacaagaaaaagacattatcctgacaagaataaatcctctgattagggataccagtgtgcttgtacgtttaaggccagcctgggaggatcttcgcagctacttaattgccagaggtcgcaaacgttttgaggtctatgtgtgtacgatggctgaaagagactatgctttagaaatgtggagattgcttgatccagattcaagattaattaattctgttcgacttcatgataggatggtgtgcgtaaaatctggtttaaagaagtccttgctaaatgtcttccatgatggttcttgtcatcctggtatggcattagtaattgatgatcgtctgaaagtttgggatgagaaggatcaattacgagtccatgtggttcctgcatttactccatattatgctccacaggcagaggaagccaatgctcaagcattccatcaaacagcgactaactttgtcatgccagtagcccctgctcagaattttgtttcgtcttcagttgcaccattagcgccacctcttagcatgatgccgcctccattcagccagccagttgttcagccaggtttttcagatccactgcaaggttctccagctagagaagagggtgaagttcctgagtctgagttggatccagacacaaggagaaggcttctcatattgcagcatggtcaagacacaagagatcctacacctccacacccagcgataccaccagtgcaagttccagttcctccagtgcaacctcatgggaattggtttcccacagaggatgggataaacccaagtaacctgagtagaggttcagcaggtttcaccgttgaatccgattctatgccctatgagaaaaaacaaccacctcatccttcattctttcatggtggggatagtcctatgtcgtctgatagatttggctatcagaaccagaggtttccctctcagctaccgcacaccgaggatcaccacatgcttcagaaccatgcacctccaaaatacagatccttttctgaaagcaactgctcctccacgccgccgctggcggccgccccatgcagcgaggcgcccgcggatcccgcacgtgcccaacccttggccctcgcctgcctgtggcgccacgagctgtccgcggctcccccacgcgcctgcaacgctcgccacggccgccacacgccgatagccgttgtgcacatgtccgcggcccgccccgctcgcctgcacgccgtgcgcccgcccctgcccgcctgcgcgcgcattggctcacccggtgaagcatcagctcactaa

SEQ ID NO: 17711 - DNA, 3301 bp, Zea mays
  Peptide Sequence Number=SeqID_59490
atggttaccgaaaagaaggacgactacttgatgccgcgcgtctttgtcaatgcagatacgccctacgcggaacggccaaagcggcacatacgagtacgcatggtgacgcggtctgcagcggcagttgtcatggcaccgtcagcgcaggcgcagggcatcgcatcccctatcgcctatcggtcggttgccacttgccactcacgtaggacggggggtacggcgtcggcgtatgggtacgggatccaccactcctcgcggtctcttgggctggcagctggcagagctcacgtcatcggctcatcgcgcattcgcgcgcacgacacgatgatgtgtacggtgtacccatcatacacggcgatcgtgcccccgtccaaaggcgaggcacgcatcttcgcgtctctgcgagatctgcccacgcgagctccgacagggcgcgtaatggccggggaccctccgtggccggtggtccatatggcattggcatgcgtccggaccctccgatcaaccgaccaatcgcgtagctgctacagggatggatcgatgacgatgatccccggccggaccatctacgcccaaactttaggcgtcgacccccgtgacatgaaagagcaatcgacctgccggctgatgctctctgcctacaggcagcagtacagctcagcgtacaactcgggtgcaaaacgttcgccgatcaactccgccgcacgtaccgggcttagctgtggtccaccggcgtcggcgccgttgcggagcggagcggacatgctgcctgatgtgatgatggatgggttcgcccgatggaagagggattcacagggcgcaacggctgccgtcacgcgcggtcgctggggcgtgggcaactgggcgtgccggatctcatctaacgccgccacttgctgccacgacctcctcctcccccccccgcacacctctgacctccctccgtccatctcatcatcatctttgtccctctcgcgcaattcgccgaacacaccgcgcgcgcctcgcctcccagcgacggccgcctcgacggccaatgctggcggcgggatgagcgtggaggaggaggtggagcgcggggaggaggacctgttctacgagtcgctcgaccgcatcctctcctcgtcgggctcctccacctctgcctcggacgacgatggcgccgaccgcccgcgccaccgccgcagctgcgatgcgccagccgcagcggccctcgacctgtggacctcccagccggcgcccgtccatgagcggcggcgccggctgctccatctcatggggctcaccggcgatccttccctcgccggatttgagattgcccggtccgcctccggagaagccgcgggaccgcccccggcctctcccgtctcgtggtccaggtcaggcggggccgccctgggctccgccgggaagccgccgctcgggggcggccgtctgcgcttctccttgtccgacgggtccgatgccgccgacgaggaccccaggtgcctgatcaggaacctcgacgacggcagagagtacgtggtgagggaagaattcgctctccgcgaggtcggcacggggcgccaccttaccgttgaggagttggcccgttcacccatcgttcaggagcttatgcgccgccaagctttcagtactcccaactccaactgcacctcaaattcccaaagcggcacctccacgccgatcgagagatcgagctcaggttccagcaacggtggggggcgcgccaagcggcgtagcagctggctccgcagcatccgctgcgtagctggctccttcgcgtcccactcacgtgaccgccgcagcagcgacgagaaggacgcgtctccagagaaaggcgggcaccactccagctccacgacggatgacagccaggacagtgttccacgccatggtccggcccgtgtcaaggtgcggcagtatgggaagtcatataaggagctcagtggcctgtttatgacacaggagatacaggcacacagtggttccatatggagcatcaaatttagtcctgatggccgttaccttgcgactgctggggaggattgcgtaattcatgtttgggaggtgttggagtttgagagggcaaggaaggagaatgaggtgtgcaatccgcttgttgctatggtgtgcaatgagtcatcagagacaacggtgggatcagctgctccaagtgagagccattgggagaagaagctgagatcaaaggtactgcacggtgggggatcggtgagctcagacaggttgatggtgcctgagtatgtgtttgcactgtccgagaagcccgtgataacctttgcagggcattcagaggatgtgcttgatctcagctggtccaaatctcagtatttgctttcatcatcaatggataaaaccgtacggttgtggcacatgtcaagcacttattgtttgaaaaccttctcacacactgactatgtgacttgcatccagttcaatcctgttgatgatagatacttcattagtggttccctggatgagaaggttcgcatttggagtattccaaagcgtgaaatagttgattgggtcgaccttcatgaaatggttactgctgcctgctatactccagatggaaagggcgctctggttgggtcccacaagggcagctgccatctgtatgatacatctggggattcttcaatggtcataatcacatctgcagattcacggatcagagttcttgatggttttgagctagcgcataggtttaaagatagccatgaatacttccactgccagagtgtgacagttgctgttacctggccttttgccagcaccgcaatgacttgtttaatgaaccccgggaagcaagaagagcttgagcgtgggtctgagccgcaagatctgcaaaccaaacttgccaaggcacaggagatgccagatgttgagtaccggagcacaaatatcacgagtaacaactcgaatcataataatggtgaccggacatctccgacttggcctgaaaaacttaacacaccaccaaatcaaagtctcagggctactacctgccatgccaacgagggagatcaagctctgaatcggtcggcctggggcctagtgattgtcacagcaggccgtggaggccggcgcgctataattcaccggactgtccggtgtacaccggacagtgtccggtgctccaaggaagcgcggcctccggaactcgccagcctcgggaacgcgcagcagccgctccgctataattcaccggacatgtccgcgcgcgcagaaggcaggcgcgcccatactggcgcaccggacaatgaacaggagatgtccg

SEQ ID NO: 17712 - DNA, 642 bp, Zea mays
  Peptide Sequence Number=SeqID_59491
atggccaaggtcggaatatcagtggcaggatccaccaccacggcagcccggggttgtttagccgcgatgcgtgatctggccacctgggggcggcaggcacacacacatgcgagcggcagcgaaagaagaaagaaagaaggagcggagcggaggtgtcaggtggccgtcacatgcatgcgccacccattggatttactccggcctccggacgagctttttggatggctggaagatgaacaggacgacggcgtcctcctcgctgctctcggtcgcggtcgcctccacaccgctgcacgcacgcaccagggtgctcgtcgtcccgcggatcgcgacgcagctctcatccacggaggaggatgtcagcaagccttcgacgacaccaccagctccgacgaggacgccgaactagcggaggaggtgtccaacggcttcttcatcgtcgccaggctaccgccgttgccgacgtccgaggacccgagcccggtccccgagggcggggacgacttgggcactgcgaaggagtcgctggacaggactagactctaccgcgcgcgccatggcgctgctggtaggcacgcggctgtcctcgctctcctcggcgtcctccttgccgctctcgcctgcccatcgacggcggattga

SEQ ID NO: 17713 - DNA, 330 bp, Zea mays
  Peptide Sequence Number=SeqID_59492
atggccacccgatcggcggcagccagcaagcgggaggggaggaggtcacaacagcagctagatccggcaatcagagcagatggacagacacaattgagccatgaaatagctttggagctaagtcagaggagtgctgctgctggactaaggccgattggagcagtggtcttcatgcaacggggtgtcctgaaggtttgcttgaggactactgacagtacagttaatacatcagagattgcaaaggcatatggcggaggtggaaaacgaagttcgagttcattcactctaagaatggatgagttcaacatctggacttcagtgaactcatga

SEQ ID NO: 17714 - DNA, 1245 bp, Zea mays
  Peptide Sequence Number=SeqID_59493
atggcggcaaccctcctgtcccacgtcgtctccgacctctgcatcggcaggccgagggtgctcacgctgccaccctccacccccgtcgcggccgcactcgccgcgctgcgcaccggagccgacccattcgtcttcgtggacgacgaaccggctgcctgctgccacgcgaagaccacgacgtacgtgaaagtcaccgtcgccgacatcctctgctacgcctgcggcgacgcgggcaacctcagggacgtcgcggccgcgctcagccggcccgtggcagtagtggtcgcgggcgccgtcgctagcggccacggcgtcacccaccgagtggacccgcagacgaggctgctcgacgccatcgacgtgctgctgaccgacggctgccaaggcctgctcgtccctctctctgcgcgcacccgcaagaggcaccaccagcaccagggccaggccccgtcctccgacgccggcgccttgttggccacgtcgtccgactgctgcgtgctgacgcgggaggacatcgtccgccacctcttcggctccatctcccacttctccccggtcgccgcgctcaccgtcgcgtccctcggcctcgtccgccgcgacgtcgtgcacgctgtccacgtcgacgacgacgggctcgacgtgatcccgcttttgcgcagggccgtctcggacggcacggccgtggccgtcgtcgccgacgacgacgcgttggtcggcgagatctgccccagcgtgctcgcctcgtgcgacgtcgaggcggtgtcggccgccttcgcggggctctccgctggcgacaccatggcgtacatagactgctcgctgtcgtcgcactctccgccagagttcttggtgcgcgccatcagagctcagctcgccggaaagggactggacgccatggccgagctcgtggaatgcgctggaaaggacaccgccgtccttcctttgtccccgtcctcgtcgttgtcgtcgacatcctctgacgaggactcaccgtcgggacgcgcacgacgcccaaggaggatgtcatctgggagcttcgggtggcggtccacggaggacgtggtggcttgccactctgagagttcgcttgtggcagtcatggcccaggcgcttgcgcaccgtgtagggtacgtctgggtcgctaatgagaccagcggcgcgctcgtcggggtagtgagattcgccgacgtgctcgcggtactccgggagcaactccggcctcagtcggtcagtcccaggtgctag

SEQ ID NO: 17715 - DNA, 1686 bp, Zea mays
  Peptide Sequence Number=SeqID_59494
atgtcgggagatcacgccaagaaggagatggagaccggcgaaaagcccactacaagccacgggagcacttcatcggaagagtcccgcaccaagaggaaggagaagaagaaggactcctccaaacggaaggagaaaaagtccttctcttctcaccacaaagagaagaaggaaaaatcttcttcccacaagccgcatcggaaaggcgacaagcacaaaaggatgaggaaagtggtctactacgagaccgacacttcatcaacatcgacctccgactccgatgcgccctccgtcacttctaagcgccaagagcgcaagaagtatagcaagatccccctacactacgctcgcatttccaaacatacacctttactttccgtcccattaggcaaaccaccaacttttgatggtgaagattacgctaggtggagcgatttaatgcgatttcatctaacctcgctccacaaaagtatatgggatgttgttgagtttggtgcacaggtaccgtcggtaggggatgaggactatgatgaggatgaggtggcccaaatcgagcacttcaactctcaagcaacaacaatactcctcgcctctctaagtagagaggagtataacaaagtacaagggttgaagagcgccaaggagatttgggatgtgctcaaaaccgcgcacgaaggagatgagctcaccaagatcaccaagcgggaaacgatcgagggggagctcggtcggttccggcttcgcaaaggggaggagccacaacacatgtacaaccggctcaagaccttggtgaatcaagtgcgcaacctcgggagcgtaaagtgggatgatcacgagatggttaaggttattctaagatctcttattttccttaaccctactcaagttcaattaatccgtggctcgaggaagatcaacgagcttgatgatgccaccacatccgaagctcaacccgttgcattcaaggcaacggaggagaagaaggaggagtctacaccaagtcgacaaccaatagacgcctccaagctcgacaatgaggaaatggcgctcgtcatcaagagcttccgccaaatcctcaagcaaaggagggggaaggattacaaatcccgctccaagaaggtctgctacaagtgtggtaagctcggtcactttattgctaaatgtccattatcaagtgatagtgacaggggcgacgacaagaaggggagaagaaaggagaagaaaaggtactacaagaagaagggcggcgatgcccatgtttgtcgggagtgggactccgacgaaagctctagcgactcctccgacgacaaggacgccgccaacatcgccgtcaccaagggactcctcttccccaacgtcggccacaagtgcctcatggcaaaggacggcaaaaagaagaaggttaaatccaactcctccactaaatatgagtcttctagtgatgataatgctagtggtgaggaagataatttgcgtagtctttttgccaaccttaacatggaacaaaaagagaaattaaatgaactaattagtgccatccatgagaaggatgatctcttggactcccaagaggacttcctaatcaaggagaataaaaaacatgttaaggttaaaaatgcttacgctctacaagttgaaaaatgtgagagattgtctattgacctccgcacttgccggaaaaatgattga

SEQ ID NO: 17716 - DNA, 1173 bp, Zea mays
  Peptide Sequence Number=SeqID_59495
atggcgaagcagttgaaggtgctgcttcctccttccttccacaagatgcgcatctccgacgaactctctggttgcttcgaggccggcgacggggcgccagagccgacggctctagtggtcagtcccttcggcaaggtgtggcgtgtggctgtgggccgggacggcgacggtgcattcctggggcgcgggtgggcggagttcttggccgctcacggcatcggcctcggtttctttgtggtgctgcggcacgagggtggcggcacgctcaccgtcaaggtgttcgacaccagcttgtgcattaaagggttcagcgctccggctgcagttatgacatccagaggcagcaaaggtgttatctgtaagccacagttcatcaggatttttcatccatatctctcagaaaagatgatattgcctgctaggtttgtgaaatattacatcacagacgagtggctaaacagccagacggccatcattctcagcccccttggcaaattttggcgtattgagcttaagaatgatcaatcaggcatcttcttcacaggtggctggtcacagtttctggaattccatggaatatgtaatggtgatgttttgcacttgagatacgaagggaacatggttttcaaattcaaagcatttggtcttggtggatgccagaaagatttcaagaaccagaacgctgggattcgatcaagtaaggaaaaacgacaggaaacaccttccatcaggaaacgtaaaagcaatgatgagaagtcaagaagtgaagaaaacaagaggccaaaaggtccaaagaattcccgattactagaaccctatcgtattgggacatcatcttggataaggaaaagcatcaacacctatgcacttgagcaccttcttccgttgtcaaaggagttctgcggtcggattgggttccagatggcttgcaagatcacgcttaagacaaaaatggacagcgccagatcatggctggtgcatggtgctgcatacaagaactactgctgcctcgtcggagtggcctggaagagcttctgccaggagaacaggatcaagccagggcgacctgtgcaccttcaacatcatcgaaaccacactgtggcatgtcactatcacgcactagacccagtggaggtagaggtggaggtgaagaccaagaataatattacctaa

SEQ ID NO: 17717 - DNA, 2475 bp, Zea mays
  Peptide Sequence Number=SeqID_59496
atgaagggcaacaacaacaacagcagcaggccccgccatgaggtggcagagaatgaccaaggaaatcgggcggagttggtgacagtgctgaggggcattgacgtggaggtgaggaggggcgagcttacggcggtggtcgggacagtgggctccggcaaatcgtcgctgctgtcctgcatcatgggggagatgcacaagctctccggcacggttagcatatgtggaagcacggcatatgttgctcagactgcttggatccggaatggaaccattcaagagaacattttatttggaaagccaatgcattcagagagatattcggaaatcgtaaatgcttgctgcctggaaaaggatttggaaatgatggagtttggtgaccagactgaaataggagagcgagggatcaatctcagtggaggccagaaacagcgcatccagcttgcaagagcggtttatcaagactgcgatatatatcttctcgatgacatatttagcgcggttgatgctcatactggatcagctattttcaaggaatgtctgaaaggcatactcaagaataagactgtgttgcttgtgactcaccaagtggacttcttgcaaaatgtggatactataattgtaatgaaagatgggttagtcatccagtcagggatctatcttgagttactagcatcatgctcagaattttctgatcttgttacagctcatcatagttcaatggagacagcaggggcacaagcttttcatgttcagaacacagagagctctcaggcttccactggatctgtagatgccccatctttggcatcgaaatccaatgctgaaaatggtgaatcagttggcagtgcaacaaacaaagaagcaggttcttctaagctgatccaggaagaggaaaaggagagtggccgagtaagctggcgtgtgtacaagctatatatgacagaggcctggggatggtggggaattgtggtcattttagctgtgtcactgctgtcagagggctccagtatggctagcaactactggttatcatatgagacatcaggaggccctgtgtttgacacttccttatttcttggtgtttatgcttcgatagttgctacgacaattatattggaaatgatcgccactcttattgtgacattcatggggcttcaatcagcacaggcctttttcaacaagatgtttgacagcattttacgagcgccaatgtcattttttgacaccactccttcaggaaggatcctaagccgggcatcatcagaccaatctaagattgatactaaccttgtgttctatgttggttttgccacatcaatgtgcatctcagtggttaccaacgtcgctattacttgccaagttgcatggccatcagtaattgcagtatttcctctgctgcttttgaacatctggtatcggaaccgttacattacgacatctcgagagcttacccggcttcaaggggtaacaagggcgccaattattgatcactttacagaaagctttctgggtgccccaactgtaaggtgcttcagaaaggaggatgagttctaccagataaacctggacaggatcaattcgaatctgcaatttgtcggcatgtccctttcctacggcatttctctcaattccttggtgtactacacaatttccataagctgtatgatcgagaatgatatggtagccatagagagggtgcatcagtacagtactctcccttctgaggcagcatgggaagttgccgacggtcttccctcacaagattggcccagccgaggagacattgatgtgaaagatctgaaggttcggtatcgtcaaaacacgcctctaatcttgaaaggcattactgtgagcatcaaaggtggagaaaaggttggagttgtgggaaggactggcagtggaaagtcgactttggtgcaggctttattcaggatcgtggagcctgcagatggccatatcatcatcgatggtgtcaacatctgcactctggggcttcgtgatctgaggtctcgcttcggtgtgattccccaagaacctgtgctcttcgaaggaactgccctcgagtgctgccagctaaaggatatagtagcctcaaaaccagagaagcttgatgcactagtcgccgacatgggggagaactggagcgtagggcagaagcagcttctgtgcttcggccgagtcatactgaaacgcagccggatcctcttcatggacgaggcaacggcttcggtcgattctcaaacagacgcggctatccaaaagatcatccgcgaggagttcactgaatgtactgtcatcagcgttgcacatcggatcccgactgtcatggacagtgaccgtgtcctggtgttggacgcaggtctagtggcagaattcgacgcaccctccaagttgatgcggaggccatcactctttggtgcgatggttcaggagtacgcaagtcgctcatctagcgtgaaggaaaccgttggatga

SEQ ID NO: 17718 - DNA, 466 bp, Zea mays
  Peptide Sequence Number=SeqID_59497
atggcccctaggcacctcaactgtcgcagccccctcctcttcgtcgcggcggcgctgctcctcctcctcctcctaccctatggctccagttctagcaccttcgggtattgccgcagccgcaaccgcagccgcgacggcgcacggcgcgtggcctggcggctggcgggcgagggccgaggcgagccgcagggcgcgatgccacgaccgcgcgagtgcgcgacggcgcttggccgggcgcccgggctggcaaacgaggacggggacgacgcgtgccgcgtggccggcgtctcagcgaggacagcgccgggcggcggcgctgtggcagactggcggctaccggctaaggattacttctgtggactggcggactggctgcgatggaagttctatttatttgtcctacgcgcctcgggccgtggccccaggtggcccataggcctgggtccgcccctgatggtgaagtcaa

SEQ ID NO: 17719 - DNA, 1677 bp, Zea mays
  Peptide Sequence Number=SeqID_59498
atggcgaccggagcactgttacagccgtggagcttgctcggttttcttgcggcgctcgcggcgctctggtgggcgtgccgggtgctgcagtcgaccctgatcgtcccgcggaggctcggtcgggccctgcggtcgcagggcctccgcggcacgacgtaccgcttcccgttcggcgacctcaaggagctcgcgcggttggccgtggctgcccgggccaaggccatgccgctctcgcacgacatcacgccgcgcgtgaatcgcctctactacaacgtcatcggggaacatggtaaagtctccgtcacttggctcggtcccacgccaagggtgatcgtgaacgaccccaagctggtgcgggagatcctggccaacaagcttggtcacttccagaaacgcaagcacgacggcatcgtcaggcggctggccagcgggctggtcaaccacgagggcgagaaatgggctgcgcaccgcaagctcatcagcccggcctttcacctcgagaagctcaagaaaatgttgcccgcgtttgcttcgtgctcagacgagttgatagctagatgggcgggttacgtggggtccgacggagcgagggagatagatgtctggccggagttccagaacctcaccggcgacgtgatctcgcgcacggccttcggcagcagcttcagcgaggggaggaggattttcgagatacagtgcgagcaagttcagaatctagtgaagttgatgaacacactgtacctcccaggtttcaggttcctgccaacgcagctaaacagaaggctgaaggcgaacgcgcgagaggtccaggcgctcctgagaggcatcgtcagcaagcgggagcgggccatgaaagaaggccgtgccaacaacgacgacctgctgggcgtgctgatggagtccaacatcgctgagaccagacaggacgggagctccgagccagtcatgaccatggacgacatcatcggggagctgaagctgttctacttcgccgggatggataccaccgctgtgctgctcacgtggacgatggtcgtcctgagcgcgcacccggagtggcaggagcgagcgagggaggaggtccggcgcgtcttcggaaacaaccggccggacctggacggcatacagcagctgaaaaccgtcagtagctcgctcgctggcctttgctctgctgtctgctctcacaacacgacttctcatgcaagtctgactgacacggtcgtttctgtccttgtttggtcgtccttgcaggtgaccatgatactgtacgaggtgctcaggctgtacccgccggtcgtgcagctcgatcggcagacgcacaacgaggtcgagctgggcggcgtcacgtacccgcccggggtgctgctctcgctgccgatcgtcttcgttcaccacgacaaggacgtgtggggagaggacgccgacgagttcagcccggagaggttcaaggacggcgtctccagggcgtccaaggactcgccggcgttcttcccgttcggctggggtccacggatctgcgtcggccagaacttcgcgctggtcgaggccaagatggcgctcagcagcatcctgcagcacttctcgttcgccctctcgcagtcctacactcacgcgccgttcccggtgtccactctgcagccggaacacggggcgcatctcatgctcaagaaactctag

SEQ ID NO: 17720 - DNA, 516 bp, Zea mays
  Peptide Sequence Number=SeqID_59499
atggcaccagcgctcctctccatctacggagagcagagtgggagcgagcatctggtttttatcacggctctgcatcacgcgcgggcaccagtgctcctctccaaagatggaagggcgtcaggggcgagcatcacggggctgtcgcgggcgaggaccatggggtgggggcggctgcgggggcatccacgcccttccatctacggagagcagagtgggagcgaggatggcgggggttggcgcgggggcatcctggaatggcgccctttccatccacggatagcgagcgcggggcgaggatcgtggggtgagggcggctgcgggggcatccgcgcccttccatcgacgggtcgcagagtgggagcgaggttggccggggctgtcgcggaatggcgccctttccatcgacggatagcgaggatggctgcgcagactgttggtaactcagtatccgagtttctgtcgggcttcagcgatgggaagacagactcggcagcgagagtttccctcgctaattaa

SEQ ID NO: 17721 - DNA, 1731 bp, Zea mays
  Peptide Sequence Number=SeqID_59500
atgaagaaatggcatggcggctttgccattgtatctttgttcatcatcttgatgttaagatatgtgatattggataacccacttgtagaaaactcgcttcagtatgttttccagcaaaacaggacggcagaattacattggttggatgttccaaacccacctgcaatccagaatctacagatttcttctgaagtaatatcaactggactcttggcttccaacctttccattaccagaaatctctctgatagagaacttcaatctttacattcttggaatcatttgaaacagctattatctcatgttcatatcctaccagatggagtagaggcaatcaaggaagctggagttgcatggagggaactcaatacagcccttgcatatgatgatgcagtttctgttaatggcagcattcagcagaaggacaaaggaaagcaatgcccttattctatcagaaggatgaatgccacaagattaggggataggtttgctttaaaacttcccctgtggactgattcagggctcttcaataactatttatttgaagatcctgtaatagtccaaaatacatggacaatatctgatgattggggttctgaaaaccgttgcccatctcctgattcagatgctaaggacactacaaaagtggatgatctagaaaaatgtagtagcatggtaggtgaggaccagaaagaaatccttccctctaagtttcattcaaatgtttcggccatgccacctgcaagtaagaagaaagcagaacctagaaagtattttccattcagacagggatatcttgccgtagcaattcttcggatcggagcacatgggatccatatgactgtagatggcaaacatatcacttcttttgcattccgagaggatttggaaccagggtttgtaggtgaaaggacttcgagcatgttcactgacttagaaatattgaaggctccacctgtgcccatggataaaccggttgatcttttcattggggtcttctctacagcaaataatttcaaacgccgaatggcagttcgcagaacttggatgcagtatgattctgttcgatcaggaaaagttacagttcgattctttgttggcctgcacaaaaatgagttggtcaatgaggaactctggaatgaagcacgaacatatggagacatccagttgatgccatttgtggattactatagcctgattctttggaagaccatagcgatctgcatctatgggacaaatgtcctgtcagccaactatgtgatgaaaactgatgacgatgcttttgttcgagtagatgaagtactttcttcccttgaccgaactaatgtcaaccatggactgctgtatggtcgtgtcaattctgattcccagccacatcgagatccatatagcaagtggtacataacccctgaggaatggcctgaggagagttatcctccctgggcgcatggaccaggatatattgtttcaaaggacatagctaaagaagtttacaggaaacacaagagtggggagttaaagatgttcaagctggaggatgtcgcaatgggaatatggatcaatgagatgaagaaggatggcttggatgtcaagtatgagaatgatgggaggattttggttgaaggatgcgaggatggctatgtgattgctcattaccaagaaccaagggatatgatgtgcctctgggatcagtttcagaaaacaaaacgaggaacatgttgcaaagaataa

SEQ ID NO: 17722 - DNA, 253 bp, Zea mays
  Peptide Sequence Number=SeqID_59501
atgcactttgttggttatggttctggtgtcaaaggatatcgtttattgtgtgctgattctaagaaggaagctccgcctcgcccgaccccagggctcgacccccgtctcggcctcggacgatcctcggctttagaagacgacgaactctgcctcacccgaccccagggctcggactcgacctcgactccgggagatgacgaactccgcctcgcccgagcccagggctcggactcagccttggcctcggacgacg

SEQ ID NO: 17723 - DNA, 369 bp, Zea mays
  Peptide Sequence Number=SeqID_59502
atgaggctgacaacagctgagtccagcctcaggcgccacaggaagctccgcctcgcccgaccttgggcctcggcctcaggagaagtctccgcctcgtccgaccccagggctcggcccccgcctcggcctcggaagatggaactccgccttgcccgaccccagggcccggcctcaacctcgacctcgggtggaatcgcgtcctcacccgaccccggcctcggcctcaggaggagtctccgcctcgcccgaccttgggctcggatcgaccatgccacaggggggtatgtgtggtctggtgttaccagcgtgggcggggtggggtgggcccagtctggtgttaccaccgcgggcggggtggggtgggtctag

SEQ ID NO: 17724 - DNA, 1405 bp, Zea mays
  Peptide Sequence Number=SeqID_59503
gaggccacttgggatttcaagaaaatacatcggttttgacgagcctgacgaagcgaaggatgattccagggttggtgcagatgatgctggttcttttgaacattatggggacaatgattctgggcctttggccggggagaatgttatgaacgtgatcgtggtggctgctgaatgttgtggtaccaaggtatggggacttatggggaaccctttgaaaatgggaatccggaaatacttccaaagctgcaggaccagggtccatgacctagaagtgaactatttccatgcatttattgatggagtcgactttgtgttcattgatgcccctcttttccggcaccgtcaagatgacatatatgggggaagtaggcaggaaatcatgaagcgcatgattttgttttgcaaggttgctgttgagggccgtggtcctgtagatgaattcccgtacatggacttgcctgaacactaccttcaacatttcgagctgtacgatcccgtcggtggcgagcacgccaacatctttgccgcgggtctgaagatggcagaccgggtggtgactgtcagccgcggctacctgtgggagctgaagacagtggaaggcggctggggcctccacgacatcatccgttctaacgactggaagatcaatggcatcgtgaacggcatcgaccaccaggagtggaaccccaaggtggacgtgcacctgcggtcggacggctacaccaactactccctcgagacactcgacgctggaaagcggcagtgcaaggcggccctgcagcgggagctgggcctggaagtgcgcgacgacgtgccgctgctcggcttcatcgggcgtctggatggacagaagggcgtggacatcatcggggacgcgatgccgtggatcgcggggcaggacgtgcagctgcacttggagcgggagcatcccaacaaggtgcgcgggtgggtcgggttctcggtgcctatggcgcatcgcatcacggcgggcgccgacgtgctggtgatgccctcccgcttcgagccctgcgggctgaaccagctctacgcgatggcatacggcaccgtccctgtggtgcacgccgtgggcgggctcagggacaccgtggcgccgttcgacccgttcagcgacgccgggctcgggtggacttttgaccgcgccgaggccaacaagctgatcgaggcgctcaggcactgcctcgacacgtaccggaactacgaggagagctggaagagtctccaggcgcgcggcatgtcgcaggacctcagctgggaccacgcggctgagctctacgaggacgtccttgtcaaggccaagtaccagtgtgacgcgccgctggggtcggtagcagtactatgggattgcattgagctgtgtcactatgtgctttcgacaggacagtag

SEQ ID NO: 17725 - DNA, 1140 bp, Zea mays
  Peptide Sequence Number=SeqID_59504
atggatttggtggagcttgaatgcaagttttgggctaacaatggaaagaacgtaaaatatgaggtgaggaacaatcggacaggctacaaggcgggtgcgctgaaacaagggatgctctacgagtatgttcaacagtgtgattttgtcgctgtgtttgatgctgatttccaaccagaacctgacttcctcgtgaggaccgtcccatatcttgttcataatccacgaattgctcttgttcaagcacggtgggaatttgttaatcccaaagaattcctgatgacaaggatacaaaagatgacattagattatcacttcaaagtagagcaggaagcaggttcatccacctttggcttctttggttttaacggaactgctggtgtctggagaacttcttctatcaaggaagctgggggctgggaggatcgaaccactgtggaagacatggatttagcagtcagagcaggtctgaaaggatggaaattcatctatgttggggatgttaaggtaaaaagtgaactgccaagcaatctgaaggcatatcgccgccaacaacatcggtggacatgtggggcagcaaatttattccggaagatgggagcggaaattattctgactaaggaggtgtcgctgtggaggaagctgtatctgatctacagcttctttttcattaggaaggttgtcgcccatgtggtacctttcatgctctactgcgtaataattcctttgtctgtgctgattcctgaggtcactgtccctgtatggggggtggtttacatcccaacaacaataacacttctttacgccatcagaaatccaagttctatccacttcataccattctggatcctttttgagaacgtgatgtcttttcaccgaacgaaggcgacattcatcggcttgctcgagctcgggaatgtaaacgagtgggttgtcacggagaagcttggtagaaccaagcctgtgccacaaatgcttgaaaagcctcgctgcaggtgcaccatatcagagattttagttgccatcttcctcttcttctgtgccacatacaacttggttttaggagacgacttctatttcgtttacatatatttacaggaaatagcatttcttattgttggcaccggtttctgcggtacataa

SEQ ID NO: 17726 - DNA, 724 bp, Zea mays
  Peptide Sequence Number=SeqID_59505
atggtgaagcagagggggtccgactatggggaaccatggtccgcggcaggctcagtgttctgcagcttcgtccatggagcgaggcgatgcgtggcggcgcggctaggagttcgcacagcgccggactcaatatgcgaaattggtgctggtcgaagctcgcccaagctccgacgaggcccccgctggtcgatgagaagcaacaagctggagaatggcgacggcgcacctaggggagctgtggagaaggcgcagagggcacccatttatttcccccggatccggcacgggatgggaggggttcgcccatgcctccccgacaatggcggcaagcgctgcgcagtttgttacagcggggagagcgcagggaagacagagtcacgcgcggtggaaaggagttgtggggctccaccaggcagccacagagagaaggagggagatgcggttccactgaccagactggtccacatgttggcgccgcggatagatatggagtccatgcgcgcgtcctcggtcgcctccgcccgccctctttcccgcaccaggatctcaccacgttgtacctactccggtggcgccagcgctgcccctgattctgggaagctacccgcggcggcgctccgacgggtccttgagatgcctggtgcgcaccaggcgcccgcctgctacgacgcgctgagcgcacgcctcgtcgagcgcgctgagttcagggcctacttcacgagcg

SEQ ID NO: 17727 - DNA, 1017 bp, Zea mays
  Peptide Sequence Number=SeqID_59506
atggccgggtaccgccgcaccatctcgttcccggccccgaagcccggagccgacgccctcgctctggcgaccgcgagcgacaagctgggcggcgtaccgcatccgctggacgacgacgtggccgcgctgcgcctcgtgatcggccagtccccgccctgcccgtccgcgccgtcgccgtcggcgtcgtccgtgtccgcggcggcgtcgcaggtgtgccgggtgctcgtctcgctctcggagctgctgcgccacccgcaggtgcgggagccgctgcgccgcctgctgggccggtcccgcctcgcggagcggctcctggacgacctcctccgcctcgccgacgcgcacggcagcttccgccaggcgctggtcgcgctggccgcgctgcaggccgagacgcgcgccgcgctgcgccgcggcgaccccacgaggctggcgtccgcgtcgcgcgcgcagcggcgcgccgggcgcgacctcccgcgcctcgcggccgccgcgcgcgccgtggccgccagggcccccgcgccgctccccgagggcctcccgcccgacgccgcggcgctcgcggccgcggtcgccgacgcgaccgccgccgtggcctccggctccgccgccgtcttctccggcgtctcctcgctctccaacgccgccgcctccgcccgcgtcgaggtcgcctccacgccgtgctgggtcaccgcccccgcgagaccgtcggacgcgccggggaccagccgccaccacatatggtgggtggccgacctggtgcgctggatgtcgcgcgccaagcggcgctccgccgagaagcagaaaggcgtcgacgaggacgaggagtcttccaccgcgcagttccggcccgaggcacgcgtgaagcccgaggagagggcgcggaaggcggcgttcgagcgccacgagaacctggagcgctgcatcgccaacgtcgacggtagcggcgagaaggtgttccgagcactggtcgacaccagagtgtcattgctcaacatcctcagcccgggcttctga

SEQ ID NO: 17728 - DNA, 234 bp, Zea mays
  Peptide Sequence Number=SeqID_59507
atggagagttcatccccattgctgtttttacttgacgccaacgacgacaaccattcagcatcggtgctcttcgacagcaacttcgtatcagaaatctcgtgtttgcctcaggagcaacgcctacgcaaggtctcactgcaaacacctggtcaaggcctggcccattcagcccatcgtgtacttctgtccgtgcctaggctccgggagctgccttcatgccgcctgctcgcctag

SEQ ID NO: 17729 - DNA, 1458 bp, Zea mays
  Peptide Sequence Number=SeqID_59508
atggcgtcgccgctgcgcgccgtggcgtcgcctctgcgcgccatggcgacgccgctggccagccccgtcaggaaggcggtggcgggcgtcagggaatgcctggaggaggtcggccacatcacgcgcctcgccgacccgcgggacgcctggctgcccatcaccgagtccaggagcggcaacgcctactacgccgcgttccacaacctcagctccggcatcggcttccaggcgctcgtgctccccacggccttcgcatcgctcggatggacgtgggcgatcatctgcctgaccctggcgttcgggtggcagctctacacgctgtggctgctcgtcaggctccacgagcctgtcgcgggcgccacccgctacagccgatacatgcacctcgccaccacagttttcggcgagagatgggccaagatcctggcgctgctcccggtgatgtacctgtcggcggggatctgcacggcgctcatcatcgtcggcggcggcagcatgaagctgctgttcggcatcgcgtgcggcgagccgtgcccggcgcgcccgcccaccaccgtggagtggtacctcgtcttcgtctgcgcggccgtgctgctgtcgcagctccccaacctcaactccatcgccggcgtgtccctggtgggcgcgaccgcggccgtcgcctactgcaccatgatctggaccgtgtccgtggccaagggcagggtgcccgccgtgtcctacgaccccgtcaaggcccccagcgacgtggacggcgcactcgccattctcaatggcctcggaatcattgccttcgccttcaggggccacaatgtcgtgctggagatccagggcacgatgccgtcgacactgaaacacccatctcatgtgcccatgtggaagggggttaaggtagcgtacgccatcatcgcgctctgcttgtaccccgtcgccatcggtggcttctgggcttacggcaaccagatacctcccaatggcatcctgagcgccctgtacaagttccacagccgcgacacgtccaggctagtgctgggggtcaccacgacgctggtgatcgtcaactgcctcaccacgttccagatctacgccatgccggtgtacgacaacatggaggccgggtacgtgcacaagaagaaccgcccgtgcccgtggtggatgcgctcgggcttccgcgccttcttcggcgcggtcaacttcctcatcgccgtcgcgctgccgttcctgtcgcagctcgccggcctcctcggagggatctcgctgccggtcaccctggcctacccgtgcttcatgtgggtggccatcaagaagccgcggaagggcaccgccacgtggaacgtcaactgggcgctgggaatcctcggcatgagcataagccttgtcctcatagtcggaaacctgtggggccttgtggagaaaggcttgcgggtcaagttctttaagcctgccgattcccagtga

SEQ ID NO: 17730 - DNA, 900 bp, Zea mays
  Peptide Sequence Number=SeqID_59509
atggaacaaaaatttgtactgggtgttattctcatggtcccttgctatgcaattgagtcagtaagttatgcctataggcattgctattttgagaaaatatgtagttgtgttcttaaaagaaaactcggcctgcggggggtgatcataaagaccctcacagccaccttatctcttcttctagaatcttttggtgtttattgtgatggagaattcaatttacgatgtgggtacccttactttgctgctgttctcaactttagtcaatattgggccctgtactgtctagtagcatgttatagatacctgatagcaccatggcttcctccaggacagatgggcattgcttcagttgttcacctctatgtgttcccagccaagccctatgcactcttaactaatcagtcacacggaaacatttctgtacttggggactatgtatcctctgagcccgtggacccttttgaaataaaggaaagcaaccggcctaccaaaatgaagcttccacagttggaaccagatgagagaagcgtgacaaacataaaagaaagtgttcgggactttgttgtcggcagtggtgaatatgtgatcaaagattttaagttcactgttaaccaagcagtgcgaccagtggagaagcgcattgataaattgatgaaaaagaatgataagagtaagaaaagccaggacgacaactgggtgagtgcagcaacaccagagaggcctgttcgtgggattgatgatccattattaagcggaagcgcaagtgacagtggtgtcacaaagggcagaaaatatcgcagagttgtgagctcagttactgctgtggacagctggggaggtggtgatcaagcttctgacggatatgagatcaggggtcgccgctgggctgtaaaaagctaa

SEQ ID NO: 17731 - DNA, 615 bp, Zea mays
  Peptide Sequence Number=SeqID_59510
atgttgatggtggaggccttgtttctctgtctccagtgtctctgtttccagtgctgccaggagtttcgtcaaggccttgtttctggtaatgatgccaaagttgatggtggaggcaagcaagattttctatcaggagttagtcatgataaaatcataagcaaaaggccatctgatggacagaatgacatgttgatagatagtgtagttcctggtgaaaacatcacttctagcttgagacagtggagtgtgaataaagatggaaccataccttgcccaccaaatgcatttgtggttgtgggagctctccttgaactgaagtgcttgtttaaagagaagtttattgctgaattactggagaaagctgattcagcgctcaataatgaaatggaggtgaagatagaaggatcaaaatgtccctgcttcactgaatccggtgacatggatgatggtatatcatggaaatcatcttgcagggagaattcctgtgataactacatatattgcccaaccgctacaaatgtccaaaatggaagtttagaccatttccaggagcattggttgaagggtgaacctgtacacataggaagagaaattggtaatgggatcagattatga

SEQ ID NO: 17732 - DNA, 1725 bp, Zea mays
  Peptide Sequence Number=SeqID_59511
atggccggccaaggtgtcagcgtgccagctgctgcaggagggatcgccgtgggcgtctttggcactgctgcagcctgcaggctggcagcgtcggcggggttgctcctcctcgtcgtcgcgttccattgcttcctgtcgctgccgctaagcgacgccagtggcggctcccgtgtcttccggcgccccaacccgccgttcctgttgaacaagccagcggatgtgcgcagaaatgtaatcggtgccgtggatttcgctgttccaagcggtgggagcaagctcggggaggagctctgggagtcgaaggcggcgggcaacttcttcggctgcagcaacgccaccaaacagttcgccgatgccgaggctgtgaccaagtcggaccgttacttgatgatcgcgacgagcggcggactgaatcagcagcgaacagggagtttatctgaaatcttattgcccgtgcctatgtctgacaattatgagacccgcatactgaatgcaacacttgtcattccaaagctggacgaagaatccttctggaaagatgcgagtgactttgcggagatatttgatgtcgattcattcatatcctcgctttcgaatgatgtaaagatcatacgccaagtacctgacaggaatggcaaaccgccttcgccgtataagatgcgtattcctagaaagttgcacactaactctgatgacccatctgttgacagatttgagcctgacatgcttgctttctctggttgctactacggcggtggagacattgagagaagagaacttggtgagattcgtaagaggtggaagaccctgcatgcaagcaaccctgacagagaacgacggcacggaaagtgccctctaacaccagaggaagtagggctcatgctcagggcattgggatttgggaaggacgtgcacctttatgttgcatcaggagatgtatatggaggcgaggagacactggcacctctgaaggcactcttcccaaactttcactcgaaggaaactctagccaacaaggagttagctccttttttaccatattcatctcgcatggctgctctcgattttatcgtatgtgataggagcgatgtcttcgtgacaaacaacaatggcaacatggccagaatgttggctggtcgaaggagatattttgggcacaggaggaccataaggcccaacactaagaaactttactcattatttctgaatcggaccagcatgagttgggacacatttgcatctaaagtccagacctttcaaaagggattcatgggggagcccaatgagattaaactaggaagaggcgaattccatgagcatcctgtagattgcatttgtgcaaaatcgaagggaaaaagcgtacagagcaggcatcacctagttaaaggcgctggagaagctgtggagaaccattctattgatggggaacttgactggaaggatttggactacggagagcatacacccttgggcaggggggattcatcgaatgaaaccgaatcagacgatgtccgtattggtggatcagacattcctgaattggaggatatgatacacatagaaacaagtttttgccagctcgacaaacaagaaaggcctggaagagctagagcttcctacagaaaagacaggaagcctatagttcggtatgaggtaacaactgtacagtgtatgatggaccctggggaaatggtttctttttcatatagcttgtaccgtagatag

SEQ ID NO: 17733 - DNA, 303 bp, Zea mays
  Peptide Sequence Number=SeqID_59512
atgcctcgaccacctaacccatggctgggtgtgcgccgttcatccacggtgggtgctcccggcctgggcatctcggtcggccctcccggttgccgtggcaagctccctccggcggccgagtcaatccaccgcgtccgccgggagatagcagtggtgccatgtgctagtgctgacaccccggaattggctctggtgctttgtggatgtgtgtgggtgcttctggtggggttgattgcacatttggccggctggagctcaaggaatctcccaccggaactgcagcaccaccgcgattccgcctaa

SEQ ID NO: 17734 - DNA, 177 bp, Zea mays
  Peptide Sequence Number=SeqID_59513
atgggtgacccatacccacttgggtatgggtatggggtgggtaacacagcgtctgtagcaaccgccatggacttttatgcgaggaagaagcgtctaggtgctgggtccaaccggtcagcggctgtgaacgacgaaggcaacatcgagtcggtggagtgcgtgcggtgttgggcctag

SEQ ID NO: 17735 - DNA, 393 bp, Zea mays
  Peptide Sequence Number=SeqID_59514
atggtgtgctcaatggtgcaagaattatacgacgttatggagaggttggtgggaatgccgcggggattctgtcgtcgaaatcgtctaggggagattgactcttcctcagcgagctatgacactaggctggcgagggaggtcgtgcccctgcgaggcgagttagaggacaccgaaggactccatgatagtgttgagatctcctatcagggctatccaggcaatcggaacctagaccagatccccttcaacggtgacgatgaagtcaaggctcccgaagcgtatggttgttctgagggcctattctatgtcgtggctggccatttggagcctgaaaaggatggtgaaaacacacaaaggccctacctggtgcgcctactgtcgttgtttccttaa

SEQ ID NO: 17736 - DNA, 2202 bp, Zea mays
  Peptide Sequence Number=SeqID_59515
atggcaagcgctctagacacactgtgcggccaagcgttcggcgcgaggcagtactatctcctgggcatctacaagcagcgcgccatgttcctcctgaccctggtgagcgtccctctgtcagtggtgtggttctacaccggcgagatcctcctcctgttcggccaggacccggacatcgccgcagaggccggcacctacgcccggtggatgatcccgctgctgttcgcgtacggcctgctgcagtgccacgtccggttcctccagacgcagaacatcgtggtgcccgtgatggcgagcgccggcgccgccgcggcctgccacgtcgtcgtctgctgggcgctggtgtacgcgctcgggatgggcagcaagggcgcggcgctcagcaactccatctcctactgggtcaacgtggccgtgctggccgtgtacgtgagggtgtccagcgcctgcaaggagacgtggacgggcttctccacggaggccttccgcgacgcgctcggcttcttcaggcttgcggtcccgtccgctctcatggtctgcttggagatgtggtcgtttgaactcattgtgctcctctcgggccttcttcccaacccaaaactggagacctccgtgctgtcgatcagccttaacactgctgcgttcgtgtggatgatcccctttgggcttagctcagctatcagcactcgcgtgtcgaatgagctgggtgccgggcgtcctcgagccgcccgccttgcggtgcgtgtcgttgtgttgctgtctgtcgccgaagggctaggcgtgggcctcatcctggtgtgcgtgcgctacgtctggggccatgcctacagcaacgtcgaggaggtggtgacgtacgtggccaacatgatgctggtcattgcagtgtccaacttcttcgatggtatccagtgcgtgctttcaggtgtggctagaggctgtggatggcagaagatcggtgcctgcatcaaccttggcgcctactacatcgtcggcatcccctctgcttacctcatagcgttcgtcctgcgtgtcggtgggacgggactctggttgggcatcatatgtgggctcatcgtacagctccttctgctcgcgatcatcactctctgcaccaactgggatagcgaggcgtcgatcaagttccgggacgacgaccgaccgctgctgcgcgccaaggtgccgattggcgtgctagggctgcccttcctctcgggcctcgcggcggggggagacgccaaggacctccgttttgacctctccaccgccttcccctctgtcccggcgctccgcctctcataccgccccaacgaacccctccagccttttgccctctccgtccgcacggggtcccctatccgcgccccattcgccctcgccgccgaattcaacctcacctcctccaacccgcccgccttctcgctcctcttcaagccccggatcggggacttcgccgtcgcaagctccgtccactccccgccgacaccgccgcccacatccactccgcccccgctagcgatcaagatggtcgacctcaccaccaacagcgacgaccacgactgcgaagcacacggtaacgacctctccttcgccgagaatgtattcggggcgaacgtggcggccgccaccgggacgaacggcggcggcgtaggcgcgctgctgtccgggatgcggctcacgaccaggagcgtgctgccactgtggagtaaagcgagcatgtggttccagtgggggctgcgcgtgccgccggagatcaaggccacgcttgcagacaacgggtacgggcgcaaggctgggagcctcgccatcagcaagctgccgctgctggtgatgaacaagatcattatcgagcacacgcccaaggtgccttcacagtctgaagcggacaagaagaggaagaaagacacaccaccggcagctgaggatgaagagttctcactcatgaagaggcaactggataagctgaatgcggagagcacaatgctgcgtcgtgcagtcgaggacttgagtgcagagattggagccggcaaaggcaatgatcgtaagctgccaacagcagtgccacctcaacaacatactttagtgtcgaaaccagatcgtcatttccacataaatgcgaaggaattggtagacagtgggacgaaaccggcctcaaatgaagcaagtgaggagttgaagaaggtgcttgagggccgacggaagtaa

SEQ ID NO: 17737 - DNA, 108 bp, Zea mays
  Peptide Sequence Number=SeqID_59516
atgggtcaggtgttcacaggagatttgcccctttctcacttctcagcaagggacactcaaattctgatcttgaagcagttcttagatgagaaggcgaagaataagtag

SEQ ID NO: 17738 - DNA, 633 bp, Zea mays
  Peptide Sequence Number=SeqID_59517
atggccgtcgtcgcccatgccggcctcccacggcctcgcctctttctccctttctccttccacggaagccccatctattcatcatgcctgtcattggctctgccttcggttgctgtagattatgaccatgggaacccatggtgtcgccctgacactcctcacaacggtgcttctcgaggccaccatcccagtgtcagcagtggatggccttgcgtgggtcgtgcaagaagccacgagttcctcatcaagatcagagcaagggcgtgcttgaaagtccagtgccagttttcttattctgagaatcaattggagcagttaataagtgatgtgactttgaatacaagaaggatggaaaatcaattggagcagttaataattcacaatttttgggcaaaggccttccttgcgactatagaattccctgaatcaaaatttggaattaatagactaaccttcgtatgcctaaaaatatttggaattggtcatgatgagcctcatgtacagatatatcaagaacctcattgccaatcagaagctgcatacttccatctttccattttacagagcgtgcattactttcacactacaataaataagtacccaaatcttattaaccaaagtaaaaagaaatga

SEQ ID NO: 17739 - DNA, 264 bp, Zea mays
  Peptide Sequence Number=SeqID_59518
atggcgaagaagccagtggaggaagcgctcctcgcagcggcagacgagcaggagagcctgagcgtgcgcgaggagctgaagaagcagctatggctggctgggcccatgatcgccggcgcgctcctgcagaacgtgatccagatgatctccgtcatgtacgtgggacaccttggagagctgcccctcgctggcgcatccatggccaactccttcgccaccgtcaccgggcctcagcctgctggggctcaggattgtacaatgtag

SEQ ID NO: 17740 - DNA, 255 bp, Zea mays
  Peptide Sequence Number=SeqID_59519
atggaaaaagataaccacaaccctccgaaaatcttcatcggcgggctcccaagccacgggatcaccacgcgcaagcttaggtcacacttcgcccgctacgggaacgtggtcgaagcgctggcaatggagcatccggacggcctgggccgcggtttcggtttcgtggagtacgaggacgaagcggcggtgctcagggcgttggacgccagggagagcgtcaatcatgacacgtttttccgctgccgggaggtgtaa

SEQ ID NO: 17741 - DNA, 219 bp, Zea mays
  Peptide Sequence Number=SeqID_59520
atgacgagcgcttttgtcgtgtggcgcacgacgcaagttgtatggcaatggcaattggggcaaggagatcgaaatggtttgaagaactttgatcttggtccactgtcccgcatcaaatttctttgtctagccaaaggagagttaaatgcagataattccaaagatgatgaaagtggattttcaatggcgacaatagaaagtatgaagaacttcagttag

SEQ ID NO: 17742 - DNA, 927 bp, Zea mays
  Peptide Sequence Number=SeqID_59521
atggatcgcacacgtgtacacgcaagcacgcggcctgcgatccgccacagcatccccagtccccactgcgccgcgcgctccgaggtggcgcgcccgggcgccgcgaggttccggcgagccgccacgcgggcgacctcgcggccccagtcgacagcctactctgctagctcccggatcgagatggtgcccgcgccgcggcgccggacgggagatcccggcagcccggcacgtgtgcacgcgccgcggcggagcattccttcgtggctaagctacagcgcgcgcccggtcggccgcggacccgcgcggggcgttcgtcgtatcgtgggagtcgtagatcgtagtgcaaccgtgggggagaaggagaaggagatgctgtctgtgcaggaagcacttgaccttgcgtcgtccagctgcggcacgatggacattaccacgtgcgggttcacaccgtgggggcccgagtcgtgccctagcctggagcaggtgatggcgtcgaggccggccgcgtcgtccacggcggcgctggccgaggccgaggccgaggcggcgagggacgcggacccggaggacgaggagcggctccggcgtcagcgccgcaaggtgtcgaaccggctctcggcgcagcggtcgcgcgcgcggaagcagcagcggctggaggagctccgcgaggcggcggcgcggctccgcgccgagaagcagcagctggaggcccggctgcaggccctggcgcggcacgacctcgccgtgcgctgccagaacgcgcggctcggcgccgaggcctccgcgctcgcgcgccgcttccgcgaggcgcgcaggctcctcgcgctgcgccgcctcgcgttcgccgccctgcagccgcggcccggcgtcgctcccgcgcccgcgccgccggcgcccctgctgggactggcctcgctcatgacgtag

SEQ ID NO: 17743 - DNA, 324 bp, Zea mays
  Peptide Sequence Number=SeqID_59522
atggcgccatggcggaggcgcatggcaaattggcaatgcaaggccgcggagtcttccttcctctgctcgttgcgggctgaggtgatcagcaatgcaaatgcaaggccgcggccaagcggatcacggcagcggaagctgcgcggcgcggatacgatagatagggtgggcgacgcgcggctcgcggtgtcatcgggcgggaccctggtggcgacgtgtgtctgcaactgcacccgtgtcgtcggaccggccactcgtcggaaacccaggtcctcgctcctcagaggctacactgcctactggcgccgccaccactactggagctga

SEQ ID NO: 17744 - DNA, 990 bp, Zea mays
  Peptide Sequence Number=SeqID_59523
atggaccgcctcgtcctcttctcccgccgccgccgccgctggatcctcctcaccgcggccggtgcagcggcggctgtcggcgcgtacaagatctaccaccatccggtcgtcgcggagcgccgccaccgcctcgtgcgccttgccgccgccgtcgcggccatcgccgacgccgccacgtcgtccgccgacgcggcggccctggtggtctccgatctcgccgacttcgtccggtccgacgcggacgaggtcccccgcagcgtcaagcagctggccaagctcgctgcctcccccgaggtctccgccaccgtctccaccctatccgaggcagtaacctccgggatgttccgcggggcgggatcctctagctccgggcccggatccggcggtaccgtggccctctccgatcgtttcgtagacaagctcttctctgattcaggcgagcgtctcgcgtccgcggttgccggaagcttcgctcgccatctcgtgctcgcctattactccgctccttcacctcagggggaggcgtcctcctccccgacgatcttcgaagggctcaccaatccgaaacatgatgccaaggtcaaggaattgcttgtttcagtgtgcaatagtgcggttgagactttggtgaagaccactcaccatgccctgtacaatactaatgacaacttggatgcaaatgatagttgtagtggcagtggcaatggcaatggagttggggaaggttgggtggagagggtgtcgagcacattggcagttcctagcaacaggaagtttgtgcttgatgttacagggagggtcacatttgagacggtgaggtcatttctggagtttgttctttggaagctacaagatggggcaaggaagggtggtgactctatggttgacagtgggctgcgtgtcgtgagaaatcctagtcacctaaggcatcatttatatggtggatataccgatctagactccggtgaggcgatagtgtcactcacttga

SEQ ID NO: 17745 - DNA, 537 bp, Zea mays
  Peptide Sequence Number=SeqID_59524
atggaaaaagataaccacgaccctccgaaaatcttcatcggcgggctcccaagccgcgggatcaccacgcgcaagcttaggtcacacttcgcccgctacgggaacgtggtcgaagcggtggcaatggagcatccggacggcctgggccgcggtttcggtttcgtggagtacgaggacgaagcggcggtgctcagggcgttggactccagggagagcgtcaaccatgacacgtttttccgctgccgggaggtcgatgtgaagagggcagaaaagaaagagaccatatctgcacagattagcgctacctctaattcaaatgctggttcaaagatctttgttggtggacttagggataacatcaccaaagaccatctcataaattattttgggaggtttggcacgataactgatgctgtggtgatgtctgatagacagacaggaaaggcaaggggttttggcttcgtcacattcgattcaaaggaagctacagacgaggttttaaaggacaggtttcattatttgatgggattagagtga

SEQ ID NO: 17746 - DNA, 933 bp, Zea mays
  Peptide Sequence Number=SeqID_59525
atggaggctgtgcacacgggagaagacacgtgtgtcaaagcacaggagtcatgcttttctgatcatactcaggaattggggccctctagtgttgttccttttgccgacgcgggggcaggtgtaccttttgttggctccctgcatgtttctcctggtggtaaacatccagcgcgtcaggtggtgttggctccgaaggacattttctcttgccagtctgatgcagctgccttggatgggatctcggctatttcagattcttttactgaggtaccacgtgtgattctccaggctttatgcaaaaagtttaatattaaagctaatatgaaaaattcaaaaatggcacaagctttgtctttgtcagctcgatctaacgatgaggtgatggtcgccttgcaggaggtagtcgattctttctctcttactcagagagtaaagaaaaataatgttgaccttgccgagcagaagatttgtgccaggagaaccaataaggatgaagataccatgatcaaagcacaacgcttggctgccaagcgcaacttggaaacaagtgagttctcctttattacttacaaacccaaaacgattatttctaacatgaaaaatattggggtcaaacttggcaagaatgagaaagaagtgttacaatcagtggttgcgattaagaatatagagattgatagacttgcagttgctgcaaattcaccttccccccataaaattacagaaatagagaatggggaagacgaggagattgatgcagagttatccctcattactcaaaattgggatgacgatgcggttcctagtgctctaaacctatgctatgacctgaatgtagttccgcgcaggaaaaaagcgaatcgggccagatccattgggaagggtactcgcctccccataaaaccagtcaccccttctaaaattattttataa

SEQ ID NO: 17747 - DNA, 456 bp, Zea mays
  Peptide Sequence Number=SeqID_59526
atgacgaataggaaatcgacgaccgaccaagatgtgatcggcaagttgaacgactccgatgatttgacggcagtcgcgacagctaacaggaggacgtgcgtagagaaacagcacggcacgggagcttcgcggcagcacgcgcaggaacaacagaacgctacgagcgacgaggaagcagaaagccacgacaagggagcgtggcgtgcagactgggcaagctggacgcgcgaccgactggagcagcccgcgagcagaggaaagggaggaacttgctatggccgagcaagatccggggcggctgggcagaaggagcagctgcgcatgcggcagctggaactgggagatgggcagggcgcatggcacaggaagaacgccaggaggaggaagaagcagctggactgcgcggctggaggagcttggggaaaggaaagccgcagcagagagctcagcacgtag

SEQ ID NO: 17748 - DNA, 180 bp, Zea mays
  Peptide Sequence Number=SeqID_59527
atggcgctgctgcccccatggtctacctgttgcgagagttgcctcgtcgcactcgtcgtcgggctcgaatcggctagatgttgccgcggcgcctcgcgcgacgcatggttcgatgaagcgcctaaaccgtggacgcatgagcaactcgaatccgagtttgacaggttgatggatttatga

SEQ ID NO: 17749 - DNA, 135 bp, Zea mays
  Peptide Sequence Number=SeqID_59528
atggacaaatttagtggtggggctctacggatgaagtgtacactcggtaaaaccgcgggtgacctaaaacccaatgggttcgggtgcgggtttgaaattgcacccatgggtgcgatcatgggcgggttttgctag

SEQ ID NO: 17750 - DNA, 369 bp, Zea mays
  Peptide Sequence Number=SeqID_59529
atggccaagatgaagtctgcttttattggtaacctgccagaagatgttaatgaggagtacttgagaaagctttttggacagttcggtgaggtagtacgggttgctatctcaagaaaaggacaatgtccagttgcttttgttcacttcgccaaacgttcagagcttgagaatgctatagaagaaatggatggtaaaacggtgtcagttgctcgacctacggcagacaacgacaagaagcgatctcgtgaagaagtggccgatgctgctgacccctatgaatcagctgttaattcattaccttcagctgtcaaggaagtcttgcttcgaattctacgtctaagaattggtactcgatatgatgagcagtag

SEQ ID NO: 17751 - DNA, 1026 bp, Zea mays
  Peptide Sequence Number=SeqID_59530
atgaggagagcaggggggctatcgcgcgcgggccacggcgcggcgccggcggcgggggtcatgcgggcggcggcgtccgcgttcttcgcggggtaccactgcttcacctccgtggcggcgctgctggcgctgccgttctcggcggcggtgctggtggccgaggcggcggcggcggcgccagcgccggcgccggtggcgctgcgcgcgctagcggcgcggctgcgcgccgtgttcgccgccgcggggttcccgccctcgcccttcttcgcgctgctcgagaccaagctgtcgcagaccgtcttcacgttcgccgacgcgctgaccgttcgcgctcaccttcctgctgctcgccaaggcatgcgtcgccgccatgattccgggacgacgccgcgtcgccgagacggcaccggcggagcaggtggcccggcgtcaccgcgctcccggcgtgcggggccgtcgcgcacgcgtacccggccgtgctcgccacgcacgtcctcagcgccttcctcatgctgtacaccaaagcggaggcgttctcgctgcagctgctggcgttcggagcggccgacctgcaggggctcacgtccccgcgcctggacgctggcgctctcggccgcgggcgccgtcgcctactcgctggcggtcggggtcgccgccgtggtctgcaacctcgccgtcgtcgtggccgccacggagcccgggtgcgcgggccacgccgcggtgctcagggcctgcgtcgcgatccggggccgggtgtccacggcgctcgcgctcgcgctgcctaccaacctcggcatggccgccgccgaggcgctcttcggcctccgcgtcgtcgcgcagcgacgcagggacgggaggctcgcgccggccgtcgccgccgaggccttctccatcgcctacatccacgcggtctgcgtcgtgctggagatcatcgtcgcctgcgtgttctacaggagctgcaagaggagcgaagcggacgagctcagagagctcgagccagaggagaagggagacctccaggcttga

SEQ ID NO: 17752 - DNA, 690 bp, Zea mays
  Peptide Sequence Number=SeqID_59531
atggggcaagcctacccacggcttgtcctcctcgccctcgtggcgttgttgtctgccggcctcttcccgcaggcgttagggaacggcaagggcaaggtgcatggcggcggtgccgtcaacccgctggttgccggcatctgctctcgcgccccattcccagaggtttgcacggccacagccgggcgccatgcatccaagtacccggtcatcgacaatttggccgtgctgaacatgcaggtggccgcgttcgccaagcgcacagcgcaggcgcggaagcacgtcgcggtggcggcccgcactattccaccgccgcaggcacaggccctcaggacctgcgacacgatgtacatgaacacgcaggacgccatcggcgcggcacagcgagccatcgcgttcaaggacacgggcaccgcgaagatcatgctgcagctcgctgtccaggacttcgactcgtgtgaccgtccgttcacccatgccggtgtccccaaccccatggccttccatggcaccctgctctatcatgagcaattgatggtcactgaagaggagaaagaaaggagtttatgtagggagatagtgaatcattggatcagtaaagaactccagaggctagaaagattaattgacagggcgagtgagaaagggagtaacagacttgtcctaaagggcatcaggcagactggctcatga

SEQ ID NO: 17753 - DNA, 294 bp, Zea mays
  Peptide Sequence Number=SeqID_59532
cctaggattgcgagcgactaccgagcctgggtggaagagctgagtgtggccttggaaaatctgcaagcgtacaacaatgtcctacatgagaaggtgcatgtgctgtatgaccagctacacccaaatgtgccacctgaagttacagagatgggagctggcgcagcaggagcagatgaaggaggaccctatggggagctagacatcttcagagcgcctcctcctatgaacatcatggatgatcatcctcccaaagctagcagcagatctggagtgaccaagaatgtgaaggactag

SEQ ID NO: 17754 - DNA, 138 bp, Zea mays
  Peptide Sequence Number=SeqID_59533
atggacgtcaaagaggatctgacatgcacagagcagccagtcaagattctggagactgctaaaagatatacccgaaggaagtcatcagagcttgctagtgaacaatgcctagtgaaatcttgtgaagaaacagtctaa

SEQ ID NO: 17755 - DNA, 1500 bp, Zea mays
  Peptide Sequence Number=SeqID_59534
atggggcagtgttgtagcagagctcccgccccggactctggacggggaggcaccaatggttatggctattctaaccaggcaaagccagcgcaaacaccttcgagttacaaccctcctcagcagccggccgaggtgaggtacacgccgccggcgacgaaccctccggtagtcccacctgtgcctgtgccaccgaagcccacggcggacacgattcttggcaaacagtacgaggacgtgcgctctgtctactccctcggaaaggagcttggccggggccagttcggggtgacatacctctgcacagaggttgcctctggtaagcagtacgcctgcaagtccatctccaagcgcaagcttaccagcaaggcagacagggaggacattcgaagagagatccagatcatgcagcatctgtctggacagccaaacattgttgagttccggggagcatacgaggacaagagcaatgtccatgtggtgatggagctctgcgcaggtggggagctcttcgatcgcatcattgccaaggggcactacacagagcgtgcagctgctacaatctgcagagcagttgtgaatgttgtcaacatttgccacttcatgggtgtgatgcaccgtgacctgaaaccggagaacttcttgcttgcgagcaaggaggagaatgcaatgctcaaggccactgattttgggctttccgtcttcatcgaagaaggtgttattttgtacattcttctcagtggtgtgcctccattttgggctgaaactgaaaaggggatatttgatgctattctgcatgaggagattgactttgaaagtcaaccttggccatcaatttctgagagtgctaaagacttggttagaaagatgttgacacgagatccaaagaaaagactgacttcagctcaagttcttcaacattcatggctcagagaaggtggaggtgcatctgataagcctatcgacagtgctgttctttctagaatgaagcagttcagagcaatgaataagctgaaaaagatggccctaaaggttattgcctcaaaccttaacgaggaagagatcaaggggctaaagcaaatgttcatgaacatggacacagacaatagtggcacaatcacgtatgaagaactcaaagcaggactagccaaacttggatcaaagctgtcggaagctgaagtaaagcagttgatggaggctgctgatgttgatgggaatggatccatcgactatgttgagttcatcactgccacaatgcatagacacaagctcgaaagagacgagtatttgtttaaggcattccagtacttcgataaagataacagcggtttcatcacaagagatgagctggagtctgctttgatcgagcatgagatgggtgacacgagtacaataaaggagatcatatcagaagtggacacagacaatgatgggaggattaactatgaggagttctgcgcaatgatgagaggagggatgcagcagccaatgaggctcaagtag

SEQ ID NO: 17756 - DNA, 276 bp, Zea mays
  Peptide Sequence Number=SeqID_59535
atgtggaatcctgttttatttcagctcccctctcatgagttgcttctcttctacaagattggtgaacaccctcaaaaacctaacgtgttcagctggagcggtgccatgaaaagatctctcaatggtggtatgtcctggttagagagggagcaattaccacctggtattcttggccctattaagaataagggcaaagatcaacttgggtcaccaaatctcaaaggcacagaaagtctgcaagagctccaacagataaactcccaggaatatcattaa

SEQ ID NO: 17757 - DNA, 759 bp, Zea mays
  Peptide Sequence Number=SeqID_59536
atggctgagagggaccgggaaagggggataccccgaaagggatccttctccgtgaaggaaccgggctccgagccccccactactgatcaggggttcgaaggctggccctccgaagggttcaacagccgcctcagatcgcgtgggcccgacacccactactggtcaggggggcatttaacgcaaaggtggcctgacacgcgcccccggcagagccgaagtgaccgccgtcactccaccgctccactggccagtctgacagaaggacagcgccgcctgcgccactccgactgcagtgccactcgacagagtgagtctgacaggcagtcaggccttgccaaaggcaccacggcgaactccgccccgcccgaccccagggctaagaccgggaagacggcgaactctgctccgcccgaccccagggctcggactcgggctaagacccggaagacggcgaactccgctccgcccgaccccagggctcggactcgggctaagacccggaagacggcgaactccgctccgcccgaccccagggctcggactcgggctaagacccggaagacggcgaactccgctccgcccgaccccagggctcggactcgggctaagacccggaagacggcgaactccgctccgcccgacccagggctcggactcgggctaagacccggaagacgacgaaactccgcctcgcccgaccccagggctcggactccgccctggcctcggccgaacgacttccgcctcgcccgaccctag

SEQ ID NO: 17758 - DNA, 483 bp, Zea mays
  Peptide Sequence Number=SeqID_59537
atgcaggaggcatgcaactgcaccaagtgggcgcaccccttcgacttccaacgcacccagcatggaggcctaggcccacgcgtcatgcaaccggcgcgccggttgctacgtgcgagccactgcaccgccgctcacgccactaccacgcctcctcgactgcggaaccagtaccgcgactcgaggcaaccctgcggaccgggaaaggggtataccccgaaaagggtccttctccgcgaaggaaacaggctccgagcctccctactgatcagaggttcaaaggctggcccctcggaggggttcaacagacgcctcagagcgcgtgggccccgcacccgctactggtcagaggttcgaaggccggcccctcggaagggttcaacggccccctcaggctactcgggctccacgcccactactgatcaggggttcataggttggccctcgaagggttcacagccgcctcagacacagagcgagggatga

SEQ ID NO: 17759 - DNA, 1881 bp, Zea mays
  Peptide Sequence Number=SeqID_59538
atgggccttcgaaggcctcctgcccgagatcctctgtgggccctttacggccccatggaagtatcgcttcgcgtcttcgccggcccagcactgcgccacgtgcagatggagtacatatcccctgagagaaatctggaggggacttgtggagatcctgggccgttatttgccgaccaaggtggcagcttgttggaccacttgggttatcaagggggaggaattccacaacatgagtctccaacactggatcatggacttttggttgatccagctggtgcaattccgtatttatctacagattctccgcccttcatgaatgatcaaatcacttgcaatgttataaaatctgcttcagctagtccagaatcttgtacaaaacaacctcaagaacctcttaatgtagaatctgatgtacagaatgacgcagctgaacaaaatgttcacaatagtaactctgaagaacagatcacttctctgggctgtgatgtacagcagaacacagaagtaattgatgaactgttgcctccaaagcttcctgaaagcagtggtaatgatatatcaaactttcaaccggaaactacatattctgatgcctaccatggtgactctttgttaactgaaaatagttgtaatagttatcagcttaacaatagtggtgctcctgctgctgatattccaaactctcctgcacttcagatggaaaatgaggagatgggaaagttacatgagacttctcacaatgaaaacagtgggtcagaggatgatcaaatgaatggtaggaagccttgccccattagtggtcgagacaatgagaagtttaacacttcagctgtacctccctcttgggaacagacaaaacaaaaaaatcctggtaccagaaatggaagttcaactccagacgatcaatttgattctcctccagacaggtttgcaagattggaaagggacacaccatctccagatgggagagtatcccctgaaaggtttgcaagactggaaagggataccccacctccagacggggatatatctcgtccaggtgaaagttcacatgtccattctgagacgatggagatggagccagaatatcgcgccaatgatgataccccacctccagacgggaggatgtctcctccagttgaaagttcacatgtccattctaagaagatggagtcacaacaccatgccaaagatgttggtgagttagctcgttttgaaagcccacaggtctccccactcaagggatcatcacagacgatctccaagaaggcattcaccaagacgcagatcacccccagccagtcatcgccatcattcaccaagaagacattggtcaccacctgccaacaggaagactggattggaactggagattcccgtggctttggattcttatccttggataaggatgaggatgctgatgcagcaatccgtgcttgtgacgagactgagtggaatggaaggatcattcttgtggagaagtcaaaagcacctgcatggcgtattcaatgcgaggatcgcctgacaccttatcctgacatacgtgcctcagtcgtcaaggtcgaagaagctctgccttgcccgaccttaggcctcggcctcggaaggaggtctccgcctcgcctgaccccagggctcggcctcaacctcggcctcggaaggtggtctccgcctcgtccgaccccagggctcggcctcaacctcggcctcggaaggtggtctccgcctcgcccgaccccagggctcggcctcaacctcggcctcgggaggaatcgcgtcctcgctcgaccccggtctcgacctcaggagaagtttccgtctcgcccgaacttgggctcggaccgaccgcgccacggggatacatcattaccctacccctag

SEQ ID NO: 17760 - DNA, 336 bp, Zea mays
  Peptide Sequence Number=SeqID_59539
atgtcacgtggtgtggtggcccggtgcccggtggggctgcctggcctggaggaaatatgccgctgcgctgcagtgcgcgtgacggggaagcgtgctgcaccgggtacctacctgcacgtggcgcagtgctgggccggcgaagacgcgaagcgatacttccatggggccgtaaagggcccacagaggatctcgggcaggaggccttcgaaggcccatcctcggtcagtccgtctcgtcggcggcggcgcagagtggaactggaagccaacgtccaagaggctcttcagctgcgagttcgttttcgtttatggattagaaaatgacgtgacgagctag

SEQ ID NO: 17761 - DNA, 672 bp, Zea mays
  Peptide Sequence Number=SeqID_59540
atggccatggcggcgccgttccttgcgacagcgagcaacaacatcggtagcgccagcaacggcgagatcaaacgccggcagacctcggccgacgccctccagcgcacggtgtccgacgtctcccacgagctccaccaccagcagcacggcgtcaacgacaataatcaggagaagaaggcggcggaggccgagaagcaccagcagctgctgcatccggggcctgaggtgcaggacgccaagtgtgagtgctgcggcatgtcggaggagtgcacaacagagtacatccgcggcgtccgcggcaggttctcggggcgctgggtctgcggcctgtgcgcggaggccgtcactgaggaggccgagaagaacggcgggacgctggaggaggcgctcaaagcgcacatgggcgtgtgcaagcggttcaacggcttcggccggacgcacccggtgttgttccaggccgaggccatgcgggagatcctcaggcgccgggccaagctcggacctaggtccaggtccagcatcaaccacagggaggtcagggaagcggataaggccggcagcggccgcacgggtatcgcacgctgctccagctgcatgccctctatcaccgacgacttcaacgagggcgtcgtcgatcaacaaaaactgattctcgatcggttggtcgattaa

SEQ ID NO: 17762 - DNA, 1437 bp, Zea mays
  Peptide Sequence Number=SeqID_59541
atggcagcgaggagctgcgtgtggcgtatgctcatgatcagcgttggagtggttatagtgggtgggcatatgagtagcttaaggttgggggggactttcgtggacagcagttgtcactatgtgacaagggtctgccggtctggagatgtttctgtgctgaatttgcttgttccgcacaagtggatcggtgtaaacatgcttcatcattcaaatagccggaaccaaaggaacaggggatcaagaatcaaaactctactccaagcgaccttgctttcaggtgttgtcttttggctcctgtatcaggtgaagcattcctatgataagaaaaacgagtacttggatgatgctgaggaccagcttacccataatgatagaagcatattccaggcgaggaaacaaaaggcaggtagttacagtgatagcaacgtccaaatggttgtcgacaattctgatgtaacaactaaaccagaggaaggtgatgtagatcatcattctgatacttttgatcataacgagaagactgtagaaactgtgttcgataaagatagtactaacctgcatgaagatgacaagagaaacactgagagttcagaagcggaaggacaagtcaacagtggagatagtaatacagaagctaataataataagaatgaagatgaaaccaccagtcttgtagaaggacgcaagcatgatactgaatccaactctgctgctgagagtaaaagtgaagtcaattcaactggagatgaattgtcccaaaacaatcatgcacaagaggaaaacactagggaggcaagtggaatgtctcatgatgaagtagcgcatggtgacgaatcaaccagtgcaagtggaacttggaatggatcagatggagaaggtgagaaaaaggaggcagttgatactcaaactggttctgaaacccttcctgacgatgccaagaccgaagcaactgatgaccgtggtactaacagcctttctgacgaaacagggaacataccatcagttcatactgataattcacaaaatgatgccagtgaaaaccaaggagatgcaacatccactacctcagattcatctgagcatggcatcagtgaggctgtccatattgaaactggattggaacatggaagtgcaacaacatcatctgttactggatctggtgatgacagggataactcatctgatagctcctctgcaggaaaaaatacggagactctatctggtgatgataagaccaactccagcagcactccgcatgcggctccggatccgtattttgcggagtctagcacactattcatcagtccagcaggctccgtatccggctccgtaaaacgcacggcgtgtacccagactccccatttccacgctttctctctcctctccgcagctctctcgcgggcgcgcgtgcctgctggcgggccccaggtgtcatag

SEQ ID NO: 17763 - DNA, 1029 bp, Zea mays
  Peptide Sequence Number=SeqID_59542
atgccggcagagaggagctcaggacaggagcccccgtgcctgcgcaagaatttcctcgtggcgctgggcctgcgcgccgacctgcccgtgcacttcatcgacgacgagaagtgcttgaaagccaccgacctggaccctcaccagaaccgggcgcttggcgtgcggatggttgcaggatttgcagcgggggagtgctgcgcgcgggcgcttcacggctggggagtacggcgggggagtgcttggcgcgagcgtgcatcgcggcggtcggcgtgcgtgtggacgacggggggatgcgggaggtggcgtgattcgcggagggggagtgctgcgcgcgggcggcgtgcgtgtggtaggcccggcgtgcgggagaagcggaggcggacgtgcatcgcggtgggcgtgcgggagaagcggcgagatgcgaccaatttgctcgcgcctgtagagcctggaccagagttgtcggggaccataattaggggtacccccaagactcctaatctcagctggagccataggaaactccgcatcgcccgaccccagggctcggactcgggcttagccccggaagacgatgaactccgcctcgcccgaccccagggctcggactcgagctcagccccggaagacaacgaattccgcttcgcccgcccccagggctcggactcgggctcagccccggaagacgacgaactccgcctcgcccgaccccagggctcggactcgggctcagccccggaagacgacgaactccgcctcgcccgaccccagggctcggactcagccctggcctcagccgacggtctccgcctcgcccgacccaggggctcggactcgacctcggcctcggaagacagactcgacctcgacctcggaggagcctccacctcgcccaacccagggctcggaccgaccacgtcacaggaggcgccatcattaccctaccccaagctaactcaggctacggggaacaagaccggcgtcccatctggctcgccccgggaccccccggggtcgaaacgccgatag

SEQ ID NO: 17764 - DNA, 99 bp, Zea mays
  Peptide Sequence Number=SeqID_59543
atgggctccaactccaagtcgccgaatggcggcggtgccgatgcctcgaggaggaacgtgaccgtggccctgccgcgaatcccgccacccagctcttga

SEQ ID NO: 17765 - DNA, 258 bp, Zea mays
  Peptide Sequence Number=SeqID_59544
atggcagacgaagccattaggcgaaatgaagaagagtctcatcttgcctcagaagaagcaataaaagtcgaggaggtcactgagcgcgatagacgtatagctgaactgtctcctcctccagagccatacaaccctaacgacgatccagccccgaagggtaccctccatgaaattagaatagtgaatgcaacaattgatgaaggtgtaaatagacttctaagcgaagctgctgagagggtcctgaaggaggataattag

SEQ ID NO: 17766 - DNA, 468 bp, Zea mays
  Peptide Sequence Number=SeqID_59545
atgcagaggccatgcaggatgctgcattatgctatctctgagagggacactgctcaggtggccatgcatgatgctgcacgccgtgcgctctcgcagtattgctcttcgtttggtggggtgcctgagagtcttcacctcaaaatgacccaccatttgaccggcagcaatcctaggttgatcagcatagttaacctagtcatagtgctcaacactgagctggaccatgctctggacgagctgagcagggctcgtgctgagattgcggagctgtgtgctgagcgtgtggagcgccgtcaccaggagggtggttctcccacccccgctaggactcagcactggtaccgctcgccgcctcgtggacaccatgcttacggcacccccaactgtaagaccaagatagatctggatccttatatcattagtgttagagtttgtaataaattcttaagtcaagtgtctccatcttag

SEQ ID NO: 17767 - DNA, 516 bp, Zea mays
  Peptide Sequence Number=SeqID_59546
atgggtgcggggtgcgggttcagactcgcgctgtacaccatgagctctgtcctcgtcttcgccacgtgggcgctggtcggcgcgtgggcggcgcccatgtccgcgctccaggagcggatcgcggaggagtgtaggcgcaaggaaaagaagggatcttgctctggctccgcgaccaagtcggggctcctcgcggagatgcaggtcgtggagcgtgccgcgcgcgagctcaacagcgtgctcgaggagatcgccgaggaggaagaggaggaggacgacgacgaggggcggcgatggcaggggatcgtggacgaggagcgcgcgagggacgtgacaaagcgcgccgaggagctggcggtggcttgccggacgctcgaggagaccggcagcgccctgtggagaccgacgctgtgcggcccctgctggacctcatggccgacccggagggagcgcgggattcgagggtgggggatccgcgaggatggaagggagcgttggggatccgcccgtcaaagctaa

SEQ ID NO: 17768 - DNA, 360 bp, Zea mays
  Peptide Sequence Number=SeqID_59547
atgaagggtgtatcacgtttcggggtaaaagggaagcttgcacccgaaaacgaggaggaaatagaagttgaagaagcaaggacttcaccaccaccaccacctgaagaacctcaggcaggaaactgcttctactttgatatctgtggagcagagcctgattcacctatcactcaaggcaagccccgacaaaagatgatgcttcaagtgggtgggatattttcaaaaataaaatttgatggtggatccatcatggtcgtgatgggttcaacatcggaaaagatgtacctctgccaggtgaagaagcagcaaatttttgttgcttctgttccaaggtggtaccgaaagaagaatcaagactga

SEQ ID NO: 17769 - DNA, 492 bp, Zea mays
  Peptide Sequence Number=SeqID_59548
gcagtgatgccgctggctgagtcgcccccgtggcgccgcaaggccacagatttcttctccacgtccagtgtcaagctgaagcaggcaggccaatcggccggggataatatagttgatgttgctgggaaggttgggtccgtggtgaagagtcggtgggctgtcttccaagaggctaggcagcagcagcagcagcagcaacgtccgccgcatgagacagtgcaagagcgtatcatcactgctgctgcctccactggtttgcttttcaggaaaggcatttcagagacaaaggagaaggttgcagtgggaaaggtcaaagttgaagagacgcctgaagagaaggcaacaaatcatgttagtggtggtgcaaatgatctgttcggcccgaccgttctagggagaagtgtaagggcactggaggcgcaactgaacgccgtaggagagaaaggagcgagagacggagttgttgaactctcggccgttatcacactgtag

SEQ ID NO: 17770 - DNA, 330 bp, Zea mays
  Peptide Sequence Number=SeqID_59549
atggggggtgcggttcgccggtcgttcgacgccttcgctatacttcggagcactatggggcggctgcgtcatcttgtcagcgctggtgaaccccctttgaatgtgctcaccagaaccatgccattgcggtgccgcgccatcgccgtgggcaaccttctgggcgccgtagccaacactggtaagtcctcgggtgttctcgacgcatacaaagggtcacgtagcatcaccaatttagccagatttgggccggaatcgccggtttgccgcacaccggccatggcgccgccgggcatgcgcgcgccgccgcagccctctgtcggagctgagtag

SEQ ID NO: 17771 - DNA, 2043 bp, Zea mays
  Peptide Sequence Number=SeqID_59550
atggttctccttcgtccctggcacatcctcttcttcctcacatgcttctccccatcctttgttcatcctatggaaccaggcacctaccgttgctccaatgtttccatcccatatccttttggcgttgctggtaagagcccctccctgtcccgtggatttaaagttgtgtgtggacacagtggtccgttgctgtccatcggaaacagcatgcttgggattcttgacatctcgttgcttgatggtcttgtgagcatattggctagtgctagttctcagcagtgcataggaggggaggcgaactctagcgttaaccttgaggggaccgtcttcacattctcagacacaaggaacaagttcacagctctgggttgtaacgtggtggccatgcttttgaatggcagcacggggtatagcggtggctgtgcttccttttgctctagcggaaatagcatcatcgacggctcatgctctggtgtggcttgctgccaagcgcctgttcccaaagggctaaagaagctggacttagagttcagtaatattaatataaccaacagcggcatcgattacgggccatgtggtcaggccttcatcgtggagcagaattcatatgtgttttcacttcctgatctgaactacacagttgacacaaaacctcaataccgacatgttgtgctcgagtggtctgtgaacggcagcagctgtgaagaggcgaaactgtccggatcatacgcctgcgcagagaatgcctactgctacaactcatcaaacggaatcggttaccgctgcaattgctccagtggattcgaggggaacccatacctgcaagggccaaatggatgcacaggattagctctgctagtgcttctcctcatccttggcttctggactcactggcttgttaagaagaggaaacttgcaaagacaaggcaaaggtacttcatgcaaaatggtggcctgatgctgaagcagcagatgttttctgaggaggcgccgctgcacatattcacctccagtgagcttgacaaggctaccagcaacttcagtgatgacaatattgtcggcagaggagggtttgggactgtgtacagaggcattctgtccaatcaagtggttgtggcgatcaagaaggcgcagcgagttgatcaaacccagacggaacaattcatcaacgagatgatcattctttcacaggcgaaccacaaaaacgtggtccagctattaggctgctgtctcgagactgaggttcccttattggtctatgagttcatcaccaacggggcccttttccaccatcttcacaatacgtcggtccccatgtcatgggagagccgtctaagcatcgcggttgagactgcgtcggcacttgcatacttgcacttagctgcaaagatgccaattattcacagagatgtcaagtcgtccaacatactcctagatgacaacttcactgccaaggtgtccgatttcggtgcctcaaggccaataccgcacaaccagacccatgtgacaacattggtgcaagggacactagggtacatggaccctgagtacttccagacaagccaactgactgagaagagtgatgtgtacagctttggcgtcgtactcatcgagctactgacaagaaagaagcctatcatggatgatatcgcggaagacattagaagcctagcgctgcaatttagtatgctattccatggaaataagctgttggaaatcgttgatcctgtagtagctgaagaagctggagtcagacatgttgaaacggtttcgaagttggcgttacgatgcttaaggttgaaaggggaagaacgcccaaggatgatagatgttgcgattgaacttgaagcactgagaaggctgatgaaacaacacttcatcttgaagaacgagtctttgcttcaggagtcatgttgcaatgaagaaatgagcatcgacgcaccatcaagtttgttccttggcgttgatggcatttctgacgatgaaggcatggagatcattccacttacatgtccatccaaaattctcacatcctatccctaa

SEQ ID NO: 17772 - DNA, 2607 bp, Zea mays
  Peptide Sequence Number=SeqID_59551
atgcccgtgaaagaaatccacgaaaatcacgcaacaatacacgtccagcagagaccagagtccagactagcaaatgattccttagcagttccctgcatgccttctcgctcgccggcatgccggccgcgtggaagaaaccgccgatcagccgctgacgcggttgcacgaccactcgccctggcgctcattctcgtctctaccctgcctcgcgccgcgcactcgcaggatctggcgctgccaccagtccagccacgtggtgtgaggaggacgatgacgtgcgacaacatcccggagcccttcggcacaagatctagaggcgcgtcgcgtctacccggcttcgaggtgacgtgcgggccaaacagggaggccatgctgtccatcggcggcgatgcatacatgatcgatttcgtgtcggtgtcgggcagctacgtggtcgtcttcgcggagcccatcacgcaggtgtgctacgacggcaagggcaagccgacgccggacactggaaccggcgccaagagctcggaagggacgacgacgacgttcacttggagcttggaagggacgcccttcactttctccaagagtaacaagctggtcaacttcggctgcaaccgcacgctcatggctaacttcttcatcgtgcccggtgattccagcccgctatacaccagctgcaccaccacgtgcaacaccctccaaatcagcggctcttgccttggggaagcctgctgcgaggcccccatggaccaggtgaacggcgccaaggcgttcagcctgtcgttcgaaaggaccacggccaacggcaccggcgaggaggacggaacctgcagcgccgcgttcttcctggacaaagacgagacggtcttcacgttcagtggcgatgaggtacggccgctaaaaacagccttgctgccaccaggtgagcgcaggatggttttggattgggcgattgggagcaccagctgcgagcaaactcagagctacaccttcgagaaactgtgcaagtacggcacctgcgtcgacgcgcccaccggagcgggctatctctgcaaatgccctagcgggtacgacgggaatccgcatatacaaaaaataagggaggttattgacacttttttgtctgcacttacctcatctaatgttcaaggtattaatttctatatgaaagtttctccttcacaacaacctcaaggtatcaacgtgtgtgatcacccggaaaagaacccttgtacatacattaagtattgcattgatttggaaggagttgtttcgtgcgcctgccctgaagggatgagtggcgatggcaggaaaaacggtgtaagtcttgtgcttatggttacaacgaccactgctgcgtcgtgctactgctgggcagtaaagaaaagagagctaggaagaaagagagcggaattattcaggaagaatggtggcttactcctgcagcagagattttcaacaatcacatctcaaggcgaggaccaatattcatcaaagatattcagtgcggaagagctcaaggctgctactgacaactatagcgagagtcgaatacttggccgaggtggacaaggcacagtgtacaagggcattcttccagatcaaactgtagtcgccataaaaaagtccaaggtgttcgatgagagccaagtggagcaatttgtcaatgagattgccatcttgtcacagattgatcacccaaatgttgtcaagcttttgggatgttgtttagagacacaggtaccattgctggtttatgagttcatatctaatggaacactcttccagcacatccacaacagaaatgcaactcgccctctaacatgggaagactgcttaaggatagctgcagagactgcagacgcacttgcctatctgcactccgcgtcttctatacctatcatacacagagacatcaaatcaagcaacattctgttggatgggaacttcgtggctaaaatagcagacttcggtgcatcaagatcagtcccatttgatcaaacccatataactactcttattcaggggactattgggtacctcgatcccgaatatttccaaagcagccaactcaccgagaagagtgacgtttacagtttcggagtcgttcttgcagaactgttgaccaggcaaaaacctatttctgcagcaaggccggaagattcatgtaacttggctatgcatctggtggttctatttaataaagggcgcctacttcaggagatagagccacacattttggccgaagcaggtgaagaccaatgttatgccgttgcagagctttcagtgagatgcttaaacgtgaagggagaagaacggcctgccatggtggtggtggcttctgttttacaagagctaagaaggtcattcaccatagaccaggctgtcggaataaaagatgaatcgatacaggaaaacagtgaacaagaagagaaacatctacatgagtccagatcaattcccagtttgcagtcatcagaaaacgagggcttcaaagacatgctctcccaaccgctagtttacacggatgttcgggatacagagactctggcggtagggcaacaacgagaagagaaaaaactatttgactaccttaggggtttttcaaactag

SEQ ID NO: 17773 - DNA, 393 bp, Zea mays
  Peptide Sequence Number=SeqID_59552
atggcctgcaatgaggttgtcaccccccaacgaggtccctgcgcaccagacccactgcccccgtcgtctctgcagatcgacgagcggtgtagattcaggtttgggtctggggttcgctcgggtctccttgcctcgccgggcccccaccgcggcggttggggagcatggtgggcggggggaggcggaaaagagcagcgaagaaggacggccaaattggatctcattttggatgctttacaggaaagttcggatggtgaacatgaacttgaaagacctaataatatcacgccggatcggaggagtctagctatggagatagtgctggagaggaagaagggttttgagggggtccatgctcaccacacgtggccaatgtcgatgaggctgtcatag

SEQ ID NO: 17774 - DNA, 1038 bp, Zea mays
  Peptide Sequence Number=SeqID_59553
atggatcccaacgacgccttctcggcggcgcacccgttccggtgggacctgggcccgccggcgcccgccgcgcccgcgcctccgcccccaccgccgcccgcgccgcagctgctgccccacgcgccgctgctgagcgcgccgagggagctggaggacctggtggccggctacggcgtgcgcccgtccacggtggcgcggatctcggagctcgggttcacggccagcacgctcctcggcatgacggagcgcgagctcgacgacatgatggccgcgctcgcggggctgttccgctgggacgtgctcctcggcgagcgcttcggcctccgcgccgcgctgcgggccgagcgcgggcgtgtcatgtccctcggcggccgcttccacaccgggagcacattggacgccgcgtcacaagaaggtatacacagcatgtgctgtccgacgagcgcgacgccgcgcccagcgggcggcttggcggaaggcgaggccggcaggaggatggtgacggccggcaagaaggaagggcaagaaaggggttggcgcgaggaagggcaagaaggcgaggaggaagaaggagctgaggccgttggacgtgctggacgacgagaacgacggagacgaggacggcggcggcggcgggtgcagtcccttgctaagctgggcggccacaagtcccctaccaaggtgaccaaccaggtgttccggtacgccaagaagtgcggcgcgagctacatcaacaagcccaagatgcggcactacgtgcactgctacgcgctgcactgcctggacgaggaggcctccaacgcgctgcgccgggcgtacaaggcccgtggcgagaacgtcggtgcctggaggcaggcctgctacgcgccgctcgtcgagatcgccgcgcgccacggcttcgacatcgacgccgtcttctccgcgcacccgcgcctcaccatctggtacgtgcccaccaggttgcgccagctctgccaccaggcacgggggagccacgcccacgccgccgccggcctccccccgcccccgatgttctag

SEQ ID NO: 17775 - DNA, 393 bp, Zea mays
  Peptide Sequence Number=SeqID_59554
atggctcgcttgctttggttctcactcaaaggaaagaaaggaaccctctccacggtacgaccgggaccagaagcatccgcgtctgccgggccccacctaccgtcctttggcatccggagggccgtgcacgcctcggcgtacgacaagaacctggaggaccaggtgcgcccggcgttcgtgccggacgatgtgatcggcagcgccgggagccccgacaagtactggagcccccaccccaagaccggcgtcttcggcccggcggcggtggaccccaagctggccgctggtggcgcgccggacgccggcgcggatgctgcaggaggcacggtgctggaccagaaggtgtggttccgcccgctcgaggacgtcgagaagccgccccccgccgcgtga

SEQ ID NO: 17776 - DNA, 807 bp, Zea mays
  Peptide Sequence Number=SeqID_59555
atgggatcgaaacagaatcgtacggaccggatgccaaaggacggtaggtggggcccggcagacgcggatgcttctggtcccggtcgtaccgtggagagggttcctttctttcctttgagtgagaaccaaagcaagcgagccatggcagccaagatcggcaggtgggtaggagtgagtgactggccactgcactgcccactggtgagggtgagggtggagccgagcgacaactaccgcgcaccagacccacccatcaatccgcctttcggaaagcgatgcgatggaacacggaaggcaatcaggcgaggtcgcttgctgtttgctgcgcggcttgatctgctgctgccatgcaaagatcgaccgttcgggagcggaggggagcggagcggagcggaggaagtcaccaagccaacagtggacaggcaggctgatgaaagggtgcggtgggttttcgattccgtggactcctaccggctgcctcgttttatagcgcccggggccccccgggaccaccaccagcgtgcaccgtgcaggccaccaccgtccgagcgagccggtgccatgccggcgcaccgtcgtacaggtacggcgcctgctgttgctgttggctactgcgtaaacaaaagggcaacggagcagctacggcggctattggggagcagcagcactgacggtgacggcaaccttcccgctcctgatcggaacgtccagctgtgcgtccaactacctgccaacggccagcagcatcgccgtccggatagcgacgtcaccttggaacctccatcaacgctgggccgtctgatctga

SEQ ID NO: 17777 - DNA, 1158 bp, Zea mays
  Peptide Sequence Number=SeqID_59556
atgcggtggctacccaggctgctctctcactccatcgaggtcgggagggcctccgcggcggggaggtccaaccctagtctcgtcaaggcaggatcccatgggttcgccagcggcggctgggatgggtcaccagcggtgccccgggagtggctgcggaagctgtgggtagacgtgctgaagaagcagaaggaggacgcgaggaggtggggcatcggcgcgtcacccgggaacgccggcagcggtgcggagccttcgctatgcgcgttcgcgaattctgtggaggctgcaggagcgaccagggaggcaccttcaaggagctatcagtacgaatacaggggtctcgccggattagtagtgcaaatgagcaaatccaatccccttttgttcatgtttcagctactcagaacaagacggccatttgttgcagaaataacggatgctatgggtaacgagatatttaaggttcgtaggccattttggtggatcaacagctcaatttatgcagaagtggatggtaaggagataggcgtagtccacaggcgttggcacctttggcagagaatctatgacctgtacttagggaataggcaatttgcagttgttgagaatccaggattctggaactggacctttagcctagtggatgaagatgacaaactgttggctcagattgatcgtaattggaggggcatcggctttgagccttttatacagtactgggctttgccattgcctgatgacacagctatgatggttctatctcacaagtcacaacagatccatgttgcactcttcacggatgctggccagtatgctatccggtttggtgatgatgtacaaagcgacaagtttgctcacttaccgtttattatatctgggtatgtgggtgcccacttttcccagttagttaatgtctcacaaaagctccagaccaaagaattgcatgttgttcgccagctgactttgcctgaaagggtagtggctcttgctctcgccatttccttggacagtgattacttctctagaagaggtggctggacttccgtttctgattgccacggagtaggcacacgaaccaccatctgccgtatacaaggaatttctttattctcgttcctgaagaggctagcagttacactcattactgttgtcaggtga

SEQ ID NO: 17778 - DNA, 1239 bp, Zea mays
  Peptide Sequence Number=SeqID_59557
atggaaagagctaaaatcctaatttggcatccatgcctcctgaaaatcttaagacgggcatattttagcaatgtcttgcttgatctcctgagtggaaagcacgttcaaccaaatcatgtgtcctggtgtaccaatggtgagcatcacgtagacacgattggccatcgccacgacacggacaggagaacgtgcttgtgctgctcgcgctctcaagatgccggagatatttatgtgctatatttttactataggggagaggcgaagagtgtcacgggtaccctcaagacgcctaattctcagctggtaacccccatcagcataaagctgcaaaggcctgatggtctgacagaaggacagcgccgcctgcgccactccgactgcggtgccactcgacagagtgagtctgacaggcagccaggccttgccaaaagcgccacggtgaactccgctccgcccgaccccagggctcggactcgggctaagacccggaagacggtgaactccgctccgcccgaccccagggctcggactcgggctaagacccagaagacggtgaactccgctccgcccgaccccagggctcggactcgggctaagacccggaagacggcgaactccgctccgcccgaccccagggctcggactcgggctaagaccctgaagacggcgaactccgctccgcccgaccccagggctcgaactcgggctaagacccggaagacggcgaactccgctccgcccgaccccagggctcggactcgggctaagacccggaagacggcgaactccgctccgcccgacccagggctcggactcgggctcggccccggaagacgacgaactccgcctcgcccgacccctgggctcaaatccgccccgggctctgccgaacgacttccgcctcgcccgacccaggggctcggattcggcctcgcaacaaaggacagactccacctcggcttcggaggagcccccacgtcccccccgcctagggccaacccgccacgtcacaggaagtgccttctttcttcctacccagatcgacttgggacaaaggggtcaaatccggagtccatcaacagctccgccggagggggaatgatggggctccaaagctctgggacaacgggggccccccgctctctttacggaagcaggcagactcagaagagtcgaccgggctccaggtggtcctcctccccgttgcgccgtcctccctcaaaagccagaatacgctag

SEQ ID NO: 17779 - DNA, 207 bp, Zea mays
  Peptide Sequence Number=SeqID_59558
atggctgagcgttgcggcgcggctgttacgggtagagctggaagaagccccccaatcctacggcatcgggcccacagtaattttgggtcttacaaatcctacccccttaatagaaatctcgtcctcgagatttgtaagcaaatgatatatactcatattgttctcggaacatatgcacaaacaaagaaatctcggtatgatgcataa

SEQ ID NO: 17780 - DNA, 354 bp, Zea mays
  Peptide Sequence Number=SeqID_59559
atgcagcggcgcaaggccggaaggcggctgtcgccggcgagcatatccacatccgccgtggtgagtgcggtacagcgaccgggattgtttactgcccggagttatccatggcgacgatattttcgcgaccccgctgtgctatccaacacccaggcactaatctcgacgccggcgacacgaatcacggcggagagagccgtcggcggcgaggactgtaaccttgatgacggagagtacgacctcgtgctggagcaaggagctgctcaggaggtagccccagatccagcaccagagcctgcaccagaggacctgcctgccactgctttggaaggcaagccccgatttattgcataa

SEQ ID NO: 17781 - DNA, 771 bp, Zea mays
  Peptide Sequence Number=SeqID_59560
atggccgagaacaaggctctggttaacgggttgcgcatcgccatcgagctaggggttcgacgcctcgacgctcgtggcaactcacagcttgtcatcgaccaagtcatgaagaactcccactgccgcgacccgaagatggaggcctactgcgacgaaattcggtgcttggaagacaagttctacgggctggaactcaaccatatcgctcgacggtacaacgaggctgcggatgagcttactaaaatagactcagggcggacaatggtttccccagatatcttctccagagacatacatcaaccttctgtcaagatcgacgacacgccccagcccgaggaggcctcagcccagcccgaggaggcctcggcccagcccgaggtaccctcggccgccgaggcacctcgagccctcgtggggaacgccttccgacaaggtttctactggccgaccgcggtggtcgacgccactaggattgtatgctcctgccgagggtgtcaattctacgcaagacagacgcgcctgcccgctcaggccctgcagacaatacccatcacctggccgtttgcagtgtggggtctggacctcgtcggtcccttgcagaaggcacccgggggcttctcgcacctgctggtcgtcatcgacaaattctccaagtggattgaggtccaacccctaaccagcatcaggtccgagcaggcggtggcgttcttcacaaacatcatccatagctttggggtcctgaactccatcatcaccgacaatggcacgtag

SEQ ID NO: 17782 - DNA, 708 bp, Zea mays
  Peptide Sequence Number=SeqID_59561
atgccgggcataccgagggatgtcgctgagcactcgctggacatccgagctggagcccgacccgtgaagcagcacctgtgccgctttgacgaagagaagcgcagggccataggcgaggagatccacaagctgatggccgcagggttcatcaaagaggtattccatcctgaatggttagctaaccctgtgcttgtgaaaaagaaaggtgcgacataccaaaggtgcatgaaccacgtgttcggagagcacattggccgaatggtcaaggcttacgtcgatgacatcgttgtcaagacgtggaaagcctctgacctcctctctgaccttgaaacaacattcaagtgtttgagagcgaagggcgtgaagctcaatcccgagaagtgtgtcttcggagtcccccgaggcatgctcctggggttcatcgtctccgagtggggcatcgaggccaacccagagaaaatcgcggccatcaccaacatgggaccaatcaaggatttgaaaggagtacagagggtcatgggattccttgcggctctgagccgcttcatctcgcgccttagcgaaagagggctgcccttgtaccgcctcttaaggaagaccgagcgcttcacttggaccctcgaggccgaggaagccctcggaaacttaaaggcactccttacaaatgcgcccatcttggtgcccccgctgctggacaagccctcttga

SEQ ID NO: 17783 - DNA, 222 bp, Zea mays
  Peptide Sequence Number=SeqID_59562
atgggtggcttccaccacacgactggcttccacgacacaccacgacctcctggcttccttgacacgcccaagccatctataaaaaagtgcatcctgctccatgaggtctacctccttttggattgcaaggagagtattgagaagcactttggcatcatggctgttcatcttgaatcctatcctcaggcagtatctccttggctagacaaggtgcataaatga

SEQ ID NO: 17784 - DNA, 261 bp, Zea mays
  Peptide Sequence Number=SeqID_59563
atggagctcgcctctgccatgaccgccctctgcccccttccttgctgttcttattgcagcccctctccatgccaagctcgccctccttctgtgcccagccctagctcgccccagcccctctccctggctgcccttgctctgttttcccccagccctagccgagctcgcccctgccctaagttctcaaggcagcccctctgtttttccatgattggaagaaaggattcttgtgagtgtgagaagaagcaaatcccagcataa

SEQ ID NO: 17785 - DNA, 1449 bp, Zea mays
  Peptide Sequence Number=SeqID_59564
atgctccccctctcgccgtccctcctctccctgatccttctcatccccttcctctccctcctcctcctccaccgttcctccttcccgggctcctcttgctccccggccctggcgggggccgcttctcaccggggaagaagcgcggccggcttcgagggggacctgcgcgacatcgagttctcctggaaccacctgccgttctcggcgtccaggccgccccccgccaagctgaagatcgccgtgttctcccggaagtggcccgtggccacggcgcccggaggcatggagcggcacgcgcacacgctgcacacggcgctcgcggcacgaggccaccgcgtgcacgtgttcacctccccgccgccgcacaccgaggccgcgccatcgccctccgccgacgggccccagctccacttcctggacggcgagccggggcagtggcgctgcgacgaggcgtggaagctctacgaggccgagggagagaacgaccccttcgacgtgatccactccgagagcgtggccgtgttccaccgctgggcgctcggcgtggacaagctggtagtgtcatggcacggcatctcgctggaggccctgcactcgggcatcttccaggacctggcccgcggcgacgaggagcccaggtcgccggcgctgaaccagagcctgggccagtccgtgtaccgcgtgctctccgaggtgcgcttcttccggagctacgcgcaccaggtggccatcagcgactcgacgggggagatgctccgcgacgtgtaccagatcccctcccgccgcgtgcacgtcatcctgaacggcgtggacgaggcgcagttcgagccggaccccccgctcgggcgcgcgttccgggaggaggtcggggtgcccaagggcgccgacctcgtgctgggcgtgtcgggccggctggtcaaggacaagggccacccgctgctgtacgaggccttctccaagctggcgctgcgccacccgaacgtgtacctcctcatcgccgggaaggggccctgggagaaccggtacatggacctgggccgcaacgccaaggtgctcggcgccgtgccgccggggaagctgaaggcgttctacaacgcgctggacgtgttcgtggacccgacgctgcggccccaggggctggacctgacgctgatggaggcgatgcagtgcgggaagccggtggtggcgacgcggttcccgagcatcaagggcagcatcgtggtggacgaggggttcgggtacatgttcgcgcccaacgtggagtcgctgctggagagcctggaggccgtggtggcggagggcgcccggcgcgccgcgcagcgcgggcgcgcgtgccgggagtacgccaagtccatgttcgcggccaccaagatggcgctcgcgtacgagaggctcttcctctgcgtcaagaacgacaccttctgcgggtacccagccgagttcgattga

SEQ ID NO: 17786 - DNA, 264 bp, Zea mays
  Peptide Sequence Number=SeqID_59565
atggacatcaagcaaaggtttagagggatgtcttcagaggagctgagggcgagcttttcagatttggcggtgggttcgccaacccagacagagggcaaaacgtatccttcaggtgatttgtcgtctgaggagatctatgtgtgggttggatgcaacacagcaaagtttggccatttatacgctgctgcaaccactaggccggataacagagcagctgcggagaggaagctggtggagaagctgaaagctaattttaacagctaa

SEQ ID NO: 17787 - DNA, 333 bp, Zea mays
  Peptide Sequence Number=SeqID_59566
atggacccaaacaaacgtggatccggcaccgcgctatcaccatgggcgcgcgggctccacggcgatggcgattgcgacgatgtggtaatcgcgacaaagcggcaggggcaggcagatcatgcaatgttcggtagtgctcggctgcacagttttacagcagcagcaccagctgtttgtacaggttgtgaccttcttccggatgaggaggttaagctgtcaaatgggcagatggctgacctgataccttggtgcctgcccaacacaggctcagtggaaagggctgtagtacgggaggctggactgggaaggcaacttccccacatctctcactga

SEQ ID NO: 17788 - DNA, 774 bp, Zea mays
  Peptide Sequence Number=SeqID_59567
atggcatggcggtgccggtgcgcgcggatttcgcaggtggagaagcccaaggacgtgtcggtcacggacagggcggacccgaacatgatcctgtactacgagggctacaacttcaccatgtacctcttctggtcgccgttcctggtgaggtcggaggaggacgtcgccggcgtgttcaagctgtacctggacgagcccgacagcaggtggctgtccgtcgcgtcccagctcgactacgtgctgctctcgggggccaactggttcacgcgccagtcctacttctacgagggcgggcaactcgtcggcggcgtgtacgtcccgctcaacttcaccagcagcctcaccaaccagcactcgcaccggatggcgttccggacggcgctgcgggcgctcgccggcgccaggttccggggcaaggtcatcctgcggacgctgtcgccgatgtcgcacttcgagggcggggcgtacgacgccggcggggactgccggcgcacgcggccgtacagggccgacgagacggcgccgatgggagggctggagctggagttctacacgtcgcagctggaggagttcagggaggccaagggcctggacgttgtgctcatggaccccaccgccgcgatgctgatgcggcccgacggccaccccagccggtacgggcactggccggacgagaagcggacgctctacaacgactgcatccactggtgcttgccaggacccatcgacgcatggaacgacatgctgcttcacatgctgtcacattctagttaa

SEQ ID NO: 17789 - DNA, 1422 bp, Zea mays
  Peptide Sequence Number=SeqID_59568
atgaagaagctccactggctggtgcggttcctgttcgggccggtgccggtctacttctcggcgctggccatcctcatcgtgctcaccaacgcgcagtacttcgggctggtgggcgtcggcgtggcgccgcgcaccgcgaagctggcctcctcggcgcccgtggtcagcgtcatgaagtactgcgacatcttccgcggcgagtgggtgccggacgcggaggcgccctactacaaccacaagacgtgccacatgatccaggagcaccagaactgcctcaagtacggccgccccgacctgggcttcctcaagtggcggtggcggccctccggatgcgagctgccgcgcttcgacccgctgcagttcctgcagttcgcccgcgggaagtcgctggccttcgtcggggactcgctggcgcggaaccacatgcagtcgctgctctgcctcctgtcccaggtccgttggttacttcgtttatgtgctcggctgctcctgagtgatgatgatgacaacggcctgctctgccgccgagacgcatcagactttgcgcagctgaagcttccacttccacactacaccacaccaccagagcagagacagccacatgcaagcagcgaactgacctcgcgaccactgtgtctccatggctggctgcaggtggcgtatcccaaggacctgtcggcgaacccgtcggaccagaacaaggtgtaccactaccgggcgtacaacttcaccatcagcatgttctggtcgccgttcctggtgcgcgcccgggagcccgaccacgacggccccgcgcacacgggccactggagcctctacctggacgagcccgacgacaagtgggtgtcccagatgccccgcttcgactacgtgctggtgtcggcggccaactggttctcccgcccctccctcttctacgagcggcggcgcctcgtcgggtgcagcttctgcagccgccagtacggcgtgcccgacctgacgctctactactcgcagcgccgcgcgtggcgcgtggcgctgcgcgccatcaacgacctggagcgcctgcgagggcgcgtcatcgtgcgcatgctctccccgatgtcgcacttcgagaacgggacctgggaccacggcggcgactgcaggcgcacgcagccgctgcgggcgaaccagaccgccatggagggccgcgacctgcacttctacaccgcgcagatggaggagttccgcgccgcggagaaggccgccgccgagaaggggcggcgcctgatgctcatggacgccacggcggcgatgctgatgcggcccgacggccaccccagccgctacgggcactggcccaacgagaaggtgcagctctacaacgactgcatccactggtgcctcccgggacccatcgacatctggaacgacatgctcttccagatgctcctcgcctag

SEQ ID NO: 17790 - DNA, 339 bp, Zea mays
  Peptide Sequence Number=SeqID_59569
atggtgggtccaactggtgctagccttacatcattggagacctgcagctcggagagcaagcccccgaggcggcaggtcccagggccctacaggtctgggactctcacgtcgagcctcctaactctccaaaacacctcaaggcaggaagacactagacagggcttatggcgtgcgccttggctcactaggtttctggtgagcttcttcaacgataatggcaaccccagatacttacaggtgaagttcatagctgcagtatatattggttggcttctatggcattgcctaggcgatcgccaggcggtggctgagcgcctagttccgccttaccgcctttaa

SEQ ID NO: 17791 - DNA, 162 bp, Zea mays
  Peptide Sequence Number=SeqID_59570
atggagaagaagaaggtggcgatcccgctggtgtgccacggtgactcacgaccggtggtggatctcttctatagctccgtcacacccgttcgttacttcctcatcagcgccagcaagggtagaaaacagttggcacttggcaggatgtaccttaatggatag

SEQ ID NO: 17792 - DNA, 285 bp, Zea mays
  Peptide Sequence Number=SeqID_59571
atggagacaataacgagtggtcagaagtacagagattgcagacaaggtcattatatgagccatcaaattgcgatgacagttgccacaaatccagtttcatatgaaggttgcatccaaggttattcaattggatcagttaaggttgatgatactgaagtcatcagttttttgctgcaaactgaaataattcctctgtgcttacgaaccatggagatgggtagtgagctatccaaaactagtttggggatcaaggagaggattccaatatcttgtcatcgcggctga

SEQ ID NO: 17793 - DNA, 261 bp, Zea mays
  Peptide Sequence Number=SeqID_59572
atggccatagcgcgatactctgcctcggcgttggagcggcagacgacagactgccgcttcgaggacgaggagacaagtgtagacgaccaacttagagatcgaagagggccaaaaaagaacatcgtggtcgagggtgccctagaagtagcgaagaatccacttggcagcagtgaggtggtgctctcttggggtgtgcttgtgaaggcacacatgctagaccgcgtagacgatattgggcggggtgaagatgaggtactgtag

SEQ ID NO: 17794 - DNA, 276 bp, Zea mays
  Peptide Sequence Number=SeqID_59573
atggaaattaaggaaagagaaatgaaagatgtgaataaatgttgtcccaaaaactttgttttctgtccactaaaatatatcaaggcaataccaaaccaatatgttatcctaaaggaaaacctgagtccaaaggactgtaatcttgctgacggagagtacatcctcgtgccggagcaaggagctgctcaggaggtagccccagatccagcacccgagcctgcaccagaggacctgcctgccactgctttggaaggcaagccccggttttatgcataa

SEQ ID NO: 17795 - DNA, 372 bp, Zea mays
  Peptide Sequence Number=SeqID_59574
atgcggcaaaattattggaacggcggagtcgtgaatgtggttgttgtcgaggcgattgatgtcgacacccatggtaagaatgatgatgacgcgagtctaactcacgtagaacagtacgtcagcgaagttcaacggcgaggtttgagcagggctgatgacgctgtggtggaaatcaaaggcggtgatcatcgcgaactagtctacggcaaggtcgagaagaaagccgacacgacaaactcgcaggtgcgggagcatgaccaaaatagggacatgggtgtggccatgatcattggcgccgggaacaaaggcaggggagaacgacctatcgggatcaccgggacgacaaacaaaaccaagccgacaaggtggtga

SEQ ID NO: 17796 - DNA, 840 bp, Zea mays
  Peptide Sequence Number=SeqID_59575
atggccgagctggaaaccaagcaccgacgagctgaagcaagatttaatctgggccaatcgcgagctgaagactgcgagcaggccacaaatttgacgcagcagacaacacaggcggggtcgacggcgcgcagactgggcgagcagagggacacgctggtgacgaagctccacggcgaggaagggcaccggcaagaattcccggcgcgcgacctgcagaggaacacgcacgcgcggccatgggagttgagctgggcgcgcagggaattcagccgaacaagcgccatgagagcgaccaagctagggcaggcgctggtggctgggcgccatggcgagcagcaggaagctgcacggcggcgcgaggagagaagcagacgcgcggctgtgcgcgcagagagggatcgagcagggcctcagctggggaaggagcggctaggcgcgccatgggagtccagggcgcggcgagctgggccggagacgcgcacagagcagggcacgcgcggttggagaagagagcggcgttggagagagagcgcggtggccagggagcttcacggccgcacggtagttttgagtgcagcgtcttctattgacccctgttcccaccagagaaagcaccggaccgggggtagctctttgggtggagcagaggaaggagccgagggagcacgcagaagacgccgagaggagggagatgaaggagctccggccatggagcagcggcgcacggcgagggagatccacgaggtggggaagaagacattagagatgggcgcgcagcgagccagggctgaagctcacgccggcgaggaagaagacgcagggtgccgtgggagctcgtag

SEQ ID NO: 17797 - DNA, 216 bp, Zea mays
  Peptide Sequence Number=SeqID_59576
atgtcgaagtcgtcttgtgtgactttcgatttcgaaaatggaaaatgttgcagttttcccattgtcgtgcagttccacggcggtggctttgtcaccgggagcaacactatcgtggccaaagacgccttctgcacgagagtcgccaaactctacgatgtcattgtcttcatctgctcaaggtccatgttcaccgattcccttttgttttttacatga

SEQ ID NO: 17798 - DNA, 324 bp, Zea mays
  Peptide Sequence Number=SeqID_59577
atggatcaggggaaagagcaaggcgccggacgaggagcggccggcaataataaggagcggcaggaggaggaggtgctgctggtgcacagccaggtgcggcggatcaagaaggaggacgaggaggccttcagggagcgcctcctgaagctgcgcctgctggagacccggcccaacaccggcgccggcggcgtggcctggcgagccccgcgctccctgtcgccgctccgccgtgccggcagcgccatcatcccggtcccgctgccatgtgttctcaaatcatgtgatccaatccaagaaccgaagccagccatccttcgtgcatga

SEQ ID NO: 17799 - DNA, 135 bp, Zea mays
  Peptide Sequence Number=SeqID_59578
atgggggttcagccggggcagagctcgtcgacgtcgctctcttgcgtcatgattcggaccaaggttgagatatggatgggtgttggcgagatggtaatagagggtaacatcagtgcttcaaatatctgcgcctag

SEQ ID NO: 17800 - DNA, 243 bp, Zea mays
  Peptide Sequence Number=SeqID_59579
atggggcaagacaggcttgcaccagcctacggcgcaccggactgtccggtgtgccaaaagagtcagcgaagaaatccaacaatggggcaagacagacttgcaccagcctacggcgcaccagactaccgaacagtgtccggtgcccaggctggcgcgcccaacgaactggccgctcttgggaaaactcagcgtccgcggctaaaattcatcggactgcccgatgtgcaccggaccatccggtga

SEQ ID NO: 17801 - DNA, 1926 bp, Zea mays
  Peptide Sequence Number=SeqID_59580
atgcggtgggcgcccgggcgggcggcctacgtcctcctcgcggcggcgctgtggtgcgcctcactcaccccgcgcgcggcgccggacctcgcggcggaccgggcggcgctgctcgcgttccgggacgcggtggggcagcggctcccgtgggacgcggccgcggcgtcgccgtgcgggtggcgcggcgtcaggtgcgaccccgccgcctcgcgcgtcaccgcgctgcagctccctggggccagccttgtcggcgcggtgccgctcgggacgatcgggaacctcacggcgctgcggacgctatccctccgcctcaacgcgctgtccggcggcatcccggccgacatcgggagctgcacggagctccggcacctgtacctccaaggcaaccagctggatggacaggtaccggaggggttcttcgacctcgggctcctgcagcggctcgacctctcgaacaaccgcatcgccggcggggtctcgccgggcttcaacaggctccagaggctcgctactctgtacctggagaacaacagcctgaatggcacgctgccgtccaaccttgacctcccgaagcttcagcttttcaacgtgtccagaaacaacctcaccggccctgttccaaagtcgctcgcccgtatgcccgccagcgcctttgatgggacagggctctgtggtaaccctctagccccgtgcccaacccctccgccgccgccgtctgttccggccgctgctaatggtagcatcagcgcaaagctctctactggtgcgatcgccggcattgctgcgggtgctgccgtggcgttcttggttctgatcgccgtgatcttgttcctctgctttcggtgtcagaggacaatggccgaaaaatccgcggagacggcagccgacgccgacctggacgggtctcccgtgtcggtcaccgtggcgagcatggacatgaagaacgcgacgaggcggtcctcgcaggccacggcaggcaacagcgacaagaagctggtgttcttgggagcggcgccggacgcgccgtacgatctggagtcccttctgcacgcgtcggccgaggtgatcgggaagggctggctgggcacgacgtaccgcgccacgctggagggcggcgccaccaccgtggccgtgaagcggctcagggcggcgcccatcccggagcgggagttccgggacaaggtgatcgcgctgggcgcgctccggcacgagaacctggtgccggtccgcgcgtacttctacagccgggaggagaagctgatcgtgtacgacttcgtgggcggcggcagcctctgctccctcctccacggcgggagccccgagcggctggacttcgaggcgcgggcgcgcatcgcgctggcggccgcgcgcggcgtcgcgttcatccacggcgccggcccccgctcgtgccacggcaacatcaagtcgtccaacgtcctcgtcgccgacgcgcgcgacggcgcctacgtgaccgaccacggcatcctccggctcgtcggcgcgcacgtgcccctgaagcgcgtcaccgggtaccgcgcccccgaggtcaccgacccgcgcagggcgtcgcaggagacggacacgtacagcttcggcgtgctgctcctcgaggcgctgacggggaagccgccggtgaactcggtccccgggagcaccggcggcgtggagctgccgctgtgggtgcgcacggtggtgcaggaggagtggacggccgaggtgttcgacgccagcatcgcggtcgaggagcgcgtggaggaggagatggtgcggctgctgcagctcgccgtggaatgcaccgacgaccggccggaccggcggcctcggatggccgaggtggtggcgaggatcgaggtcatcgtccggagcgcggagctgaaggcgaaggccgacacggaggatgacgacttccatagcatctctccctaa

SEQ ID NO: 17802 - DNA, 312 bp, Zea mays
  Peptide Sequence Number=SeqID_59581
atggcgcgactgctccctgccgcgcgctcttttctgcaccgcgtccctggcctctctgcccgagctcatccatactcgcctgcgcgcgccttctgccccaccgtcttcagctcgcccaggacggtgttccggtccctgctcgaccacggccctggtttcagcacagctctgcgcacccaagaatttcctgctcggactgtgcctctccagcgcggcgcccatgccgagctccttgcgcacaaccgcacttccttcctgctcggcctcctctccatttttctccagccatggtgtgcgctgctcgcattttag

SEQ ID NO: 17803 - DNA, 134 bp, Zea mays
  Peptide Sequence Number=SeqID_59582
atggcgaacatcatccgcaagtgctgggacccgaacctggataagcgccctgacatggatgaggtggtgcggttgttggaggccctcgacacaagaaagcgcggtggcatgacaccaaaaggccaggcgggcgg

SEQ ID NO: 17804 - DNA, 333 bp, Zea mays
  Peptide Sequence Number=SeqID_59583
atggaggcgatgcacgcgccggtctacttcgagacatacgaggtccgcggcgacatgcccacggtccccgccgaggtcatcgagtccatccgccgcaacaaggtctgcctcaagggcggcctcgccacccccgtcggcggcggtgtctcctccctcaacatgcagctccggaaggagctcgacctctacgccgcgctcgtcaactgcttcaacctccctggtctgcctaccaggcacgacaacgtggacatcgtcgtcattcgggagaacactgagggcgagtactcagggctcgagcatgagctgatacgtgcatatggccagatgtgctaa

SEQ ID NO: 17805 - DNA, 618 bp, Zea mays
  Peptide Sequence Number=SeqID_59584
atggggtccttcaggcgtgcgctcacgttggttcactacgcatcgggacccacctgtcggactcatccctatcccaagtccgctccgcgcaacaaattcgaccgcagcctgcgcgagttcatcggagcagctccgaacccgatcctcattccccctttctcggaccgttgcggtgccctcgcggcgagattttggccgccgctcggcttacctgatgtggagattggagaagaaggtccgccgcgaacgaaccacgggtacgccgtcgctagtggctcgacagtgggcctgggggcttcgtcggttatcgtgggatgtgttcgatgcggcgccagggtcgatggccaacctggtggcggggaatttctcgccgtggacagcatatgcctgggttcgccgaaatccaaggatagtgccctctgcgtcgtgttcgccggtaaggatactatccatcacttcgcctttcttcccccaaggtttagcaccgttcgcgtttggattttgacgccagtgcgctgggcggaggaaatccagcgagctcccagggtggagctctgcttcgtcgccgccctgctgattggggaagaagatgacacagtgccgttagatccaatatga

SEQ ID NO: 17806 - DNA, 333 bp, Zea mays
  Peptide Sequence Number=SeqID_59585
atggtagagaagcacatgcctcttcccgtggtcgtcgacatcatcgatacccatgtttatgggctccaatctaaagcactaagattgtcttttgctacaaaccttccttctcttgaggttaccaatgaatcgagtaattccgtgtacgagagagagctcttcctcgacgagttcaacatgaggttcgacgagtgggagactcgctgggactggcgcttctcgcctcggccagcgatggagccacaggatgccccattggtcgcatctacgctcatcgacagcaccactgacgagcccagcctcgtccccacgctgggccgcgccaactcctga

SEQ ID NO: 17807 - DNA, 1464 bp, Zea mays
  Peptide Sequence Number=SeqID_59586
atggtcacttatcaaacagacctgtttttagataaaaacatagattatgctgtaaatgaacatcaagttttgttaaatgcctcaaaatgttcatttgtgtcaagtctttttccaccgtgtgaagaatcaacaaaatccacaaaatttacttcaatcggctcaagtttcaagcaacaattgcagagtctgctagaaactctgagtgcaacagaaccacactatatccggtgcataaaaccaaataatgttctcaagccagcaatatttgagaacagtaatgttctccagcagcttcgttgtgggggagttttggaggcaataaggataagctgtctgggataccctactaggaggacattttatgaatttgttaatcgatttggtattctacaacccaaagtccttggtcgaagccatgatgaagttactgctgcaaaaatgcttcttgacaaagccaatcttgcaggctatcagattggaaagacgaaagtatttcttcgtgctggtcaaatggcagagttagatgctctaaggacagaagttttgggactttctgctaaaaaaatacaaagcaaacttcggtcatttctggctcgcaaaaaatatatcgagctgcaacaatgtgctacacaaatccaggcaatatgcaggggaacaactgcaagaaggcgttatgaaaaccttcgtagggatgtagcttcattgaaaatgcagacctgctaccgtatgcactatgcaaggaaaaactatgtagaaatctgttctgcgtcaactaatatccagtctggtttacgtggtatgggtgctcgcatcaaactccgcttgaagcggcaaacaaaagctgcagtgattattcagagtcgatgccgctgttatttagtacgttcacgatatgttaggctggtgaaggccacaattacggctcagtgcggttggagaagaagagtggccagaaaggaacttcgaaacctcaaaatggctgcaaaagagactggtgctctacaggctgccaaaagcaaactggagaaggaagttgaggagcttacatggcggctacagctggagaaacgtattaggatgttgatactgggccgaaactctaagaacaacgaggaggaaagactcttagtgaagatgttgggaaactgtgagcttgtcaggattgttagagtggacgcattaaccagttcaacccaaaagcttaagctattaggagaagcctctaccaggattcaaactcgagacctctggctttggtaccatattagagtggatgcactaactagttcaacccaaaagattaagctattagaaggtaggaatctacttatacacttcaacaaggacgtgaggaacacggacatccccaatggcaatgcactcacagacgaagtgaagatcgatctcaacatgcttcatgcgctagtgctagatggggttgatggagagggtagacgacgttga

SEQ ID NO: 17808 - DNA, 1452 bp, Zea mays
  Peptide Sequence Number=SeqID_59587
atggcggcagcaacggcaactgcaactgcaactgaggctgccggccaccaccaggagcagcagcagcgtttccgcgtcgtcgacacggccctggtggcgcctgcagctgctcccgcactgccgccgcgctccatcccgctcaccttcttcgacgtcaagtggctgcacctcccgcccgtggagcgcgtcctcttgtaccgcctctccccggacgccgacgtccccgccattctctccggtctcaggacctccctctcccaggccctccgcgccttctacccgatggccggccacgtccgcatgccggccaccaataaccgccgccacgagctgtgctaccgccccggcgacgccgtccccttcaccaccgcggagtacaacgtggacatcgaccacctcatcgccgacgactccgtccccgtgcaggtggcccagctcgcccctctcgcgccgcacctgcctaagggccgcgccgtgctcgccgtgcaggccacgctgctgctcggccgccggggcctcgcggtcggcgtcaccgtccaccacaccacctgcgacggcgcagggtccacgcacttcctccacacatgggccgccgccgcagccgcaagagcagatgagcacggtcatctcgtcatccccccgccccccgtcatcgaccgggaactcatcccggaccccaggggcctgtacgacgtgtacctcagaagcatgccgcccatggtgtcccaggacgactttgagttcgtgctgggcaagcctcaggatcccggcgaggacaaggccctggccacgttcacgctgtcccagcagcttctgcagagcatcaagagcgcggtcgcccacgaggcggcgcggcgtggcatggtgacgccgccccggtgctcgtcgatcctcgccacctacggcttcatctggtcctgctactgccgagcccgaggggcggcggcggcggcggcagagaggagctacttcctcttctccgtggaccagcgctctcgcctgaagccggccgccgtcccggagaagtacctgggcaactgctgctgcccggccatcgcgagggcgcgggcggacgaggtgtccgccgggggcatcgcggggctgttcgcggcgtgcgcggcggtggcggcggcgttggaggaggaggtgcgcgagggggcgcaggagcggtgggacacgtgcgtggcgcgggtgaaggaggccgcggccaaggggatgctgtccgtggccggatcgcccaggttccgcgtctacgacctcgactttggattcggccggccggagaaggtggacatggtgtcggtggccaagaccggcgccatctccgtggcggacgcgcgtgttggaggtggaggcgtggaggtgggtatctctctgccggtggcgtcgggtgacatggaccgcttccgacagagcgttgcagacgggatggagtggctccggttgctgtga

SEQ ID NO: 17809 - DNA, 228 bp, Zea mays
  Peptide Sequence Number=SeqID_59588
atgtatgtccagttcgagttcatggtgatgtgcgccggtaagtacgctgacgtgtcatggatgccggtgttcccgccgggcaggggggcggaggtgttccaggggcaagtgatgcactctgtggactactgcaagctcggcgaggagggagatcatggagctgatgaggaggaagaaggtggtggtcatctggtacaagaagagcagcatggtgacctaggatcgtga

SEQ ID NO: 17810 - DNA, 2274 bp, Zea mays
  Peptide Sequence Number=SeqID_59589
atggcgacgaggtggaggaggtcgctgctctgggtcgccgtcgtccagttcctgaccctgtgcgtcgccgagcatctctcctacattgtgtatctgggatcacatgcatatggccgtgatgcgtcggcggaggagcatgctcgcgcaacccagtctcaccaccacctcctggcatcgatcctcggcggcgacgaccaccaccaccatgagacggcgcggcagtccatcttctactcctacaccaagagcagcatcaatggcttcgcggcgcacctggaggagtcggtcgcgcagcagatcgcggagcaccctgaggtggtggcggtgctggagagcaagatgctcaagctgcacaccacgcggtcctgggacttcatggacctggagcgcgacggtcacgtcctccctggctccatctggaaccacgctaggttcggacaggacgtcatcatcgccagtctcgacagcggagtgtggcccgagtcccacagcttccaagacgacggcggccaagtgccagctcgctggaagggctcctgtcaagacaccgttaagtacggtgtcgcctgcaaccgcaaactcatcggcgctaggttcttcaacaaagacatgctctttagcaacccagccgtggtgaacgccaactggacgcgcgacaccgagggccacggcacccacacgctctccaccgccgccggtggctttgtgccccgtgccagtctcttcggctatgccactggcacagccaaaggcggcgcgccgcgtgcgcgcgtcgccgcttataaggtttgctggtcgggagagacgcgcccctcgccgatgacgtcaagtcactcttccacgagcctgcccatgctcggctcgctccacgccgccatccacggtgtctccgtcatctgctccgccggcaactccggcccgtacgatgacaccgtcgtcaatgccgcgccatgggtcaccacagtcgccgccaccaccgtcgacagagacttccccaacgttctcaccctcggcaatagcgtgcgccttaggggaacgagcctcgagtctactacgctgcactccagcatgctctacccgatgatcgacgccgcgcgcgccgcgcgcaccacctctaacccgtacgacgcggccagctgcgggctcggcaccctcgaccctgctgccatcaggggcaagatcgtcgtgtgtcgccgcggcggcggaggcggaggcgacgtctcccgagtcaccaaggggatggccgtgctcgaggccgggggagccgggatgatcctcgccaacgacaggatggacggtgacgacatcgtcgccgacccgcacgtgctcccggccaccatgatcacctacagcgaggccgtctctctgtacggctacatggagtccaccagcaaccccgtcgccaacatctcgcccgccaagacggaggtgggcgtcaagaactcgccgtccgtggcgggcttctcctcccgcgggcccagcgggactctgccgtacgtgctgaagcccgacatcgccgcgccgggggtcgacatcctggccgccttcaccgagtacgtcggccccacggagctcgcctccgacaagcgccgctccgagtacgccatcctgtccggcacgtccatggcctgcccacacgtctccggcgtcatcgctctcctcaaggcggcgcgccccgagtggagccccgccgcgatgcgctccgcgatcatgaccacggcgcgcacccaggacaacacgggagcgcccatgcgcgaccacgacggcaaggaggccaacgccttcgcctacggcgccggcaacgtgcaccccaaccgcgccgtcgacccgggcctcgtgtacgacgccggccccgacgactacttcaccttcctctgcgccatgggcatctccgcggcagacatgaagcggctcagcgccggcaagttcgcgtgcccagctaatagcgctaaggaggcgcccgccatggaggacctcaactacccgtccatcgtggtgccgtcgctgcgcggcacgcagacggtgacgcgacggctgaagaacgtcggccgtccggccaagtacctcgcgtcctggcgcgcgccggttgggatcaccatggaggtgaagccgagggtgcttgagttcagcaaggtcggtgaggaaaaggagttcaaggtgacggtgacgtcgcagcaggacaagctcgggatgggctacgtctttgggaggctcgtctggacagacgggacccactatgtcagaagccccgtcgtcgtcaacgccctcgcatga

SEQ ID NO: 17811 - DNA, 474 bp, Zea mays
  Peptide Sequence Number=SeqID_59590
atgttgctatgccgaagctccctggatgatagcttcggcttacaccttcgcgttatatttgcctgtgctgatcttccgaaggtgttttttcttacaggaccttcggcgacgaagcagacccccaacaccacccatccgcaacctcgctcccctgccgcgccatccccacccatccacaaccctatcccctgccgcccctcacgtgatcacccattcgcgacctgccccctcccctcccccgatgggacagggagcagcaagaccaccactggagacggcctcaaccacccatgtgatctcctccgagccaacctcgaagtcgggggtggcggcgccgaggccggaggcagggtcacggtctatgggaggaaggagatcatgatgggggagcagtgccagccgatggacttctctggggtcatctactacgacgctgaaggccaccaagtcgcacaaccaccgccgcgacgctag

SEQ ID NO: 17812 - DNA, 2061 bp, Zea mays
  Peptide Sequence Number=SeqID_59591
atggggtggcagaatccgaggatggctgggcacggcgcgtggtggccttccatagatggagcggatgcgagatctcgggcacaggggaggaggaggaggaggcagaatcggcgaatgcggacgcgcaagcacattgttatcgcactgaaatcctcctacgaaaacaccccccagcgcggcaatgccgtcacgtgcccgcatctcctccgccgtctccaccgcagctgcatcctccttcctcgccgccgccgcatcctcctcctcgccgccgccgtcgccgccgcatcgccgccgccacggcgcgcgtgcggggaggggacgctccgccctgaggacgcacacgacctgctcgacgagttgcagcgtcgaggcacacccgttctcgggcgcgatctgaacgggttcctcgcggcgctcgcgcgtgcgccgtcctccgccgcctgcgggagtggccctgccctcgccgtcgcgctcttcaaccgcgcggcgtctcgggctcaaggaccgcgggtgctgtcccccacatcccacacctacgccatcctcatggactgctgcacccgcgcgcaccgcccagagctagcgctggccttcttcggccagctcctcaggacaggcttgcgcgtcgatatcatcatcgctaaccaccttctcaagggcttttgtgaagcgaagcggacagacgaggctttggacatccttctccacagaacgcctgagttgggctgtgtgcccgatgttttctcgtacagcatacttctgaagagcctctgtgaccaaggaaagagtggccaggcagatgatttgttacggatgatggctgaagggggagctgtctgctcgcccgacgtggttgcctacactacagtaatcgactgcttctttaaggagggtgatgttaataaagcatgtgatctattcaaagaaatggtacagcggggcattccacctgatttagtgacttatagctctgtggtccatgccctgtgtaaggcaagagcaatgggcaaggcagaggctttccttcgacaaatggtcaataaaggtgttctgccagataactggacatataataacttgatatatggatactcctccacaggacagtggaaagaggcagttagggtatttaaagaaatgagaagacacagcatcttaccagatgttgttactttgaacatgttgatgggttccctttgcaagtatggaaaaatcaaggaagctagagatgtttttgacacaatggcaatgaagggccaaaatcctgatgttttctcctacaaaattatgctcaacgggtacgccactaaaggatgtctagttgatatgacagatctcttcgatttgatgctaggtgacggtattgcacctgacatttatacttttagtgtgctgatcaaggcatatgcaaactgtggaatgctagataaggctatgatcatcttcaatgaaatgagagaccatggagtgaaacctgatgtggtgacctatacgacagtgattgctgccctctgcagaatcggtaagatggatgatgctatggaaaaatttaatcagatgattgatcaaggagtagcacctgataaatatgcataccattgcctgattcaaggtttttgtactcatggtagtttactgaaagccaaggaattgattttggaaataatgaataatggcatgcgtcttgatattgttttcttcagttcgataattaacaacctttgcaaactgggaaggataatggacgcacaaaatatatttgacttaactgtaaatgttggtcagcatcctgatgctgtggtgtatagtatgctgatggatgggtactgtcttgttggcaagatggagaaagcattaagagtatttgatgctatggtgtcagctggcattgaaccaaacgttgtagtgtatggtacacttgttaatggctattgtaaaattggaaggattgatgaaggattgagtcttttcagagaaatgctgcaaaagggaataaagccttcaactattttatacaacatcataattgatgggttatttgttgtaaatttagaggaataa

SEQ ID NO: 17813 - DNA, 375 bp, Zea mays
  Peptide Sequence Number=SeqID_59592
atgcagggatatgccgagaccggggattctaccaatttgatcccctccgtctcgcgaccgccgtcctgcggtggtgctgccgctgcgtcgcgggcgtccaaaagccgctttgttgtgggctctcatgtctgggttgaggacccagatgaggcctggatggatggcttggtggaacagatcaatggggacgaacttgtcgtcaactgcacctctggaaagaaggtaactgctaatgtgtcaagtgcctaccccaaggataccgagtctccacgtggtggtgtggaggatatgacaaggctagcatatttacatgaaccaggagtgcttcaaaacctaaagtctagatttatgctaaatgaaatatatattctctaa

SEQ ID NO: 17814 - DNA, 489 bp, Zea mays
  Peptide Sequence Number=SeqID_59593
atgaagcaatgggtgtctcgagctatgggtaatgtggcggagcttactgaggcaacgggcgcgacgagggctcgatggtggtcgcggaacgggcgacaaactttggtgagcggtggcggatctgcctggttgcgcgcgcagggcgagagagctcggctgagggcgcaaatgagcagggggaagtgggtgagccgggtgcgggctctaaaggggcgagggtgtgcggaggtggccgggaaacacgaggtcgtgggcgcgtccacagcgggggtgcgcgggcgtgaggttagggatgggggtctgactggtggggtccccgggccagcaagagagaacgtgagtgtgctcaaagaaaacaccgccgataggactggtccacagggcagcgggagggagagaggagagagagcgcacgagtgggataggctgacaggcgggggccacctggttttcaattcaaatccaaaccaagtttcaatttcaaattaa

SEQ ID NO: 17815 - DNA, 1086 bp, Zea mays
  Peptide Sequence Number=SeqID_59594
atgtcggctttgcgccattctctaccgatcatcctcctgcagctgtacatcctctccggccgacccgcggcggctaaggtccctgcgctgttcgtgttcggcgactcgacggtcgacacgggcaacaacaactacatctccacgctcatgaagagcgacttcgcgccctacggccgggacctctggccgggaagcggcggcggcagtactagtagtggccagtccaccggccggttctccaacggccgcctcgccgtcgacttcatctccgaggcttttggcctcccgccactcgtgccggcatacctggaccccgacgccaacatgagcagcctagcgaccggcgcctgcttcgcgtctgcaggagccggctacgacaacgccacatctgatctgttttccgttctgccactgtggaaagagctggactacttcaaggagtacgcggcgaagctgaggaccttccagggcgacgacaaggcccaggaaacgctgtcggaggcgctctacatcgtcagcatgggcaccaacgacttcctggagaactactacgcggtgccgagcggccacgcggcgcagtacgcggcggcgtccgactacgccggctacctcctgggcgtcgccgagtccttcgcgcgcaagctgcacgcgctgggtgcgcgcaagctggacctcaacgggctcccgcccatggggtgcctcccgctggagcgccacgcggccacaggcgcgtgcaccgaggagtacaacgccgtggcgcaggccttcaacgcgggcctccgcgacctggtggctcgcctggacgccggcctcggcggcggcgctagggtcgtctacggcgacgtgtatggccccgtggctgacgtgctcgccgacccggcggcgtacgggttcgaggatgtcggagccgggtgctgcggcaccacggggcggttcgagatggggtacatgtgcaacgaggccagcctgctgacatgcccggacgccggcaagtacgcgttctgggacgccatccatcctacggagcacctccaccgcttcctcgccgaccgcaagatgaacaccacgctctacgtcttccagtaa

SEQ ID NO: 17816 - DNA, 390 bp, Zea mays
  Peptide Sequence Number=SeqID_59595
atggcgaacatgattgtgagcacaacgctggcacgggggacaccagagggcgcagaatacggtggggtggcccaacggcggcgcggatctacattggcgagcaatcgcgcgaagactagggttgctcatctcaagaggaaacactggagcaccggagcaacgacggagatgcagggacgcctcgggtcgacggtggcgaagctccgactgcatggggagaactccggtgagcgcggactgggtgaactagaggtgttgggggcgaaccgaggggtgtccggtgctgatgatgatgaggcggaactcaccgaggcagtggacacggcgggggctgaacggcgaccgcagaacgggcgcgagaccacgacgagcggcggtggaagtttctag

SEQ ID NO: 17817 - DNA, 360 bp, Zea mays
  Peptide Sequence Number=SeqID_59596
atggctacggcggatgaaaagagggataggcgggacccgcttaccagaggcaccaggtcgtgcgtccgcgggggtggggccaagcgaccgaggcagggacacgggcggcacgcgggcaccaggtctctgatgaacggacctgatctgacaatgagagcgctagggtaccacggtgattcagctgccacgcgagcccatgctatcagtgccggtgttggcggattgggccgcgcaggattactgggcttatgtcgagtgggagaagagtgggccgagaaaacagatgcaaatgggccggtggtcaatcaacgaacaacggagaggtactcaggaaaatggcctgagtcccctaaattatga

SEQ ID NO: 17818 - DNA, 1083 bp, Zea mays
  Peptide Sequence Number=SeqID_59597
atggcgatggtaggaagaatatatggatatggaccagcagtcccagttggaccgttccctacgacactgcggcggctgcgcgcgcgcgtgggccggtcccgcgccgccgccatcgtccgcggcgcgctccacgtggtgagcatcggcaccaacgacttcctggagaactacttcctgctggccacggggcggttcgcgcagttcacggtgcccgagttcgaggacttcctggtggccggcgcgcgcgcgttcctggcgcggatccaccgcctcggcgcgcgcagggtcaccttcgcggggctggccgccatcggctgcctgccgctggagcgcaccaccaacgcgttccgcggcggcggctgcgtcgaggagtataacgacgtggccaggagctacaacgccaagctggaggccatggtgcgtggcctcagggacgagttccccaagctcagcctcgtctacatctccgtctacgacagcttcctcgacctcatcacgaacccagacaagtttgggctggagaacgtggaggaggggtgctgcgcgacaggcaagttcgagatgggcttgatgtgcaacgaggactcgccgctcacctgcgacgacgccagcaagtacctcttctgggacgccttccaccccacggagaaagtgaaccgcctcatggccaaccacacgctccaagcgtggaccatctggaagcacgtagaggggagcacctcctacaacgaggccgcggaccgtctggcacgagatcgcataccgtcctcgctcctacggatagcatcgccaggagagctacggttgccgtcgttcatcgcgttcgtggtggtaagctccccctatgcctccctcctcggcgtccctccccgcggcccccagccctcggcgcggcggcctcctgcccgcacgtgcccctgccccaggcccctcgcccaggcgcagtcctacccagtgtttggcgtggcccccgtcccggcgctcaatgtggtcccaagcgtgcaacttcgtcgctgtcgtggcacgacctcggcgcgcttcgtgctcgctgtttgccgcttcacgcgcgccgtaacgctttaa

SEQ ID NO: 17819 - DNA, 381 bp, Zea mays
  Peptide Sequence Number=SeqID_59598
atgggctgcgtctgcggccgcccctcctccttcgaggatggccagtgccgcgcgacgcctccgccggccgcgaagctctcggcggcggtgaggagggaggaggaggcgcggaagcagcagttgcagcttcagcagcatgcgagggcagggagtgggagggaggaggcgctcgagaggaggcgggcgatgatggcgatggcagcggcgtgccaggtgaggagccccgtgccgagggcggttgaggcggagcaggtggccgtggggtggccgccttggctcgtcgccgtcgctccggaggccgtgcgcggatgggtgccacgccgcgccgagtctttcgagaagctcgacaagatgggagcagtaaaattgtgcggtaaatga

SEQ ID NO: 17820 - DNA, 207 bp, Zea mays
  Peptide Sequence Number=SeqID_59599
atggcctcctacatcggtagagatgcaagagtaattccggccacattctgtggtccgtttgagctgattgtgcttggcaaactcgtgcagactgtgaatggaaagacgcagggctgtgattctattgcaatgacatctgtaactgataagaaagctaagatggagagtttaatatcttctgcgacctttgtggagggtggcatttag

SEQ ID NO: 17821 - DNA, 459 bp, Zea mays
  Peptide Sequence Number=SeqID_59600
atgactgaaggccccaccatacaatcagataaagcattagtattagtgtccaataaactaggtgctggaaatccacatgcagcacacctatcagtttatgtttcagccttgcctccacatcaagaaattggaatgctttcactttcacctaccatgactgatgtatatttgttactgggagctagggcttattggctgctccgccgaggtcatgcaatggccctactgggagctcgacgagatggacgacacactcacctacagaggggagctagggtgtgttgtgcatgcctgcgagctgtagagaagagggggcagtctggatccgaaccctcagcaaggtattacattcacccgctcccccacgccaacgtcctccagattttgcagctcctactagagaatggcattagagtaaatgaactaacaaggatagaggttgctctcgtcgtcccataa

SEQ ID NO: 17822 - DNA, 1686 bp, Zea mays
  Peptide Sequence Number=SeqID_59601
atggaggagcagaactcgtggctcaggaccaagttctccaatactgtctatgctagggtggatccccggagagtacctgttgctccgcttagcaaggatgttgagcggaaactgcacaaattcttcaagatgaagaagactgtatcgatgcctgttgatcgggatgatggagacacagggactgcattcaagcactgtgctagcttgccgctagttcgatcccagcctcagcttgacagggaaaaggtcaacaagcccgagagggcgagcctggagattccttcaagctcccagatgatctcagagagttgcaagactccaaaagcaaggagcctggtcaagaccccaagttcgatgatgctcctgagctacttgaacaagtcaccgtcaaatcaagggcatagttctcacaaggcttatggatccagaccgagatcgaagtccccccttcctagtattgtgccttccgaagtgtttagggaagcaaagtctagcagccagaggtttgcaagccctcctccacagcgaggaggatctgcaaagagtatatatggcaagtcatttggtaggcaggtctctgatatgggtcaaagtcctagatggcgctcaactccagttgtatctggtaagcacaagtctcaaaaggataatgcttggacaaggaaatacagtggtggaaggagggttagtgcagtgaaccctgctgatgatcgaagggcacagatggttagaatgaaccaggcagtgcagacgacagttgattggacactcgatccgtccaagctgctcgtggggcacaggtttgctagtggagcatatagccggctgtacagggggtactatgatgataatccagttgcgatcaaatttatccgccaacccgatgatgacgacaatgggaagatggctgcaatgcttgagaagcagtataacagtgagatcaattcattatctcacctgtaccacaagaatgtgatcaagcttgtagcagcctacaaatgcccaccagttttttacattattaccgagttccttcctggaggctcaataaggtcatacctaaacaatccagagaaccaccccatccctctagagagaaccatatccatcgctctggatgtcgctcgtggcttggagtacatacattctcaggggatcgttcaccgtgacatcaagcccgagaacattctcttcgacgagaacctctgcgtgaagatcgctgatttcggcattgcctgccaggaggccttatgcgatgtgctcgtggaggacgaaggcacttacaggtggatggcgcccgagatgatcaagcagaaggcgtacaaccgaaaggtcgacgtctacagcttcggactgctcttgtgggagatggtgtccggtagaatcccttacgagaacctgaccccttaccaggtggcttacgcagtagccaacaggaaattgacgccaacaatttccccagaatgtccaccggccctcagatccctgattgaggagtgctgcgccttgcggcctgacaagaggcccgacttctggcagatcgtgaaagtgctggaacagttccactccgttctcttgcagggtggctgcctcgacataccgaagagcggccccggcacctgccaggatcccaagaagcggctcatgcggtggattcagaaactgaagccgaagcatagcgcctga

SEQ ID NO: 17823 - DNA, 273 bp, Zea mays
  Peptide Sequence Number=SeqID_59602
atgactgcctcgtcttctccatctctgtctctacgtcgccgcttctctgtacgagtgttggcgaatcaggtttctggaaaatgcttcgcacaatccattcgtgtttctcaccatcacttgtggaaaacattgcgccgtcgacgagcaccgccgcatgagctcgtggccagaccaactccggttacctccaacgacgatccgcacatcgacatgaccgcaagaggctccctagtctcacccaaacctttgtcggagctctactatcgctggtaa

SEQ ID NO: 17824 - DNA, 906 bp, Zea mays
  Peptide Sequence Number=SeqID_59603
atgggagcacaaccaccggcttctacgtcacagacttcgtgcagtacaaccaggtgtggtgctcagcttggtggggatttgggatcctcgaaccaggcccttgatgggattcttgggttcggccagtcggattcgtcgatgctatcgcagttggctgctgctcgtagagtgaggaagatttttgctcactgcttggacactgtgcgtggtggtggcatcttcgctatcgggaatgtggtacagcccaaagtaaagacgacgccgttggtgcccaacgtgacacactacaatgtcaatctgcaaggaatttctgttggtggtgctacacttcagcttccaacaagtacttttgattctggtgacagtaaaggcactatcattgacagtgggacaacactggcatatcttccgagggaagtttataggactttgttggctgcggtctttgataagtaccaagatttgcccttacataattatcaagacttcgtgtgttttcaattttctggaagtatagatgatggatttcccgtaatcacctttagttttgagggagaccttacactgaatgtttacccagatgattaccttttccagaacaggaatgatttatactgtatgggattcctggatggtggtgtacagactaaagatgggaaagatatgctcctcttaggagacctggtcctctcaaacaaactagtagtttatgacttggaaaaagaagttattggatggacagactacaactgctcctcgagcattaaaattgaggatgacaagactggctcagtgtacactgtcgacgcacaaaacatctccgctgggtggagatttcaatggcacaactccttaattctgttgatattaataaggacaatctggagctgtttggttatagcctaa

SEQ ID NO: 17825 - DNA, 450 bp, Zea mays
  Peptide Sequence Number=SeqID_59604
atggcaaaacacaacccaaaagcacaatttgcctccaaaattagagttgcgtacactcgccatgcatctgacaccaagcaagcacgtacaagcgggatcagtcgatcgaagaagagttccctctctggatctcttcctgaagagaggcactgccacaccaccacgccacccatgctcaacatgatgaccgatctgagctgcgggccgtcgtccaaggcgaaaggagggcagccggcggcggcgccgggctccggcggcgacaggcaggggaggggcaagatcgagatcaagcgcatcgagaacacgacgaaccggcaggtcaccttctgcaagcgccgcaacggcctgctcaagaaggcgtacgagctctcggtgctctgcgacgccgaggtcgcgctcgtcgtcttctccagccgcggccgcctctacgagtacgccaacaacaggtga

SEQ ID NO: 17826 - DNA, 2436 bp, Zea mays
  Peptide Sequence Number=SeqID_59605
atggcgtacggcttctccatcaggggatacgcggcgagcatgcggggcacggccgagctcggcccgtttagtttggcggcccgggaactgcagcccatggaggtgcgcgccttccggtggtgggaggacgagctcgcgtccatcaaggcggcggaggcggaggcggagaaggagaaggagaaggaagcggtggcgggggcgggggcggagggggaggaggaagaagaggaagaggaggcgtcggggaacggccgggcgccgaagaaacgctccatcaccgacctgttcgctgaggcgcctgccgtgggcgccggcagcggacccgacgctgtcgtggacgacgaggaggaggttcttcgctccatcgtccgccggagcaaggagctgcgaagaaagaggcgtctggagcaagctgcgttggcgtcggtagcggaggagccggagacgtcggcggcaggcgaacggcgtgcggccgaggggaatttccccagaaagaaatcagctgacaaaccaagtttgggagatgaattggatacttctggtccatcaaaggaacatcagaatgatctcattacagagaagcaaaagatcccagatcttaagagaaggaagcatggaagactcagtaatagtttacagaagaaggctgagaggctaaagtaccttgagagtagaaaggctgtcaaggttggaaaacagcgagatattaaaaaagtgctccctttgcacagcattctgaagaagtacacaaaacatacgtctgttaaaatggttaaggaaaaacatgggaattcaaaaggcactggagtcatacaactctgtcgcaaatcagtcaagcgtgtcaaattctcagaaacagatgatgccaaaaagcaatgttccaaaagaccaccactggaaagcatccgcgagcttctctctgctattagttcttcttcgtcgtcatctatagagatgtcaagtgaagaggaacatgttattgcggaaagtagtagttctcacatgacagagaaagctgtcactatggctagcgaagcaaatgagaacacaaatcatgacaatcaatatgagctcagcagtaccagattgtccaccggtttgcttgatctgaatcaagctcttccagaacctacggacttaaacaatccatatgttccaaattcagaggtttcaaatcttgagcaggcacaggtaggaacttggaatctggatcaacaagttcttggtaatggaagaaaaaacatagactcatcttttgatctgcatggacaggaacaactgagacattctactgagttggacaccacatcaaaaggcaagtccccttgtactctgtcaaacggattccaggattcagtgcatctccaacagaattggagctctatgactttgcatcatggtgtctctcaactctcaactggaggtgaaccatcttcctttgaagttcgagaaagtaatatatcacacagtgagaaacgaaattttagttctgaaacgaacgtggaacaagagttgaggccttctgctggacaaaccttgcgcttgatgggtcatgatcttacagtatccgatactagagttgactatttatctgacgcggcacagaatcacacaaataatactgcagaccatcttaccacaaaggtggtgttggaattgccacgacaaggtcagcctttcctagcattacaaactcagagtattcccagtgtttcagcaagttctgcaaggacagctcaggcacattttggatacagaacaacacataacatcagccacccgttgctcgctgccaatgtgttctctggtgatccatcagtatatgaagacaggtgcagggacttcacaaacttgcaatcacatcgaaattctatattgggatatcctcctctttccaatcatggcagtgctgcatttcttcagaattcaccaccttggcgttattactctgatcattccaccaggagagattcactctcagcgccatttacaccaacagtgatgcagcatgtggcaacaccttcagattaccgtgccaatctgcctcatcagtcatatggtgtgtactctggaagctcaacagttcgacctcttaactctgcaagttttacatgcacaaaccagatagtacaagcagttgacagtagggctactgcaaaccttccgtccagaagtccaacaactggaacgacaagaactcatcacaactccaatacttcatctagcagccgtttggttctgagatcaggccctgtaaagctcagtgccggggcgaagcatatcctgataccaaatgagaatacggaggacgacaattctgcaccaatgtactcttgtgtgtcctttggcagcagtggtgggaatgtttcggcagcttatcagaataaaggagcagctgctgggcaagaggctgcatgttttgaagctgattcttaa

SEQ ID NO: 17827 - DNA, 177 bp, Zea mays
  Peptide Sequence Number=SeqID_59606
atgccccctccggcggcgccagcggcctccgagagggtgtctttgccaccgcgcgctgttgaggcggcggtttcggagactggagggactgaccaggagttatctgtggaagactacctagaaggaggtgtcaccatgtttgatgcccagacggggctgtcgcgctgctgggactga

SEQ ID NO: 17828 - DNA, 399 bp, Zea mays
  Peptide Sequence Number=SeqID_59607
atggcgcggcggatcgccggagtggcggctctgaacctgctctccgtgctcatggcggcgacctgcgccgccggccgcgacttctacgtcggcggccgcgccggctgggcacccaaccccgccgagcccttcaacgcctgggcggagcgcaaccggttccaggtcaacgacaccctcgtgttcaggtacagcaaggacgcggacgccgtgctgctggtgagccagggccactacgacgcctgcaacgccgcgcagccagcccaacggctcgacggcggcgactcccgcttcgtgttcgaccactccgggccctactacttcatcagccccgacgcggcgcggtctaaagaaacatccaaaaatacagagaaaaagagaaaaacgaccaataccgaatga

SEQ ID NO: 17829 - DNA, 822 bp, Zea mays
  Peptide Sequence Number=SeqID_59608
atggtatggaagggtaaaaaattgcatctgagaatggattcgaacatttacgacaaaaaaaagtgggcatcattattatattgcagtgtgaagtccaccattgagaggtacaagaaggccaacagtgacacctccaactctggcacagttgcagaagtcaatgctcagagtctgtatgaagtgcagagccacgctcagactgcatatatactgcagtgctctctctttatacttgctttttatgggcatgattatgtagtcgatttaaaaaccacgccgcataagcactaccagcaggagtcctccaagctgcgccaggcgatcgatagcttgcaaaacgcaaacagtaggaccatagtgggagattcaatccacaccatgggcctcagggagcttaagcagatggagggcaagctggagaaggccataaacaagattagagctagaaagaatgagctcttgtatgctgaagttgaatatatgcaaagaagggagatggatctgcagactgacaacatgtacctgaggagcaagatcgccgagaataataatgaaacggggcagccagcgatgaacatgattggagtgccgtcgacgagcgagtacgatcacatggcctcttttgttgactcgagaaactttcttcaggtgaacatgcagcagcagcagcctcagcactactcccatcagctgcaaccaacgaccctccaactcggatcccttaaagcagcagtttgtttctggggagccccaaaaaccccttatttgtatctacaaaatgacggagttttaagggttatgaaaaagttgggagcgctttag

SEQ ID NO: 17830 - DNA, 1082 bp, Zea mays
  Peptide Sequence Number=SeqID_59609
atggcgatgcggcacgcagcttggcttttcggcaaaggccagatgggatctgcgccgagggtaccctactacgcgttcacgcaggcccatccatttcccgacgccacttcttccgtgggcccagcccactgcgccactgccaccgagacaaaccaaacagtgcaaggctgctgcactgcaagcgttagtgcgactgtccccactgcaagttcggctggaaaccaccactactcgcgccgctcgctcggtcatccatggcgacctcctccactccgcctgctgcttcccacgcctccctctccccccatctctaggttcgttcgttccacgtcgccgtccacccctgtccacagccgcgacaaactcttcctcagacccacgccacgtacgatgcctctctccccttccccttcccctccgcccaacgccaccgccgccgccgccgccctgcccctcctcctgctgctcgtctgcgccagcagcattgccgcgcagccgctggcgtcgtcgcaggccaaggcgctcctccgggtgcgccgcctgctgttctacccgccggcgctcgagccgctgcgcggggcgccggacccctgcgcgctgccgcccgcgccggccctcgccgtcgcctgcgagggcggccaggtcacggcgctctccgtcctgggcgaccgcgacccggacgcggcctggcgcgccgcgctgccggccagcttctcctccgaggcgctgttcaccacgctcaccaggctcccggcgctcgcgcgcctctcgctcgtcggcctcggcgcctggggcccgctcccgggcgccaagctccgccggctccaggcgctgcagcagctcaacctcagctccaactacttctacggcgccgtccccgatggcctcgcccggctctactcgctgcagagcctcgtgctgtcctggaactggctcaacggcaccgtgccgtccctgtccgggctccagttcctggaggagttagacctgtcgcacaaccgtctcggccatgtgacggggcccgtggggcgagaacagccacaccgcagcaggagtatacgcgccgactgcgatcatgcagc

SEQ ID NO: 17831 - DNA, 1932 bp, Zea mays
  Peptide Sequence Number=SeqID_59610
atggcgagcccctcgacgacgccctcggctccgatcgcggcggaggtagtccccgtggctgaggggactccggcggcggtactgccgccgctcggctcgatggcgtccctgtacgtgggtgacctggctgagaccgtagacgagccgcagctccacgcgctcttcagccaggtcgcgcccgtcgcgacggtgcgcgtctgccgggacatcctaagcggcgtctcgcttggatatggttacgtaaatttttactcgcgccaggaagctactcgtgcgctagaagctttgaattttaccccattgatcggaaagtacatccgggttatgttctctaaccgggatccaagtctgcgtaagagtggacgtgctaacttgtttgtaaagaaccttgagcctaacattgatagcaagaacctgtatgagatcttctcctcctttggcgcaatactgtcatgcaaggtggccactgattcagctggtcagtcaaaagggtatggttttgtacaatatgagactgaggaatctgccgaagctgccattaacggacttaatggtatgctagcaaataacagaaaaatgtttgtgggcctacacatgcgccgtcgggacagagaagtgaagttcacaaacgtatatataaagaatttgcccactgaattcagtgaggatgacctccgccaggagtttgcaccgtttggtgaaattactagcgctgtggtcatgagggatgctgatggtgcctccaaatgtttcggctttgtaaattttaaaaagccagagttcgctatagaggctgttgagaaggccaatgggaaggccatcggtgacaagactttatatgtcggaagggctcagaagaaggaagagagaaaagccgagctgaaaacgagatttggacgtggcagagacaacaaggttgataaacctaatggtatcaatctatacttgaagaacattgatgatggtataaacgacgaggggttgaagaaattattcgaagaatttggtcaagttgcttcatgcaaggtaatggttgatgctcgaggaaggagcaagggttcagggtttgtgtcgtttgctactgctgaagctggccaaagggcgataaaccgaatgaatggtaggattgttgggaagaaaccactctacgttggtttagctcagcctaaggaggaaagaaaagccatgctaatggcgcatttcgctcaacgtaacctggcaatggcagcttctcaatatgccggacctcagcaggtctattttggtcacccttcttcacctggcccgatcgcgcctcctcagggcgcagtatttgggtttccgcaacacttcgttccgggaatggggcctatctctcccgttatgatgccgccacacaacatgcagcgaccaaggtatcctggtcctgctccatatcggcagcagcaggcgatgatccacgcaaatgccaatcacatgccgaatgccagacctgggccttaccctgcaatgccgcctcaggccttcccaggtgcgggtgccacggcgtggcagcaacacgctgtaagcaggacaactactgccgtagcatctgctggaccggcagaccaacatcagattctcggcaacaagttgtacgcgctggtcgaacagctcgagcgcgatcacgctggcaaagttaccgggatgctgctggagatggacaaggccgagatcctacagctgctgcggtctccggaggctctccgggccaaagtccgcgaagccatggctgttctacagcggaccaaggccggaggctccgtcgatcctgccgccgccgctgctgtcgccaaagccggagactcggcagccgatcctcctcctgctgccgccgccgccgccgccgccgttaaggccggaagctcagccgatcccggtgccgccgccgccgcaccaaccgtaaacgcctga

SEQ ID NO: 17832 - DNA, 1278 bp, Zea mays
  Peptide Sequence Number=SeqID_59611
atgcggggcaattcctcggcgcgcacggtcctcgtcgcgggtaactgcttcgccgacgccaagcagcagcgggccagctcgtactgcaaccccggcgcgctggccgccgtgctgccgccgccgcagggcaacggaggaggagggcaggggacggggaagggccgcgagatcgggatggttcttgcgattgccggcagcgtcgttggtgccgcattgctgattgcgctggccatggtggtggtcctgaggagggcgaggaggcagcgtccggaggcgaccatcctgccgaagtcgcccgcggcgacaccgaccaacaaggcggatggatggaaggctccggctaaggcaacccagaagattattactactgctgataagagacatgcatcacaagctgcaagggtgaatacactggaagtaccagcctaccgagtgtgtacactggaggagctccaagaagcaaccgacaatttcagttcctccaacctaatcaagactagtcctcttgcacaggattataatggtcagcttcaagatggttcacgagtactggttagatgtttgaggctgaagccgaagtactcctcccagagccttgtccaatacatggagattatttctaaacttcggcaccgtcatttggtcagcatcattggtcattgcattgtcagtgatgaggagaatcctaatatcgcgagcttggtctacctcgtttctgaatgcgtgacaaatggatctttaagaagtcaccttactggtatgaacaatctcaacatagaacatatcctgctggacaagaccctcacgtctaagatcagcaacttcagtcttccaatgatatcaactagcaagaacggcaagattctctcagagaccccatttgctgtccatgaagacaatgatattggcagtgctcagaacgcggcacaaggtgacaaggaagacatctaccagattggcctaattctcctggaggtgatcacaggcaaaccaacagagtcccaaaggcaactggagtccctgaaagctcagctaagtgaggcgctaactgaagacccagacaggctgaaagacatggcagacccggcgatacacggtacttttgcagtggactcactgagcacagttgccgagatagccctcaagtgcacgactggcgacccaagcgaccgaccttccatcgacgacgtgctctggaacctgcagtactccatgcaggtgcaggatgggtgggcgagcagcgagagcttaggcttgagcgtcaaatctcaggcttag

SEQ ID NO: 17833 - DNA, 477 bp, Zea mays
  Peptide Sequence Number=SeqID_59612
atggcggtggcaggcgggcaggagcagcggccccgtcgtcagccaagctcacgtcccatccgggggcagcaagagaaccctctctcacggcgtgaagacaacgcacccgtgctccgtttctcgaacggctcgcgcacgcgcaacggccgccccgccaaccactcgccccgtcgcattaactccgcgggactgggaaagggggataccccgaaaaggatccttccccgtgaaggaaccaggctccgagcctccctactgatcagaggttcgaaggctggcccctcggaagggttcgacagccgcctcagatcacgtgggccctacactcactactggtcagaggttcgaaggctggcccctcggaagggttcaacgaccgcctcaggctactcgggctccgcgcccactactgatcaggggttcgaaggctggcccccgaagggttcacagccgcctcagacacagagcgagggatga

SEQ ID NO: 17834 - DNA, 1029 bp, Zea mays
  Peptide Sequence Number=SeqID_59613
atggaggtggtgaacaggtacgtcgccacccggcaccacatcgagggcgccccgacggaggccgattttgaggtgaaggaggagatggcgaggtgggcgccggactccggcgaggtgctcgtcaggaacctgtacctgtccatcgacccgtaccagctcaaccgcatgaagcggagcagcgtgacgcacctcgccgtcgaaggcatcctgcccggccaggctgcttctactctattatctccgtctccgtccgtgaagaggatcactacgtacgcggccggcgaggtagtggcgtcggcgtgtgaggagtacaaggcgggcgacaaggtggccggcgtgctcgggtgggaagactacacgctgttcaagccgtccccggccgtggtcatgtccaaggtcgccgacgacgccgcgggcttccccctgtcccaccacatcaatgtgctgggcaccagcggcatgaccgcatacggtggcttcttcgaggtgtgcaagccggtgaagggggagaaggtgttcgtgtcggcggcgtcgggctccgtcggcagcctcgtcggccagttcgccaagctcgccggctgctacgtcgtcgggtgcgccgggaccgcagccaaggttgatctgctcaaaggcaagctgggattcgacgatgctttcaactacaaagaggaacctgacctgaaatcggcgctgaagaggtacttccccgacggcatcgacatctacttcgagaacgtgggcggggagatgctggaggcggcgctggccaacatgaacccctacgggccgggtggcgctcagcggcgtcatctccgagtgatctacaagcgtatcaccatccggggcttcttcgcctacgacttcttgtccaagttcgcggagttcaacgccgtcatcggcggctgggtccgggacggcaaggtccaggtgctcgaggacgtctccgacgggctggagagcgtcccgtcggcgttcgccgcgctgttccgcggccagaacgttggcaagaagctcgttaagctggcgtag

SEQ ID NO: 17835 - DNA, 327 bp, Zea mays
  Peptide Sequence Number=SeqID_59614
atgggggaggggcgtggcggtggcggtggccgcggagttggtgaggcgggcgtggaggtagacagtcttgtccctggcgtgggtgaggagcgcggtggtggaggagcggattgcggatctgccgcagtggggaggcgattgacagcggctctggtgtggtgggagcgcggtgggggaggagcggattgcggatctgccgcggtggggaggcgattgagagcggctgtggcgtggtgggagcgcatccgtgcgatgaggagcggagggacaggattgtgcggcagaacatggtgcactattgtgaacgtctacgttgaaggtttatag

SEQ ID NO: 17836 - DNA, 138 bp, Zea mays
  Peptide Sequence Number=SeqID_59615
atggctgatcgtggtcattgttgtggaagtgagttcaccggagtatatctgttggatgaatcaaagcaacttatttattttgaggaccttgagcagaaaaggagaccccaaccgcttctttctcgagtccttcaataa

SEQ ID NO: 17837 - DNA, 1548 bp, Zea mays
  Peptide Sequence Number=SeqID_59616
atgtccgtgtactttctcctgctagggagggtcaccggcgacgagaatgcacggctctggccagcctcgggaggcagggccgacctgtgcctctcgcgcatggagaggctgagtccacgcagagcctccgagaccgcgtcggggctctcgagcggaggaggccagggccaggcgcaggatccactcgagtggtttcccttcgacgcgaccgcccccctgtccggttccgccaaacccgacctcgggctcgatgccacaagtgggcccctgttgccagaggccctttcccagtgtgctcgctggccgatgggccccaggatctggggatcatatccccgacagagcgctgcgatgtttaagttcctctccatctcacgccactgcgctgccctagaaccttcgccgccgcccctctttaggattaccgtgtcctcgatcgccccctggcacgcccgccccgatcgccccctggcacgcccgccccggatcctgcaccggaattccgtgtggaattccggacccgatcgaaatcgaaccgcctccctgcgtgctcccctgatcaagaaattctcacgccgcgcgaacgcacgcctgaggcggttggatcctctggtggggttccttggtctcgatttgctgtggatgggggcgccgaagcagcgctggacgccggaggaagaggccgctctcaaggccggcgtcgccaagcacgggcccggcaagtggcgcaccatcctccgggactcggacttcagcgcgctcctgcgcctccgctccaatgttgacctcaaggtgacgctcggatcgccagggagggacaagtggcgcaacttgagtgtcaccgcaggaggttatgggtctagagagaaggcaaggatggcgttgaagaaaggtagacgtgtggtgcctaagcttactgctgagccaatggatgtagatgtgaaggatatggacgatgctcatgacacagccattgatgtggaaccgttagcaatggctttcgagtccttgccaactgaggaaagtccagataagtcagttgctaggctcgatgatctcatattagaagctataaggaagcttaaggagccttctgggcccagtaaggcagccattgctgcatacattgaggaccaatactggccacctgctgattttcagcgcctgctatctacaaaactgaaggcattggttaattccggaaaattaatcaaggtaaaccaaaagtacagaattgcaccaagtccacccccctcgggcagaataggcactaaggtatcctctgctgaagggatgaaggcagaaaataataatgctaaacgtctaactaagcatcaagtgattgctgagctggagaagatgaaaggcatgaccaaggaagaggcagctgcctttgctgccaaggcagttgctgaggcagaagtagcaatagcagaagctgaggaagcagcaagagttgcagaggctgcagaaaatgatgctgaagctgcaaaggcttttcttgatgctgtcactttatcaatgagaaacaggaatgctgcttccatg

SEQ ID NO: 17838 - DNA, 420 bp, Zea mays
  Peptide Sequence Number=SeqID_59617
atgggtgtgaccaagaggtgtcttgaggcaagagaggtcgagggcctgcctcgccacgctggcgacaagtggaaacgcgccccaagtcctctctcggaggacttcggcgattcggagtactcggaggaagtttcctccaggctcgaaggatcggatgagtcggaggtctcatcggatgaggagaactcctctggcttgtctgaggagcggagcggcgatgacagcgatgatgagggcagtggcagcggtgacgacagcgatggaggtgatggcggcgacggcggcgatgacggcggcaggggcgacggtggcaacagtgccatcaagggcgacgacggcgacaacggtagcaagggtgacggcggcagcgacagcagcaagggcgacggcaaggccagtggcaaagcgccactggtctga

SEQ ID NO: 17839 - DNA, 537 bp, Zea mays
  Peptide Sequence Number=SeqID_59618
atgtcaacacaaaaggaagctgcacccccgcaaggcaaggggctggatttcgacagaccattcacgcgcatgtcatgcgcccacgtccttcgccccaccccgccccgcccaggcctctctcttctcatccatgacttgaccataaatcctaacaaagaaagtatgaaaggaacctctcgtcatgccgtggtcgctcaagagactgcctccggcgtcgtccacacccggcctccaccattgccgggcctcgtgggtcgctgtattcttctcctcaccgtcgcgctgctccgcttggcacacctcacgcagccacccccggagaccgtccgcctcttctcccgccgtcctgcgtccgcgcacgcacgacagcagcaaactcccattcggcttctccccgctcgccaagtccgccgcggccggtcgaggaggcccacggggtgcctttgggtggggtgcggctgggaagctcaggtccgtcctgtacctccaaacgtgcgatttgccacattttcaaccaatattgttatgaccttctga

SEQ ID NO: 17840 - DNA, 576 bp, Zea mays
  Peptide Sequence Number=SeqID_59619
atggagaaagattgccaggacgcgctgcgaaagaaacgtcgcgcccatgtcaggttggcagatccgaggcaggaggtgaagatggcacggcccagcgcgaagtccgccgccctaggcgccggggcagagtctggccagatggcggttgtgtcggcggggtcgtctgccggcccagtggtcacggcgacggggacgaagggtgacacgggggcctcagaggacccgtgggctagattctgcgctggcggtgaaatcgcttccgttgccgctgctacgggcgtggccacctcggtcgcacagcagctgaaatacatgagtgtggcaaacgccatcgcgggacgtattgcttcaggggcgctaacctcgaagtttgtcaccgaaaggcaacggcttgaaagaaggattgagcgcctccacacgcaacatacggaggcagcgagggacaagtcggcggcggagaataaaagctgcaatttgcttgagaagctttgggcggtagaaaaagaaagagaagacctgagccgtcgacttgctagggaaaaggagggcatagaaaacgctcgcgcagaggcctag

SEQ ID NO: 17841 - DNA, 360 bp, Zea mays
  Peptide Sequence Number=SeqID_59620
atggcgcctggcgagggtggtgataccagtcctttcctgaacggggactttggggagtttggctatgttgctccagagtatgctagcaatccagttggtacgatgaaaggcgatgcgtatgcatttggggtgatattgtttgagcttgttagcgggcaggaggctgctgctgtggttactgacgtgacagaagtaatattgctcgaaaatgtagagctgactcttgaagcctttgactacatgcagctgccattcacgctgaaagatgtgcagagggagatgaagaatgtggagaaagacatcagggtagctaccaagcgcaatgacatgttatctgcaaaggtacgctcctgcgtttga

SEQ ID NO: 17842 - DNA, 228 bp, Zea mays
  Peptide Sequence Number=SeqID_59621
atggagtcgtacaaagttgatacagacaggtgtacgcagtgcagtcgtcgaaacgacgccaaagaacgggatcagctctggtcgagcggacgaagcgagcagtcaaggtgggacgggaatgggctaagtgcaatgcgtctgagagactgtttgcgtaaccagaagagcatccacctcctccgtatttatacaggcgcagagggaggggagaagggcaatgaacaataa

SEQ ID NO: 17843 - DNA, 312 bp, Zea mays
  Peptide Sequence Number=SeqID_59622
atgaccatccatttcgggagtctcaacttcatcatcaatgataggggaacaatgatcagtgccccagaagccctagttctcctgatgaatgaatcgatcaacatttctagaagccttggtggcctccgacttggctcccttcagggaggtgtctggcggcgatgtgcactacaacccgcttatgttgagatcgtgggaatggttgaccccgtatggaactcattccatgacgtcctccttcaaggtcaaaaggtggcattagctccccatcatgtggggctagccatgatccagcccaagagtgccttgtag

SEQ ID NO: 17844 - DNA, 411 bp, Zea mays
  Peptide Sequence Number=SeqID_59623
atggactacgtcgagtcccatggttcctctctggtggaacttctagacaatgcccggtgtcatatttgggacattgttgattgcagcattcaccgaggagccacagtggcgctgctcgtcggagatctcaggtttgattgtggcctctgggacgttgtcggtcctccttcgtccctttcgaacaaagggctggaggacgtgctggagggcttcaacgaggtggccagtcgcatcatccagcgcctccctccgactgccctctatccatggatcgagacagacttcctaggagaggtcgccctgggagatgggtggcggttcaccctctcgagggttcaccggggcgcagcagtgcctcttaccattgcacaactacactttcttggtaacctccatgacgccattggctag

SEQ ID NO: 17845 - DNA, 645 bp, Zea mays
  Peptide Sequence Number=SeqID_59624
atgcaagctggcatggaacagaagaagccaaaccgtcgcgtgcggagcgtggaccgggaaaggggatatttcgaaagggatccttctccgcgaaggaagagggccccgagccctcctactgatcaggggttcgaaggctgcccccctggaaagggttcaacagccgccccagagcactcgggcttcaggctcattactgatcagaggttcgaaggctggcccctcggaagggttcgacagccgcctcagagcactcgggctccgcgcccactactgatcaggggttcgaaggctggcccctcggaagggttcgacagtcgcccagagcatgcagagcgagggatgactctgggtacgtccgatacatggcgaggctcgagctacgctcccgaggagaaagtctccgcctcacccgaccctagggctcgaccctcgccctcggcctcggaaggtggtctccgcctcgcccgaccccagggcccggcatcaacctcgacctcggaaggaatagagtccttgcctgaccccggcctcggcctcaggaggagtctccgcctcgcccgaccttgggctcggaccgaccatgccgcaagggggctcaaacgctcctctgacggccacgacaccgcgtacacagggctctag

SEQ ID NO: 17846 - DNA, 492 bp, Zea mays
  Peptide Sequence Number=SeqID_59625
atgtctgtcggcgccttccttcttctgctctcctgcctgtgcagcctccaccaagggtaccgcaacagccgcgccaatgccgcggccgacgacgctgccgcagccgctgcagcgctcgctgcgcggccgcaggcgccgccaccccgcccagagccatgggacaaccaggagcagtggctacgccgccaccgcagcgatcgtgacgacgacggccgcacgcggcgcgccagccttacggcgggcctcccgtcgttcacgtacaaccggacggtgaggcacaacgtgacgggcagcggggacgaggcggcgacgtgctccgtgtgcctcggagcgttccaggtcggggagacagtgcggctgctgccggtgtgtatgcacctttaccacgtcgagtgcatcgacccctggcttgaagcgcacgccacgtgcccgctatgccggtcgggcactgaagaatccacgatgcacggcaggctgcttctgccggtttag

SEQ ID NO: 17847 - DNA, 621 bp, Zea mays
  Peptide Sequence Number=SeqID_59626
atggggtgcaccgaaggtgcacccaatgggtgtagcccccgaccttcaagtggatttttgaggataatctactcgaaggtcttccttctgtgtccttttgctgagaattatcctttctgcttctctcaaccatgggcaagaacaacaagcgtaagcgtgagccgactcctccatcagaggagtttggtgactcggagtactcggaggaggagttctcctccgagcccgaggggtctccggctcccgtctctccccccggcgtcgtccgatgactcggacgactcccaggggatagccgcggaggtctggacatacatccgggccgtcgagcgcgccgggctcgaaggctcggatgagtcggagtactcctcgggtgaggaggactcggacggcggcgaggagggtgaagacgacgacgacgacgatgacgacgatgacggcgatgacggcgacggcggcagcagtggcaggggcggcggcgacggcaggggcagcaccaagggcggcagcggcggcggcggggacagcaccaggggcagcagcaggggcagcaccaggggcggcggcggcggcaggggcaggggccagtggctagacgccactggtcttcttagatattag

SEQ ID NO: 17848 - DNA, 276 bp, Zea mays
  Peptide Sequence Number=SeqID_59627
atgggtctctggtggcgaactacagctccgcgctgcgtggctctggttctggtctcagggagttacttgggaggggtccagaacatctgcactaaaacacctaaaaagaagtcctacaaagatttgctggttacagtaacaaggaaccaccattttgatgcaaaggacagaaaggaaacgaaaaagcaggagccagggctgttcaacaacgtgaccgagtcgctgaggcgaggaagaattgttttgaaaggaaatggaatggataaagcaaattaa

SEQ ID NO: 17849 - DNA, 438 bp, Zea mays
  Peptide Sequence Number=SeqID_59628
atgcggtgtttttctatctaccagcaaccagtacaaccccggcaacgcttcggaatcacgccacgccgaggcggcggaaaggcgaagcgcgtccccaccaggcaccagcagcggcggcagccgctccggaaaggcgaccgcgaaaaggagacgctgcgcctggccggccaccaacctcgagccccgccgcccgacgcaacgcaagaggcgctgattggccgccagcaatccatcgtcatcgtacatgcactactgcccgccagtagtgctgctgcgaagcggtacacctacgctgattccgtggatgtcagcgacgaggcgatgcaaccgatgcccgacgcgctgtacctgtaccagccagcccgccctctggagttgaacttgaacggatcaaacctgtctgtttcaatttcgagacaccccgtgaagaaaagttaa

SEQ ID NO: 17850 - DNA, 3243 bp, Zea mays
  Peptide Sequence Number=SeqID_59629
atgacgtctcgctcgatgctttccctaaggttcgggcacgagggtctttggttacattgtcctgaggtctccttcccgctgaggaaaagggaaaatgacatagctggtttcatgatcggagtttctgctcgttacttcatcaagtccattgttcgttcatcactcgttcggttcccgaaggcggcccggtctgggcctcctacaccgccctcgcggggcgaggctgagggcgttgagggccgccgagacgacgttgtggctctcgggcgggacaggtcgggtgggcactgcccagaccatgtctccttctggcgaatggtgaagtcaaggctctcaaagcggatggacgatccgggaaacgtgcaagcctactacctggcgcgccaactgtcgatgtttcgtacctcactccgacaacgcctctccgtcgccgccaacggcttctacgggcccatcccgccgtccctcgcgcgcctgcagctcctcgtccacctcaacctctccaacaacgccttcaacggctccttcccgcctgcgctcgcgcggctccgcgcactccgggtgctcgacctctacaacaacaacctcaccagcgccacgttgccgctcgaggtcacgcacatgcccatgctccgtcacctgcacctcggcggcaacttcttctccggggagataccgccggagtacggccggtggcctaggctgcagtaccttgcggtctccgggaacgagctctccggcaagataccgcccgagctggggaacctcaccagcctcagggagctctacattggctactacaacagttacaccggtggccttccgccggagctggggaacctgaccgagctcgtccgcctcgacgccgccaactgtgggctctccggcgaaatcccgccggagctcgggaggctgcagaatctggacacgctcttcttgcaggtgaatggcctcaccggcagcataccgtcggagctgggctacctcaggagcctcagttctttggacctgtcgaacaatgcgctcaccggtgagatacctgcgagtttctccgagctcaagaacctgacgctgcttaacctgttccggaacaagttgcgcggcgacatccccggcttcgtcggcgacctgcccagcctcgaggtgctgcagctgtgggagaataacttcaccggcggtgtgccacgccgcctcggccgcaacggccgcctccagctgctcgacctctcgtcgaacaagctcaccggcacgcttccgccggagctctgtgcggggggcaagctgcagacgctaatcgccctcggcaacttcttgttcggtgccatcccagactcactcggccagtgcaagtccttgagccgtgtccgtctcggggagaactacctgaatggctcaattccgaagggtctattcgaattgccgaagctgactcaagttgagttgcaagataacctcctcactggcaatttcccggctgtgatcggtgctgcggctcctaaccttggtgagattagcctgtccaacaaccagcttacgggtgcattgcctgcatctcttgggaacttctctggtgttcagaagttgctgcttgatcagaacgcgttctctggtgccatacctccggagattgggcggctgcagcagctctccaaggctgaccttagcagcaacaagtttgagggaggtgtgccaccggaggtcgggaaatgccggcttctcacttacttggacatgagccaaaacaacctctctgggaagatacctccggccatctctggaatgcgaatactgaactacctgaacctgtccaggaaccatcttgatggagagatacctccatccattgcaaccatgcagagcttgacggcggtggacttctcgtataacaacttgtctgggcttgtgccagggactggccagttcagctacttcaatgccacatcttttgttggcaatccaggcctgtgtggaccatacctcggtccatgtggtgcaggcataggtggcgccgaccactctgtccatggccatggctggttgaccaatacggtcaagctgctcattgtccttggcttgttgatctgctccattgcattcgctgtggcggcgattctgaaggctcggtcattgaagaaagctagtgaagctcgagtatggaaactcactgcattccagcgcctagacttcaccagcgatgatgtgctggattgcttgaaagaggagcacattattggcaaaggtggtgctgggattgtgtataagggggcgatgccgaatggtgaacttgtggctgtgaagagactcccagcaatgggccgtggctcatcacatgatcatgggttctcggcagagatacaaacacttggtagaattcgacaccgtcatattgtgcgcctgctaggcttctgctcaaacaatgagactaacctgttggtttatgagtatatgcccaatggcagccttggggagatgctccatggcaagaagggagggcacctccactgggatacccgatacagcattgctattgaggcagccaaggggctttgctacttgcaccatgactgttcacctttgatacttcaccgggatgtcaagtcaaataatatacttcttgactccaactttgaagctcatgtggccgactttgggctagcaaaattcttgcaggactcgggggcatctgaatgcatgtctgccatcgctggctcatatggctacatagcgccagaatacgcatacacattgaaggtggacgagaagagtgatgtctacagcttcggcgtggtgcttctggagcttgtcacaggaaggaagcccgtaggcgagttcggcgacggcgtcgacatcgtccagtgggcgaagatgacgacgaactcaaacaaggaacaagtgatgaaggtcctggacccaaggctctcgaccgtcccgctgcacgaggtgacgcacgtcttctacgtcgcgttgctgtgcaccgaggagcaaagcgtgcagcgcccgacgatgagggaggtggtgcagatcctgagcgagcttccaaaaccgccatctaccaagcagggagaggagaattctaccaagcaaggagaggaggttccgaattccggcgacggctctgcgcccagccctctacactcagcaccagttgggaccaacgaagcaccagccgtcgaagcgagagaccaccagcagcagacaagctctccgtcgtcgccaccgcctccagatctcatcagcatctga

SEQ ID NO: 17851 - DNA, 1191 bp, Zea mays
  Peptide Sequence Number=SeqID_59630
atgcagcccgacgccaacgctccctcgcaccgcctcgcccgcgtcgccgcgcacctaaacccccagcggccgcagatggaggaaggcgcgtccgcactgaggctcgtggtgtgccgcgccaagggcggcgcgccggggttcaaggtcgcgatcctgggcgccgcgggcgggatcggacagccgctgtcactgctcatgaagatgaatcctctcgtgtccgtgctgcacctctacgatgtcgtcaacacgcccggggtcacggccgatgtcagccacatggacaccagcgctgtggtccgcggcttccttggggcacagcagcttgatgccgcacttacaggaatggaccttgtaatcatacccgctggactccctaggaaaccaggaatgacaagagatgatttattcaacaaaaatgctgggattgttcgtacactatgtgaaggcgttgcaagatgctgtcctaatgcaattgtgaatctgatcagcaacccagtgaactcaactgtccccattgctgctgaggttttcaagaaagctggaacttatgatcccaagcggcttcttggagtgacaacactcgatgttgcgagggctaacacctttgtggccgaagtgcttggagttgatccaagagatgtcagtgttcctgttgttggagggcatgctgggataactatattgcccctcctctcccaggttacacctccgagctcattcactcaggatgaaaccagatatttgacagaccgcatacagaatggtggcacagaagttgtggaggcaaaggctggatcaggctccgcgactctgtcaatgaagaaaaaatctcaggcttttgctgcttctaaattcgctgacgcatgcttgcgagctatgcggggcgaagctggaatcgtggaatgctcatatgttgcatccgaggtgacagaactgccgttctttgcaacgaaagtgaggcttggccgtggtggagccgaggagatcctcccgcttggccctttgaatgatttcgagagaattgtgattccatcgcgtcaaaatctgttagacgatgaattctctcgatctccgaaatccaatggcctaacgcttattgggtctctgggggaaaacagagctggtctggaagcggcaaagaaggaactgggcgagagcattcagaagggcatcgctttcatgagcaagtga

SEQ ID NO: 17852 - DNA, 534 bp, Zea mays
  Peptide Sequence Number=SeqID_59631
atggctcccggccccggctggctcatctcttttctccgccactgccggtgcggtatgatgcagtatgccgtgtgcgccgggcgtcgagcctcgttttcggcctcggtcgctgagcctgcacgggtgtctgtcgtcgggtccggaagctcatcatatgtactatatgccccctatccatacctggctactaattatggtacacaactttccttgttcacacaccacatgtggattggcggatttctaatagttggtgctgctgcacatgcagtcatttttatgaacaagaaactgacaactttgtcactgaacaagaaactgaggattattttcatggcaatttcagtttcttgttcatatattttcatggcgatacatgttctgtatggctggagtctggagagaagcagtgacgcaccgtccactggtgcgaaagtgcgagcagatcgctggctgcctgggacctcgccaccaccacaccaccaccaccagattgcagcgcgatgcaatcgatgtgagcagatcgctgcctga

SEQ ID NO: 17853 - DNA, 1404 bp, Zea mays
  Peptide Sequence Number=SeqID_59632
atggctgcttactggatcttgcatatggcactgctcctcctatccatcacctcccagcaggttctcgcggcgaggcagcagcaccgccataccatcagcgtccaccagtcgtctctgctgcccagttcgatgtgttcttcgtcacctcctgctccagtgtctcgtagcggagctggaaacaccatccaaatcgtccaccgcgcgtgcctgcaaagcggggaccgcaagacagtgccggaccaccacccccactacaccggcatcctgcgccgagaccacaaccgagtccggtccatccaccgacgccttaccggggcgggagacacagccgccaccatccccgcaagtctcggcctcgccttccacagtctcgagtacgtggtcaccattggcatcggaaccccagcgcgcaacttcaccgtcctcttcgacaccggcagcgacctcacctgggtccagtgcaagccgtgcaccgactcctgctatcagcagcaagaacccttgttcgacccgagcaagtcttccacgtacgtcgacgttccgtgcggcacaccgcagtgcaaaatcggcggcggccaagatctcacctgcggtgggaccacgtgcgagtacagcgtcaagtacggcgaccagtctgtgactcggggtaaccttgcccaggaggcttttactctgtcgccgtcagcgccgcctgccgccggagtcgtgtttggatgcagtcatgagtactcttcgggcgtcaaaggcgcagaggaggagatgagtgtggccggtcttcttggtctaggccggggcgactcgtccatcctctcgcagacacgccggggcaatagcggcgacgtcttctcctactgcctccctccacgcggtagctccgcgggatacctcaccatcggcgccgccgctcctcctcagtcgaacctgtccttcacgccactggtgaccgacaactctcagctgagctctgtgtatgtgacgcctcggctttctacatcggcacggtcatcgactccggcaccggtgatcacgcacatgccggctgccgcctactacgtcctgcgcgacgagttcaggcgtcacatgggcggttacacgatgctgccggaggggcacgtggaatcgctggatacgtgctacgacgtgacggggcacgacgtcgtgacggcgccaccggtggcgctcgagtttggcggcggcgcgaggattgacgtggacgcgtccggaatcctattggtgttcgccgtagatgcctcggggcaatccctgacgctcgcgtgcttggccttcgtgcccaccaatttgccgggttttgtcatcatcggcaacatgcaacagagggcgtacaacgttgtgttcgatgtggaaggacggaggattggcttcggagcaaacggatgcagttga

SEQ ID NO: 17854 - DNA, 330 bp, Zea mays
  Peptide Sequence Number=SeqID_59633
atgcagccagttaagtttcaagcggtagcgcctcatgctgttgaagacctactagaggtcgtcgatgaagttctccaggtccatggttttgatcaccacatcgtcaatactgatttagtgatatcccaagtaacagtccaggagagcatggagcagccgacgaaatcggatgagcgtgtctttctatttggcggtgaagctggaactgatgatcgtcgtcttgtgttcatcggaaaaaccaaggttggatctcttggtttcttcgatcagtcacaaggtggtagtggtagatgcttcatttgtggggattgtgaggtcatcccttggtga

SEQ ID NO: 17855 - DNA, 228 bp, Zea mays
  Peptide Sequence Number=SeqID_59634
atgggcaggggacatcaggttggggaggaagaacagggcaaatgccgtcacattctaaaaatgtgctcgaggtacaaagatgagacacttgagagatttgcagggtttagggggagagcagtcctgaatttcgatacaaccctaaaggttgtagttatcctgaagacgcctattgtactattttttccaccttttaacgatgagttggtcatcgcagtattcatctaa

SEQ ID NO: 17856 - DNA, 225 bp, Zea mays
  Peptide Sequence Number=SeqID_59635
atgaccggcgatgcccgcgccatcgccgcagcaggctgccaccgcgggctcgcgtggacaggccacctggggctgccgccggcccagccaactccttggctgggcgcgccctccaccagggacggctcggctggccccgccgcgctcggccgacgccggcgagccccggcaaggcaaggccgatcccctttcccctattttgtgctgaagtttgaaaattcatag

SEQ ID NO: 17857 - DNA, 1160 bp, Zea mays
  Peptide Sequence Number=SeqID_59636
aggtggaagagcactatagtcacgagctccacagtccaagctcgcactcgcaagtgctagcatctctcggtatggtgaagtcgcgtggcttcgtgatggcggctgtgatggtggtggcggcggtggtggtcgtggtatcggtggcgccgcgcggcgcggaggtgaagacgacgatcgagccatgctcggggtctgactcctgcccggcgctgctgggttacacgctctacgccgacatgaaggtgtctgaggtggccgcgctcttcgtcgtcgacccggtggcgttgctggccaccaacgcgctcgacttcggcgccccaggggcggcgcaccgcatcctgcccatgggcctcttcgtgcgcgtgcccacccgctgctcctgcgccgacggcgtccgcaagtccgtctccgtccgctacaccgcgtgcccggccgacacgctcgccaccgtctccgacgtcgtcttcgcggggctcgcctcctccgaccagatccgcaacgagaacggcctcacctccgccgaccccgacgcgccgctggacgccggccagaagctcgccattccgctgccatgcgtctgcttcaactcatccgacaacaacctccccgcggtgtacctctcctacgtcgtgcaggtcggggacaccgtgcccgccattgctgcaagctacgagaccaccgtcacggatgtcatgaatgtcaatgccatggggagtcccgtcgccgcgccaggcgacattctcgccatcccattgccagcccgccagcccccgccgtgcccctcccccacgatcgaggcaccgtcccccgtcgcccccgccccggatctcgcccccgtcgcggatcccgcactggctctgtgcgggagtgctgtcgggctctgtgcgggagtgctgcggcgccttcctccagctcagaagatcatcgtcttcaagaacggaaacggaacactaagcagcagtggtggatccgcaacaaaggctgagactgactcaccgatggctgcgagctcgtggtccttcacccaggactgcaccgacgagcttatctgctccaccgttgactccatcgactcggacggacggatctcggttccctccctgcctgtctctgatgcggggggatctgggatgcgactcctgcttttgttggacgattga

SEQ ID NO: 17858 - DNA, 282 bp, Zea mays
  Peptide Sequence Number=SeqID_59637
atggtcgacgtcttgacagcgtgcaggggcgcggggtcttcggcgctggtcgctcgactcctgctcctgggcgcgcgacgcggcgctgggtgcgcgcgggttgctcggcggcttggtgtggcttggggaagaaagcagggaggagagagaggtaggggaaggagagagaggaagagaaaggcggatggacaaaggaggactggcggctaccaagggcggtcgggcggcggctgcgagccaaggggagagggaggagcgggattttcatttaagaagaaatga

SEQ ID NO: 17859 - DNA, 330 bp, Zea mays
  Peptide Sequence Number=SeqID_59638
atgactagctggtcacccgacttgaaaatagtgtttcagctacttgcaaagatcaatctccagacctttgctccccagtttggagaaggaagcttcatgcagtggtggcaaaggtgtagtgaccagctgcggggtattgccaagaaagggtttaattctcttattacccttaggctatggactttatggaatcacaggaatggatgtgttttcgacaaaattcttcctaatttgggagcagctattagaaaagctgaggagagggatttgtgggtgctggctggggccaagaatttggatctcctaacagcccctatcccagggttgtag

SEQ ID NO: 17860 - DNA, 99 bp, Zea mays
  Peptide Sequence Number=SeqID_59639
atgacaagagaagctggacaaggatctggatcctcagagcgcatgggaggtcatgctatttatgttgctatctgtttattttcagttgttccatcataa

SEQ ID NO: 17861 - DNA, 381 bp, Zea mays
  Peptide Sequence Number=SeqID_59640
atggccccgctcctcaacgacccgggcggcgccagcgccgtgacggcatgcctccgcggattcgggtcgggcgccgggaacgacagcctctgccgctggctctacgacgtgttccggtccaacgtccccgagctccagctcgcactgttggtgccgtcgctagctagggcgcacctgtgccacgccatgtcacggaagccgctggccgggttcgaggcagtgctcctcgcgctgtacgcgcatgtcgcgtcgcagcgcgacgccggggaggtcgagactcgagaccatatcgctcccgaacctggcaaagattttggtacatcacaaagagaacccgtaggaaaaattgaacaagtacaatcaatcggtgaggttcactga

SEQ ID NO: 17862 - DNA, 690 bp, Zea mays
  Peptide Sequence Number=SeqID_59641
atgggctgccacatcctagtgtctgcctcctatgtgaccaggaagatgagcagctcaacacattctagtgtcttgcgtcttctcctaggagacttggaccaaaatcctctgttttgttggactgcaggccgctgccccgcaactgagagaaattttgctcgctggtggggatgcgcagtcaagaaagtgccaaaggagaagagaagagaatttaattctctcgtcatgcttgttgcttggacaatttggaacataggaatgcgtgactttttgagggtcttagtcctagtgtttccttgctctcttgcgtcgctcttggaggagagcaagttccaacaactaccactgccttgcgaagatcttcctcgacaacagccatggcatggttccaacccagtaagcatgggagaaacagccctggagaagcgtaagcttgagacattgcaggatgatcgacgcgcctcgtctggcgctgaccgccaggcaatggaggagaaagtctgcttcagacagactacaaggtcccaggaggttgctgatgttgaagatgggaccaaacaaaagctttgcctgggccgacaccgccaagacgagaccacaccgtcctcttgggatcagatgagaaaacctgagcacgaaccggagccaacgagcagaggaacgccctatggccaagcccacaacacttga

SEQ ID NO: 17863 - DNA, 1164 bp, Zea mays
  Peptide Sequence Number=SeqID_59642
atgtggggaagcagacgcctgcagggggctaaatgcaatcccctggaaggtggctgccggccccggagtgggcgccggcgtgaggctttggagagtgcaggcgtcggaaggggaggggaagggacgcgcgggaagggagtggaagggacgcacttgggacatcgcgtctttgaatactccagatttctcaaagaagaatggaactacctaaatgagaacatttcatcgaaagaatgtcccttacgagaaacagtgtggaagaatcttcctcgtaaagtagaaaagaaaatagttgaggcaattagacataatctgcctactgaccgggcaccagatcctgatggttttactaattttacaaatcctgttgggtggtcatcaaatctgatcttatggctgcaatcatctccttacaacaagatcacatgtaggcttcctggttggaaggcctctcacagtaataagtttggtctagcggttctggtgaagtctcctgaacggagaaaagctaatgagaaaatctttgaaaattctcggcgacacacccaatgggtgtgcccaaggggtgtcttgaggcaggaggggtcgcggtggcctcgccgtgctgatggcaagcacaagcgtgcttcgagtcctccctcggaggacttcggggagtcggagtactcggaggaggtctcctccgagtctgaccgtttcacctgccccggcttctccccccggcgtcatccgaggactcgtatgactccatgggggctctccaccgtggcccgggcgtactggcgctccatcgagcgcgccgggctcggtggatcggatgagtcgggggtctcctcggatgaggcggactcctccgactcatccgaggagtggagcggcggcgacggtgatgacaaggacgacggcagcagcagctgcgacgacgacaagggcgacaacgacaaaggtgacggcgacaacagcgacaacagcggcaagggcgacggtggcgacgacagcagcgacgacgacaagggagacggtgatggcagcggcggtgacgacagcggcaagggcgacgacgacagcggcaaaggcgacggcagtggcgacagcgacggcagtggcgacagcgacggcagcggcaaaggcggcaaggccattggcataatgccactgatttaa

SEQ ID NO: 17864 - DNA, 275 bp, Zea mays
  Peptide Sequence Number=SeqID_59643
attttggaggacagccgcggctgcttggagcgcttagcccggagcgggaggccgggagggtgcaacaggacgtggaggcatgcgagccgccacaacggggatgggagagccagcgaccagcagggggaggacaactggggagggggaggggagcggggaagggtggccggcggttaggtgcacaggcgccgacggccaggtgcgcaggagctggcgactggggtgggaaaggaaagggagaggctctagtaccaagttggaatggaaaaccctaa

SEQ ID NO: 17865 - DNA, 1593 bp, Zea mays
  Peptide Sequence Number=SeqID_59644
atgtgggaccttaacgactcgccggccgccgaggccgccccgccttccccgtccgccgacgactccggcgcgtcctcctcgtcggcggccgcgctggtcgagatacccgacgacgcggacgacgactcggccgccgccgccgcggaagccgtcgtcacgcgccagttcttcccggccccggccgccgtcggcgcggcgcccgggcccggctcgtcgagcgcgcgcgcgggctggcttcgcctggccgccgcggctccaccgcccgcggcgggcggcagtaacggcgtcgcgcaaaccggtggcccgcggcggcggcggcggcggctggcaagaagagccggcgcgggccgcgggcgcgcagctcgcagtaccgcggcgtcacgttctacgccggacggggcggtgggagtcgcacatatgggattgcggcaagcaggtctatttggggcgtacgatcgggcggcgatcaagttccgcggcgtggaggccgacatcaatttcagtctggaggattaccaggacgacatgaagcagatgggccacctgagcaaggaggagttcgttcacgtgctccggcggcagagcacggggttcccccggggcagctccaagtacagaggcgtgacgctccacaagtgcgggaggtgggaggcgcgcatgggccagttcctcggcaagaagtatgccgtcgtcctcgtccgtccatctcccttctcgccttccttccttccttccttccttcttcccacaaccactgctttcctcttttcctcccagtccctgcatcggcatcggcatcgccccttttctttccttgtcgttgcgcatctcattgttcatggctgtcacttccgggcgtacgaccgcgcggccatcaagtgcaacggcaaggacgcggtgacaaacttcgatcccagcatttacgccgaggagctcgagccggcgggttcgtctatcccccgcccgcgatctccgccacgatcgcgccccctcgtcgctgtgcggcgatttcgctacaggctacagcctatacaggcaagctctgacggtccgctgtttcgccgtgcagcgtcgacgggcggcggtggcgatgaccacaatcacaacctggacctgtcgctggggagctcggcggggaacaaaaggggcagccttgacgacggcggcggcggaggaggcggcggcgacgacgagacctcggaccagcgcgtccccatggcgttcgacgtcgactggcagacggccgcgccccggagcacgaaagcaaagtcgcagttcctgagcaacggcggcgatccggggacctcgggaggcctgtccctcgcgatcggcggcgcgggcggcgggcactggcctccccagctgcagcacctgcagcagcagaggctgcacggcgcctgggccaacggcggcggcacgagctggccgcctccgccgcacccgcacccgcacccgcacccgccgccaccgagcaccgccgcgaccgcagctgcagcatcatcacgattccctccctacgttgttactacgacgcaaggcccggcaggctgggctcagaagaatgggttccattcgctggccaggccaacctag

SEQ ID NO: 17866 - DNA, 457 bp, Zea mays
  Peptide Sequence Number=SeqID_59645
atgttgtgggactcggacaacgaagataaagtgcacatggttgaccatcctactgagcgtcatgctgctactcatgcagataaaggaaaggctatggctgataccaacacatcttctagtggtgctgatgtggtaaggtcatacccgaacctgaccgcgccgcgcctcggccgcgccgcgcgtctcctccaggagcacctcaacctcgacagcagctgcttcaacggcgcagccgactggcggcggccactgctcctggcggcgtggaccctcctgccccgggcgctgccgctgcgacggccaaggcaaccgagacacggcggcgcctactcacctgagctgcttcctgtccgtgctactgctgccgataaggtcgtcggcggtttcctgtcttactatgaggtcactcgtgaagctccaaatatttgtgtggcgccactaaggttggttgtcaccg

SEQ ID NO: 17867 - DNA, 144 bp, Zea mays
  Peptide Sequence Number=SeqID_59646
atgacatctggtggcacgatctctacatctagacaactggaagctaagcgagatctcgtcgctggtgtcgtctacggcaccgacttcttcacgaagaggaaaattcaagacagtagaggaatcttaattggacagattgagtag

SEQ ID NO: 17868 - DNA, 231 bp, Zea mays
  Peptide Sequence Number=SeqID_59647
atgctgttccaagtgggagggcagggcgcgcgacccaccttcttcgagatgtccgccgcgcagcagctgcccgccagcctccgcgccgccctcacctattcgctcggggtaaaaccgcccgcctccttcccttgctgttgctcgtctccgattggatcgatcgagtctctgaggttgtatgcctggttcgggggattgtctaatcgcgcgtgcccccgttgtacatcttaa

SEQ ID NO: 17869 - DNA, 201 bp, Zea mays
  Peptide Sequence Number=SeqID_59648
atgtcgcccaccacacatgggagctggagactagagggtgtagtggcggagcgctatgctagagcggttgagccgcaagcggagaagcaggctggaagcaaagctggagagggggagctagaacagcggcggccaaggtatggcgtgagccatagcacgccataccgggcgctccgccactgcacttacctagctcaataa

SEQ ID NO: 17870 - DNA, 713 bp, Zea mays
  Peptide Sequence Number=SeqID_59649
atggcgtctctgctcagcctgtacggcggcgacgccgccggcggtcggaggaggatgagccgaggtagcggcacggcgccggcgccggtgaggcgtctgctgaggaggctgaggtccagcttcatcagacggagcgcggcgcggccgaggacgagggcggcggcgaggttcgcctacgacctgcgcagctactcccagaacttcgacgacggcgtcatttcgtcccgtcgccgccgggatctgccctgcgcgccaggcggccgccgcccgaagtccctgcgcgccaggccgcgcgcccccagcgccgccgccgggacctgcccttgcgtgcctggtcgccgccgccaggagccctgcgcgccaggccgcgccgccagccaaccaagcgccgcccaggactccgcgccgccgtccagcccctgcgcgccaggccgcgcccggagccagccgaccgagcgccgcccagggatctgcgccgccgtcagcgtccggccgtccggctgtgcttccgcgccaggcggccgccgccaggagtccctgcgtgccaggccgcgcctccagccttcggaggcggctcaacctgctcatgcagtggcgtgcggatatgacgacagtcagacacgaactaaaagtccctactttgggcggcctggggcggcttgctgggctgttggctctggcttcgctgctaggggcgcggcgctcgtctccgg

SEQ ID NO: 17871 - DNA, 4269 bp, Zea mays
  Peptide Sequence Number=SeqID_59650
atggcggaggtcgaggctccagctgctgcggttgcggcggcgacccctgaggtggcgacggtgaccgagggcggagccgctacggaggcgaagggtccgcacaagctgcaccgccagtggaccttctggtacgacatccagtccaagcccaaacccggcgctgcgtggggcacctccctcaaaaaggcgtacaccttcgacaccgtcgaggagttttggggcttgtatgatcatgttttccgtccaagcaagttgcctgggactgctgattttcacctattcaaggctggagtagagccaaaatgggaagacccagagtgtgcaaatggtggcaaatggactgtcccatgcaacagaaagccaacctttgagaccatgtggcttgaaacgttgatggctcttgttggggagcagtttgatgaaacagatgacatttgtggaattgttgctagtgtccgtccaagaggagataagcttgcattgtggactaggactgccagcaatgaagctgtccaggtaaacattggcaagaaatggaaggatgtcatcgactacaatgacaagatcatctacactttccatgacgactcgagaagggataagccaagcagaggtggacggtacaccgtaaaactgggcagggcagggcgcgctcagcacgtttgcttcggaaacactgcgagtgtgcgacacatttcccggcttgatctcgaagcgagccctgatgtgtttgtcatgcacctgcctgccttggcttgtgctctaatcaacgccggactccccaactcacggttggtgcgggacgccaccccgccaccttaccgcccgcctcggcgcctcaccagtcaccacacctcgcgcctgccatcagctatatcaccgtggccacttccgtgtcccttcacggatacctcacccccacagcccccggtcgatcgctcggcaatcggcatggacgccggctcggtcaccggtggcctcgccgcgggctcgcacatgcgggacgagctgcatgtcatgcgcgcccgcgaggagccgaacgccaaggtccggagcgccgacgtgaagacgtgccgcgtgtgcgccgacgaggtcgggacgcgggaggacgggcagcccttcgtggcgtgcgccgagtgcggcttccccgtctgccggccctgctacgagtacgagcgcagcgagggcacgcagtgctgcccgcagtgcaacacccgctacaagcgccagaaagggtgcccgagggtggaaggggacgaggaggagggcccggagatggacgacttcgaggacgagttccccgccaagagccccaagaagcctcacgagcctgtcgcgttcgacgtctactcggagaacggcgagcacccggcgcagaaatggcggacgggtggccagacgctgtcgtccttcaccggaagcggtgagtggtgtgcggttccattgacgatgatgctggcgtgtcgcaagatgggtctgctgaccaatatgagtccgcgtgcagtcgccgggaaggacctggaggcggagagggagatggaggggagcatggagtggaaggaccggatcgacaagtggaagaccaagcaggagaagaggggcaagctcaaccacgacgacagcgacgacgacgacgacaagaacgaagacgagtacatgctgcttgccgaggcccgacagccgctgtggcgcaaggttccgatcccgtcgagcatgatcaacccgtaccgcatcgtcatcgtgctccgcctggtggtgctctgcttcttcctcaagttccggatcacgacgcccgccacggacgccgtgcctctgtggctggcgtccgtcatctgcgagctctggttcgccttctcctggatcctggaccagctgccaaagtgggcgccggtgacgcgggagacgtacctggaccgcctggcgctgcggtacgaccgtgagggcgaggcgtgccggctgtcccccatcgacttcttcgtcagcacggtggacccgctcaaggagccgcccatcatcaccgccaacaccgtgctgtccatcctcgccgtcgactaccccgtggaccgcgtcagctgctacgtctccgacgacggcgcgtccatgctgctcttcgacgcgctgtccgagaccgccgagttcgcgcgccgctgggtgcccttctgcaagaagttcgccgtggagccgcgcgccccggagttctacttctcgcagaagatcgactacctcaaggacaaggtgcagccgacgttcgtcaaggagcgccgcgccatgaagagggagtacgaggagttcaaggtgcgcatcaacgcgctggtggccaaggcgcagaagaagcccgaggaggggtgggtcatgcaggacggcacgccgtggcccgggaacaacacgcgcgaccacccgggcatgatccaggtctacctcggcaaccagggcgcgctggacgtggagggccacgagctgccgcgcctcgtctacgtgtcccgtgagaagcgccccgggtacaaccaccacaagaaggcgggcgccatgaacgcgctggtgcgcgtctccgccgtgctcaccaacgcgcccttcatcctcaacctcgactgcgaccactacgtcaacaacagcaaggccgtgcgcgaggccatgtgcttcctcatggacccgcagctggggaagaagctctgctacgtccagttcccgcagcgcttcgatggcatcgatcgccacgaccgatacgccaaccgcaacgtcgtcttcttcgacatcaacatgaaggggctggacggcatccagggcccggtgtacgtcggcacggggtgcgtgttcaaccgccaggcgctgtacggctacgacccgccgcggcccgagaagcggcccaagatgacgtgcgactgctggccgtcgtggtgctgctgctgctgctgcttcggcggcggcaagcgcggcaaggcgcgcaaggacaagaagggcgacggcggcgaggagccgcgccggggcctgctcggcttctacaggaagcggagcaagaaggacaagctcggcggcgggtcggtggccggcagcaagaagggcggcgggctgtacaagaagcaccagcgcgcgttcgagctggaggagatcgaggaggggctggaggggtacgacgagctggagcgctcctcgctcatgtcgcagaagagcttcgagaagcggttcggccagtcgcccgtgttcatcgcctccacgctcgtcgaggacggcggcctgccgcagggcgccgccgccgaccccgccgcgctcatcaaggaggccatccacgtcatcagctgcggatacgaggagaagaccgagtggggcaaggagattgggtggatctatgggtcggtgacagaggatatcctgacggggttcaagatgcactgccgggggtggaagtccgtgtactgcacgccgacacggccggcgttcaaggggtcggcgcccatcaacttgtctgatcgtctccaccaggtgctgcgctgggcgctggggtccgtggagatcttcatgagccgccactgcccgctctggtacgcctacggcggccggctcaagtggctggagcgcttcgcctacaccaacaccatcgtgtaccccttcacctccatcccgctcctcgcctactgcaccatccccgccgtctgcctgctcaccggcaagttcatcattcccacgctgaacaacctcgccagcatctggttcatcgcgctcttcctgtccatcatcgcgacgagcgtcctggagctgcggtggagcggggtgagcatcgaggactggtggcgcaacgagcagttctgggtcatcggcggcgtgtccgcgcatctcttcgccgtgttccagggcttcctcaaggttctgggcggcgtggacaccagcttcaccgtcacctccaaggcggccggcgacgaggccgacgccttcggggacctctacctcttcaagtggaccaccctgctggtgccccccaccacgctcatcatcatcaacatggtgggcatcgtggccggcgtgtccgacgccgtcaacaacggctacggctcctggggcccgctcttcggcaagctcttcttctccttctgggtcatcgtccacctctacccgttcctcaaggggctcatggggaggcagaaccggacgcccaccatcgtcgtgctctggtccatcctcctcgcctccatcttctcgctcgtctgggtcaggatcgacccgtttatcccgaaggccaagggccccatcctcaagccatgcggagtcgagtgctga

SEQ ID NO: 17872 - DNA, 264 bp, Zea mays
  Peptide Sequence Number=SeqID_59651
atgacgaagttgtggagttacccattctcgaagaaactcccctggcgaacgttggttctgggacgaaagaagctcctacttcggagttttcccaagcaacatagaggaagacaaatgcatagctctactaggatgaaggaagaatatacacagcctgcactagcaaatacaaagggcaaaggtgctgcagaaattgacgaagctaagaaagccatagaggaggacgtgtctattggcgaagggtgggaaggagattgtccttga

SEQ ID NO: 17873 - DNA, 234 bp, Zea mays
  Peptide Sequence Number=SeqID_59652
atggactacacggtgtttgagattgctgaattggatagagcagcaatgatttatcacactaacaacaaaatgaaagatggccaaacggcggcccagcacgagccagacgcctgcgggccacaactctggcccaggcacgtcataccggcctggttaaaaaatggtgcagaaggtaggattcgaacccatgtcccgatggaagaagggtgggagccactggataaagctatctaa

SEQ ID NO: 17874 - DNA, 453 bp, Zea mays
  Peptide Sequence Number=SeqID_59653
atggccgaatcggtatcaggatctaatcctacccgcacatctagatcggacggtcaggagttgtccgcccccttcctccaacgcgacggcggcgccgcccacggcatgcggcggagccccgccggaactaagcgattacgcgatccccgatcccaacctcaagctaagcgggtgctacacgaagagaagaacatagtgattcgtatgggcagaggctcaccagagacggtggccgagacggcgctgcccacgattaggggcaattccacagcggaggaggggcgcggtgaggaattaccgtcacaccgatggctccgagtgccgaagtacgagcacgcacagccacccgcccgttggcgaacctcactttcttctttgcgggcaccggaaggagcagaagaaggaaagccaaggcggcggcgtgagctcctactccggcgcgtagggcgatag

SEQ ID NO: 17875 - DNA, 2130 bp, Zea mays
  Peptide Sequence Number=SeqID_59654
atggagcagctgcggacgttcgggcgggagctggcgatggggtcgcagggcgggtgggggcagtccaaggatttcctcgacctcgtcaagtctatcggcgaggcgcgctccaaggcggaggaggaccgcatcatcgcgcgcgagctcgagcacctcaagcgccgcctggccgaccccgacgtgccacgccgcaagatgaaggagcttctcctccgcctagtctacgccgagatgctcggccacgacgcttccttcggccacatccacgccgtcaagatgacccacgacgagtcgctaccgctcaagcgtaccggctacctcgccgtcgcactcttcctcgacgagcgccacgacctcgtcatcctcgtggtcaacaccatccagaaggacctcaggtcggacaactacctcgtcgtctgcgcagcactcaccgccgcgtgccgccttattggtgaggaggccatccccgccgtgctgccccaggtcgtagatctgctcgtgcaccccaaggaggctgtgaggaagaaggccgtcatggcattacaccggttctaccagcgatcctcctcctccgtttcccacctcgtctccaacttccgcaagaggctatgtgataatgatccaggggtaatgggtgcaactctatgccccctctatgacctgatttcggaggaaccaaattcgtacaaggatttggttgttagtttcgttaacatcctcaaacaagttgctgagaggaggcttccgacttcctacgattatcaccaaatgcctgcaccatttattcagataaaactattgaagatacttgctgtgcttggcagtggtgataaacaagcaagtggacatatgtacactgtattgggcgacatattcaagaagggtgacactgcgagcaacattggcaatgctatactgtatgaatgcatatgctgcatttcatccattttcccaaaccctaagatgctagtggctgcagctgaaacaacatcaaagtttctgaagagtgatagtcataatcttaagtacatgggcattgatgctcttggcaggttaataaaaataaatccagatattgcagaagagcaccagctggctgtcattgattgcttagaggacccagatgacactttgaagcgcaagacatttgagcttctttataagatgacaaagtcaacaaatgttgaggtgattgttgataggatgattgagtacatgatcaacataactgatcatcattacaagacagaaattgcatcacgttgtgtcgaactcgcagagcaatttgcgcctagcaatcagtggttcatccagaccatgaacagagtttttgagcatgctggagatcttgtcaacatcagagtggcacacaatttgatgcggctaattgctgaaggctttggagatgaggacgaaggtgctgacagtcagctaagatcatcggctgtagattcttatgtccgcattgtcggagagccaaagcttccttcttctttccttcagataatatgctgggtgttgggggaatatggaacagcagatggaaaacattcggcttcttatattattgggaaattgtgtgatgtggcagaggcccacctcactgatgacactgtcaaggcgtatgcaatctcagcaattctgaagatatttgcgtttgaaatcgctcttggaaggaggattgatttgctgcctgagtgtcaaacattggtagatgaattgttagcttcacattcaacagacctgcagcaacgggcatacgagctacatgctttactaggcttgggcaaaaatgatgttgaaagtgttatgcctgcagatgcaagctgtgaagatattgagagacttttgatgccttggggatcgcacgctccgcgttgcacccccagcgccgcgccgatccacgacatcacacccgactacgtcaagtttgaagtggactttccaggggcctacaatgccatattggggagcccgggctacgtcaagttcatggtcgtttccaactacacatacctcaagctaaagatgcccgaccccatggggtcattatggcgtccacttccttccaagcagcccatgcgtgtgagcaagctagctgcgagctcgcgtcaggacaagccgttgtga

SEQ ID NO: 17876 - DNA, 630 bp, Zea mays
  Peptide Sequence Number=SeqID_59655
atgggcgtcgcttgctcgccggccttggaagtgtcgtcgcctcgggcccccggatgtatgtcttcattcaggccgcccgaactgcgctggatcggaagatgtaatgcgcgatcgtcgctgcgcgcacctcgcacctcccgtgacgccgctcgaacctcgcgcctcgtgtgtcgctgtcgctactcgcacatcgaggggcaccgcttgctcgccggccttggaagtgccgccgcctcgggccctggggacgccgccgcttgcccgcacaagggcactgccgtcgctcaccctctagatcggggagccaccgccggcggcctaggaatcgccgcctcgactccggatcgaggaaccgccgccaccgcacgtcgaggtcggggagtcgcggccaccgcagccactggccgggggtccaccgcagccactggccgggggtccaccgcagccactggccgggggtccaccgcagccactggccgggggtgccagggggtcggtgccatagatcttggcgccgaccccctggacggcgaggtcgatgacgcctacctcggcgccaagatctacgacatcgagaacctagacgccaatgatgacgacgctgagccaagagtccattttttgaaataa

SEQ ID NO: 17877 - DNA, 609 bp, Zea mays
  Peptide Sequence Number=SeqID_59656
atgacgcggaacgaccgtccctacgccagcggaacaacagcggagaaacctccgctcgccgtatccccgtccttggtgccccgctccacgcttcctcggtgtcccgctccacgcccgtcgcgtggtcccagccccaccccgtcctcctcgcgtcccccaccgctacagccaccagcagcaggaaaccccgccgcggggaggcaccgccccaagaagcgctgccatgggggcgtggattccgcatcaccgaccctgacccctgatagcgtcgtgctggctatcctcatcggggatgaggacatcgagcccgcgatgctagccaaagaggcgaacggcgggcacatggcgatcgaggctccgacgaggtggctccaccagatccagaagacggaagtagagaagagaagcgaaccaaagcaagcaggcttcaagaataagttagaaaagcaccggagaactgatcaagggctgaagaagggggttctgaagtttgaatttttccttcaagaatctcagtctcagatgcgaaaattaaagaggtttgaggcaagctctcctgcttctgagaaagaaaaaaagcaggataggaagcaggataggagcccgtaa

SEQ ID NO: 17878 - DNA, 447 bp, Zea mays
  Peptide Sequence Number=SeqID_59657
atggcgaacccctcgttttcagcccagacgcgtggccgaacagccctgccgcccgtcgccaacgttccatcgtgcccttcacccaaggcatacgtaggagcttcggtttctttccacacgctgggacttagcttttcttgtggtcgtgcacgaactcacggcggttttcggcctcttgccacgctgcgccttggccgtttccgttcggaagatcggtgcccctctcccgttggttcgaaacctagtcgctgggcgctgtgtagagtggggggagggacgaatccgtgcgacgcggggctggatctcagtggatcgtggcagcaaggccactctgccacttacaatgccccgtcgcgttttaagtcgtctgcaaaggattcagcacgccgcccgttgggaagggagcttcgaggcggcccgccgcggcgcgtcgaccgggcgggctga

SEQ ID NO: 17879 - DNA, 210 bp, Zea mays
  Peptide Sequence Number=SeqID_59658
atggagcaatggaagaacagcaatgctaaagacttcgtcgaccgtgagagggaactacgagaaatggcgtcgcgcacgttcacaaatggacgtctgactgaggatcaccgcgcccacacgcggtcatacgagaagcgtcgcacgatggggcagcggacttttgcgatgaagaaacccatgcggtcagacgacagtcgtgcggtggggtag

SEQ ID NO: 17880 - DNA, 303 bp, Zea mays
  Peptide Sequence Number=SeqID_59659
atggccgaccctctctggtggagatggtgcaggggatctgggcgtacggaggtggccgcgtcggcgaaacagatctgggcggtcggaggtgaccacgttggtgcaggggatctgggcgcaggggacgacaggctccatggtagaggtggtgcaggggatctgggcgtaggggacgacgtcgacagtggttggagacccatatttatagccctagaggctgcactaccacaccttctcacacacactacacaacaggattgtcctctagatgctaaagagactacagaggacagtcaaaagtga

SEQ ID NO: 17881 - DNA, 585 bp, Zea mays
  Peptide Sequence Number=SeqID_59660
atgaagggagcccaaatcctttatggcaaactcgtgctacgagaaagacgtagtgagcacaatgtcatcaacatgcaggaggagaagcgggatgtggaaaaatggaagcaggtggccgtggggtgcaaagggcccagagctatcatagcggacgagaaggctcgagtagcgagatccttcatgggcaagtcaaaaggatcaaactcaatagaacaagaattatcggtgatatatcaacaaacagataatagatttttgaatgatatgtggggcgacgagaacattgcgaagatgaaagcacctggaaagaaccagatcaccaacagagccgcagagaaggttgaggggcgtgcgatcaaagacgggctcccagaggccatagaggccaccatgcccttcatctggtggcagtactcggtggcggagagtaccaccacgctctcgaatgacatcctgcagttcaacagtgatggtcccgaggatacacgaaaggaccacattatccatccgctaccaagaggaaataatgagcctatagcagcagcaattgtctatctaacatgcagctctcatgcgttttcatga

SEQ ID NO: 17882 - DNA, 750 bp, Zea mays
  Peptide Sequence Number=SeqID_59661
atggcgacctgctatagctgcgtccacgagccggtgaaggagtacagcgccttggagagcgataacgagggctatagctcctgcaagcaaagcaccataggaagctccgctccgcccgacccagggctcggactcgggctaagccccggaagacggcgaactccgctccgcccgacccagggctcggactcggggctaagccccggaagacggcgaactccgctccgcccgacccagggctcggacttgggctcagccctagaagacgacgaattccgctctgcccgacccagggctcggactcgggctaagccccggaagacggcgaactccgctccgcccgacctagggctcggactcaggctaagccccggaagacggcgaactccgctccgcccgacccagggctcggacttgggctcagccctagaagacgacgaattccgctctgcccgacccagggctcggactcgggctaagccccggaagacggcgaactccactccgcccgacccagggctcggactcgggctaagccccggaagacggcgaactccgctccgcccgacccagggctcggacttgggctcagccccagaagacgacgaattccgctccgcccgaccaactctgccccggcctcagccaacggcctccgcctcgcccgacctaggggctcggactcgacctcggtcgcggaagacagactcgacctcgacctcggagaagcccccacatcgcccaacctag

SEQ ID NO: 17883 - DNA, 252 bp, Zea mays
  Peptide Sequence Number=SeqID_59662
atgacgctgcaggcgccttccacgccgccatctccgtgtcctccacctccttcgtcagatcagatcagcactcaccatggaaccttccaacgagaggtgtctcggtcttgcactgccgatgcggttgtcggggccgaggtcacacgccttgtgggtggcgatggcagcgtggagcagtgggatgcggcgaggcggagcacgcgtgggggcgtgtcgcgaggcgcgttgcgcgcatcacgacgagatggatga

SEQ ID NO: 17884 - DNA, 702 bp, Zea mays
  Peptide Sequence Number=SeqID_59663
atgtcgcggccgctgtacaggggcgtgtcggggatcggcggcaagctggcggcggcggacgaggcgtactacgaccccaaggagcccagcgagaacggcattggcgggggcttcggcggggcggcgcgcggaagcggcactcgcggccgcggcggtgaagatcggggtcctgctgctgctggcggcggcgctcgtgggctcggtcgcgagcagctggtcacggacctgctcgacatcggcgagctcgcgggcggcggcgtccgcgccaaggaggcggaggtgtgcccgcccgagtacgacaactacgtgccctgctactacaacatcacggacgccgtcgacgtctcggatctgggggccggcgtcgtcataagctacgaccgccagtgcacgcgcgacggcagggtcacttgcctcgtcgcgccgccgcggagctaccgggttcccgtgcgatggcccagcggcaagggcttcatctggaaggacaacgtgcggatcagcgggcaggagttctcgtccggaagcctgttcaagaggatgatggtggaggaggaccagatctcgttcccgtcggacgcgcacatggccgacggtgtggaggattatgcccatcaaatcgctgagatgattgggttgcggaatgaattcaatttcaatgaggctggggattcaggacacctgtactttatagtggttccataa

SEQ ID NO: 17885 - DNA, 1740 bp, Zea mays
  Peptide Sequence Number=SeqID_59664
atggcctcctcgtcgcaatcgggcggcgccggaggcggcgggacggttgcttccaatccccgcgtctggattgtcgcgagcatcgccgtcgcgggcgtcctcgtcctcgcggaggtcgcgcgccgccgccgccggtggctgcggggcatgtccggcacggcacccgacgctggatccttctgcgaccgctttgagcttcaccctccggcgcagccgcctcctcccgcggctcgccacattctctcgggtctgaccttcgccgctagtgacaacttcgagatcgagggctacgtagccgggtttgggaacccagactggaagaaaactcatgagacggcgaggcacactgctgtggctgtcacaatgctgcggaaacagggggccacctgcgttggaaggacaatcatggatgaactaggctttggtgtcactggagaaaatttgcaccatggaacaccagccaaccctgtttcttcttcactcgtccctggtggatcatgcagtggctctgctgtggcagttgctgcacaacttattgactttgcaattggatggtttgcacgagatccatgtattcttcatcgtgttggtgaagttcttttaccagccgctgtaggtggacttaagcaaacaaggcaatttgtttttgccgatgactgctttcagctgctaaaggtctctaatcagaaaactgtgcatgccataaaaaatgctgtccaggcattacgtggatatcagccacctaaacacatcaatattggccaatatatttattccaatgtacctagcctgaaggagttttgcgaaccagctacaaagttagaagaaggaacatcagccctgaaagcaatctccacagtgatgttgttattacagagatatgagtttaaagcaaaccacgaggagtgggttaacactgttaaacctaagcttggccttgatatctctactcgtgtgctacaagccgtgaattttgcacgggaaaacatcaaatctttgtacgcaataagaaatgaattgcgggttgcactcaagaatcttctaaagcttcatgctcttcagaagtctgacactccttgtgctgatgctcctggcagggacagcagcatgccttcagatcagcagctgctgcagcgtgacttgcacaggcacagcttgtctgggtgtgcccctcgtgattgggatactggaattttagttctaccaaccacagctggatatcctctgaagagaaactctaaagaaagactatcatctggatttgaggatagaatgtacaaatttgtaggcgttgctgcactttctggatgttgtgaggaccaagtagttttggcatccaagttggaaactgcaccagtaaccaatgttgatgttgatgtcaatgcatcagagcttctaaaagaaaagggaaatagcgctttcaaaagaagacagtggatcaaggcaattgagttttactcagaggccatcagtttgagtgacacaaatgcaacatattactgcaacagagcagcagcttatctggaactgggccgttttaagcaggccgaagcagattgtgaccgggccttactgttggatagaaagaatgttaaagcatatctacggcgtggttttgcaagggaagtaactttgaattacaaagaagcacttcaagatttcaggcatgctttggcattggagccacagaataaaacagctcttgcagcggaaaggaggctgcagaaactcctgaagtga

SEQ ID NO: 17886 - DNA, 120 bp, Zea mays
  Peptide Sequence Number=SeqID_59665
atgacgccctcgacgctgctgactttcttaaaggtggatgaaagtcccctagaggaggacactaagtcccacaagtatcaccacacacttacgtgtctcttgctagctgagagcacctag

SEQ ID NO: 17887 - DNA, 471 bp, Zea mays
  Peptide Sequence Number=SeqID_59666
atggcggagttggttgaggagctcccgcgcgcgaacccatggcaagttgaggaattcatggcgtggccacgcggagagctcgacgcgatggaggcatttgttggcagaggtggcgaccacgatcgacgctgggaaagcagaggcgactgtgtggcgatgaggacgtcgaggatggggcagacgcgcgatgaggacgaggagcgactgtcgcggcggcggaggcgggcgggtgcatcacgagcaagtgacaagcgagggcacactgtaccgattcgctatctgggccgcaccaaacatcgctggaatatgggccacatgaagattttagcccaggacaccagcattgtttgtggtgctttctttactattgtggttagtgccataccggctagtgaaacaggcagagaacggcttataagcgttggtgcagccccaaatgttaacttgctagcggctcaatggcgttggtag

SEQ ID NO: 17888 - DNA, 4554 bp, Zea mays
  Peptide Sequence Number=SeqID_59667
atgagggatctgtacaatcgcactcgccacaaagattttccggctctagaggaatcagccgaagggcgcagcggaggacgcccgtcgggatcggagcaacgggaactcgcctctaagatggaggacaaggctgtggtaaggaaaagattggtatcaagcaataacactcatgccaaagtagaatctggcacctgtaatgtctgttatgccccttgctcctcttgtttacacccacatattcgggttgtggattcgaatgttgaatgtgcatcctctcagacatgctccacaaggtcagaagtaaaaaacaattcactcgttcgtaatgagaaagggctttgtagtaaaggagaaaacgatgatgagtttagtgcaacctcaggtcatgtttccgactctgtggttgcaagagcatccattgcagacgattcatcagaggttaacatgccatcaaaacgcaggaggctgttaaatgaaaacacaagactacctagagcagaataccttgaagacagcaactcatgtgttactggtatatcagcagaaggcaaacttcatgtggataagaaaaaattatcaacttctgcatccagtcgagatttgactgctaaagattataaagtcaacagcatggctaaccacagcaaactaagaaaccaatgtattgatgaatcaaagaaaggatctgatggtcgtgacatgcatcctagctcatctggtagattttcccctgtagattcttctgttatgacaaaaaagatgctgcgaacccagtcttctgtcagtgcattgagcagattatctcctaacaggcaagctcatgaatttgggaaagcactggataatttatctcatcaaccttgtgagaaggcttctcttttgaagaataatgaacaactacgatgtgggcaattgaacccttgtatagctggtgaaaacaatcatggcacactggcaggctacagtaataggcatgcggacaaagatgttttctcattgaaggatctagacaatggtaccttgtgctcaaaagatgaaatccaagaacatggtggcatccattctaatgatgatgttaagaagaatgtgtgtggcgaacaagctttggatcaagattgttcaagggatatatccagtgacagaaagttgaatatacaacatgatgtgacagactgtgggaattcagaaggtttgatagatgttaatgtttgtgatatatgtggagatgttggtagagagtatcttttagctacatgcaccagatgccttgagggagcagagcatatttactgcatgcgagtgaagttggaaaaagttccagttggtgaatggttttgtgaagaatgccagcttaaggaagatcagaacaatacaagtaactatggtatctcggtggttaatgtgacagaaggaaagaaccaaaggacagaaagtcgaagcaagcctaagacattgcaaattgttgtgcctgattttgatgctctggaagtcacacacagcgcattgacagctgatcggtgtgatggtaacagtaaaaggttgcatttagcttcgactgatacacaaacacggcaactaaaggataccaccccagctgctcaaaggttggatgtgaagaacaaaaaatcattaagtgttacaaaccgtaacaaactgcaagttcttacatctgatttagacacacgaccacacaattatggaacatcaacatctggagtctataccaataaaagtcaaagttcagaatttttgttaaaccacaaaaagctgcgagtttctactgacatgcagtcgccactctcaagcgaaggcctacggagtccaccaatatcatgcaagagacatgcagagagtatgtcgtcccctaagcctaggatcgtcaaggcgggtacccttggaaaacaagatgtcatctctcgtgcgaactcatttaagaaatctaacaagggaggtttaagttcagttgataatattccagtgagaactacccaggctgtcaaaagttctgactctcagacattgtcacggtcatattccttggggaacatggtgaatgctaaagctccagttccttcaccaagaggctttttatccaagcagctatccttcaacagcaccaacaacggaccaaaggtcaaacagttggctgatggggtgtctagcaagttaagacctgcagaacattccccaagagatcctagagataagaaatccatcaaaaagattgtacaatcaggatccttcaaacacgagggttcagattccatagttgctggatcatcaaaaaaaaagcaaacatttcatttgtctcaagatgaaaaaccaggagtactgaaggtaataaaggaaaataatttaacagaaagaagggcttcatttagcttgaaaaaacgaaacattccttcatctccaaggcctgacagctgtatgaagtcaggggaaagaaaaaatgatcaggatatttcaaggtctggaacaagcatacttaaaagtagcaaaaaacctggatatgctgaaaagaagcagaacaatgatttgtccagaagtgataatggcaaggaagatgttaccgtgcatccaaaaacaatggaagtttctggtaaagatgcttacgtagtgaagacatctgatccaccagttcaaccccaatgtgccaaaaaggatagaccaaatgatgttgaggatgacgatttactcatttcagtgaataatgttaacatagcgccaaatgagcatgccgaggtggttcccacaacatttgctgccatgacttatgaatcagatttgcaagatgttccaagagaaagcacctctgatgattcagctccaaaagtggtatgttgccaacaaaagcttttggaaaacacaggagatgattctggtaaaatcgtagaggtggttcaagattcaggagatatattgtctgtgactccacatggtcttcagatggcacacaatctatacccccctgacaataaattgcataaaccagatttgaagaaggaagcttttgctgatcaatcttccgctcttgggaattgtttaaaagattttgttattccagagcagtcttacatctggcagggtgggtttgaggtttcaggacatggaaactcccctgaaatgttcgatgggtttcaagcttacttgtctacttgcgcctcatccaaagtacgtgaagtaggtgaacaattacctgacaaaattcagctagcagaagtcccacggcattcctcatggccactgcaatttaatgaagtaaatccaactgaagataatattgctctttttttctttgctaaagatgttgaaagttatgaaagggcatatggaaaactcttggataacatgcttcttggtgatttgtctcttaaagcaaatattggtggcactgaacttctcattttcccatccgataaattgccagagaggattcaacgttggaatggtttacctttcttttggggcattttttatgcccggaaagcaagtagtccactagagcttcctacaaataattgtccattagaacaaatcaatgaacctgttatccagcatgatattggttcgcctaaggcacatcagcctttgggtatagatttgaatgagtgccctaatgattatatatctgatctgtctctttcacttggatcagagagtgagaagtctggtgcatctttagatcgtaatattgtattagagtccaaacgtgaggatagaagtctgaatgcaagtgaaatacatcatgaagaaactgcaggcacaagacaaattataccggggcatccttctgttgcttcctgtggaactaatcttcccacaatctcaacaggaggtcatgacatgattcaggattatctggctgctgctaaaggtagcacaggaacaccaggtggaaacaaaatggagaaaacagatcagaatgaaactctgttccgtttttcgcagcaactaggtgcaactagatcaatctcacatgagatagaacttaataaacatggtcttttgccctcgcactgtcatttgagtggatcaaagatatgtgatgatcaaaccaaatcaactccaaattcagatatgggtcctttggattttgacatcaccaacaaaaggcagaagacttatgggaaacactcttgcatttttggagatgcaatgacacctatgaaatgcttgtccaagatacatcccttaccggctggacaggataatccatgcgatgttttacagcattgtcatcggggcccttcagatcctgcctctcttaaaaaacctttacctgatcatttcatccacgttctttcatctgacgacgaagattccccagaacctagtactagcttaaataaggcatcatcgaaggcagatgagggctcctccattttatgctcactttccctatccatggtggcaacgaagcgtaatctttctggttcagatattgtagatgatgaaccactgtctctctctcttgggctccctagtgttgtcggtgggagagcagatcaggagatgaagcaattcctgccggagaagccaggcataaacacttaa

SEQ ID NO: 17889 - DNA, 1281 bp, Zea mays
  Peptide Sequence Number=SeqID_59668
atgcgctctcccctagcagccgaggactgtcacggcgataaccacgtctctgtccctctccaactcccacaacacgacatcctcctcatcgtcgcagcttccccgaccctgtccaccagcgcctctacacacgacggctctggcatcgtggttcgtgctcgactggctgactccggcatcgaacagccgcaaccccacatcgttggcaccatccgttcggcggatgtgtggatccatggcctccaagtttggatccagttgaacattccccagatctggtgcgacatacaacacgaagaagggaggcgacgacaccggatcttcgaagccgaaaggtggtggctcctggagcacggcacgctgcctcaaacggacgtgctggccgacgctctcgctggcaagctcgacaatagtggctgcagcctctccgagctcaagaggaaggtgaggagtttgcagagccagtacgccaaagcggtcaagaaaggtgcgccaccgagcaaggatcaggatcgccgtctcttcgacctctgcaagaacgtctggccttctgttagcaataccaaggcgtcagctaacggtggtgctgggagggagcctgacgagatgtgtgagctgtacccataccttgtggaggaggtgagggcgcttcagaggccacacccgggcttgttcaagcgggagtttgggatgatcgacgacagcaaggcctgtgcactggatgagaggactacgaagccaggccctgccaaaggcaccataggaagctccgcccgacccagggctcggactcgggctcagccccggaagacggcgaactccgctccgcccgacccagggctcggactcgggctaagacccggaagacgacgaactccgcttcgcccgaccccagggctcggactcgggctaagacccggaagacggcgaactccgcttcgcccgaccccagggctcgggctcgggctcagcccagaagacgacgaactccgcttcgcccgaccccagggctcggacaccgccctggcctctgccgacgacctccgcctcgcccgacccaggggctcggactcggcctcggccatggaagatagactcgacctcggcttcggaggagcctccacgtcgcccaacctagggcgagggcgtcagcaaggacacaaccgctccgacagctgtccctccgccaggctccgtcgctcctccgacggccacgacatcacactagttgggctccaagatctctccggctgccacattggcatgtactcagggcactag

SEQ ID NO: 17890 - DNA, 129 bp, Zea mays
  Peptide Sequence Number=SeqID_59669
atgaaacaaggactcctcaaccagctcgtcgcccatccagtagacggcatgcgggctggaccgaagcaaagaggctctagtttagctgagagagcaaacaacggcgcattggatccgatccacggttga

SEQ ID NO: 17891 - DNA, 438 bp, Zea mays
  Peptide Sequence Number=SeqID_59670
atggcgcgacagcaccacgaacgacccgagcttcggccatcagcaagcgcagtatcgacgacgaggatccaccgaccgcaaacacctaaactacacgcgacgctggccgatccaggaacgcggtcgagcaagcagcgagcaaaggaacatcgagcaggaccgagcgccgtggcgagctggaggttgaagagagcgaaggctaggcggcagaaacctcattgctgcgcgcagggaaaacaagggagcggaggcacgacagccatggctcagcagagggaacgccgtgagctggagctagaagaaggagcacggacgggcggggcctcggccgactgggagaagcagagaaagaagcttgctaacaggaaccaactcgaactggagaagagaaggagagggagaaggaggaactggaagtgttcccccgaggtagattag

SEQ ID NO: 17892 - DNA, 141 bp, Zea mays
  Peptide Sequence Number=SeqID_59671
atggactacatggtgtttgaggttgctgaattgaatggagcagcaatgatttgtcacactaacaacaaaattaaaggaggtggcgttcgaacccatgccctgagggaagaagggcgggagatattgggtgaaacagtctaa

SEQ ID NO: 17893 - DNA, 1407 bp, Zea mays
  Peptide Sequence Number=SeqID_59672
atggatcatgtggtcgggggcaagttcaagctcggcaagaagatcgggagtggatcgttcggggagctcttcctcgccgtgaatgtgcagaccggggaggaggtcgccgtcaagctggaaaatgtcaagacaaagcacccgcagcttcattacgagtccaagctatacatgcttctccaaggaggaactggcattccgcacctcaagtggttcggcgtcgagggggactacaatgtgatggtgatcgaccttctcggccctagccttgaggacttgttcaactactgcagcagaaagttctctctgaagactgtgctcatgctcgctgaccaaatgattaaccgggttgagtacatgcatcaaaaggggtttcttcaccgtgatataaagcctgataatttcctcatggggcttggtaggaaagccaatcaggtatatataatagactatggactagcgaaaaaatatagggaccttcaaactcataagcacatcccgtacagagagaacaagaacctcactggaactgcacgatatgcaagtgtcaacacccaccttggtgttgagcaaagcaggcgagatgatttagaatccctcggttatgttcttatgtacttccttaggggcagcctaccatggcaggggctgaaggcaggaaccaagaagcagaaatatgacaagatcagcgagaaaaagatgctcactcctgtggaggtactctgcaaatcgtacccatcagagttcatctcctacttccactactgccgttcgttgcggtttgaagacaagcctgactattcttacctgaagagactattccgcgatctctttatccgggaaggataccagttcgactacgtgtttgactggaccattctaaagtatcctcaaataggctccaacccacggaccagggccggtgaaagaactagtggcgctgctggaccctcaatggataggattgagaagaccccaggagaagcgtccggtagaaggaaccctagtggtcctgtgaatcagagcgacagttacgcgcaacggccacgcgagaccgtatccatgtcgctaaaggagattatgcatagcactgaccggtctggggaaaggactgtggagagaccacgcacgtcctcacgcacaggcagcgcatcccgcagagccgttgcgtcaagcagcaggccagcaacctcgtccatggaaccaagcgagcagcagtatagccgggcgagcagactgttctctagcaacagtggcagccggccatccagcgcccagagagtcaaccctgcgccgggcgagtctagggccacctccctttcgcgggcagcggtcgcgagaggctcccgcgacgagccactccaccgcagcctggagctcctttcccttggcagcggcaagaggaaatag

SEQ ID NO: 17894 - DNA, 675 bp, Zea mays
  Peptide Sequence Number=SeqID_59673
atggggatgggaataccgaatgcatttgaaggtgacatggttcgtaggagggcgcaaagctatctgtctccagtagagacattgctcatttgtccagaccctctatgctcctctgtatggaccaaaatctttctgcccgatcttggctttcttggccaattgcttgcgattgcaatcagtcacaccggacagcagatcgcatctgcgcctctgacagtggggggtgcccagcaggtaaacggtgtgagggacaaaatgcagctagaaaacagcgccgcctgccccgctccgacttatgtgccacccgccagggtgaggctaacgacagctaagttcagcctcaggcgcaacaggaagctccgcctcgcccaaccttgggcctcggctttaggaggaggtctccgcctcgcccgaccccagggctcggcccccgcctcggcctcaggagaaggtctccgcctcgcccgaccccagggctcggcctcaacctcggcctcggaagatggtctccgcctcgcccgaccccagggctcggcccccgcctcggcctcaggaggaggtctccgccacgcccgaccccagggctcggtctcaacctcgacctcagaagggatcgcgtcctcacccgaccccggcctcggcctcgggaggagtctccgcctcgcccgaccttga

SEQ ID NO: 17895 - DNA, 471 bp, Zea mays
  Peptide Sequence Number=SeqID_59674
atgggcaagaacaacaagcgcaagcgtgagccaactcctccatcggaggattttggtgactcggagtattcagaggaggagttctcctctgagtctgaggggtctccggctcccatccccctgcgtgagtcgtctgacgactcagacgactcccaggggctcgcggcggaggtctggacgtacatccgggccgtcgagcgctccgggctcgagggctcggatgagtcggagtactcctcggatgaggaggactcggacggtggcggcgaggacgaggatgacgacgacgacgacgacgacgacgacgaaggcggtggcggcggtgacggtgacggcagcggcaggggcggcagcggcgacggcaaagacggtgacggcgacggcagcaggggcggcagcggcggtggcggcagcagcaggggcagcaacaggggcggcagcggcggcggcagcaacagggccagtggctag

SEQ ID NO: 17896 - DNA, 330 bp, Zea mays
  Peptide Sequence Number=SeqID_59675
atggccagagccggcgactccacgcgggagaagagggcatggggcggttggagttggtcggggggtcttggtacgacggcgcggtaccgataccggcgatcaccagcggctaatcgatggaacagagaaaacaggggagggagaaaaagaggtccgacggggaaattcaccttgggtggggcgagaacgatggcgaggctgtgcttgacggtggcgaagcacggttggggacggtggtcgcgctctgctgggggcggattcgggcgcaggaggcctggcgatggggaagcttcggcgagcttgaagaacaggtgcgcgcagctcgggtga

SEQ ID NO: 17897 - DNA, 279 bp, Zea mays
  Peptide Sequence Number=SeqID_59676
atgacacttgactcggagaagggatttcgaccaaacccttggtggccggcagggaaggtgatgggggcgaagcaactagccgaagctattcacttcgcaaaacaaatgaggtaccctttagggtccaccatttttggggacagcgaagacgattacctatacttctgcccgaacagcaagggcacatatcttcgggttattttgacaaaagagctcatcctttataacttcatagggcttgatcctaaacaaagcttcgaaaaacaagaagaaagttga

SEQ ID NO: 17898 - DNA, 201 bp, Zea mays
  Peptide Sequence Number=SeqID_59677
atgggaccttcggggcgcgccgtcggcttggatagagcaaatcggacggatcgagatgaatctgagtatttagaatctgggcggtcgcatctggatcctacggctggattgacactgggtacctggcgtgatccgcagtcgtccaatcctaatccgatggatggggtcacccgataccccttcgcggatacattttgttaa

SEQ ID NO: 17899 - DNA, 360 bp, Zea mays
  Peptide Sequence Number=SeqID_59678
atgctcactggcgccgagcagccggccaacaacgacgcgacgacggcaggggtagccgctgccgccaacggggccggcgcccaggcggcctgtgatgaccccaacgaggatgggagcgcagtcgcagcatcgcggtgcgagagcggagaggagcgagatcgagggcgagagtttgggacatcgagagcagaggataggagagggaaggaagagagcagatcctcaccggggagaaggcagcggggagggtcgtcgtcggggctgtgcgccgccgccgtgccggtcgcgtcgtccaggattcgatccggagggtccattggttccacctggaataaggcccggaatgagctgatccgctga

SEQ ID NO: 17900 - DNA, 219 bp, Zea mays
  Peptide Sequence Number=SeqID_59679
atggcgagctcgcccaagctccacctcccagcgctctccctccccatcgctgtcggtcgagtctccctggtggctgacctcgcccccgcgttccccctctacccagccgagttcgcccagcccctcgcctctccacctcatcagcgccctcagccatggatgcagaaccccctctcttcaatgcctttctttgcagcccctgtgtcgctgtgcgtgtaa

SEQ ID NO: 17901 - DNA, 153 bp, Zea mays
  Peptide Sequence Number=SeqID_59680
atggcccgcgcctgcgtcttcctcgtcgtgctcctcctagccgccgtcgccatggcgccgttcgcgggcgcggcgcgcatcgacgtcgtcgagggcaggagtctccaggtacctgaactagtgagtatctctgaaaatgatatgcacaattga

SEQ ID NO: 17902 - DNA, 543 bp, Zea mays
  Peptide Sequence Number=SeqID_59681
atgactgtagacaagcccctagtctcgacatcgctacgacgagaccagcagccgtacctcgctgcaatagcgacgttgacgtttgccgtcatcagtcgttccgagaaacaattctcctcaggatatgagcatgtgcttgacaagaccagcaagcccggcagggcggccgccgcggtgctgctcctcaccctgctcgccgctttacatgtggccgcccacaacaacaacaccgagaaccgcaacccgggcggcggcggcggcgacccgggtgccttcttcaccaggatgccgcggttcagcggcggcggggtgccaggcggcggtgggttcttcggcgggtggggcgagggcggtctcgggtaccggcgcggcgctgtggtgccgcccttcgccgctctacatcaggacgcgggaagctcctcgcctcccctccgcgctgcttccggaccttcagctacgacggcaagaacagggggggcggcggaggcagcggaggctgtagcttcgactgcaccgagcgctgcaccgccacctgctgagtga

SEQ ID NO: 17903 - DNA, 141 bp, Zea mays
  Peptide Sequence Number=SeqID_59682
atgaacgagtgggataaggtgactcactacgacgttgttaaagcaccaaagcacgtggcgcaaggtcgcgaggtggataactctgaaatacagagctccaaagttagccttgttcactggttttgggacttaggcatatga

SEQ ID NO: 17904 - DNA, 228 bp, Zea mays
  Peptide Sequence Number=SeqID_59683
atggcgagagtagcgtgtaccctccatggcaagaggctagacggtggtgtatctgtgctcttggttgccttgcctaaggcattcggcaaaggagttgtgtccggtagtgttgagagtcttttatttttacgggtgaggaagaagcaattttttgttgcttttgttccaaggtggtgcctaaagaagaaaatcaggactgaagcctcaaaaggaagtgtcctcctataa

SEQ ID NO: 17905 - DNA, 405 bp, Zea mays
  Peptide Sequence Number=SeqID_59684
atgaaggtgatgcttgccgaagatgttcaaagctcaagaaatggaagtgagttcaccggagcaaattacaaatgtaccttcggcttgaaggaaggtaagggtacaagcgtgatgctaaagcgaatgccaagtcagcatgaacagtacggctctgcagcttgtgttgatggtgattaccagccgagtttaagagtgttgggggtacccctaattatggtccccgacaataggatactgctaaagctggtccgtcagttcctgtcgaagcaatatcttctaaggctaccgaagaaagcatcgaaacaaaaccttcggaagttgtcaaggcacagtcaacactgggaaaagaaggtggtgctgaagaatttagggtccctgctcccggagcccctggcgaggagttag

SEQ ID NO: 17906 - DNA, 240 bp, Zea mays
  Peptide Sequence Number=SeqID_59685
atggccgttgaagctgaagaatcacacgatgcccaagtggaggcaaaggaagctgaagattctggtgaacgcgcattgattatagttggcctctcgccaccaccggagccatacaatcccgaggctgatcccgtcatgaaagaagctttggatgtgatgaaggtcgctaatataatcgtcgacgaagttgttgactgcttactaaatgaagctgccgaaagagtactgaaggaagactag

SEQ ID NO: 17907 - DNA, 417 bp, Zea mays
  Peptide Sequence Number=SeqID_59686
atggtgccccgcctcgccctcgtcgtgatctatgcaccgaaccatcaggcgttatgcagggagcgtggtgccgagcaaagaaaatggagaggggagagagaagaggatgctgcatcgctgcgccggttctgcgacgcgatgctagaacgcctcgtggtcggggtggccgacacggagaagtacgatggggatgggggccaccagcacaatgggggtcacaaaggaccagttcggatgcaggatcctctctgcggccgactagttgtatttggtttggctgtgggagcacctgaagtaccgagcttgtgctctggtaatggcggctacgtacttgggggggtctccctcgctagcgtgttcgacggacaagaggttgaagaagaatcgatggctgttggatttcgcatcggtggatga

SEQ ID NO: 17908 - DNA, 339 bp, Zea mays
  Peptide Sequence Number=SeqID_59687
atggctctgcatgtgctgacaaccttctgtggatttcaccccttggagatgtcgacccaccccattggcttgttccccgctgagaaggaggacgacccgatgtggaaggacagggttgagcatgccaaggattctactgagatcacccttgataaccgggaggaccttgtagtagacttgtccactgagctagtggagaaggatctacaagtggaacagatggccaaccacatacaagagatcgaggacatggaggcagaaggggccgatgaggacgtagatatcgagggaggggaggagctggagcccgcatctagcttggacactgctggctcatga

SEQ ID NO: 17909 - DNA, 231 bp, Zea mays
  Peptide Sequence Number=SeqID_59688
atggagtttgtcgtgttggagttgccgtggcgcgcgatcgagacggaggtggcagtgcagctcaacatccaacagcgtgcagcgacaatcctacatgacatgctgatgaacctaggcccttcagcccaggagagggatccgaagtggaaaacctccgctgtggtgaagctgatgatggtgttgaagacgatggccaaggagttgtcctggatcgatgctgcccatatctag

SEQ ID NO: 17910 - DNA, 318 bp, Zea mays
  Peptide Sequence Number=SeqID_59689
atgggtccaaatccctgttgtcgttcgaagcacgagctcaaccctatgggcttcaccacgccaccaagtttgtgctccgggtcttcacgagcaaaaaggtgcaagggtgcacggcaaattgctcgtcggagcttcgatgctgtgcctcgccgtggaccaaatctatggctacacgattcacgggtagcgattcatgtgattaaaccgtggccattggatcttggctgggcgagtgagaatagatctcagctcaggggtagttttgagccttggatcagtgatccaagggtccacgttatgtaccggtttgggctctaa

SEQ ID NO: 17911 - DNA, 1191 bp, Zea mays
  Peptide Sequence Number=SeqID_59690
atgggaggtcagatgaagattagtgcaatgtgggaggaaggtggcaacaaaacaccggcttcacctgccagggtcgtgcaatatgaagcttctgatgttggtgcggatgatgcattaggcatttggaaaatagatgacgtcgacaatagcttccacacacaagcgtttcggatcaactcttcgccatcggctgcctccgagctgtggcttcttcctgctgggaaaatgcctctccgccatcgaccgcctctgaggtgcggcttcttcctggcaagaaaaatgcctcccaatccctcatggcttcctttggttacttactcatatcttgctaatgtgtttcattgtgctggtaatgagcaattctcaaggggatttcgaatggactctcatgggcaggggctaaaggagatggacaagctggtggtcgatgtgaacatgcaagtgaaagctggtagtgtcggtgagaggtattcaagttggaattggaattgtaggttacagtccactagaagagggttttttgtgcagtggagcacctcgtggccagcacaagctggcctttttcgactccggcgacgccgccagcccccatcacccgtccccaaactcatcttcctagagggtaagctggtgcagaccttaggccctaaaaggcgcgtgcgcgtcgcggccctggacgaggcgttgcagatcccgcaggagttggcagcgttcgtgacttgctatggtcaaagcctccatgtcctggttggatgtgcactagcaagtctggcagatttctggcatctgagatcggaagaagaaggcattcgtaactccatcatagtgagattaagtgattatgcactcaagatatggctgccctttgtgctcaagttcttccgagacatcaagcatgtgcgagaacaaggagttatagatgatcgtgacactttcctccatgcagtgcgagatctcctatgttttcactcaactcaaagagtcgggggaaattttatgcatgaacaggcattgttatacaggccatctggggattacaatcctttgcatttagacccagatattgcacagcttgctggggtgcactaccaaacgaagcttgtggttggagaatcttgtgccacaaaccaaacatgttcatatcgtggccgttttggccatatgttgggccatctggaaatcaaggaatag

SEQ ID NO: 17912 - DNA, 189 bp, Zea mays
  Peptide Sequence Number=SeqID_59691
atgaagactgttgagctgagggacaagttacaggaggacttttattgtgagattcactatgacactgtatggaaaggaagacagaaggcattacgagaactgcatggcagctgggaacagagttttcaattgttgttcaattggagagcagagggggcttgctatgttgcttggggagagcacaagtga

SEQ ID NO: 17913 - DNA, 426 bp, Zea mays
  Peptide Sequence Number=SeqID_59692
atggcgaatgggcaaataactcggccatggcggcgccacaacgcccgtgacagcgacaccgtcgacgcacccttcacacccgacgacagcacaagcatcatcatcgtgacccagcaaagatccctgggcattcactcgaccccaagcaacggaggatggagtttccccacgcagcgaccgattcccacaactccccgagctccgacagctacggtagagattctgcgaggttcaccagatggcccacatgtcggcgaggagcgcgaggggctaacatccacctgtaggcgccgggatgggagctcaaggatgttgggccgcaaagttgttctggcccagcactcagggttcttctgcaaatgcactagagcgaaggggtatctgttgccttcgtccgttggatcacaagcccaccaccaggattag

SEQ ID NO: 17914 - DNA, 1425 bp, Zea mays
  Peptide Sequence Number=SeqID_59693
atgactaacattccaaatcttactcaggcggctgttgaaagtgaagagcaaatttattccccagcatttggcaacattgaggtccaggatagtcgtggttgctgcagtggtttcacaggcagtgtaacgaagttgctgttcatctttcatctgcttgctttcattgccctcacagcattcctaggcgtccaggcctcttaccaccagaaccctgcctacaagcccttctccaacttcatccctctggtatcctctgtcatagtatccacaattgctgcatgcttctgggttatccttgctgtcacaaacccgccaaaagccatcaagacctctctctgggctgcccctgtttctgcacttgcttgtgatgtagtcatacttcttgttggcaatactgctgcacttggcattggagcgcttgtagttgtattcgcaattgcagcaggattatacagttgttgggccactggcccacgtctcaagcatgcctctgatatgctttccgtttctgtcatcggtgcacatttaccgcctgctacttcatgccttgttgtctatgtccttcttgcaacgtttgggtatatggccttctggacagttgccatcagctgcattgctgctgcagaagggcacttcatggactaccggatggcttatgtggcagcacttctagtgagcatggcctggacaatgcaggtactgagatatattgtctatgtggcagtggcaaaactggcacatggacgtctcacctatggaattcacgtcctgggcggtgctgtcgaagcattctgtgacacgatatttggaccagcctttggggacatatgcatgggtgcagtggctgtgccggtgaactcagcggtgcggggattggctcgagcaatgaaaacagcggctgggggcaacgacgagttcattttgtcaggacagggctgctgctttgctgtatcagagaagatgctgggacgtgctaaccgttggggttttgtgcacgtgggggcgcgggggaaggcattctgtgtggcttcacgggatgtgtggtcgctttttgttctccgtgggattgcagagcttgttgattcagacctcactggttcgttttgcttcctttcttccgttacatcaggcgcattggcctcattggtttctggatcatgggcactagccatggataaggatcagaagaaactagctttgcccatatccatctatgcattcctgatcggttattatatgtgccggatgatgatcgcatggccgcaagcatgtgtggctgcgtaccatgtcgcatatgcagagaacccgcagaaccctcagctgggcacgctgataccagaacatctgcgcgagctccaagcaatggctgcagatcaagatcgtcccagagttatccatttttctgatgacattgacaattcatag

SEQ ID NO: 17915 - DNA, 279 bp, Zea mays
  Peptide Sequence Number=SeqID_59694
atggaagctaagagacaaagggaagagggagacgtagaggacccaatgtaccaggaggaccgcctccgagtggtcactttattcgaagtcgtcggtggaggagcaggcgaaactagcaccactggaactgccctcagtggcaccatcaccacggtgggggaggaaaccccggcaggttccttccccacgcaatgcatgggcaacgcagaggacacaagcaggaatggtcgcacgatcctccaggaaagccgcgatacgcaagaccaccaaataatgtga

SEQ ID NO: 17916 - DNA, 414 bp, Zea mays
  Peptide Sequence Number=SeqID_59695
atgaagaggcagtggagccatcagtcggtcgtgctcccgctgctcgtcgccgtcttcctgctcctcatgtttcgaacaagctacgccgttgacgtcacgctcgcggagctcgcggccgtggacccggccgcgtcggcggtgctgcgagccaccgaggcgctcctggaggccaacctgacgagggctccctcggagcgtcgggacgccgcggtgcgtggcctccacgactggctcggcaagcagcggttcgagccacaggtgatggccgagctcgtggacctcatcaagcgccccatggatcggctggaactgatcaccagcagaccggaagctaggaacgaacaagctctggaggccggctacaacgcaccgccacggacgagctcgaggcagactgggaacagtggaagctag

SEQ ID NO: 17917 - DNA, 303 bp, Zea mays
  Peptide Sequence Number=SeqID_59696
atgcgcgcagcctggtggggctcgggcttggtggcatggtggggcgccggcgtgttcgtgaccacgggccgtgccgcccgcctctacgcggggcccggcctcgtcgtgtcctacgccattgtcggcctctgcgcgctgctctccgccttctgcgtacgactccgtggacatggacgacggcgagctggtggtcctcgacagccgcggcgtgctcccttgcttcctcatcatctacaaggtctagccgctgccgagccgactcgggacctgactggagcactgaccgaccgtcgtgaccgctaa

SEQ ID NO: 17918 - DNA, 1620 bp, Zea mays
  Peptide Sequence Number=SeqID_59697
atgtcctggaacatcctcatcgggggatacgtcaagaacggtgacctggagaccgcgcgtaagctgttcgacgaaatgcccgcgaggaacgtggccacgtggaatgccatggtcgctgggctcaccaactcgggactcaacgaggagagcctggggttcttctttgccatgcggagggagggaatgcagcccgatgagtatggcctcgggagcttgttccggtgctgtgccgggctgagggacgttgtgtccgggcggcaggtccacgcgtacgttgtgcggtctggactagacagggacatgtgcgttgggagctccttggcacacatgtatatgcggtgtggttttcttcgagatggggaggctgctctccgagcattgccttcgcttaacattgtgtcgtgcaataccactatctctggaagaacacagaacggagacgcggaaggggcactcgagtttttctgcttgatgaggggtgctggtgtggaagcaaacgcagtcacattcgtcagcgccgttacttcttgctccgacttggcagctcttgcacaaggtcagcagattcacgcactggctatcaaaactggagttgacaaggttgtgccagtcatgacttctcttgtgcatatgtattctcgatgcgggtgcttaggtgactcagaaagggtttgccttgagtatagtggtacagatcttgtcctttgcagcgcgatgatctcagcttatggattccatgggcatggacaaaaggcagttggcctgttcaaacagatgatggctgcaggagcagaacccaatgaggttaccttcttgaccttgctatatgcatgcagccatagtggtcttaaagatgaaggcatgaattgttttgagcttatgactaagacttatggactgcaaccaagtgttaaacactacacttgtattgtggatctccttggacgttcaggttgcttaaatgaggcggaggaccttatcctgtcaatgcctgtgcaacctgatggggtcatatggaagacactactgtctgcatgtaagacccagaaaaagttcgacatggctgagaggatagcagaacgtgtcattgaattggaccctcatgattctgcctcatatgttcttctatcaaatattcgagctaccagcagcagatgggaggatgtcagtaaggtaagagaaaccatgagggaacagaacgtgaggaaagagcctggagttagctgggtggagctcaagggtcagattcaccaattctgcaccggagatgaatcccattcaaggcaaagggagattgttgaatgcttggaagaaatgatgaccaggatcaggcaatgtgggtatgcaccggacatgagcatggttttccatgacatggaggatgaggagaaagaagttagtttggctcaccacagtgagaaattggctatagcatttgcttttctgagcttacctgaaggagttcctattcgtgttatgaagaatctacgtgtatgtgatgattgccatgttgctattaagttgatgtctaaggttattggacgtgagattgtggtccgagatgttagccgttttcaccatttcaaagatggaaaatgctcctgtggagattattggtga

SEQ ID NO: 17919 - DNA, 522 bp, Zea mays
  Peptide Sequence Number=SeqID_59698
atggagctgcggcgagcgattccggtgaacccagccaccgttcttgcacgagatgtcgacgaggatcatcgatgtgaactcgcgaagaccagaggctatcgtatgttctcacaacggcgcagcagacgccggacaatggtgattggtgacccgcgtcgtcttctctcccacggccgagccacggcggccgccagtgcccacacggtggagacccactggcgcacaccgcgcatgcacaaaccaggtcccgtggccaaattccccggtgctatggctagagaagcgcaaggcggacacgatggaggtgtacttaccagctgcggctcgacacagggctctgcccacgcgcaccatagaggagaaagagaaagcggtggacgtagggagagggaagggaatctcgtgcggttgaatgagtctgttgaagagattgacacggggttggggaaagggatgacgaatcggtcccacatggcagcggttctggtctggtatgcctggacgcggctggggcgctggtga

SEQ ID NO: 17920 - DNA, 147 bp, Zea mays
  Peptide Sequence Number=SeqID_59699
atgaaaagaagggaaggtgtttttttcgacgaaggctcaaaaacgaagtctatcaacgacttcatcgacaatggaattggcaacactgatgacatccaacgcctctttcataacgagatcgacctaggggtcgtatggctcgggtag

SEQ ID NO: 17921 - DNA, 204 bp, Zea mays
  Peptide Sequence Number=SeqID_59700
atggcccggatcaccttccgacagcttagcagggaagcatgggtggactaccacggcggtgacttggtttcggtggagaggttcacggcgatagtgaaggtcgcttatgcgtggtatggatgtaacaacccaggtgtttatcaccagcttaatagtgagtatggacttaagcacagaatatggactcttcccaagttttcgtga

SEQ ID NO: 17922 - DNA, 495 bp, Zea mays
  Peptide Sequence Number=SeqID_59701
atggagttccggtgtcgagatactgagggagacacacgtagagaccgagctgttggcgacatggacagacaggtccgagcagggagattggcgcgctggagcagcaagacaagaccgcgcccaggcgagctggagcaggggcaagctggggagccggcgcccaccagagaagaagatccggcgcagagagcaaccagagagaggggcgccgaactgaaacagggaggagcgccggcggtgaagcgtccgggcgagctggagactaggcgaccgagcgccatggcacagggcaaggccgagcagggcgcaatccgagttgggcgagctgggcgcggcgctggaggagagatggagggagagagaagcaagggggcgcgccatgggaaggaccgagctggagctggagctaaagccggcggcggggtgctggagcgtggtgggcgcgacctgcagagaagcttcgcgcgtgcggagagaaggaagaagccgagggag

SEQ ID NO: 17923 - DNA, 582 bp, Zea mays
  Peptide Sequence Number=SeqID_59702
atggcggctccgctgaatcttctggcaagggcgcgggcggccggtcaggcgcatccccagcgcgggctcggtcctggcgggcatgctgctccagccagcctcgtcgtgggtgcgcaaccccgacgcgcgtgggctcggctccagcatccccagtcggcggcgtggaggccaggcgcgggcaccacgacgagcgtcacgcgggcgctcggcctccagcgcgggaccgcggcccggcagacgagcgggcccccggcgcggcaccggatgggcatgggcgcgcggccgcccccggcttgcgagcagcccccgcaaaaccccggtggccctagtccggctacggcggcgcggcggcgcgagtgcagccccaacggcgtgcagggcgtgaccgtcccggcgcgagtaggcgaggcccctagcgctacggcgcgggtgcgaggccccctgcgcaactgcgcgtgcgcagccacggcgcgggaccgcggcccggcagcacgatccagggcgcacacagcacggcgatggcacatgccaccggtgaaggtcaatgccatgttcacgaaagagataagaacagtggtgtga

SEQ ID NO: 17924 - DNA, 114 bp, Zea mays
  Peptide Sequence Number=SeqID_59703
atggtgggtgccagccaaggccgatggtctgtgtcaccagaaatcgagaaagatctagatgacctaaacaaggttgctgtttgccgatgtgcatgtgctggcttgtttgtctag

SEQ ID NO: 17925 - DNA, 804 bp, Zea mays
  Peptide Sequence Number=SeqID_59704
atggatgatcgtggtggcgctagcagcagcgggagcagcagatggcgtgggtgtcgcgacaaggagagcagctatggccaccaccaccactggcctcctccgcactcagctagatgcctctgcctctgcctgctgctctcgctcaccctcctgctcgccgccgccgccgcgctgctggccgtcttcgtcacgaggctgaagaagccggccttctacctgcagtccatccagatggacaggtccttcagcctgctgacgtggtcgtcgaacccgaaccgcagcgcggacgacgggacggcggcgccgtgcgcggtggcgtcgctggtgttcgcggcgcagaacctgaacggggtcgggatacggtacggggcgacggtgctggacgtggcgtacgcgaacgagtcggtgggcgccctggacgtgccggcgctctaccagcccccgcggagcgccaacgtgacggtgctcgtgcacgccgtcctcgcgcagcggaacgtcacccggctcctcgtgggcgagctgtcggcgcagaggaggtacatggaggtcagggtcgccggccgcgtcgacgcccggacgcacatcatgaacgtccctcttcccaaagttcagttttcgctggattgtagatttggagctaactacaccgaaattgtgctacgggagggaatcgagtccgtgatgacacgcaaggctctcgtcgtaccttcgctgcctcacctctcgcagaagtgctctatcaagattagcttgaggccgcgacgagcaaagggaacaagtcttgacgatttattaggctgctga

SEQ ID NO: 17926 - DNA, 222 bp, Zea mays
  Peptide Sequence Number=SeqID_59705
atggcatgcagccgcgcggccaaaaagcctttcagctatgcctgcccgactcacctcacgcctctaccacggcgaaccccctgcgcggccgacgcccactggccactagcggtcatcaagttcctcggcggcgctttcatcggcgccgtgctcgaggtcacctacggcggcgccgtcgggccgatgccgtcggcgatcgccggtggcgtggggaggaagtag

SEQ ID NO: 17927 - DNA, 432 bp, Zea mays
  Peptide Sequence Number=SeqID_59706
atgagggagcggcgccgtcgatggggcacgccggcaaggaggcaactctggtggctcgcccaaaacgcggcctacggcgcgacgcagcagggaggggtcagtcgtcgaggagcacgcgacgcatggccagggcggatctcgcgacctagttggttggccgcgccaggccattgggggcttgccgcgcgcgcaggggagctcgacgggttagcagccagcacgacggctcgccggcggcacgacacaaacaaggaggcgaagcgcgacacggcacagggcgagctcgccgggatgaagtgggaggacgccatggagcttacctgcacggtggcgacgagcagctccggggaggcgagggcgagcagcacggtgttgatccaggccgtcatggacggttgggcgagcgattttggtgagggagaggtgacgtag

SEQ ID NO: 17928 - DNA, 199 bp, Zea mays
  Peptide Sequence Number=SeqID_59707
atggcgctggcaacacaaaggcgtaaagcattgcttcggagagaacttctaacatcatctactgggaaggacatcaaggctctactttcaccttggactctcaaactgcttgaaagaaacgagaggctatacaagatcattcacgcgacaatcaacgtagaagacacatatcgcaaagtcatcggcgatgacaaacaag

SEQ ID NO: 17929 - DNA, 150 bp, Zea mays
  Peptide Sequence Number=SeqID_59708
atggatggtgatgttgtgcggcctggtcccatgtcgcatgctccacctcctcattgtgctgctcctcctcattgtgctactcctcagtgtgcttctcatcctgcgctcaacagctctcggcgtcggctgctgctcgaagaactgccctga

SEQ ID NO: 17930 - DNA, 150 bp, Zea mays
  Peptide Sequence Number=SeqID_59709
atgaacgtatcagaccctgagaggcagtgggcagccgaccccttgctgtcaatgggagctgctctgctgctcctcacagctgacgaggggtggtacgccacggagcacttcggcctcgacgtcatcttccacagccggatgaggcagtag

SEQ ID NO: 17931 - DNA, 675 bp, Zea mays
  Peptide Sequence Number=SeqID_59710
atggaggaagaggaactcacctccggcggcggcgacgcggcgttgctggcgccggaaccgcgcgaacaggcggccgaagaggggaggtcaccgcgagacgcggaggcgttcgaggacgcggtggaagaggcgtccgccgcctccacgtcgccggtggcgtgctgcaatggcgacgccgcggagacttcgtctccgccagcttggaaatcgcaggtcgacgggccgtcggccccggaggaagcggaaacgtacgagtcgccgtcggcttcgtcgtcggggtgtgcggcgatggaggtggagtcttcgttggtttctgaattgcgggaggagccggggagggtggatgctggaagcgccgcgtcgccgtcgggggcagcgcgcgggaggcacggaggagcacgagaattcgatggccacgccggggggcaggatcgccgtccagggaggagacggactcgtattaagcagcagtcgcggcatgtgcgaaccggcagcttccagcggttccgtgagcagatgcagcgcgcttggaagtgggggcctattggaggtggaggaggtggcgagaggagtcctagggagcagttgttacggacgactgtgaacattgaggctatggcgaatcagaagcggcactggtatcaagtccgctccaagtcgcagatgtcggagtag

SEQ ID NO: 17932 - DNA, 3029 bp, Zea mays
  Peptide Sequence Number=SeqID_59711
gagaagaaggaggcggcaaaggagcgaaggagaaggggagagcagaagaaccgagcatggctagtgctactccaatgcttggtagcactgcacgcctgctcttccccttatccttctccttggcgctgctgctcctgtgctgcagtgccgtctgcaacgccgccggcaatgacgatgagtccacggcgttgcttgccatcaaggcgtcgttggtcgaccccttgggcaagctcgcgggctggaacccggcgtcggcgtcgtcgcactgtacctgggatggcgtgcgatgcaacgcgcggggcgcggtcgccggcctcaacctcgccggcatgaacctcagcggcaccatccccgacgccatcctcggcctcaccgggctcacctcggtcgtcctgcagagcaacgcgttcgggcacgagctgccgctggcgctcgtgggcggctacttctccggcacgatccccaagtcctacggcaagctccggaagctcaggttcttgggcctctccggcaacaacctcggcggcgcgctcccggccgagctgttcgagatgtccgcgttggagcagctcatcattggctacaacgagttcgtaggcgcgatcccgggcccgcaattggcaacctcgcccaacctccagtatctcgacctggcgatcgccaagctggaaggccccatcccgccggaactcgggcggggtttgtcgtacctcaacaccgtcttcctctacaagaacaacatcggcggccccatacccaaggagatcggcaacctgacctccctggtcatgctggacttatccgacaacgcgctcaccggcacgattccgttggagctcgggcagctcgccaacctgcagctgctcaacctcatgtgcaacaggctcaagggcggcatcccggcggcaatcggcgacctcccgaagctggaggtgttggagctctggaacaactccctcaccggcgcgctgccgccgtcgctcggcggcgcgcagccgctgcagtggctcgacgtgtcgacgaacgccttgtccggaccggtgccggccggcctctgcgacagcggcaacctgacgaagctgatcctgttcaacaatgtcttcacgggcccgatcccggcgggcctgaccacgtgcgcgacgcttgtgcgcgtgcgcgcccacaacaatcggctcaacggcacggtgcccgcggggctcggccggctcccgcggctgcagcgtctcgagctcgccggcaacgagctgtccggggagatcccagacgacctggcgctctccacgtcgctctccttcatcgacctctcgcacaaccagctgcggtccgcgctcccgtcaagcatcctgtccatccggacgctgcagacgttcgcggcggccgacaacgagctcaccggcggtgtaccggacgagattggcgattgcccgtcgctgtccgccctcgacctgtccagaaaccgtctgtccggtgcaataccggccagcctcgcgtcgtgccagaggctcgtctcgctcaacctccggagtaatcgcttcaccgggcagatacctggtgcgatcgccatgatgtcgacactgtctgtgctcgacctctccagcaactccttcaccggcgtgataccgagcaacttcggcggctcaccggcgctcgaaatgctcaacctggcgtacaacaaccttaccggtcccgtgccaacaactggtctgctgaggacaattaaccccgacgaccttgctggcaacccgggcctgtgtggtggcgtgctgccgccgtgcggggctagcgcccttcgggcctcctcgtctgagtcgtacggcctccggcgctcacacgtgaagcacatcgccgctggatgggcgatcggcatctcggtctcgattgtggcatgcgtcgtcgtcttccttggcaagcaggtgtaccagcggtggtacgtgaatggcagatgctgcgacgaggccgtgggggaagacgggagcggtgcgtggccgtggcgcctcacggccttccagcggctgagtttcaccagcgccgaggttctcgcctgcatcaaggaggacaacatcgtggggatgggcggcacgggggtggtctaccgcgccgacatgccacgccaccacgccgtcgtcgctgtcaagaagctgtggcgcgcggccgggtgccccgaccccgaggaggccgccacggccgacggacggcaggacgtggagccgggcggcgagttcgccgccgaggtgaagctcctgggccggctccgccaccgcaacgtcgtgcgcatgttgggctacgtgagcaacaacctggacacgatggtgctgtacgagtacatggtgaacggcagcctgtgggaggcgctgcacgggcggggaaagggtaagatgctggtggactgggtgtcgcggtacaacgtcgcggtgggcgtcgcggcggggctcgcgtacctgcaccacgactgccggccgccggtcatccaccgcgacatcaagtccagcaacgtgctccttgacatcaacatggacgccaagatcgccgacttcggcctcgcccgcgtcatggcgcgcgcggaagagcccgtgcccgtgtccatggtcgccggatcctacggctacatcgcgccagagtgcgggtgcaggctgaaggtggatcagaagagcgacatctacagcttcggagtggttctgatggagctcctcacggggcggcggccggtcgagccggagtacggcgagagccaggacatcgtcggctggatcagggagcggttgcgcagcaatagcggcgtggaggaactgctcgactccggcgtcggcggtcgcgtcgaccacgtccgggaggagatgctcctggtgctgcggatcgcggttctgtgcacggccaagtccccaaaggaccgtcccacgatgcgggacgtggtgatcatgcttggcgaagccaagccgcgccgcaagagcagcagcgccacggtggccgccaccgtcgtgaacaaggacaggccggtgttcacgacgtcgccggactccagttacctatag

SEQ ID NO: 17933 - DNA, 351 bp, Zea mays
  Peptide Sequence Number=SeqID_59712
atgagtgacctgaatgaagtgatatttgggcaggaacatctgtctcgagatgatctgtcttttatcttctccctcaaggcggaggagcgatgcaggaggccacacacggatcttgacaaagtagaggtgatcaacgcgagcgagcagaggcggtcggtgtgggtggcggattgcgcgggtgggaggagggcagacgagccagctgacaggagcaggcgttggcaggtagtcgcaacatgcaccggtaggtgggcgagaggcgggcatgtggacaaggcgatcaccggtagacaggttgtcacaactgacgtgccaactttgacgagcattcacaaagatgagcgccgctag

SEQ ID NO: 17934 - DNA, 213 bp, Zea mays
  Peptide Sequence Number=SeqID_59713
atgcacgggcaggtagtgtgggccaaggatggcagggcggacgcggtgcaagcaggaactggcagaggcggttccaggtcaggagttcgccggagcgatggctcggagctagaaggcgtggcgctgccttgcgcatggaggctgtgtgacagggtcagtgctgccgggtctactagtcaacgcaggaaaaagagaaggaaagcaaagaaatga

SEQ ID NO: 17935 - DNA, 315 bp, Zea mays
  Peptide Sequence Number=SeqID_59714
atgaagaagaaagtgtcgaggcggatctctaggagttccaggacttcgacgagttcgaggattaggctagcgacctcccctagtcaattgcctgtggaagataaggcaatactaatgaatatgttgataagagtgggtgaacaaagtgaaactcttctcaagctagaagagaccctcatcaaaagagatgaaagcttagagaagggcccgagggactggttggccatttatttcacggctgcccgagctgctgaggcaatgaaggatgtgatgacagcctactgcccaatcatgctagggcaagatgtgccctag

SEQ ID NO: 17936 - DNA, 321 bp, Zea mays
  Peptide Sequence Number=SeqID_59715
ggctcaaggaggtggtgccaaccgctaagcacgacggactgtgccatctgcctcgacccattggccgatatcgctggtcctgatcacaagaaggacgacgcggcagctacgtcgatgcttcgggccatgccctgctcccacatcttccaccagcactgcatcttccagtggctccatcgcaacgccgtctgtcctctctgtcgctaccagctgcccaccactttcgaggacgaggacaccgaagtcgaggaggacgctgaggagatggacaactcaaattctcgattcagggggtgtttggttgctcctgctaaagtttag

SEQ ID NO: 17937 - DNA, 525 bp, Zea mays
  Peptide Sequence Number=SeqID_59716
atgagggggaccatgctaccttgcgggtggcagtcccatggcattgacttcttccctcaacctcttgtcatgcatcggtcttgccgtagggcatcttatttattcatggacatgtcgttttcgctagtcgatgaggtcgtgggctcgtttgttggcagtggtgtatatgtcggtgtcattgatgacgagctcatcacggaagtagagggtggttctggcaccgtagccatggtgaccacattagtagacttggtgatcacgatagcttcagaaagcttggagatcttgggtaggcatgatccgcatgagcatgaatccacgtgggatgcagcgctctgggctctgacgcaatgtcaccagcccaccaaatggcctttgagggtaatgatgatgacgagccctaattggagtctggcaggggcggtcttccctttgtcgacttatagtggttgtcgtggtgctggtgctggtgctggtgctgtgtatgagaccgtggcccccaacgtatttcggggtgactattag

SEQ ID NO: 17938 - DNA, 771 bp, Zea mays
  Peptide Sequence Number=SeqID_59717
aggcatcgttatcagccgtcctcctcgtctatatatgcgagtagttgagatcgaaaccccatcagctggcctcctgcttttgcttatcgaaacctcgctcctaaatatcccatcatcgtcgtctgccatctgccgccggcccgccgccaccactgcaccgcccactagcgagttgctagacaactggccggagatggatccggtgtggttagagtggttccacagggacggggcggagctcgccaaccgcggccgtcggccggatcatcttgatgatgaggacgatctctacgtagccttggccttggctccctacgttgatcgccaccggcctcgaacccgtccccgatccccatccccatccccgccctcacacgaggacgccggggacgacactgctgctcgcaacaacaagcgtccttgcatccccgcgtacagcgaagccatcctggggctcaaggaggtggtgccaaccgctaagcacgacgacgactgtgccatctgcctcaacccattggccgatatcgctggtcctgatcacaagaaggacgacgcggcagctacgtctatgcttcgggccatgccctgctcccacatcttccaccagcactgcatcttccagtggctccatcgcaacgccgtctgtcctctctgtcgctaccagctgcccaccactttcgaggacgaggacaccgaagtcgaggaggacgaggaggagattgacaacataatttctcgattgaatcagatcagacgacgactgcagatctt

SEQ ID NO: 17939 - DNA, 402 bp, Zea mays
  Peptide Sequence Number=SeqID_59718
atggcgcctgttacgctactacaagtcctcccctgccatggtggatttgtcgtcagagacaacatcgtcttccactcccccgttgatgacgagctcctcatggaagtagaggggtggttctggcaccgtagccatggtgaccacatcagtagacttggtgatcatgatagcttcaaaaatcttggagatcttgggagtaaaaaaacagtgaccaactctgaggctttacatgccttgaaccgaggcgtacctcgtcacaggtggtcgtggatgtcgaagtccgatgcacttagagttgtgcggggtatactatcttgtgagccctcaagagagggtgaacttcttctttgcctcccctctgcctccgactggtctgagtccagactcgagtcagggaagtag

SEQ ID NO: 17940 - DNA, 219 bp, Zea mays
  Peptide Sequence Number=SeqID_59719
atggcctgccagaggtccacgccgcgaagctccatcgaccacgtcgaactacccggtgcaaaatgtaattggaatatgggcggaacacaggtggtaccccataccagcaatgatgaagccacggaggccgaccacggtgaatcgggcaggaacgcgcgtggtgcggaggaggtggttggaggggtcctacacatccgtggtggagcgagattttcctaa

SEQ ID NO: 17941 - DNA, 255 bp, Zea mays
  Peptide Sequence Number=SeqID_59720
atgcagagcaacgacgacgccgcctgtgagcgacggcgatggcctgccagagctccacatcgtgaagctccatcgaccacgtcgaactacccggtgcaaaatgtaattggaatatgggcggaacacaggaggtaccccataccagctatgatgaagctgcggaggccgaccacggtgggggatggtttaaggactcccgagattcgcggcagcaagtccaccccattcgcgcggtggggatttcggctgaggtag

SEQ ID NO: 17942 - DNA, 816 bp, Zea mays
  Peptide Sequence Number=SeqID_59721
atgggaaggagctctaccaccgcagcccctcgagcatcctccagcgatgcatttccatcgccgaaggtcaggagctcctacaagagatacacttgggggcttgtggccatcaagcaacacctcaagcccttgttggaaacgccttccgacaaggtttctactggccgacggcggtggccgacgccactagaattgtccgcacctgcgaagggtgtcagttctacaaggcacccggggggctacgcgcacctgttggtcgccatcgacaaattctccaagtggatcgaggtccgacccctaaacagtatcaggttcgaacaggcggtggcattcttcaccaacatcatccatcgctttggggtcccgaactccatcatcaccgacaacggcacccagttcaccggcaggaagttcctggacttctgcgaggatcaccacatccgggtggactgggccgccgtggcccaccccatgacaaatgggcaggtagaacgtgccaacgacatgattctacaaggactcaagcctcggatctacaacgacctcaacaaattcggcaagcggtggatgaaggaactcccctcggtgatctggagtctgaggacaacgccgagccgagccacaggcttcacaccgttctttctagtctatggagccgaggccatcttgcccacagacttagaatacggttccccgaggacgagggcctacgccgaccaaagcaatcaagctaatcgagaagactcgctggaccagctggaagaggctcgggacgtggccttactacactcggcgcggtaccagcagtccctgtga

SEQ ID NO: 17943 - DNA, 315 bp, Zea mays
  Peptide Sequence Number=SeqID_59722
atggggaaaactactagggaaaaccgagatgcaaaagaggaaaaatatgatgcactaaaatcaaggaaaaggatgtgcaggattgttcctaataaattaacttctgacacagtccaatgtgcctttgatgatgtaaatattgacgacccagatttcctgtatatccaatctatagttagatgctttgttccattttgttttgtaaatcctgactctggttacagtccagataccgagtcaaaatgtttgcattttggatctgcgagcttgcccagatgtgtctccatccatgctcatagagctaatggctggtga

SEQ ID NO: 17944 - DNA, 1017 bp, Zea mays
  Peptide Sequence Number=SeqID_59723
atggccgccgcggcgcaccaggtctccgccgtgatctttgatctcgacggcactctccttgacacagagagggcgacaagggacgtcctcaccgaattcctggcggcatacgggaaggtccccgatgcgggggaggaggagaagaggctggggcagatgtatttggaatccaccaccgggatcatcagagactacggcctgccgctcacggtcgacgagtactccaaggcgatgtatcccctgtacctgaaaaggtggcaaaaggcaaaaccgcttccgggagtgaagaggcttgttaagcatcttcacaagaacggagtgccactcgcacttgcttctaactccattaggagaaatgttgatcacaagcttccgaaactagaagattggggaaagtgtttttctgttattcttggtggagatcaagtcccaaatggaaaaccttcccctgacatatttttggaggctgcaaagaggcttggtgcaaatccatcgtcttgcttggttatagaagattctgtcgttggagtcaagggtgccaaggcttctggggcaaaggcagttgcagtaccatcacttcaaaatcagaggaaccactattacattgctgatgtcatcctatattcgcttttggactttcaacctgagatgtggggtcttcctccatttgaagatcatgactgtgcctacgagtatattcctgaccaaatatcaggaatttttttgggttgggccaagtccaaagtgcatggattctccaaggtgatcgtagctactgggtgggacttctcacagcagaccgtcgagagagtgatgcatgtacattttcttgattgctctggcacggttgaaacagagcctgtgaagctgctcataattggttacatccggaagctccaaagtgcagatgatatattgcaagcattaagcgtaactgacgaagacaggagaattgcaagggatgcattggatctcccaactttctctgaatatgctaatgaccttcatcttgcctga

SEQ ID NO: 17945 - DNA, 453 bp, Zea mays
  Peptide Sequence Number=SeqID_59724
attcaagctgcctttagatctgatgaaatcaggcgggcgcctcctactccgcaggatgaaatgcgtgctggaatgagttattttcatgagactatatggaagggtgtacccaagttcttacgtagggttgacactgctcttaagaacattggcataaatgagcggttgccatataatgcccctatcattcagttttcttcttggatgggtggtgaccgtgatgggaatccaagagtcacgccagaggttacaagggatgtatgcttgttggctagaatgatggctgctaatttgtataatgcccagatagaagacctgatgtttgagaaattgcattccttctctgggaaagaagggagagccatatttgcttatgatttatatggagtccctcatcataaccataaaaagtgtggttcccagtttgttagttcattctcgggttacaattag

SEQ ID NO: 17946 - DNA, 600 bp, Zea mays
  Peptide Sequence Number=SeqID_59725
atggcgcgcaatgcggtggacaaggcgacgtctatcgatgcgcagctgcggctgctggccccgcagaagctctctgacgacgacaagcttgtcgagtacgacgccctgctcctcgaccggttcctcgacatcctacaggacctgcacggcgaggacatcagggagacggtgcaagaatgttacgagttagctgctgagtatgaaaataagcttgaccccaaaatgctggatgagattgggaatgtgctgaccagcttggatcctggagactccattgtcataaccaagagaataaaactgaagaagggtgactttgttgatgagaactcagcaacaactgaatcagacattgaggagacactaaagaggcttatgcatcagcttaagaaatcccctctggaggtatttgatgctctcaagaatcaaactgttgacctcgtcctgactgcacatccaactcagtcagtccggagatcattgcttcaaaagcatggcaggataagaaactgtttaactcaactttatgcaaaggacatcactccagatgagaaacaggaacttgatgaagcacttcaaagagagattcaagctggcttttag

SEQ ID NO: 17947 - DNA, 465 bp, Zea mays
  Peptide Sequence Number=SeqID_59726
atgccgtggagcatgagaagccggggcaactggaggatcgagctatctacgaggaaggggcaggtggattggaggagttatgtgccatcaccatttatgggagtggagggctcgatcattgaggcacaccaaagcttccaggctgctgccaaggagcatgccgcaactgtgacaaagattaaggttgctccttttgatttgagctcggtgtttctaaattccaattttggtagcgtttccattgccacttcattcgtgtgcgagcagagcctggcttcatatagggctccccgacgtcacagaacctgcaagagccggtgcatgccacaccggtgcggtgtcgacatgaagaaggggttagggtcgatgactgtgggccccatgtgcgactgcctggagaacatagtgagtagcatgggccagctcggtgatgcggaggagatgcgcgacgctaggatggcctag

SEQ ID NO: 17948 - DNA, 282 bp, Zea mays
  Peptide Sequence Number=SeqID_59727
atggagttcatgggcactgtgaccatagatgacttcttcgacttcttcggtggccatgctatggcactggcgggtgggacgacgatgcatattgactttatcattcatgtgaacagcaacttgactgcatggtcggagtccgacaagcacaaagcagcaaaagcttccatggattatggctttcacatggccattacaaagtgggatgatgaggttgcaagggaaatggaagtgatggtcaaggaacatggaattagacaaaaacgaatcaagctgaactag

SEQ ID NO: 17949 - DNA, 513 bp, Zea mays
  Peptide Sequence Number=SeqID_59728
atggggatgggggcggaggaaaggaaaccgtccccttgccgtttcagcctgttgttgttggttggatcggggggaggccaggggggaaggaacaaaagcctccgtgcgccctgggccctcgtcggagacgggctggcctggcctggcccggtcggtctttgcccggatttgacaactcggttctcgctggaggcccaggtcctggatcgcacggaacgtgcagggcccaagacgacagcctgttcatgcgtggcccgggcccagcctgacacggtgcacggagacggaggagccgcaacagttggcttcgcggcatcgttgcgcccccgaatcaaggaccagacagttgtcaacgcgcacctcgcggaggaggccgacgtctacatcgaggacgacatcgtcatcgccgtccgcccaaacatcctggttgatgttgataatgtcagagtaatcgacgtagcaggcaaatatgtcatgccaggtgaattcatccaggtggatgtcacgccgtga

SEQ ID NO: 17950 - DNA, 600 bp, Zea mays
  Peptide Sequence Number=SeqID_59729
atggtcccggttctgctgtgggctgcggactggctatgtggcgaacaagcgcactcatgggcggcctcaacgttcttcatgctcctagcgacagagaggcatcaacatcaggaattcaggttctcagagttcagcaacctcaaggcagaggcgtcccaagaaaattgttggccctacatcgtacgcccgaccgggctaggagcggcggggccaacccttggcgcggcggcggtcatccgcggcggcccgactgatggtttcggcgaggcggtggatggaatcggggcgacggcggccggaggcaccggcgcgatgggggcgaacctcggcgcggccgcgcacaacgtcccaccggcgcacatggagttcccaggtgctcgtggcagcgacgtccgtggattcttcgccaaggacaacgtcggagcaaccgtccatgctacgactacgaggcaaggcacgtactacggatgggctcggactcgggctaagtcccggaagacggcgaactccgctccgcccaacccagggctcggacttgggctaagtcccggaagacggcgaactccgctccgcccgacccagggctcggactcgggctaa

SEQ ID NO: 17951 - DNA, 330 bp, Zea mays
  Peptide Sequence Number=SeqID_59730
atgcctcgcttccctctcacgcgtgttgtgctccttctcctccctttgctccacatcgtcaccctcctccatgtccctaagatctgcgcatgtggtggcctccgagtactccccatcaccttcctcactaggctacgcaaggacaagcgatgtgccattaagcacacgctgatgtacctcgctagggttcctgatgtgggagatgctacccttcatgctcattggaaggtttttggtacagttatcttccgtgagcaggaagatggtcgccatgcttcatctaagattactatatttgcttttgatgggcccttgaaagaactagtgtga

SEQ ID NO: 17952 - DNA, 897 bp, Zea mays
  Peptide Sequence Number=SeqID_59731
atgatgagacccagggactgggactctcagtctgggagcatgtacaaaacactcgagagataccgcagctccaactacagcacacaggaagtaaaagctccactggagagtgaaattaactaccaggactacttgaagttgaggaccagagttgattttctccagactacacaaagaaacatccttggcgaagatctgggcccactcagcatgaaggagctcgagcagctggagaaccagatagaggtatccctgaagcatatcaggtcaagaaagaatcagatgctactcgaccagctctttgatctcaaaagcaaggaacaagagttgcaggatctcaacaaagacctaaggaaaaagtgctgccagctgcaagaaacaagtccgcagaatgtgatccacgacgtctcctgggaggaaggcgggcacagtgggagtagtgttcttggtccgttccagggactccttcagcaccatggcaatgatccttccctgcagacacggtaccatcagcaggcctacatggaccagctgaacgaggacatggcggaccctgacgagcacggcaggcttagatctctgggcctctacccagcagcctgcatcaccgtgcgcatagctcgtgggccgcgtcatcatcctcacacggcagacgggcacactactaactgccgacgccagtcgtcgcccctcgctctcgcgaatcgttttgggtgctggggtcgtctcatgtcatggaggcgaccactcggcatgtccatggcccaagaaggagtgagcgagcccgccagcccaataccaattcaccggcccacaatggacttcagctggaacacagcctgcgtgcgcaagttctgtcctgtgcgtgcggcgcgtctatacgagacgagtcattaa

SEQ ID NO: 17953 - DNA, 2667 bp, Zea mays
  Peptide Sequence Number=SeqID_59732
atggcgtcgtcgtcgtcgccgccgccgccgaagctgccgattcccggccgccgcaacatactcatcactagcgcacttccgtacgtcaataatgtcccgcacctagggaacatcatcggctgtgtgctcagcgcagacgtgttcgcgcggtactgccggctccggggttacaacgctatctacatatgcgggacggacgagtatggcaccgccaccgaaacgaaggccatggaggagaagtgcacgcccaaggagatctgcgataagtaccatgctatccacaatgaagtttacaagtggtttaacataaaatttgacaagtttggacggacctcttctcctgagcagacagaagtctgccatgcaattttccataaattgatggaaaacaattggctcacagaaaatactatgcagcagctttactgcgatacatgccaaaaatttttagctgataggcttgttgaaggaacatgcccgaacaaagtctgcaacgcatcagcaagaggagatcagtgtgaaacatgcagcaccttgttgaatccaactgaacttattgacccaaagtgcaaggtttgtaagaacactccacgtattcgtgacacggatcacttatttttggagcttcctctattgagagacaagctggtaaactacatcaatgaaacttcagttgctggtttgtggagtcaaaatgctattcaagcaacaaatgcatggctgaaggaagggctaaagccacgctgcatcaccagagatcttaaatggggtgttcctgtcccccatgagaagtataaagacaaggtgttctatgtttggtttgatgcacctatcggctacgtgtctattacggcatcctatacacctgagtgggagaagtggtggaagaatcctgataatgtagaattgtttcagtttatgggcaaagataatgtgccgtttcacacgatcatgttcccttcaacgctactcggaactggggaaaagtggacaatgatgaaaacgataagtgttactgaatatttgaattatgaagcaggcaaattttccaagagtaaaggtattggagtctttggtaatgatgcaaaggatacaaatattcctcctgaagtatggcgatactatttgcttatgaatcgccctgaggcatcagatacactctttacttgggctgatttgcaagccaaattgaacagcgagttgctgaacaacttgggaaacttcattaatcgagctggatatggttctgttgtacccgatgcacctaatgcgggcgcgcacacattgacaaaaacacttgcagaaaaaaccagtaaatgggttgaacaatatctcgacgcaatggaaaaggttaaactgaaacaaggactcaagagtgcaatgggcatttctagtgatggaaatgcatatttgcaagagagccagttttggaaactttacaaggaagatcctgcagcatgtgcaatcgtgatgaaaacttcagttggccttgtttacctgcttgcctgtctgctggagcctttcatgccctctttttctgatgaaggagtcaagctgagagaagctcaaaagcagcagctgatgctgaagccaacaaagttgctaaccagctcaagggcacaaaattatctggacgacgacactgaagatggctacatgctccccgtgccacttccgcgggctccggccccggcgccggtggagaagcggacacagttccagtgcgtcgcgtccaaggtgttctgctcttaccagacgctcggtagccatcacgccagcaacgtgcacggcggcaggggctgttgcttcgtgcctcccgtttgctcccactcctcccctgcagccccagccgccactcctctgtccccgatcaacagtccctgcatgatcgatccccacttcaatccagatggaggaacaaaaaaggaaccgaagaaacaatctggtggctcaaaatcgaagacagctgaggctgacattacagttgcaaagttggatattagagtggggcttatcagaaaagcagagaagcatccagatgctgattccctttacgtggaggagattgatgttggagaggacgcgccgagaacagtagtcagtggccttgttaaattcatacctcttgaagaaatgcagagccggaaagtctgcgtgctctgcaatctgaaaccggtggcaatgcgtggcataaaatcacatgcaatggttctggctgcatcgaatgaggaccacacgaagttggtggaacctccagagtctgctgctgtgggggagcgtgttacctttgctgggtacgcgggtgagcccgaggcttccctcagtggcaagagcaagacgtgggagaagctggccgccgagttgcacagcaacggtcccgcccccgcccccgcggccccgccccctccacggacaacggctccacctccggtcctcctccccgcgccagattattgcggtctggacgtacgccagggcgaggtcgaggagactcgagggggcgcgcgctggtacgggcgaactggcggcacatcaatcggctatcacgcgtctatcagggcgctatgccccgtcccctcgccctcgcgggcgcggccgtcgccgtccccaccaccatgcacctcgcaaaaagcaacagctcctggtgctgccccggtgggcgagtga

SEQ ID NO: 17954 - DNA, 309 bp, Zea mays
  Peptide Sequence Number=SeqID_59733
atggagctggctaggggcttgggttggatggggcaagggatcgcggcgggttttatgctgcaggaaggtagagtccgcgaggaaggcggcaacaccatcacgcgcggatttcggctggttgcaacgaactcagttgagaacgacatcggggagggcgatttccaagccgaggattccgtagcgggcggcgcgcgtcgttgcaacagattcccaaagaagcggaggcggatttgggttttagaagctagattccagggtttacaggggtctcagagatctctcggctatagttttggcacagttgtttga

SEQ ID NO: 17955 - DNA, 453 bp, Zea mays
  Peptide Sequence Number=SeqID_59734
atgggcgaccggttggtgcgaagtccagcctttgttgtggatttgcatggtcggagctcggccgcatttgtgcgcgaagtggaagctgaggcagtgaagattgtgggaaagtatgttccgaggacggagaccctaaggagttgggatatccgcggttcaaacgttcggttgaaccgcgtctttgagttgaacagtctgccatatgctggctacccgaaggacgacgatgccgatgttgctgaccgccggggaaaaaaaggtggtggcagcgttgatgaagacccttcgcggggagcagtgtcggctgcggccgtcaagaagaggaaaataggtacaacagttgaggggttggggcttccgatcgttttgctgtggatttattggaaacttgtgcggctcccggggagacgatgtcttcgcccaagctccgggaatcttccgcgcgaatgctga

SEQ ID NO: 17956 - DNA, 546 bp, Zea mays
  Peptide Sequence Number=SeqID_59735
atgaaggaggcgaagacgaagcaaccctctgctggatcctcctcctatggcatgggaaataccgacttcaccagctccctacgccatgggttaggtcgcactagcctcatcggccctcccacctgcgggttgggaggcgccggcctcatcatgccaagcttcgacacaagtgccttcaccagcatgtatgctggtcttcccttcccctctaggtgcctcgatttcgaagaggaggatggtttgggccctggcctagacctatccgagcttcacggccctgaggccatactgcagttcttattcgcatgtgacaaagtgctgtcctatggctccgatgactatagctccgacgaggagggttatgacccaactcgagagtgcttccacgcgggtcacgaggagcacgacaccaaaaagggtgatccaatactttttggaaagcttagcaaaagcaatacacaacttataatcattaaaaaggcccattaccgtgggccaaatcccacatgggcctcccagggcggtgacgacgtgggagacccatag

SEQ ID NO: 17957 - DNA, 420 bp, Zea mays
  Peptide Sequence Number=SeqID_59736
atgggcttcgagctgagcagagcgcggcgaagggctgcagcgctggggctcgactggaagaagagcgctcggctggccggagatgagagcgagtgcgtgcaagcagggagagagagacacgcggggaggagtaggcgctgggagagagaacgcggcatgagcagagagggaggagataaggccgcgtcaggggagaacggcggcggaatcttcaccggcggtgagcggcggccaaaaaatatcacgcagtcaggtacggtggctggggagaggatgagaacgactgagacacaggaaaatcttgcgccggctgaacggatagggacgagcggctgggagatttttttgaagcagagcgcgcgctgggaattgcagcttgccggggagcagaacacagaggaagataccgtgaggagataa

SEQ ID NO: 17958 - DNA, 601 bp, Zea mays
  Peptide Sequence Number=SeqID_59737
atgaacgtatgtgagctcactcttgctgtctcacaccccccacaggtcaagaacaggtaccacaggatgaggcatatgaaggatgctatgatcacacctggtgattatgttcgcgcccgggtcttcgtgccccgaaacccgggtgtgacatataaggagggatcctcttcctccatcaagtcacattggaagggtgacaagaagaagaagatgaagaaggtggtctactacgagaccgactcttcgtcaccctccacatccggctccgaatcgtccactacttctaagcgccatgagcgcaagaagtatatgagtgataaaatgaggcaccatctaacctcactccacgaaagcatttgggatattgttgaatttggagcgcaggtaccaaaggcgggggacaaggactacgactcggacgaggccgcccaaatccagcactttaactcccaagcaacctctatactcctcgcctctttatgtcgagaggagtataataagatgcaagggttaaagagcgccaaagaaatttgggacttcctcaaaaccgcacacgaaggggacgaggtgaccaagatcaccaatgatgtgcacccgttgg

SEQ ID NO: 17959 - DNA, 381 bp, Zea mays
  Peptide Sequence Number=SeqID_59738
atggtgtgcacgtgcttgactcgggcaacgtgtgattcaagcttcggcaattcctcgccgtacttccagaagcctgccgcgctgctcctccatgtcgccaggtcccgtagctgccagagtcgaggtgagaagttccccattcagtttgctggcgtccctttttcgtgtattgcccttcggattgatgcgcggcgctcgggatcacggtttaggaacggcggcgatggcctccgccgtgttcctgtacaagcgctgtcgcgggatgctggtttggggcgggtgcctcaggccattggatcacgaccgacggctaggatcactctatgcacaccggttggtcaggatggctttgtagccatcgatcggtggatggaggggtaa

SEQ ID NO: 17960 - DNA, 1071 bp, Zea mays
  Peptide Sequence Number=SeqID_59739
atggactcgtcttcagtcggtgaacccttctacgtcgtccgcaagggggacgtcatcggcatctacaaaaccctcagcgaatgccaagctcaagtcagcaattcggttcgcgacccttctgtcaccgtcttcaaaggctactcgctgcgtaaagacaccgaggaatacctcgccgcgcgcgggttaaggaacgctctctacgccattgatgcaacagatgcacgagatgaattgttcgacgatctagttccctgccctttccaggtaacacgaacaatgctctctgctcgtaagttccagctgcttcagcaacctgatggagctgcatcgtctactctgaaaagatcacaggagattgaaatcggaccatcaaagaagcatcccaaagttgatgagcaggtaccattacctgatagtcatctctcttgtattcttgaatttgatggtgcctctaaaggaaatccagggaaagccggtgctggagcaataataaggcagattgctcaactacgtgagggtctgggcattgcaaccaacaatgctgctgaatatcgtgcattgatcctagggctaacatatgcagccaagaaagggttcaagtatattcgtgctcaaggcgactctaagcttgtttgtaaccagtttctagccatattatttcttattctcggtctagaaagcgtcaaagggacacaacccaacagtgtgaaggtccaagatatctggcgtgttaagaatgataatatggctagcttctgcaagaaagtgaaggagctaaagggaacatttcatttatttcaaatcagacatgttttgaggttggtgaagttcaagagcagtcgaacttcccatgctagcagttgtgttgtggtcaagtgtggtttgtgcatcgctaaggttctgggactgaagctatgtcacatttgttcagttctcattgacacaaaaggaagagacgaaacaacagttgtattggaagtggtagtgggtctgatatatctgcggagtattgaacagacagatgcaatattgagtagattcttaggaaatttaatcgtctcaaacttctag

SEQ ID NO: 17961 - DNA, 438 bp, Zea mays
  Peptide Sequence Number=SeqID_59740
atgggggaaaggtggcagtggcgcccgtgcgcgcctgctttgggcggcggcgtggctagcgaccgtgctcgcctgctcacggtggcgacgtggccagagcgcatgctcgcctactcgcggcggtggtgcggcccgattctgcggcgtggccagactcatgctcgcctgctggcgccggtggcgaggccgacagcagaggcggtggcgcgacaagcctacgtgttcctcgaccgcggcgtcggcgcgcgtggactaagtggaatttatgggtgcgaccgtgtggagcaaccaaccaaactgagagccattttaataatagagtggactactggtcgtaaggctatcttcagcagtttacccatccctatacccattgttggtcacttgttatcaaatgatgtgaatcaagaacaagacaacacaatcgttaaagactaa

SEQ ID NO: 17962 - DNA, 447 bp, Zea mays
  Peptide Sequence Number=SeqID_59741
atgggcaagagtaacaaacgcaagcgcgagccgactcctccatcggaggacttcggctactcggaatactcggaggaggagttctcctccgagtccgaggggtctccggctcccgcctctcccccggcgtcgtccgacgattcagacgactcccagggattgccgcggaagtctggacttatatccgggccgtcgagcgctccgggctcgagggctcgaatgagtcggagtactcctcggacgaggaggactcttcggactcgtccgaggagggcggtggtggcgatggcgaggatgacgacaacgacggaggcgacggtgacgacggcgacgacagcggcggtggcggcagcaagggcggcaacggcgacagcagcaggggcagcaacgtcggcggcagcagcaaggtcagcaacaaggccagtggctagatgccactggctttag

SEQ ID NO: 17963 - DNA, 234 bp, Zea mays
  Peptide Sequence Number=SeqID_59742
atgactggttgggatgccccggggaaaaaacaggaaaccttcattttgctcctctctaagggtggcagaggaaaggaaatccagggaaccgctctcgccgacggggaatacgcgcacgtcacccgctcgtacgtcgcgcagtaccttctccacctccgggagctccagcagcgcccccacctgtggtcgcgcgggagatgtaccaaaggaggaggaaaggatgcgtgggaggag

SEQ ID NO: 17964 - DNA, 351 bp, Zea mays
  Peptide Sequence Number=SeqID_59743
atgccgaggtgcggtggcaccgccgccgacgttcgtgcgcacgacactctggtgtgctacttccttcccaacccggtattacgtaatgcggaagttttagcgatctacatagaggtgacatacgacgttgctgcagcgccgagagttgtccttgtcgagcggctacaacccacctccctctctcgttttcagcgtggtgctaatggcgatctctcggtggcggcttggctcccacgacgtggtacccaagatgcttggtggacggatgcgacggtcaggatgctccattttatatcacgaggcgaggatgtgcatcatggcggctggggctgctcccatccctcccgatag

SEQ ID NO: 17965 - DNA, 519 bp, Zea mays
  Peptide Sequence Number=SeqID_59744
atggcggaggtggagcagcaacaggacacgccgaagctcttcaaccgctggaccttcgatgatgtccaggtgaacgacatctcgctgaacgactacctcgctgtgaacgcgacgaagcacgcgatgtacctgccgcacaccgcgggacgttactccaagaagcggttccgcaaggcgcagtgcccgatcgtcgagcgcctcacaaactcgctcatgatgcacgggcgcaacaacggcaagaaggtcatggctgtccgcatcatcaagcataccctggagatcatccacctgctcaccgatgccaaccccatccaggtcgtcgtcgacgcgatcatcaacagtggaccccgtgaggatgccacccgtattggttccgctgggagagtgcttttccggaacatcaaaaccattgccgagtgccttgcagatgagctgatcaacgctgccaagggctcatccaacagttacgccatcaagaagaaggacgagattgagcgtgttgccaaggccaaccgttga

SEQ ID NO: 17966 - DNA, 540 bp, Zea mays
  Peptide Sequence Number=SeqID_59745
atgagcttctgcttgacccctcactactccgtcccccagtatgtcatgtcatctctcatcacgcttgtgttcgccgaggtgctcgaaggagtgaacctgttcctcctttctctcgtgatgtcgtcaaggctctcccgtgagacttacaatggcaggctactctcgacggaggccgagacgctggcccgcgttgccgccgacatgactatcacggctgctgaatatgtggggcagagctgcctgctgaacaccaccctcctgccgtcattgcgtcctcgcgtcttccagcgtctgccagcatctgtgtccctcacgtcctcgcgttctctagcatctgccagcagccctcacattccagcgtctgccagcatcttcgtccttccttgcgcccttgcgtcctcgcgtccctccgtcttccagcatctacgtccctcgcgtcttccagcatctatcagcagccctcgcggtttcagctctcagcgtttgccagcagccctcgcgtcccagcgtcctagtatctccctgactcgcgacctgtag

SEQ ID NO: 17967 - DNA, 216 bp, Zea mays
  Peptide Sequence Number=SeqID_59746
atggggaccatcctctgcatgtgccgcccatgctcggctctgatagacacctccctccttgtcggtgatgagtctgtcacgtcgcctgtcaaccaccacctaaggccacacgagtcaagcacaacttttgagagtcgtggactggttgatcctcactgtggtgtccttactgcccttgtcttctggcccaacgtccatccacaacacacttgctga

SEQ ID NO: 17968 - DNA, 321 bp, Zea mays
  Peptide Sequence Number=SeqID_59747
atgcaatgttgtgcggaagccagaggtgcggacgacaaacgggtgaagctcagcttgggtgtgttcgccgagccgcggacgcgtggggtggagctcgaccagcggccgtggccggaggtcggtatgacaggccgtggagcttcgtcctggagtcggcagggcaaggaggagcttcgttctggccttctgggcccaggggcgaggaggagcttcgtcctgcagccgatggggcggggaagagcttcatcctgggtcagggggcgcgaggcgggcgagggcagcaccgagggcacgacgagtcgatggtgggttgaagcctga

SEQ ID NO: 17969 - DNA, 267 bp, Zea mays
  Peptide Sequence Number=SeqID_59748
atggcgcaccggacagtccggtgcgccaccggtgcgccaacggtgcaccaccggtgcgccaacggtcacttccaacggctagttctgacagggagccgttggactcatggcgcaccggacagtgaacagtccactgtccggtgcacaccggacagtccggtgcggtgtccgggaagacactgccgtggaccagcctggccccacctggcagagggtgcaccggacagtccggtgcacaccggacagtctggtgcccctaagcactaa

SEQ ID NO: 17970 - DNA, 276 bp, Zea mays
  Peptide Sequence Number=SeqID_59749
atgcagccgttccaacttccttccaaattccaacgagagtccagtctaccagcctccaacactgaggacaaagcgaaaagaaaaaggggaaaaggggctggtgcgcaaaaccctagcacagtcgcatccatcatggcgatgtccatcttcggcggctgcgtcggcggcgactccggtgcgctcatcgcgccgtccgcgtcctcgctccgcccgccgttccgtcttgtcgctggtcccaaggttcggactcctgctcggctgctccccgtcccataa

SEQ ID NO: 17971 - DNA, 480 bp, Zea mays
  Peptide Sequence Number=SeqID_59750
atggagcgcccaaccgtccgttccggccgcccctcggtcagctccacgacggcacgacctcagctctccaacctgggcctcggctactccatcgccatcgcgctcggcttcctcatcctggggtccgagtcccccgaagacgacgcttacccctcctcctccgccgccgcggcctgctcccccgtcgggctcgacgcggccgccatcgcttcctaccccaaggtcgccttctccagcagggccgccgaggccaacgccatgtgctccatctgcctcagcgagtacagggacggcgagacgctgcgcgtgatgcccgagtgcaggcacggcttccacgtcgcgtgcctcgacgcctggctgagccggagcgcgtcctgccccgtctgcaggtcctctcccgtcccgacgcccaatgccacgccgctctccgagctcgtcccgctctcgcagtacgccgccgaccggaggcgccgcaggtga

SEQ ID NO: 17972 - DNA, 321 bp, Zea mays
  Peptide Sequence Number=SeqID_59751
atgggaggcttgggagtcaccaggctagcttctactgatgagctcatagagaccaaaaatccagagcctgaaatccagagactggataagaatcattttactatactatcaaccgaggaagaacgaagattatatgattggagcttgtcaagaagtggacagcctgagcgatatgtctggccatttgaagttgatccattggagttggcaccagatcctccaaaggaaccagaagatgagttcccaaccaagctcgttggctacttcttactggcgtggttcatactctctgttggcctctcggtggccctcaacaaatga

SEQ ID NO: 17973 - DNA, 549 bp, Zea mays
  Peptide Sequence Number=SeqID_59752
atggcgctccacaagctctgtgacgacggcggctctcagctctcttacggaagcaaggcgacccacgacatcacgccagcaaggtgccaagacctctccggctgccacattggcatggccttcttagagaaggttggccgcgtgggaccgaggacgagacaggcgctctcttggggccgctcgcttccctcacccgcgtggacgcttgtaacccccctactgcaagcgcacccgacctgggcgcgggacgaacacgaaggccgcgggacttccacctctctcacgcccgtctccggccacctcgcctctccccccttcgcgctcgcccacgcgctcgacccatctgggctggggcacgcagcacactcactcgtcggcttagggacccccctgtctcgaaacgccgacaccacccatcaggaagcatatagaaatgtttggattggcagggtgccccggcatctcatatttatagcccgagagggaaaatatccggaaaccggtaatgtcaggaacatcgggaggttgtttaagtgcttgattttctag

SEQ ID NO: 17974 - DNA, 369 bp, Zea mays
  Peptide Sequence Number=SeqID_59753
gccgtcctcataggtgtcgagggtagagcttggctggtggccgacgatgacaatcttgggttcgccagtggcggtggcgaggaggccgagagagtcgaacttgatgatgctcctatgggcggagatctttgcctcgtcgggtttctcgacaatgagttggtcggccagtccgccttggagagttggtcggtggagctgggctccttccgaagcatcgcccgagacgccctcgggcgagtcgaaaatgcactgctcgtctggggttggcctcgggtgagacagagagttcgacttccacccgaggttagcgtctcccacccggcgatggcctcgggcgagccgtgtcttgagtccctcgtgccttggtga

SEQ ID NO: 17975 - DNA, 252 bp, Zea mays
  Peptide Sequence Number=SeqID_59754
atggattctagcacacgctccatgcattcggttttgaccctaaaatctggtgtgacaaaagtgatggttatcaccaaaaagactgcccgcaagagcaccggtggacgcatccgcatcaacactcgagtctttccaccaccttctccacctgaggctagaccttctcgcatcactatggatgacattctaaaaggctttgatgaggagatcgaatacccggagtttgagaatgaggagaacccatggaggtag

SEQ ID NO: 17976 - DNA, 1665 bp, Zea mays
  Peptide Sequence Number=SeqID_59755
atggagatggacccgccgccgccgccacccctgcacgccgaccgccgcctccgcttccgcgactacctgctcgcgctggaggaggagcgacgcaagatccaggtgtttcagcgcgagctgcccctctgcctcgacctcgtcacacagactatcgagggaatgaggagtcacatggacagcgtcgtcgtcggcagcgaggagacggtgagcgaccacggcggccccgtgctcgaggagttcatgccgctcaagcccacaaccctctcgtcctcctcctcccagccccagtcccaggacgatcacgacagcgcccactaccttgaacaccgtcgcgctgccgccgccacggccaacgacgttgtcgatgccgacaaggacgacgaggcgctgggagatccggagacggcagcagccagcagcagcaggccgttgccacatccggagacgaagaaggcgatgccggactggctgcagtccgtgcagctctggagcaaccaacaacagccctccgtgtccccaccgcagcaccaggatgagctgctgctgccgtgcaggccggtggcgctcaacgcctgcaggaagtccgggggcgcgttccagccgttcgagaaggagaagaagaaggaggacaaggaggagaagcagcgcgccgagctggagctgccgctgccggccgcggcgagctcggccgtggtcggggacagctgcgacagggccggcgccaccgacaccgacaccgacacggccgagaacaataaggctagcagcaccaaaggcggcaaggacaaggaggctcagctgtcgtcgcaggcgcccagccggaaggcgcggcggtgctgggccccggagctccaccgccggttcctgcaggcgctgcagcagctcggcgggtcccacgatgctaacgtatgcgcatacattcatgcagtggcgacgcccaagcagatccgggagctcatgaatgtcgacggcctcaccaacgacgaggtcaagagccatttgcaggtcatcagtcatcagtcatcagtagcatctgttctcacttcgcccttcattttgaacatcttgggcgggccttcagaagtatcgtctccacactcggcgtccgaactcggcggcggcggcggtccagagcggcggcaccagcgtcgttgcgccgccggccgcaccgcagttcgtcgtggtggggggcatctgggtgccaccgccggagtacgctgcggcagccgcagcgcagccgcagcaggtgcacgtgcacctagccggcgacgcgtcgggaacgacgacaacagccgccgacaaggtgtacgcgccggtggcgacgacgttgacgcccgcaccgcgaccgcgaccgcgtccgggtccggagaggcagtcgagcagctgctccggcgcgcggcgcaatggggacgcctgctctggctcgccggccgtgtcatcgtcgtcgtcgcagaccgcctctgcctaatgaaacgccgtcggtcggtccccagcttggcttctaattttagctgcttacgtccggagtactatcataatgttattactttatccaattatctttgttgtttaatttttgtgggtacgggtgacccaatgggtgatccatacccacatgggtatgggtatgggggtaaatccatacccgctagtgtatatgggtga

SEQ ID NO: 17977 - DNA, 1242 bp, Zea mays
  Peptide Sequence Number=SeqID_59756
atggccggcggcaacgcgtcgtgcagcgtccgccctgatcacggaggcaacggcgacgtcgtcgctacggtggagagaatcagtcgcaggctagcacgcaagcaagcagacaaccaggcggtggtggacttgatccgcgagctggaggccttgcccatgacatacgaggcgctggaggccacaatgatcggccgcaccgtcaacggcctgaggaagaccgcgccgtccgcgctggctcgcctgctcgccgacacgctctacaggcaatggaaggctcttgcccacgagtggcacgcgagcagcaagacgcagccgcagacggcgccgccagaggctgataacggtatcaagaagcgtccctctttgtcatcgccgccgccaaaggttgatgatgataaggacaccaggaagcgttcctcttcgccgccgccgccgcagcctgtcgacgcgcaacagtcggctgcgccagaggccgaccgcgagatgggcgccccgccgtctacgacacgcgcggcttccgtcatcaggaagccgaacatcttacggttccggatggtcaccgtcaccgagccagagaagccacatcagcgccgcgtaaggctcatcccgctagcgacaccagaccccgcaccgtcatcgaacgacgcaatgcaaaacgacgccgacaacaaacaacaagccacgtgctgcccggcgacggcggcgagccaccagagtaccagtgctgataatgagcatgtaggtacgaccgacgcaacgcccttgacgacggtcgttaagccgtcgactgcactgccgaactcggtctcttcgtcagaggcttgcaagcgcaaagaagaggctcctacggatttcgaggaggagaggctagcaaaggcgagagcaagactcctcgaggggtacgaggaagcctccgccgccagggagaagaggaagaccaagctgatcgatgtgattgatgtaccggagaaagcgagacagcgtcctgctacccaccgcacatggaagaagcaacctccggtcgttcttcccaaccgaccgaagaagttcaagcacaagctgaatccatgctgcgagatcttcgaccagagtgggtactgcggccgccagaccagacggaggacggcgacgccgacacggagaagtgcttggacgacgtcagcctgccgcatgcatgccggctggaagggctgtcgacccgacgtcgtggatgacttcgagggagtccatccaagaacgtag

SEQ ID NO: 17978 - DNA, 630 bp, Zea mays
  Peptide Sequence Number=SeqID_59757
atggcaacatcccttgcattgaagtgttcagggtcaaaacaacttcttaatgatttagagaaagcattaagaaagttggaattggaagcagatgattctctaagtaagatccgagacaatgatgcccatgttgtttatgtagaccctgctgctataggtggagtaaacagtacaatatcatttcgagttccagaggtagtgaaaggaggaaaaacaagcaacacagaagagaatatgccagcgcaaaagatttccaccaatatgttggtcaattattcgagcattatgccaagtttcatgcaaggaggatataccgatcttttgctcggtcttgatcaagaagcttcaactgctcgaaagataggcccggtactgcatgctaatctcgtgcatatatggtgcgtattgctcgagccatgcagtctatggtggtcgacatccacgcggtctttggagatgacgccgtgccagacaagcaagcagactcctgaacttgtcgacctgagtgccgagtttggacgcctcgtgcgtcccctccacgacgccggcgccgccgacggcgaagttcatgccgggcgggtcgaccttgctcgcccggcctgctctgatccctttcttgcgcgcatttaa

SEQ ID NO: 17979 - DNA, 822 bp, Zea mays
  Peptide Sequence Number=SeqID_59758
atgcaaatttatggggcaaaaaatgtgacactgaaagccatttgcttccagcagcttaagaattgttgtggtagatgcaaccgaagagggtcttcaagcaaaattattaagtatattctggaatatctatacatggtgatagaaggcctgagtagaactctaaatggctctttgttgacaacaagcagcctttctaataaatctgcagatgcagtggtcacagtatctaatagacctgtaatagttcaaagccctgaaccttctttagacacacagtttgtgcataacccatcaggcaaatgtacctcagaatcaattctacaaaataacagcattcctgattctgcttcagttccttcaaaagaaaatgatcatatcgtgttaaaaggtgatatttgtgaagaaaccctcatgggtactaaaactgctaatgattcttgggattgtagtgaactaaataatgattcctgtgggaaaacttcagccctttgcatgaaattgaatcggcctgcacttaatgttacacaagccacatctgtacctgatcgatactcttcgtctttggagaaagccagtgaaaatgtggccgcaagtggtgtcaaagagacaaaaacatttggctcagctgtttgtgatgttgacagaagttcagaaccaattgaccgttcaaacaacaatgtgacgagcaacacaatgcgacatagtgagactattgtagtggattcagtgaacaatgtgggggatacagcaagcaactcttcactggctactaaatcatccagtatacaatctgatgcagacacctggacgtctgaattgtaa

SEQ ID NO: 17980 - DNA, 435 bp, Zea mays
  Peptide Sequence Number=SeqID_59759
atggcagcgaaggctgccgccgccgtcaccaccatcgcccacgttgtcgtcgacgaggacgagctgttcgagctcgacatcgcactcctggacggccgcgaccacgaccaccgccgcggcggcggcggccgccgtagtagtcctgctgccggtgccgacgccgacgccgacgcggggcacgccctgctggctaactgcctgctgccgctgcggtcgctccagctccaggaggctcttcacgccacgcagcagcaggaggttccttttccttggacggtccgctgggagttcttcggcgaggctttgcttctcgagcaggggcttcgaagccatggggagctacttccagagctgtggccactcaatgtcaatgggtgcgtgttcgaggaaatgtcaatggttactgaggagcagtccaatcatactgccaaatga

SEQ ID NO: 17981 - DNA, 600 bp, Zea mays
  Peptide Sequence Number=SeqID_59760
atggctagaatatgtcacaagccttgccacaccactcatcagaatatacccataaaccatcactgcccaaaaaaccaggaccgttgtgttgagacattcttgatcgatattgcactgaacagcttgcgcgaagcagactacggtcgatgggacacgtcaggggtcaacgtgtcgctcaggacgttcggacggaacggaggcacgccgcaaacatggtgttgcagagctgaacaaccgaggggcggcaaaagaagcagagagtcgtccagacgattaagcagatgcggcggagatgggacttccgaatccaagttggtcggttatttgtcattagtagaaccaaatattatcatatatagaacccaagttgatattggcaaaagaaagcagttactcagagactctactgacagtacgtgcacgtatttgttgcctgatctggggattactgatcagtaccgtgtaaatttctcatcaactgtcagcacaaaaaacaaattcagaacaagaagcgaggatgaatataaatcaagcagatctcatcggaccaagaggggcggggtgcatgctagcgctgtggcgcgtgagaaacaaaaatga

SEQ ID NO: 17982 - DNA, 912 bp, Zea mays
  Peptide Sequence Number=SeqID_59761
atggccggcgccgacacgtcgggcagcgacgtcctcgcgacggtggcaaggatcgatcgcaggctagcgcgcgagaaagacaacgatgtcgtggtcgagttaatccgcgagttgcaggccgtggacatgacgtatgaggtgctagaggccacaaagatcggccacaccgtcaacgccctgaggaagagcgcgccgacggcgctggctcgcctgctcgccgacacgctctacaggcaatggaaggttctggccaacgagtggatcacgatcagcacgacgcagcagcaacaaccgtcgcctccaccaaacactgatacggacagcaacaagcgttcgtcttcgtcgccgccgccaaaggccgttgatgataaggccaccaacaagccttcctcttcgccacgaccggcgtcgccggtcgacgcggagcagtcggctaggccagagcccgaccacgagaagagcgccccgacgacaataagcgcggctcccgtcaggaagaacatcttacggttccggatggtcaccgtcaaggagccggggaagctagatcggtgccgcttaatgatcatcccgtcggaagctccggatcccgcaccggcgtcgaactacgcaacacaaaacggcggcgacaacagacagcaagcctactgcacagcgacgacgagccaccaggctaccaatgctgataataagggtgtctatccgagcgacaatgtaccattgacgaggacagttaagtcgccaaccgcattgccgaaccctgtcgcttcgacgggcacttgcaataagcgcaaaggagagccctccacaaatttcgacgaggagaagctggcaaaggccagggtaaggcaccacgaggggtacaaggcagcctctgtcgcaaaagaaaagaggaggaccaaagtggtctaa

SEQ ID NO: 17983 - DNA, 1371 bp, Zea mays
  Peptide Sequence Number=SeqID_59762
atgggggtggccgccggcggtggggtgcggctgcgtgccagcagcgccaagaagcagcggcagcggaccctgaacaacatcaagatcacgctcctctgtggcttcatcaccgtgctggtcctccgcggcacggccggcttcaacctgctggtcagcagcggcgacctggacggcgcggcggcggacgccaaggtggtggaggacgtggagcgcatcctggccgagatccgctccgactccgaggcggacgacgtggtggtggtggtcgagggcgggtcgtcgtcgtcgtcgtcgccgcgcaacgcgacggcggccagcttcggcaacttctcggcgtcggcgacgctagtcaaggtgcgggagtacagcctgggcccgcccgtgcggggctgggacgcgcagcggcgggactggatggcccagcacccggagttcccgcgcctccacccgcggggccgcccgcgggtgctgctcgtcaccgggtcgccccctggcccctgcgacaaccccgccggcgaccactacctgctcaaggcgaccaagaataagatcgactactgccggctccacggcatcgacgtggtgcacaacatggcgcacctggacccggagctgacggggtactggtccaagctgccgctggtgcgccgcctcatgctggcgcaccctgaggtggagtggatctggtgggtggacagcgacgccatcttcaccgacatggcgttcgagctcccgctgtcccgctacgacggcagcaacctcgtcatccacggctacccggacctgctgttcgagaagcgctcgtggatctcgctcaacgccggcatcttcctgcttcgcaactgccagtggtcgctcgacctgctggacgcctgggtgcccatggggccccgcggcccctcccgcgtcgaggccggcaagctgctcacggccagcctcacgggccgcccgcccttcgacgccgacgaccagtccgcgctcatccacctgctgctggtgcagaaggagcggtggatggacaaggtgcacgtggagacggagttctacctccacggcttctggacggggctggtggacaggtacgagcagatgatggaggacaaccacccgggcctcggcgacgaccgctggcccttcatcacccacttcgtcggatgcaagacctgcggcaggtacgaggactacccgctcgaccgctgcatccggggcatggagcgcgccttcaacttcgccgacaaccaggtgctcaggctctacggattccggcaccgctcgctcacaaccgccaaggtcaggagggtcaccgaccccgccaccaacccgctcgaggcgaaggaggccgcgctcaacatggacgccaagttcacctag

SEQ ID NO: 17984 - DNA, 1704 bp, Zea mays
  Peptide Sequence Number=SeqID_59763
atggctgttaagccgccgacagcatcggcgaatcctgtcgcttcgccgggcgcttgcaagaagcacaaatctgaggcccccacggattttgacgaggagaggctggcaaaggccatggctaggccagcactgcataatgttgcaagaggatttgtatacacacaatgggactcgaggactaacgagccgggcaggcaaagtgtcggattagtcaacgagccgggcaggcagtgtcggattagtcaacgagccgagcagatcaccgatcaccctctcctctgcgccttcgtcacgctcctcgtcctccgcggcaccgtcggcgtcaaccgccgcctcgtctacatcgccggcagccccgacaaccgcgcggacccggccacggccacgggcagcgccagacccgtcgaggacgtcgagcgcatcctccgcgagatacgcgcagactccgacgacgacccggacgctggccccaacaacgacgaggcgccgacgtcgaccagctcgtctgcggccacgggggaccactacgaccgcggcgccgcgtggacgacgacgacctacaggctgcagccgcgggtgacgcggtggaacgccaagcggcggcggtggctgcaccagaacccggggttcccgtcccgcgacgcgcgcggcggcccgcgggtgctgctggtcacggcgtcgccgcaggggccctgcggcagccccgacggcgaccggttcctgctccgggccaccaagaacaggctcgactactgccgcctccatggcgtcgagatggtgcacaccacggcgcggctggaggaccccgagctgcggtcgcccggcgacgggtgggccaagctcgcgctgctgcggcgcctcatgctgtcgcatccggaggtggagtggctgtggtggctggacgccggcgcgctcgtcaccgacatggggttcgagctcccgctggcgcgctacgagggcgcccacctcgtggtgcgcggcgactcgtaccagctcttccagcgccgggcctgggacgccgccagcaccgccagtttcctgctgcgcaactgccagtgggcactggacctgctcgacgcgtgggccgtcatggcgcccaggggccgcgcccgccacgacgccggggcgctgctcacggcgacactggcgggtcggccggctggcgaggccgacgaccagtccgcgctcgtacacctgctcatcaccgagaaggagcggtggatggaccgggtgtacctcgagaaccagtactacctgcacggggtctggacggcgctggtcggcaagtacgagaaggccatggagaagcaccacccggggtacggcgacgaccgctggcccttcgtcacgaacttcgccggctgtaatccttgcgacgacggcaagaatcgcagtgacgagtacccgctggaccggtgcgccagcggcatggagcgcgccttcaacttcgccgacaaccaggtgctcaggctctacggcttccgtcacgagtcgctggcgagcaccgaggtcaggcgcgtcgcaaaccggtcgacggacccgctggaggccaaggaggaggctctcgctttcttgaagaagcccaatgagccggatctatggagcaacgatgtgcgcaagaataggaagcgtaagggaaagggagatttagattctgttcttgcaagaatcctgaggagactgggatggcgatcccagtgttga

SEQ ID NO: 17985 - DNA, 309 bp, Zea mays
  Peptide Sequence Number=SeqID_59764
atgaagctgtggaaggagacttccaggagttccaagactacgacgagttctaggtgtgggttagcggcaacccccagtcggctgcctgtgaaggccgtgttatctacgtttcgttttcgcactttgatttattcaagagaacgtctagctaataataaaaatgaagaatgcatcatcagactaattggagccaaagaaggtgacacccaaagcacgataggcctggtccagcccgacccaattaccagcactagtgctgattttgagaatgagcccggtctaattcccaacactggttactggatgtga

SEQ ID NO: 17986 - DNA, 1911 bp, Zea mays
  Peptide Sequence Number=SeqID_59765
atggccacggcggcgctggcgctcctcgtcctcgcgctgccggcgtccctcgccgtgacgtctacgtacgtgcggccgccgccgagggccacgctgtcgctgctccaggacgccggcagcgacggccagacgccgcagcagctgcagcagtccaaacagctgcaacagtgtcggcttgcagcctgccgaacacgccccatggtcgtcatgtggcacatgcagcttggcatttctcttcacgtttggttggattggattaccgtactaggcatctgtcgtatgggtccacacagcgtgcacgacgtgtcagcacgcgtgccggtgcacatatcactggtagggccagacaaggtgcgagtgtcgtggatcaccgcggccgacgcgccggcgactgtcgactacggcacggcctccggccagtacccattctccgcgacggggaacactacgtcctactcctacgtgctctaccactcgggcagcatccacgacgccgtcatcgggccgctgcagcccagcacaacctactactaccgctgcagcggcagcgcctcgcgggacctctccttccggacgccaccggccgtgctgcccttccgcttcgtcgtcgtcggggacctaggccagaccgggtggacggagtccaccctcaagcacgtcgccgccgccgactacgacgcgctcctcctcccgggcgacctgtcgtacgccgacttcgtgcagccccggtgggactcgtacggccgcctcgtggagccgctggcgagcgcgcggccctggatggtgacgcagggcaaccacgaggtcgagcgcctgccgctgctggagccgcggcccttcaaggcgtacaacgcgcggtggcgcatgccctacgactatgccgccgacggcacaccgccgtcggacgacaacctcttctactccttcgacgtggccggcggcgccgtgcacgtcctcatgctgggctcctacgccgactacgccgcggggagcgcgcagctccgctggctccgcgccgacctcgcggcgctccgccgccgcggcaccccgccggccttcgtgctggcgctccaacaaggtgcaccagggggagggcgacgccatgcgggacgccatggaggcgctgctgtaccacggcgcgtcgacgcggtgttcgcgggccacgtccacgcgtacgagcggttccaccgcgtctacgccggcaaggaggatccctgcggccccgtctacgtcaccatcggcgacggcggcaaccgggaggggctagccgacaagttcatcgacccacagccgtcgatctcggtgttccgggaggccagcttcggccacggccgactcgaggtggtcaacaccacgcacgcgctctggacgtggcaccgcaacgacgatgaccaacccgtggttgccgaccaaaagcgctctcgcaccgcacggctgctcgggcgtggcgcggtgacgggctgtctgctgctctggtcctccgggctccgcagttcgcacctcagctcgtccggtgaccggcggtccggctcggcctcggtgggcggcggctccaggcaactaggcgagctagcgatgtggcgaggtgccgagcagtcgaggtgcgggcgtgcgggcgcggcggccagtggcggtgctccggggcgtcgagccgtcgggtcggggcatggggccgtgggcgcctcgtgcctgggcggtggcgcagaagcgcgatgccggcgtctctggcagctggaccaggggaacaccagcctgtgcctggagaacctgctcatcatgcaggagaacgaccggctgcggaggaaggcgcagcagctggaccaggagaacaaggccctcctcgccgagctcaagcagcgcgaacaaggcacttccgcttccgcgtccaccaacctgaagcagcccaagtga

SEQ ID NO: 17987 - DNA, 180 bp, Zea mays
  Peptide Sequence Number=SeqID_59766
atggcgcgacggtggcccggggcggcagtggcggacctccacggctgcacggggaacggcgggcctaggtcccagtcgaggctacctcctgggggccattgccaactcgttcttaggtatgctggtctacaaccacgacaaatcgagcctacatcccgggggctaggtaccaaggagtaa

SEQ ID NO: 17988 - DNA, 318 bp, Zea mays
  Peptide Sequence Number=SeqID_59767
atgagctccgctctcctctctctggtggcttatggtcaaattgcattagaccttaagctccgcctctgtgtcgcaagcctagcacacacttcctcgttgcctattgcgcccggtagcctcgccggcgacttccctgccgcgggcacccgccacctcgctgtggaccgaccatctcgagtgtccaccgaccaaattgaccccgcctccgtaatcccctacttctgctcatgccttaccaccattctgtcagagcagaaccgggtcaccggcaaagaaccgctgcggaacttcaccggtgaccggttctccccgccgtga

SEQ ID NO: 17989 - DNA, 264 bp, Zea mays
  Peptide Sequence Number=SeqID_59768
atggcgcctttggagccaatagggcgccgtgcggggaaggattcggctacggtccatcccatcatggtggaggcggctgctcgggctacaccacgattttccattccttcactggtcgccaaagggaaggtgaccactaggaagcgctcatcccgcgcatacgcaccacataagtccgtgaaggacaccaccctggtggcaagaggggagcctctgtctccccaagccttcgtgtcaccgtcgctagtagaacagcccctctag

SEQ ID NO: 17990 - DNA, 150 bp, Zea mays
  Peptide Sequence Number=SeqID_59769
atgatgaaggacttcaccatgactgttgagttatcaccatacgaggatatgcttcgaatgatgaagcaatttctccttgctcttctcgacttgctaatggatgagttcgaggttgctgatctcctcatgaagctcctcttcgtggggtga

SEQ ID NO: 17991 - DNA, 480 bp, Zea mays
  Peptide Sequence Number=SeqID_59770
atgccgaagatatttgaaaaagacgcttcggacgccaagcctaggctagtcagacttcgttacaagtataaatatgaagataaatttggagaacctagtgatgggtggttagattatattgaagcaaaatgtaacgaaatacttgattcgaagaagaggaagaagaaggtgactactaggcaaagaaaagtcccgaaggtgcaagttaaatcgactcaagcttcaaaggaaattctgagtataagggtaaggggtttgctaagactgaagaggccaaaaaggcaattgaagatgatacaccgcttggagaaggacctttcgatcaagacttgggtggtcgaagacaatatggaaactgaagtatgccgctacatgacagataatattggtttcccgaagctggaggccatgctctcaaccatgtcctccgaggaattttctgaatgcttgcttacacgcatcttaagggtttgcttctga

SEQ ID NO: 17992 - DNA, 198 bp, Zea mays
  Peptide Sequence Number=SeqID_59771
atgaccgttggtggaggctacctgtcgtatggtgcaccggacagtccggtgtacaccggacatgtccggtgcgccagccacgtcaccaatgccgttgggattcgaccgttagagcttctgtcttctgggcccgcctggatgtccggtgcacaccggacatgtactgttcaatgtccggtagccgttggcgcgaagtag

SEQ ID NO: 17993 - DNA, 306 bp, Zea mays
  Peptide Sequence Number=SeqID_59772
atgactcggaggattccgaggaggaggaagaaggaatccatggaggaggacgaggacaacgatgacgaaggcaatgcgaccgacacgatcggcagcgacgacgacaaggacgtcgatggtggcaagggcaagggcggcgatgatgacagcagtagcaggggcaacaatagcggtggtggcaaggaaggcgactacgacaagggcaagtgtagcaacggtggcggtgacgacagcaacaacgagggcagcaacgacggtggcggcaacagcgatagcaatgtcggtggcgaggcgccaccggcttaa

SEQ ID NO: 17994 - DNA, 300 bp, Zea mays
  Peptide Sequence Number=SeqID_59773
atggtggaggctcaccggagaagacgaagttcaccggagccgaacacaaatttgtcgattgaggacgaaccatcggtcggatcaacgaagcgaaggcaccaggatgaagctctcgacaagatgaacgcagcggtcgtaatcgctattcaccggggtcttcttgaggagcacaagcagacccacatttccataaaactcctagctgatgactctgagattggagctgttctaggcatgcttgctagagagtcgtctgagtcagaggaccttgagtcgggggttgcggccttcgggcaatag

SEQ ID NO: 17995 - DNA, 312 bp, Zea mays
  Peptide Sequence Number=SeqID_59774
atgaagttcaagatcgcctggttggatgaaatcataaagagaaaagaaatcacagtgattcaagaagggagttacactttttgtcaacctaataatgaagatgtagtgacatatttatatgatatccttcattatgagtctcacacctttgagaacatgtggcataaaacaaaggttcaaattgtagaacttaatcccctggcctcacaagtccaagtgcataagtctcaaattagaaaggaatcttcgggcaaaagaaaatcacttccactgcaaattttgatgggtatcaaagattctttgctcgaataa

SEQ ID NO: 17996 - DNA, 321 bp, Zea mays
  Peptide Sequence Number=SeqID_59775
atggaggagacgctcttccggcgctgcaccatggatctcgtctatggggacgcttgtccgccgcggttgtgctggcttcgtcgcgctcgctcatgtcgtgcaaccgccgccactgaaaccctagtatcagccatcgtggaaggccagatagagcgattgtttttatacgatggcaacgggattaaccgaaaagggtctaaattggaaaaatggttagaaggattgggggagggagggatagagacgagaaataaatcaggtctgtctcaacgagagaactacatgttgccgtttaaattggacttcagtgtcttatattaa

SEQ ID NO: 17997 - DNA, 537 bp, Zea mays
  Peptide Sequence Number=SeqID_59776
atgtatcgtgggggccttgaccgcttcaagaaggcacaagccttggagcccttctcagtgaactccaagccaggcaccaagaaggcacctgcagctgcaggaacaactaaagcactagctctgttgacgctgccacaaaattctaattttgtgctggatggggaggtctttgataggatcaatctagaaaaacaggagcatgctgttgttattcgacacaggaatggaaggacctcaacaaccatccataagagaaacttcgagaaagaagatacaactgtctacagaaacaataaacattttttcttctcggactactcaatctgttggagtgatgttgatgagacatttgaggtagattgggagttcttaaatgctcaatggtctgatggcatgtgtgccaatcttcaaattgtgcagacgattggtattgcttggcttccaaatgaattttcatttatgaagcttatcctctctaaagcaaggcttcttcgcacgttgtatgttgatagaaaccaagatgattttgataattag

SEQ ID NO: 17998 - DNA, 204 bp, Zea mays
  Peptide Sequence Number=SeqID_59777
atggttgttgtctgcgcgaactgcagcggcctcgacctcgatgacaggtgttgggagtctgagacgatgatgcctataagcattgagatggaaaagggaataggagtatcagtgctaaaggatcctaaaaattgtagaggtctgggaaagggaatttccaagtacagggtgaacctgtcatatttaacatgtgatggactctaa

SEQ ID NO: 17999 - DNA, 117 bp, Zea mays
  Peptide Sequence Number=SeqID_59778
atggctaaagtccacttcctaatgggatgtgctgacccaatgccatcaatttcagaaacaaaaaagatattaagacaacataaccaaggcatactcggactgtcacagatgagttag

SEQ ID NO: 18000 - DNA, 513 bp, Zea mays
  Peptide Sequence Number=SeqID_59779
atgaaactcctctcactgtcgcgatgctcaggaggcatggtcgcggctgtcgtcaaatcaatcgatgtcgccgctgaactagaagttgaaaccagctcgcccggggtccggtcgattccccctcagattttgctgctgctaggaggccacgacgaccatgggcaactgttgtgccacaccctcgacggacgaagcggcaaagagctgccagaagcagcagaaggtgaacccctacaacgtcacgtaaaaccgcgtggaggcggccccggcaagccctggcctggtggtgttgctggacccgacgcggagggacctcggcgcacaatacgagctcggcggcgagctgggacgcggcgagttcggcgtcacgtacatgtgttcgccatgagcgcgcggtacccgtacaagtccgtctccaagcgctgtctgtggacgctcgtggacatggaggaccttcgctgggaggtggacatcctgcgccacatgccggtgcaccctaacatcgtcagctaa

SEQ ID NO: 18001 - DNA, 2577 bp, Zea mays
  Peptide Sequence Number=SeqID_59780
atggagaaggatacagccatggatatcactcaggttctgatagctgctcaatctccagatgctaaccttcggaccgtggcagaaggcaacctcacacagttccaggagcagaattttcctaactttctcctctccttatcaatagagctctcgaacgatgaaaaacctccagagtctagaaggcttgctggtattatccttaagaattctttggatgcaaaggattctgcgaaaaaggagctactgactcagcaatgggagttgttgctggtgacactaggatcttctgtgcatgatgcaagacatacctcttcacaagtcattgccaaggttgcatcaattgagatagcacgtcgagaatggcaagatctcgttgccaaattactggggaacatgacttctgcaggtgcacctgctcctttgaaacaagcaacactagaggcattggggtatgtgtgtgaggagatttctccacaggacttggagcaggaccaagtgaatgctgttctgactgctgttgtccagggaatgaaccagacagagctcagccctgaagttcgtcttgctgcagttaaagccctatataatgctcttgactttgcggagagtaactttgcaaatgaaatggagaggaattatataatgaaggtggtttgtgatactgctgtgtctaaagaagtggagatcagacaggctgcatttgaatgccttgttgcaatagcatccacctattattcacacttagagccttttatggaaaccatattctacctgacagctaatgcagttaaaggtgatgaggaaccggttgcacttcaagctgttgagttctggagcgctatctgtgacgaagagattgcactccaagatgaatatgagggatctgaggatggtaactctgctatacacttccgctttattgaaaaggccctccctttacttgttccgttgctgctagaaactttgttgaagcaagaggaagatcaagatcaagatgataatgcttggaatatttctatgagtggtggaacatgccttggactcatttctagaactgttggtgatgcagttgtccctcttgtgatgccatttgtcgagaccaacatcacaaagcctgattggcattgtcgtgaggcagctacctttgcatttggttctatccttgaaggcccctctgttgggaaacttgctccacttgtccaggctggtcttgatttcttgctcaacacgatgaatgatgcaaatagccaggtaaaagatactactgcttggactcttgggagagtatttgagctcttgcattctccagctggtataaactcaatcataaatggttcaaaccttccccgtatcatgtctgtattgcttgagagtactaaagatgctcctaatgtagccgagaaagtctgtggagctatttattttctcgcccaaggttatgaagatgcagagtcaacgtcttctgtcctcacaccttatctatctaatacgattgctgctcttctttctgccgcagaccgtgctgagaccacccatttcaggcttcgtgcttctgcttatgaagcactgaatgagatcgtgagggtcagcaacatacctgaaacttcaggcatcatagcacaattattgcaggagatcatgagaagattaaaccttacatttgatctccatatactttcttctggtgataaggagaaacaaagcgatctgcaggctttgctatgtggtgttctacaggtcatcatccagaaactgagcagcacagatgcaaagtctataatttctcagaccactgatcagctgatggtgctttttctgcgtgtctttgcctgccacaattctactgttcatgaagaagcaatgcttgcaattggtgctcttgcatatgctactggtccagattttgtgaaatacatgcctaacttctttacatacctggaggctggtttgcagaattatgaagagtaccaagtgtgttccatctctgttggagtggttggtgatatttgtcgtgccttagaagataaaagtttgcctttctgtgatcgcattatgacggttcttcttaaggacctatcaagctctatgctcaatcgatctgtgaagcctctgattttctcgtgctttggagacattgctcttgctattggtgagaattttgagaaatacctaccttatgccgtgccgatgcttcaaggagctgcaggactccttggtacacttgacctgagtgatgatgatatgggcatcaagggcccaaaagctcagctgatgatcccatatgcaacccatctactacagttcactgaagctgtctccaaagataggagcagttataatatatatccctgttctgttgttatttgtgccataagggatgacagtgtgacaaaggctgcagttgctgtccttggggatctcgcggacacgcttggccaaagctcaaaggatctgttcaagacccacctattccatgttgagttcttgagggaatgtcaagctcaagagttggatgatgaagttcgggagactgcacaatgggcccaggggatgataaaccaggcggtggtctcttaa

SEQ ID NO: 18002 - DNA, 483 bp, Zea mays
  Peptide Sequence Number=SeqID_59781
atggatccaaagatgacagaggtgacccagatgttcgcccgcttcaagacggcctacgcctgcaacgacctcaacacctgtgtcaccctcctctcgcagctcaaggtgcggtacccagcttcactggatctttattgcccgccatttacttcccgatgtcccagtttctctaggaaattccacggctgggggggggtctgtttcgtgggtgtcgtccgcgccggagcagtttgcactctgaagcgggtccatctcacccaattccccagccatccggccttgtttcagcagacaccgaacattgtggaggagctcaaacttgcaattaccattccttcaacagagcaagttttgaactcagcccaaaacatttcaggggacatttatgagcatgctgttgttttgagtatgaaatttgaggaccaagatgcgtttgaacgcaatttctgccagctgaagccttattacgtggatacatggtaa

SEQ ID NO: 18003 - DNA, 660 bp, Zea mays
  Peptide Sequence Number=SeqID_59782
atgactcaaaagtttgaaatgtcgatgatgggcgagttgaactacttccttgggttccaagtgaagcaactcaaggatggcactttcatctcccaaacgaagtacacacaagacttgatcaagcggtttgggatgaaggacgccaagcccacaaagactccaatgggaactgacggacacgtcgacctcaacaaaggagactccgattatgctggatgcaaggtcgataggaagagtacatcagggacgtgccaattcttaggaaggtccctggtgtcatgtagctctaagaaacaaacttatgttgccctatccaccgctgaggccgagtatgttgtcgcaggacagtgttgcgcgcaactactttggatgaggcaaaccctcagggactttggctacaatctgagcaaagtcccactactatgtgataatgagagtgctatccgcatggcggacaatcctattgaacacagccgcactaagcacatagacatccggcatcactttttgagagaccaccagcaaaagggagatatcgaagtgttttatgttagcaccgagaaccagctagccgatatctttaccaagcctctagatgagtcgaccttttgcaggctgcgtagtgagctaaatgtcttagatttgcggaacctggattga

SEQ ID NO: 18004 - DNA, 225 bp, Zea mays
  Peptide Sequence Number=SeqID_59783
atgactaatgatgttgagttgtataacctcgacgctattgatcttcaggttctttctcttccagctgaaaccgacggacacgtcgatgatgatgatgcaaggagtgactcgagtctccaggtggtgggtacctactttacacatgcagtccctctccagttcagtctgaaagggtcgcggattggctatcaaatggtggagtggatggtgccagtgactaactga

SEQ ID NO: 18005 - DNA, 1707 bp, Zea mays
  Peptide Sequence Number=SeqID_59784
atggcgacctgctgcagcatctccctgccgtcgtcgccatggctcctcctgctggcggtcctcatcatcggcgacgccgcggctgtgatggcggtgcccaccaggccgctgctgcgcatcgccgagccgccaaccgcgccgggcacggcagcggggcccgccggcgcgtcgcggcccgggggcggccgaggcgggaggctgcctgaccggtcggtggccggcgccgaggtgatccctcgccgggttcgctgccgcggtgatggtttatcggacttatataatttgggggcgatcaaatccgacaccgttggaatcctgtttttcctcttcttcttctcagaatctcagccaatacgagatcttgggttcgattttagcaacaactccgtactggaacgcgacgtctttttcatggcatttaatttgctggacaaagtccacgcctgcaactttggactacgtacgccagagcgagctaccaaaccgtcgcaaagaaatgcgcgcaaggaagctccagtcagcagtcagcagcagggatccagctacgccacagcacggcggcgcccgacctcccacctcccagtccctcccgcccgccaccgaacacggagccgtcctgatatgggtcccgggacgggaaacggtgctggcgctgcactgcagtatctagcagcagcagcatctgctgcgacaggaaacaacgtctccactgttccgcatagccgtacactattttatagtatagagtatagatgtctaaatgacgtcttttacgtccacagcaagctcctacaggctacagactacagtcctaccatgcccgagggctcgaggggagcagcgcaggacgacaagacagacagtagaaaggggtcacacacacagtcacagccatgcgcgaaggcctaccctaggctgccgagggcagcgtccaccaggtacgatacaaccctccccgatcccgacctcgatccttcttcaaacaagccgggtacgggagtagagcgctgcggcgtcacatcacggcgcagcagagtccagaggagatccagcacaccgtcgcctcgattctcatgtgccagccaggcgcatgcaagaccacggtcagactccgacgcccccacccctgctttcctctcacacgtccacctcactcccgtccgtgcgaccgtgcctcgtctcacttgcccacatatataccagataccagttaccaccaccaccaccaccacgagctccctccaccctcctcgcatttcccacccaaccttctggagcaagctcagagagacctccagagcaacagaccagttgcgacttgcgagcagtgcagtagcagtacaaatggctagccgccgcggcagcttcttgtcactgccaaggcagctcctcctcatggcggcggttcttggcaccgtcgtccttctcggcgagggcgcgacggccaggccgctgctgggcatcgccgagccaccggcctcgccaggcgccgcggcggcggcgccgggaccgggggtcgccgcgcaggctgcggaggcaggcggcggcagggcccccgaccgctcggaggccggcgtggaagtgatcctcgccgggttcgcggcggcggtggccgttgtcatcgtctgctacatccgggtcaccagggagagcaagaacggcagcggcagtgtgggagagaagcgcggaagcttgggagggttctga

SEQ ID NO: 18006 - DNA, 695 bp, Zea mays
  Peptide Sequence Number=SeqID_59785
atgtcgtcatgcaagcggtacttgccgtgcttgatattgttgttgctgcacggaggacgaggtgcggtggccgggaaggtgtcggcaatcgtcgtgttcggcgactcttccgtggacacggggaacaacaatttcatcccgaccatcgcgcggagcaacttctggccgtacggccgcgactacgacgatggcctccccacgggccggttctccaatgggcgcctcgccaccgacttcatctccgaggccttcggcctgccgccgtccatccccgcctacctggacaacaactgcaccatcgaccagctcgccacaggagtctccttcgcctccgctgcgacaggcctcgataacgcgacggccggcgtcttgtatactgtgggcgagtacgaggcctacctgctgggactcgccgaggccgccatacgccgcgtgcacaccctcggcggccgcaaaatggacttcaccgggctcacgcccatgggctgcctccccgccgagcggatcggcaaccgcgacaaccccgggggagtgcaacgagcagagctcgtcctcaagcttaacaaggaactgctgggactgcagctcgtcttcgccgacacgtaccagctcctcgccaacgtcgtaaacaggccggccgactacgggctctgcacagctccgagagacagggcagcagcgcctgtgccgtcagc

SEQ ID NO: 18007 - DNA, 456 bp, Zea mays
  Peptide Sequence Number=SeqID_59786
atgcaggcggcatgcgaccgcaccaagggggcgcaccctttcgacttcgacgcgtccagcatggaggcccaggcccacacgtcatgcaaccagttcgccggttgctacgtgcaagaaactgcaccgccactcgcgccactaccgtgcctcctcgactgcggaaccagtaccgcgactcgaggcaaccctgcacatgacccaacagtgccaaccaagcacatcggtcacggggaccgagaaaggggataccccgaaagggatccttctccgcgaaggaaacgggccccgagcccccctactgatcagaggttcgaaggctggcccctcggaggggttcaacaaccgcctcagagcgctcgggctccgcgcccactactggtcagaggttcgaaggccggcccctcagaagggttcaacggccacctcaggccactcgggctccacgcccactactga

SEQ ID NO: 18008 - DNA, 660 bp, Zea mays
  Peptide Sequence Number=SeqID_59787
atggctagccgctacgccaactcgcgggcgcgggaggtggcggtgctgtcgcagcgcttcttcaagaacgtggcgcggacgcggcagctcttcgcgtgccgcaccgtgtgcatgctggtggcgggccttgcgctgggctccatcttctacgacctcgggcaggacaaggtggtggagcgcgtgggtctcttcgccttcctgctcaccttcctcctgtcatccacaacggaggcgctgcccatcttcctgcaggagcgcgacatcctggccagggagacggcgtcgggggcgtaccacgtgtcgtcgtacgcggtggccaacgcggtcgtgttcctgcccttccagctggcgctggccgtcatgttcgcggcgccggtgtactggctggcgggtctccgtcgaacggcgaccgcgttcggctacttcctgctggtgatatggctgatcctgtacacagcgtactcggtggtggtgtgcttcgcggcggcgacgccggacttcgtggtggggggggatgttggcgggaacaacttccgtgggaggaatgttggcgggaacaacttccgtggagagaaggctaatcccctcgtctacgcctctaaaacgtcgaagccgcacgtgaggatctcccataatagcaaattttctcgcgagagagag

SEQ ID NO: 18009 - DNA, 414 bp, Zea mays
  Peptide Sequence Number=SeqID_59788
atggtcacggccacaggggcgtcccgccacctgcttgccgtgcagctggaacagacgctgcagcgtgcaccgaccctctcggtctccggaggacggcgcctgcaggctgctactggcgtggcggcggagcgcgtccacggagacgtgcgggggcaggtggaggcccgcgtccccgagcagggcgcggagctggtcgacgcacggtgcgtccgcgcgcctcgggccatggcgcggagcgcgccgacgatgtggagcgcggaggcgctgtcgaggccggaggtgggctcgtcgaggatgagcacgggcgggtcacgcacggccgcgatgccgatggagagcaagtggcctattccctgcttttctatatcagctaatccttcacctacgccttcaaaacgtcgaagccgcacgtga

SEQ ID NO: 18010 - DNA, 129 bp, Zea mays
  Peptide Sequence Number=SeqID_59789
atgaagggggcacaggtggtaaatgcgggtgggggcggaggtgcagctggaggacgcagaggagacatgcagatgcgactgtgggtaaggatgaaaacggttagaaaatccgttgtaaacatcatgtaa

SEQ ID NO: 18011 - DNA, 102 bp, Zea mays
  Peptide Sequence Number=SeqID_59790
atggcggcggccggtggcgtttcaactgacgatgtcccgatcctgcaggcagagaacctcaccagcaacgtcaagtccgtctactacaggcctagggattag

SEQ ID NO: 18012 - DNA, 480 bp, Zea mays
  Peptide Sequence Number=SeqID_59791
atgaagatgtctatactaatgggtgttgcccagatgaacctggggattgtattgagttattttgatgcacgatatcatggaaatgctcttgacataaggtatcaattcataccacagatgattttcctcaatagcctttttggttacttagcactcctgattcttatcaagtggtgcacgggctctcaagctgatctttatcatgtgatgatatatatgttccttgatcctgctggagatcttggagaaaatcaactgttctggggccaaaaggaacttcagatattgttgttacttctggctttgatcgctgttccatggatgctcttcccaaaaccttttatcttgaagaaacttcataaggaggtaatgatttggaaaatgttcttgaaaaatatatcaggctctggtatgactgaagagtcatataagcaaagaaaagtacaagaggtcttcgagaaatatataccaggctcataa

SEQ ID NO: 18013 - DNA, 1173 bp, Zea mays
  Peptide Sequence Number=SeqID_59792
atggtggacgcggggcaagcggcgaagcgggggaaggccacggatgagaaggggcagccgtcggcggccgcgcggacgcctcgccaacacacgccggatcacccaccctattgctggatgatcggcgaggcaattgacgagctggctgaggacggcggctcggaggaggactccatctcggccttcatccgcgccaggcaccctggcgtgccccccgcgcacgataggttcctccggcactacctcggcaagcacgtcgccgagggattcttcctgcgaaacgctgcggggcggttcgagcgcaaccccgaggagaacgcagccgaggagctcccggtggagcagactgaggccggctcgtgcaacccggcttccgttgggtctttggtggtagatgccaagcatggccggggcaggccgccgaaggatggctatccttcgacaccgcctgaaggcaggaaggatggcggcgcgggtgctcagtggatgacaccacatgcaggttcttcttccacactagccgctgctgccaagggttctgttctaatgtcaccggttgctgctgcagacaaggacgaaagccgagcaccatccttgaagcccaagcgccgtcgccggcttcgcaggcaggggatggccacgaccgctgacagctccggcgaagcactcgtcgcaggcaagaaagatagcagggaggagcatgagccaccgcgtgagctggcactggtgatcctcgatgatagctccaacacaccaaccatggacaaggcatgcaccaaggtccctccaaccacgcgacctgtggatggtgggcagcctctcgatctgtcagctacacccaagggacgtcgccggcaacgcaaatcagtcgcggtggctactggtggccgctctgctcttacacctggcaagaagctaggttgtaaggtctcatctgcatcgcccaagtttgcaccggtggttgccgctggctgtcgtactccggcttcagttgctgaccagggcggcaggaaagcatcagcgacgctgaagcggcacgggcggcctcgcaaactgtacccagttagcgctgacgagatttcagatgatccagagattgctttgctcgcgttgccttctccagacactagcggcgtcatacccgtagctccaaaacttggctacctgacctga

SEQ ID NO: 18014 - DNA, 1278 bp, Zea mays
  Peptide Sequence Number=SeqID_59793
atgccctcccgcgctgacgaggctgacgactggggcgccaccaagaagtttaccccggctcccacggactctggccgccgcgataggttcggcggcccttcccctctcggccgtgctgatgatattgacgactggtcgcgcggcaagaagccgctcccggcgcgctaccccagcctcgggtctggaggtggcttccgcgactctccagccttccgcgactcaccagctgcttctgattctgaccgttgggtccgtggcgccacccctttgccacacaacggcgagggggcgggggagaggccgcgcatcgtcctgaatcctcctaaacgtgatccgttagttgcctctaccccacctgctgaggtggcccgcaaccgaccaagcccgttcggggctgcaaggccccgggaggatgtgctggcggagaagggggtggactggaggaagtttgagaatgagattgagcacaagaccagccgtcctaccagttcgcactccagcaggccgaatagcgctcattcctcccgccctgggagccctgggtcgcaggtttcggcagttgggagtgaaggagcaccgagggcacggccaaaggttaacccatttggtgaggccaagccaagagaagtggtgctgcaggagaaagggaaggattggaggaagattgatattgagcttgagcatcgtgctataaataggtatgatgtccgtggaattaccatagaatttctgttacttgtggttgaaagctacaagctcatacaaaacctcgattttgtaatggaagcacttgctaatggcacaccttttatctgttgtgtcatacaagttctctttgctaaaactgacctttacccctggccagagtctgatgaagaaagaaatttgaaagaagaaatcaaccttctgaaggtggatcttaaggaaatcgagagaaacatgagtaatggttctgaccagacatcggtagatgcaaaaggtttgtctgagaagatatctcagttggaaagccagcttgagcagctttcaagggagttggatgacaagattcgatttgggcaaagaccacgttcgggtgcgggcagggttacagcacttgcaccaactagtttaggggaggaaccacatgctacagtggtggacagaccgcgctctcgtggtggtatggagccaccaccaaggcaggaagaaagatggggatttcaaggaagcagagaaaggggctcttttggtgcaagcagaaattcggacaggccaatggcaaggcagagatggtga

SEQ ID NO: 18015 - DNA, 468 bp, Zea mays
  Peptide Sequence Number=SeqID_59794
atggccgggtctcccacacccgcgccgtggccggggccgaggacgctgcgccagccgcgggcggtcgcgcccgtgctgtcgcaggggttggccggagagacgctctcgtcgggcacatgggagagtgcgaaggcgaggttgaccgtgaccggctcccccggctcgcagcacagcctggacgcatgcacgaggggagccagggcgaggagatttcggatcggaaatgggggaggagatcacgatggtgcatgcacgagtggagccagggcgaggagatttcagatcaggaatgggggaggagatcacggtggtgcatgcaatagcttggggatggggtggcgggggccggcggcgtcgctggagccggagaagaaggccaactcgtgttggtgtctcaccgagggcaggggccgctggtcgcgagacgggggaactggggtgggggctgggtgggtgggggcatcgtag

SEQ ID NO: 18016 - DNA, 1209 bp, Zea mays
  Peptide Sequence Number=SeqID_59795
atgaccactccaggatggtgctgcagcagaactgatggcaacggcttcttcggagatgtgtacttcgaccccaatgaatggttgaaaggcctcagtgcaatggcgactatgtttaacaacacgaaatatgttgttggcatgagcttgcggaatgagcttcgaggaccgaaacaaaatgttagtttgtggtacaggtacatgcagctgggtgctgaagctgtacatgctgcaaaccctaatgtcctggttattttgtcgggcctggattttgacaacactctcagcttcttgttcaaagaaaaagttaggctatcattttctggaaagttagtttatgagcaacattggtatggcttctcagatggtggcaattgggaaactcagaaccagaacgatgtttgtgggatggttgttgatttcatatgggctaaaggattattcctacttcaacatggctggccgttgtttttctctgagtttggatttgatatgtcaggcacacatattggtgacaatcgctatcttacctgcttcttaagtgtggcagccgaaatggatctggactgggcaatttgggctctgcaagggagttactatatcagagagggtattttagcttatgatgaatcatacggattgctgacatgggactggtgtacagctagaaatcctagcttcattaaaaggatcaattctctgcaatcagcattccaaggtcctggtcttccaaacactcaacagccatactacataatattccatccccaaagtgggctctgcgtcttggccaggtcttccaagttacttgagttgggtccatgcgacgaatcaaacgcctggaactacacctcagcgtacgagctggtagtgaaaagcacagggcaatgccttcaggcgcagtcggtaggcaagaatgcgaagctcggcaccgattgcagcaaaccaagttcgaagtggcacctgatatcggattcaaagatgcatgtctcggctgagctcgcgaaaaatggaaccagggtgtgcttggaagccagtcctgacggtgccatcagaacaaatcagtgcaagtgcctaagcgtcgatccgacctgtgaccctgagagtcagtggttcaaagtgatcttaagcagcagagacatacctggaggcgactccatcttgcagttgccgtcacttggcccctggcctccgacatcccttagttcttga

SEQ ID NO: 18017 - DNA, 2085 bp, Zea mays
  Peptide Sequence Number=SeqID_59796
atggccaccgccgtccccacggcggctctccccacaccgggccgcgccgggccggcgccgccacgtgctccactccgcgcagatcctagctacttgccacagctccacgcggcactaatcaagtccggagagctcaccgggtcggccaaatccttccactccctcctcgaggcggccgcggcctctccgacgctgctcccctacgcggtcagcctgttccgcttgggcccgcggccgcccctttcgacgccgtgctacaacgtccttatgcgagctttccttcacgcgggccacccggaggacgccctgcacctgttcatcgaaatgctccacgcggcttcggcctgccccgctgatcagcacaccgccgcctgtgccctcaagtcgtgctccaggatgtgcgccctggacgtagggcgcggcgtccaggcgtacgccgtcaagcgtgggctcgtggccgatcggttcgttctgagcagcttgattcatatgtacgcgagctgtggcgacgttgcggcggcacggcttgtgttcgacgcggcggaggagagtggcgtggtgatgtggaacgcgatcgtcgcggcgtacttgaagaacggagattggatggaggtggtggagatgtttaagggcatgcttgaggttggtgtggcctttgatgaggtcacattggtgagtgtggtcacggcatgcggaaggataggtgacgcgaagcttggcaagtgggttgctggacatgtggacgaggaggggctggcgaggaacccgaaattggtgaccgcactgatggacatgtatgccaagtgcggagagattggtaaggcacggaggctgttcgatgggatgcagtccagggatgtggttgcttggagcgcaatgatctcaggctacacgcaggcagatcaatgccgagaggcgctcggtcttttcagtgagatgcagcttgcaagagttgagccgaacgatgtgaccatggtaagcgtgctctctgcctgtgctgtcctgggtgcacttgagacagggaagtgggtgcattcctacgtaagaaggaagcgcctatctctgacaactattctcggcactgcactggtggacttctacgcgaagtgtggatgcattgacgatgcggttgaagcgtttgagtcaatgcctgtgaagaactcgtggacgtggacagccttgataaagggcatggcaaccaatgggaggggcagggaagcgttggaactcttctcgtcaatgcgcgaggccgggatcgagcccacagacgtgacattcattggtgtcctcatggcttgcagccacagctgcctggttgaagagggccgccggcattttgatagcatggctcgggactatggcattaagccaagggttgagcactatggatgtatggtggatctgttggggcgggccggtttggtagatgaggcgtaccagtttatcaggaccatgcccatcgagccaaacgctgttatctggagggcgctactgtcttcctgcgcagttcacagaaatgttgggatcggggaagaagcactgaagcagatcatctccttgaaccccagtcacagtggtgattacgtgctcctgtcaaacatatatgcatcggcgggacagtggaaggacgcagcgatggttcgaaaggaaatgaaggatagagggatcgagaaaactccaggctgcagcctcattgagctggacggggttgtcttcgagttctttgccgaagacagcgaccaccccgagttgagggagatataccagaaagtcgaggagatgattggcaggatcaaggtggctgggtatgtcccaaacacagctgatgtgaggctagaggttgaagagcgtgagaaggaagtatccgtttcccatcacagcgagaagctggccattgcgtttggcctcatgaagctggaccctggtgcaacaattcgcttgtcgaagaatctaagggtctgcgcagactgccactcggccacaaagttgatttcgaaggtgtacgatagggagattgttgttcgagaccggaatatatttcatcattttaaggatggtacttgctcctgcaatgattactggtga

SEQ ID NO: 18018 - DNA, 447 bp, Zea mays
  Peptide Sequence Number=SeqID_59797
atgcaggcagcatgcaactgcgccaagtgggcgcacttctccgacttccaacacgcccagcatggaggcccaggcccacgcgtcatgcaaccggcgcgccggatgctgcgcgcaagcgactgcaccgccacccgcgccactgccacgcctcctcgactgcggaaccagtaccgcgacttgaggcaaccctacgcacgacccagtagcgccagcctggcgcgacggggaagcgagcgacgcttcgccttcgccataatgaccgcgtcaaaaaaggctccgagcctccctactgatcagaggttcgaaggctggcccctcggaggggttcaacagccgcctcagagcgcgtgggctccacacccactactggtcagaggttcgaaggccggcccctcggaagggttcaacgaccgcctcaggccactcgggctccgcgcccactactga

SEQ ID NO: 18019 - DNA, 150 bp, Zea mays
  Peptide Sequence Number=SeqID_59798
atggagaagggccacatgatggacaaagttcgaatcactataaagacaaagactctgctcaagtctgggtgcaccggacagtgtccggtgcgccaggctggctctggtggaaagaccgctctcgggaattcgtcggcggtgtacggctaa

SEQ ID NO: 18020 - DNA, 207 bp, Zea mays
  Peptide Sequence Number=SeqID_59799
atgggcgttctcctcctgctggtgctcctgctggatgcgggcgtcgtcctcccagccgtgctcctagcagcagaggctccagcagcagaggagaagaggcaggatgcgggcgtcgtcctcctagttatgctcctgctgggcggtgcgctgtgctcctactggtgctcgacggctggagcctgctgcctggtggtgctcggcggatga

SEQ ID NO: 18021 - DNA, 1095 bp, Zea mays
  Peptide Sequence Number=SeqID_59800
atgactgggcatggcaatggggtgacacgcctggcaagtggacatggccgcagggtggcgtggctatggtggtgccattggtgggaaacacaattggagggcgacatctgttcggagaagataaacagtacccacagacactgtggctacaatatccagtggctagggttagaatttgataccaggttccaccccaaggtattcatctctgtattgcttgaagttgttcacacctctatctttaccagttttattgtttctatccagaaaattgatgagggtgccgtgcatgctgtgttttctaaagcccttgataactatatcaaatggtgcaactatctgcctcttcgtcctgtctgggataacaatgattcgttgacaaaggaaaagaagttgctatatgtgtgtttatactacttgatgtggggagaagctgctaacgtgcgatttattccagagggcttatgctacatatttcatcatctagcaagagaattaggggtgattctgcagaaacaaactgcagagccagctgaaagctgcaattctggtggtggcgtatcgtttcttgacaatgtcatttatcctttctatgaaatcattgcagcggaagcagccaataataaaaacgggcgtgcaccacattctgaatggagaaattatgatgatttcaatgagtttttctggtctcataagtgcttccacctacgatggccttggaacctgagcgacccgtttttctcgaagcccagtaggaaatataagggcttgctcagtaggaatcatcactacggaaagacatcttttgtggaacataggacttttcttcatctttaccacagctttcatcgcctttggatgttccttattatgatgtttcagggactgactatcattgctttcaatgatggtagttttgacaggaagaccatattgcaacttcttagtctgggtcctacttatgtcgtaatgaaatttattgagagtgagcacatatctttttcctactgtaatatgataatccgtgtcaattatcccgatggctattttttatgttaccttattgttaccgtgaaggtctattggatattctaa

SEQ ID NO: 18022 - DNA, 387 bp, Zea mays
  Peptide Sequence Number=SeqID_59801
atgccgtgtcaagtgcatacacgtgtggagtgcacacaagatagacatgatcaggagagtagtagctgcatgcagccattagtctctttccttgtgattgctgtattcttattcattaatactcaattgtatcttttggttttcaatgggccattgacagtggactacccaaaatcttctgaaagcagcccattgaaggctgagagagtggttcatatggacggagcccagctaattggtagacatgatgaagcaacaatcttcacgttgcgtcagcttgctgaggctaccaataattttaggcaggactctcttttggggcgagggggattcggttgcgtctacaaggcaactcttagtaatggacagccagagagaaaggcgtaa

SEQ ID NO: 18023 - DNA, 399 bp, Zea mays
  Peptide Sequence Number=SeqID_59802
atgagcaagaacaagaagggtggtagttctttgcatcactccggcgacaaacacaagcgtgagccgactcctccctcggaggacttcggcgactcggagtactcggaggaggagttctcctccgagtccgaggaggtatggacctacatccgggccgtcgagcgcgccgggctcgagagctcggatgagtcggagtactcctcggacgaggagaactcctcggactcgtccgaggagggcaacagcggcgatggcggtgacggcgacatcgacggaggtgatggtgatggtggcggaggcgacggcaagagcggtgacggcggcggcaaaggtggcagcggcgacggcggtggcggcagcaagggcaacagcagaggcagcaacaaggccagtggctag

SEQ ID NO: 18024 - DNA, 201 bp, Zea mays
  Peptide Sequence Number=SeqID_59803
atggcgaaaagcagattggacaccggccttgcggtttctgtagccatcctgtctccagcaaggtcgggctctagcgagacagagatttctcccgaggccgaggccaggttagcgcatgaatacgatgtcatgcctagagtggttggaatagcagtcagagtggtctcctgtgggattcacgggagagttgggggcatttaa

SEQ ID NO: 18025 - DNA, 453 bp, Zea mays
  Peptide Sequence Number=SeqID_59804
atgacggcggttctcaagccccctacggaagcaaggagacgtcagcaaggtcccggcagccccgacagctgtgcttctacagggctcaagcgctcctccaacggccacgacaccgcgcctatccaccgagttcgtgtcgcgttcgtgggacctaatggagaccgatgctaccgggatggagggcatcgacggttaggcacgggccacacggagggcatcggtgcggtgttcgtcaccacatggatctgtggcacggcgtccaccgtggtaaccttaggtatggcaagcatcagtggaagggtggccacgggcacgatcgatggattcgacacgataggaatgcccgggatggcgacaagagcgatgggggggcggagcgtgagcaagatgtcacatggcgtggcacgtagtgctgtcgtcgccgatgagcatgatgagcgccatcgtcactag

SEQ ID NO: 18026 - DNA, 158 bp, Zea mays
  Peptide Sequence Number=SeqID_59805
atggcaccagttgaagatcttgttcttgtaccacctattaatgaagttgtttcacctcctcccaagactgaggctacagacacgcccccgcacgcacagcgcttcctttggaagcccctctacgcaggggaagggaacaggagcatgctgcagatagc

SEQ ID NO: 18027 - DNA, 101 bp, Zea mays
  Peptide Sequence Number=SeqID_59806
atgggccgctgctccttccctggtcgcggccgccgtcgagtcgtcggatttctatctccgcagatcccacatcgcgagaaggcacagctcccacagcgcgc

SEQ ID NO: 18028 - DNA, 1107 bp, Zea mays
  Peptide Sequence Number=SeqID_59807
atgtacatcaagaaggacctgaatatcacggacgtgcagctggagatcctgatcgggatcctcagtctctactcgctgttcggatccttcgctggcgcgcggacgtccgacaggatcgggcgccgcttgaccgtcgtgttcgccgctgtcatcttcttcgtgggctcgttgctcatgggtttcgccgtcaactacggcatgctcatggcgggccgcttcgtggccggagtcggtgtgggctacgggggcatgatcgcgcccgtgtacacggccgagatctcgccggcggcgtcccgtggcttcctgaccaccttcccggaggtgttcatcaacatcggcatcctgcttggctacctgtccaacttcgcgttcgcgcgcctcccgctccacctcggctggcgcgtcatgctcgccattggcgcagttccgtccggcctgctcgcgctcctggtggtggaagcagctcatcctgtccccgaccccggcggtccgacgcatccctgctctcgggccgtgggtctccacttcttccagcagggttctggcagcgactccgtcgtccagtacagcgcccgcctgttcaagagcgcggggatcaccgacgacaacaagctcctgggcgtcacctgcgcggtgggcgtgaccaagacgttcttcatcctggtggccacgttcctgctggaccgcgcggggcgtcgggcctctgctgctgatcagcacgggcgggatgatcgtctcgctcatctgcctcgggtcggggctcaccgtcgcggggcatcacccggacaccaaggtcgcgtgggccgtcgccctgtgcgcgcgctgggcttcgcggtgggtgtggcgagcaaccgcgtcaccagcgccgtcatctccatgaccttcctgtccctctccaaggccatcaccatcggcggcagcttcttcctctactccggcatcgccgcggtcgcttgggttttcttcttcacgtgcctcccggagacacgcggccggacgctggaggagatgggcaagctgttcggcatgccagacacgggcatggctgaagaagcagaagacgccgcagccaaggagaaggtggtggaactgcctagcagcaagtag

SEQ ID NO: 18029 - DNA, 1511 bp, Zea mays
  Peptide Sequence Number=SeqID_59808
atgacgtcggttgttctcaactctctacgaaaccaaagaaacgtcagcaggaccccgggccgcaccgtcagctacgcttctatagggctcaagaacttctccgacggccacgttagcacatatacagggctcaggcacttctccgtcggccaccagccgaggactcagagagtgacgctgattccaactcccttcaggaaatggagagctgatcgttgtggagactgcagagatcgtttcacggccaaaagccagaatgctcggcaaaaggaactccagagacaggcgttctccagatgcggtgaagcccatgaggcgtcctctcaacaaggctataacgaagtcggatggaaactccgaaaatttcgatacgatgacctcgccgtcgtctacaacacggtcgtcagggcgcaggccgacctgaagctgctggcgtgcaccgtcgcgctctcctctagcctcggcgcggtcgcggccgtgggagcgcagcgcctcatcggaggccgccaggccgcgctcctgtcgggcgccgtgctctgcgccggcgcgatcgcccggggcctcgccaccggctccgcggcggcgttcacggccggcgtcttcgtcaacggcgtcgggatgggcctggcgctcgtggccgtcccagcctacgccgcggagctcggcccgtcctctgcgcgccgcgcgctcgccgcgcaccccgacggactcgtgtacctcggctgcatcctggggtcggtcgtctactccatgcggctcgtgagggttcctgcccaccacgcgtgctggctgacagttgccactggtatagccgttccggcgttgctcagcgccgtcgtcctcttcatgcccgacgcgccccgttggcgcgtgtccagggaccgggaaagcaaggcccggcgtatgttgagcagaacatcggcgacactggaggaggctgagctccgtctggtcgagataaaagtcgagtgcggcggactgctgcaggacggctccgacgagccgctggcggtgtccaagcgggccctgtggtggagggaggagattgaaacattgagagagctcctggtgtgccccacggagcctcttcgccgcgctgtcctcaccgcgctcgtcgccaaggtcttccagcaggtgtccagcatcgggtccattctccagtacgtgcagcgcgccttccgcgactcgtccaggggggcgctggtggtgttcgtgtttgtgatgtcctaccctatgtcgctcgtgctcgtggagctcggctggctcctggtgacggcgctcgcccgcagctgccgcctgggcaggcgcgtgccgacgggcggcgtgacccggcggcaggagcagctgaagtgggtgaggggcctgtccgcgacaatgcttctctcgctgatggctctggtgtggatcgcgctcggcccagcgccgtgggcgggcgcgtcgtcacgcggctgcctgcggtggctgcgggcaacggtggcggtggtgaaaaagtctgtcatctcggcgatcta

SEQ ID NO: 18030 - DNA, 381 bp, Zea mays
  Peptide Sequence Number=SeqID_59809
atggtcaggatagctcagttggtagagcagaggactgaaaatcctcgtgtcaccagttcaaatctggttcctggcacagaaaaaaggatctaccgaataggagttgtagtttggtacaggtatgttcaatgtgataacccttttattatcccccaagaaatagctcacccattggcaaatttgaatgcttttaagaacccagaagccgttattaatggttacaagagggtgactttcttgatcaataaagacatagtgaatactgttcttagtacatttatgaatgatccaacctttacggaggtttttaacgttaaccaagccgagaacatggataataatgttgctatgaagcgagtgtcggcactgccatcatggtag

SEQ ID NO: 18031 - DNA, 633 bp, Zea mays
  Peptide Sequence Number=SeqID_59810
atgaagctgcacccagaaaagagggggttggacagcgaatcagtaacaaggtggaaggttgctgcaagagtgcctccagctgtggagaatgttgcagatgggagagctgaaaggatggagaagccctcggaccctcctatagccccaccagttgatgatggaaaatctgttgtgcctgatgagaacctgaagaagcgaaagaacactgaaacgaatggttacttacaaaacaaccttgatatgcggcctacaaagttgccgagaccagcactccccagcaattgtgtggagaatgcttatgatgaggccctagaagtcaggaggctacaagacaaagctgctgatttttcaggtggaagtgttgcacttttcatgggacaagggaaattggaaagcatatgtaccaggaagccacctcaccccgactgcaagtatcttagccagatatacaacattcctgaagcccctcaaatgatggaattgcctgggcaggaaggtgaggactgtctgttcgacaaaggcggcacccagccaaggaagccggccagttcagcgcctgagtctgatggagtctcccaagtgtgggctcaggctctgaaaattgaccatgctgatggtggtggtggtggctga

SEQ ID NO: 18032 - DNA, 402 bp, Zea mays
  Peptide Sequence Number=SeqID_59811
atgaaggcaaaagcatcaggtatcttgctgccaggaacgccgtcagggagaatagcagatggagttgctgacgaggggctccaggacacggtgtacaggcatcttcctctacgtcctcgtggtgagagccagacgaatattgttccaggcggagttggagaagatcgcctcaacacccttgtaggtgtgatggcaggtcttaattctgacctggatagtgctaccttggatctctccaagatacatgaggaacttgaggatgcacacgccaggatcgcagcactggaggctcagcttgaaggaagggacccaccagaagctaaagttccaatcacagcagtgtccccgccccgcaagaggattcgctatggagccccaggatctattactaggcttctttag

SEQ ID NO: 18033 - DNA, 324 bp, Zea mays
  Peptide Sequence Number=SeqID_59812
atggggaggaccgggaccccgatatatacggtccaggcctccaaggaccccagcaatgggatccggacccccctgtataaggtccgggtcgactacagtggggtcctggagttccagggcagaatatactcgagccctagtcagggcccagacaggggtccggagccgacacgtgtccagacccagtctggcaggatccagaccttgtcactcctgtttcccacccaggtggggatccgatgctgccacgtggcctactgcgcatggcgctgcgtgcccaatacacgctacctgggctgcgcagttactcatacgttaccgtag

SEQ ID NO: 18034 - DNA, 1017 bp, Zea mays
  Peptide Sequence Number=SeqID_59813
atggaggatatgacctccacggcctccagagggatggaggccctggcattgacgggtggcccgtcgcattacggcgatgccgaagctagctccaatgtcctggcccagagggatgagccgactttagaccctaccgcgctcgcggcgtcttcaggtcattgcgtggaggtgacgccgcaacctccggcgccgttggcgccattggggcaccttgagggtagggagccgagaacaatccccctctgcgccttcggcggttgctcagaggaaggtgaccacctgagcgcgctcctcacacgtcttttcacgcgatcggcggctcgggcggaggcactgctggtagcccagctggaggcggagcggctacatgcggaggctacccgtggcgaggaagaggagtgtaagcttgctgagctccgctccgagatcgactggcttcaaggcgaggcaacacacctgcgctcagagtgtgacgacgcgcagcgtgacgcggaccgtctttgggaagagggatcccggctccaaggggccctccacgagacaagtcttcgagctgaagaagccgagttgtctctcaaggaggccaacgttcgcctggggaaggcagacttggagctctcgaaagagcgcaatgcggccggagtgtgcgcacacctctcgcccctggcatcgatcgaggtgcctctgatcgaccgactgcgagcgctacccggatatgtagaacgcgtggtcgtcgagtgcgtctatcacgggagcaacatggctctagggcagatggtctaccattttgatgagatagatgacgccgtgatcatagaaggctttgccgccggtcgaagtgataaggagctggacaatattggggagcaggtccgtcctcatgcccggtcgatcgcgagctgggttgacgtgaagttcctcctgatcggtccttggagtctggagccgtctgccggctctaacccttgttatcggtcatctcggtctaccagagtcatggccattgaggccttctag

SEQ ID NO: 18035 - DNA, 243 bp, Zea mays
  Peptide Sequence Number=SeqID_59814
atgtcggcgagccagtctagcgcgtgcgcggaggacggcagaaaccggtggacaataagatttatgtttggtgggtatgcaagcgcgaactcacttcgaatggtgaatcgctgggactcgagggcatacacccggtatggtgtaccgtcccgtcctttcctttatacgggcaactgtagagactccggcgctgaggtccccacgatcggggttgactggccccgcaagtcagtggggacatga

SEQ ID NO: 18036 - DNA, 699 bp, Zea mays
  Peptide Sequence Number=SeqID_59815
atgatggccaccacaaaggaggccaagttgatgagtggactgctgaggaacagatgtagggaaaataatggtccattttcaaggagtgtctttatcaggaaatggacctttgcagctatgttcagaatatgtgaggaatgttctcctgtggaagagtctacagggggctacactgctactaaattgatacttgatggatctgatgacaagaatccttgtgataaggaactagttaataaggacaacctgctgcagaggaacaagataaatcaaaaataccaaggactgttcaaaggaaaaacaactaaatgccgacaccctgtacaaaagcaagaaccaggagatggagggtttgatgaaacaacattgctgctcaataaagaaaaggagcaaggcaaaacacacacaagggttagtggaaaagcagatggcaatgaagcaaagtcagcagaacttgtgagccttggtaacgaaaaggagcaacgaagaaatcacacgaaagttagtggaaaactggataatacggcaaagtccgcgagagtttcggctacctgcgttgcgtactttgtgtcttatgatggctttgcctggttgaacttttatgaaatgcttgtcttgatgattgttgttcggcaacaaacgtgtcaaccttttgcacgacatggcattgaatgcaaaatgaaatggttatctggttaa

SEQ ID NO: 18037 - DNA, 354 bp, Zea mays
  Peptide Sequence Number=SeqID_59816
atggcagctggccgagcaggggctccctgctgctgcgcgaagaagaaaacaggggggcgtccatggaggtcgcagggggctcggccatgggagggtggccagcgccatgggagaagtacctgctggcagccgtgggaaccagggaggaggaaaaggtggcactggctgctgatggccggagaaaaggaggaggacgaccgagcgagggaggaaggggctgatgctcgccaggaagaggagcagaggtccggccgtggggagagagccaagctccatgcttgttgccgtgaagcagggaggaagaagagaacagagcgatttagagcttcggcaaacggacgattgagcgattaa

SEQ ID NO: 18038 - DNA, 360 bp, Zea mays
  Peptide Sequence Number=SeqID_59817
atggaggtcgcaggggctcggacatgggagggtggccagcgccatgggaggagtacctgctggcagccgtggaaacgagggaggaggaaaaggtggcgctggctgctgatggccggagagaaggaggaggacggccgagcgagggaggaaggcgccgctgctcgccaggaagaggagcagaggtccggccatggggagagagccaagctccatggttgctgccgtgaagcagggaggaagaagagatactttggtacaggtgacaatgagattgatggttttggttacgattatggtattggcgaagatgaagctgtggaaggagacttccaggagttccaagactacgacgagttctag

SEQ ID NO: 18039 - DNA, 171 bp, Zea mays
  Peptide Sequence Number=SeqID_59818
atgagcaggccggagcacacgccgccaacgagcccgaccgcctacacacgtggtcagccctattccgaccatcaccgtcgacgatctacacctcgacgtgaccgccaggacctcctggacctcacccggcccttcaccggacctccctcgccgtcggtctatctgaactaa

SEQ ID NO: 18040 - DNA, 210 bp, Zea mays
  Peptide Sequence Number=SeqID_59819
atggcatcagtgtatgggacattgcaaaggctaacatcgtttgaatcaaatgtcagcgggacgtgtgactacttcatctggaagattggtgggcgctctcgatgtcttctagtgctctggtggtgtgtagggttgacttgtggccttcgtatcgagggcctccgcgtcattgctcccattggtcatgactggcttgagcgcatcctttag

SEQ ID NO: 18041 - DNA, 147 bp, Zea mays
  Peptide Sequence Number=SeqID_59820
atgggcagaagcaaactccggtcaccactgacggcggagggacacatcgacgtgaccactagaagcctcccgaacctcgccagcaactcatcggagctctacgtcgcagagactcataggaatagtgcactaggggccagttggtga

SEQ ID NO: 18042 - DNA, 405 bp, Zea mays
  Peptide Sequence Number=SeqID_59821
atgggggtttgcacggagaagaagctctgcgacggcgcacagccgcacgagcgagagccacgacgcgagcagggcctctacaccctaccggggcccgcagagcttcctcccaagcatgccaactcgcggttcttttacaaaacagtcattcgaaggggtatcgggcttcctcggctgttggatcttggatcgacggtcgagattagaaatggcgggcaaacgcgtgggcacgcggggcgctggtggctgacacgcagggcccacaggccagcggcttgggcagggcaggggacgagcgacgggacgccaaggcgtgggacaactgacaggtggggccacgatagggtcgggcccactagtcagcggctcggggcaagtgtaggcgcaggcgcgagcgcgcgctga

SEQ ID NO: 18043 - DNA, 375 bp, Zea mays
  Peptide Sequence Number=SeqID_59822
atggcttactggattgcttggtccacgtgcggcggcgggcgaccgaagtccggcgagtacgatctcgggcctccggtgaagttttgccgggtccgaggacttgggaagcttcacaggctaatggtgaagctaaccgagtggctagcgtggcctagaagtgaccaggggaggctggccacggtggccgaggctcggaaggcttggcgggcggtggtgcggcatgctcggggcgaattccgcgcggtgcacgggcggtcgtggaccggcgagcgctcgtgggcgtgcactggggagcgcgggagcgcgaacgggcgtgaaccgggggtgtcagccatggtcgaacacgtggaaccgttgcttctgcccaagttctaa

SEQ ID NO: 18044 - DNA, 366 bp, Zea mays
  Peptide Sequence Number=SeqID_59823
atggcggcgcccgtacccgcggcggggaagctcgccagagacaaggggcgcgggggctccgcgggtcttagggcgaccgggatgggctgggagattggggaaggcacggggaacctactggcggggctaaatcgcaataggggcaccggagggtggcggcccacggcgagatggctcgacggcagcgccaaccgactccgacaagaaattaaacgcagcagggagcaagggagggaaaaggagagggcaggggaggttccttacctcaaggcgcaccccagggacctctcggtggtggtgaaggcgcgacgacggctcgggtcaacggtggcggacaacggtggctgtgtggaggacgacgggtga

SEQ ID NO: 18045 - DNA, 159 bp, Zea mays
  Peptide Sequence Number=SeqID_59824
atggagcgccctggcgcgatacggatcacggcggctactaaccctctcggcaaacacacgatggcggcgcccagggttcttatacccaggatgggaggagtccgaggcggtgtaacggatcatgagcgagaatcccggacgtactcggtactcccctag

SEQ ID NO: 18046 - DNA, 1009 bp, Zea mays
  Peptide Sequence Number=SeqID_59825
atgagagcgccttcctcgccatggccgcctcccacctgcccccccgcagccaccctcgtcaagaagtacccaactctcctccacccgttcggcgccaaaccacacgcccagaggctgatcttcaggtgccgcgcgaccagcagcgagggtgcggacgatggctgggcgtcctttgtggacgagctcaagaggtcgctgcaggtggacccgtccgacgcggtgattagcaacgccggcgcgggtctcacatcaaataacgacctcgtcaccgcgctgccactggaaccctccgctggtccggctgcgggagacgcgaccactgccgctgccggcgcggtgagcgagctcctgggcgtggacgcgtcaggcgcggtggccacccccgaccgcctcctgagctccctgctgcacctggacgcgtccaacccggtggcgagcgtggcgggcggcgcgctgtctcgcctggacgcgctcacgtcggggactgtcggacgcgcagcggtgggcgctgttcgggttcctggccgcgacgtggctgtacctgaccgcgcggcccggggtgctgagcggcgccgtggacatatgagcgacttcgtcgtcggcgagcgcatcggggagggctccttcggggtggtgtatgccggcgccgtggtgccgaagaacggcgccgtcgtggaggagcggtccggcaaggccaagacgagcctccagaacgacgacaggtacaaggagaaggtcatactcaagaagatcaaggtcatgacggtgggggcgaaggagtgtggggactacgaggagtggttcaactaccgcgtgtcgagagcggcgccggagtcgtgcgccgacttcctcgggagcttcgtcgccgacaagaacaaggcggagttcgtcaagggcggcaagtggctcgtctggaagtttgagggcgacaggacgctggccaaattacctgagcgagcgcgcttcccgtctaacctggagcgtctcatgttccggcgccgtgctgcag

SEQ ID NO: 18047 - DNA, 528 bp, Zea mays
  Peptide Sequence Number=SeqID_59826
atggctgaagttgagtctgtatcccggattaagcaagaaggagctccaggactccaacaaggcgccaagctgctggttgaatgttccctgtcatgtaatctctgttctgatgtggcgttcgcatcccaactgtgcgccgtttcgaagcgcaaagcacggtttccacgcccagatttatgcgtaatcgggtggcagccggagatgttgatgtatatgatctccaagccttatgcaataagaagttatttgacagagggagaagagaagaaacagctcattgggatggcacgagcaacctcagaccatgccttcaatgcaacgatttgggatgtccttgttgatccttcataccagggtcagggtcttggtaaagcactcatggagaaagtaattcgtactttgctccagcgagacatcaacaacattacactgtttgcggataacaaagttatagatttctacaagaacctggggttcgaagttgatcctcaaggcatcaagggcatgttctggtaccccagattttag

SEQ ID NO: 18048 - DNA, 393 bp, Zea mays
  Peptide Sequence Number=SeqID_59827
atggcggacctcctcggcgacccggcgtggccgcagctccacccgcggccctgcaccgacacgccatggccaggcctacagtgcgagcttgcgcccgacgacacgtgcgtgctccgcgccacccgcctccacctgggccccgacgtcgccaccccgccctgcaggcccggggccaggctcaaccccgcctcgctgcgcggcctgccgcacctccggacgctctccatcttcgtctgtttcggcgccgcccaggcccccgtcgagttgtcgcccgcgctattcacgttgtcgtcctcgctcgagcagatcgtgctcaagtccaaccctagcctcacctcccccataccggcgacgttggttatcattgtttttgaggaaaaaatggcgtattag

SEQ ID NO: 18049 - DNA, 1341 bp, Zea mays
  Peptide Sequence Number=SeqID_59828
atggccgccagctccggcgccggcgcgtcccctccggggattgcgggtgatggggatcgcagctgggagggtgaggagggcgcaatggggagcggagcagagggggaggatgtcggggaatttccaaatgcagtgtcaacaggtttaagtaaggctgcactgggcagtatctttgctagcacaattgctggcgctattttactttctgtggtagctaccacccttatagtgagaaggcgttcaagacacagaactgtctcaaaacgttcattgtcaaggttttctgtcaaagttgatggcgttagatgtttcacatttgaagaaatggctatagcaacaaataattttgatctatcagcccaagttggccaaggaggttacggcaaagtctacaagggaattctaggcgatggagcacttgtagcaatcaaacgagcacacgaggattcccttcaaggttcaagggagttctgcacggagatagagctactatcaagattgcatcatcgcaatttggtttcattggttggctattgcgatgaagaggatgagcagatgctggtttatgaattcatgtcaaatggcactttacgtgatcatctttctgccaagtccaagagacctctaagttttggtttgaggttgaaaatcgcattgggtgctgcaaagggaattttgtatctacatactgaagcagatccacctatattccaccgtgatgttaaggccagcaacattctgttggactccaaattcgttgcaaaggtagccgattttggtctctcgaggcttgctccagtgccagatgtcgaagggacattgccagctcacgtatccactgttgtcaagggcaccccaggctatcttgatccggaatacttcctaactcacaaactgaccgacaagagtgatgtttacagcctgggtgtcgtgttccttgaaatgttaactggtatgaaaccaattgagcatggtaaaaacatagtgagagaggtaaactcagcttgccagtcgggcgcagtttctggaataatcgatggccggatgggcttataccccccagaatgcatcaagaggttcttatcactagcaaccaagtgttgccaggatgaaactgatgacaggccttccatgtgggagattgtcagagaacttgagctcatcttgaggatgatgcctgaagaggacctgattctgctggaaacctcagaaacagactcgaccgatgtcagtaagtcgttgtcatcttcagcgaccaggaccctcttcgtctcgtcacaggcctctgggagtcttgatgcgagcagcggcatgatctctggaagagtaactccccggtag

SEQ ID NO: 18050 - DNA, 1463 bp, Zea mays
  Peptide Sequence Number=SeqID_59829
atgaaggctatcaaggcgaagtatcaggtgaagaagaactggatgggagacccgtgcgttgctgggacttttaggtgggatggactgacgtgcagctatgccatttctgatcctccaaaaattactgccctaaacatgtccttcagtggtctgaccggtgacatatcatctgctttcgcaaatctcaaggctgtccaatccttctatgccgataatccagacctttgcaccaacgccggggattcatgtcagacggcgccgcaaggaaagagcaagctagtcatctactacgtcgctgttcctatggctctgatcgtggtggcgttggcagtactgctgtgttgtcttctgcggcggcgaaagacgcgagggctagcggacgtctctgtgaagccccgggacaagactccgacgagccttgcttcaatggcggccgacgaacacagacttagctcgctgcggcttgagaaccgccggttcacatacgaggacctagagatgatcaccgacagcttcaagcgtgtcattggccggggcggctttggatacgtctacgagggcttcttggaggatggcactcaggtggcggtgaagatgaggtctcagtcgtccaatcagggtgccaaggagttcctcacggaggcacagatcttgacacggatccatcacaagaaccttgtctccatggtcggctactgcaaagatggggtgtacatggcgcttgtctacgagtacatgtcagaaggatccctgcaggagcacattgcaggaaaacgcttgacttgggggcagaggcttcgaatcgcattggaatcagcgcaagggctagagtatctgcacaggggctgcaacccgcctctgattcacagggacgtgaagaccagcaacatcctactgaacgcgaaactggaggccaaggttgctgatttcggcatgtcaaaggctctagaccgcgacacctatgcgtccacgaacactcttgttggcacaccaggatacgtcgacccagagtacctggaaacaatgcagccaagcaccaagagcgacgtgtacagtttcggcgtggtgctcctggaactggtcacagggagacctcctatcctgcacagcccacagcccaccagcgtgatccagtgggcacggcagcacctggcgcgcggcgacatcgaggtcgtggtggacgcgtccatgggaggcaaccacgacgtcaacagcgtgtggaaagccgcggaggtcgcgctccagtgcaccgagcaggcgtcggcgcagcgccccaccatgggcgacgtggtggcgcagctcctggagtgcctcgacctcgagaagggccgctccgccaacgaaagtttctgcgacggagacgacagcggctccgcgaccgcgagcttgagccacagcagcgcatttgtgacggggcgtatttttgggacggtgccaatggtggagacaggccctgccacgag

SEQ ID NO: 18051 - DNA, 765 bp, Zea mays
  Peptide Sequence Number=SeqID_59830
atggcgcggtcggtccgagcccaaggtcgggcgaggcggagacttctcccgaggccgaggctgaggtcaggcgaggttgtgactattcccgaggccgaggctgaggccgaggcccgtggtcgggcgaggcggagaccttcttccgaggccgaggctgaggcctggggtcgggcgaggcggagctccctgttgcgcccgaggctgaactcgggaggggccgtgacttactgttcccaccgtcccagcgtgcagcccaccgtgcgacctaatcaccgtgggcggctccagccacgggctcgcgcagcttcctccactgcgctcaactccggcggcctcccctccctctcctccaccccaccatcggactccacctcctcccccaccgcaccatcggactccacctccccaatggcggcctccagcccactgccgtcctccaactcctcccccatcggctgccttcacccaaccctcatcttcatgcacggcacaaccgtccccaatcccacaaccccccggtcagcggactctccctctacccacgacctccacacccgcatgctccctctgcacgacctctactttgcctgtgtcatgcgcggatgccagatgaatataaaccttgagcatgcgcggacgctagagtccgaggagttccctggagagcgaggacaatctactcagttcccatctcgctctgtcctctatgttcgagctcgagcacgtgtggacgccatagccggaagagttcccctgaaaccgtga

SEQ ID NO: 18052 - DNA, 738 bp, Zea mays
  Peptide Sequence Number=SeqID_59831
gtcgcttcctcatccctcggtcccgcgtgtcgcgctcgcccagacccgaactccgcgtatcatcatcggtccaagcagaaggatcggaggcacacacgggacagccaagatgaacgacgccgatgtcgggaagcaggtgcagcagatggtccggttcatcctgcaggaggccgacgagaaagccagcgagatcagtgttgccgccgaggaggagttcagcatcgagaagctgcagctggtggagtcggaaaaacggagggtgcggcaggagtacgagcgcaaggagaagcaggtggacgtccgcaggaagatcgagtactcgacggagctgaacgcggcgcgcatcaagctgctgcgggcgcaggacgacgtggtgaccgggatgaaggagagcgccggcgacgcgctgctccgcgtcaccaaggacgccaacgcctacaagagggtcctcaagggcctcatcgtgcagagcctgcttcgcctgagggagccggcgctggtgctgcggtgccgagaggcggaccggagcctggtggaggcggtgctggaggtggccaagaaggagtacgccgagaaggcccaaggtcaacctccccaagatcatcatcgacggcaaggtctacctgccgccgcagaggaccagccgcgacgcgcatgggccgtcctggacggcaagatcgtctgcgacaacacgctggacgccaggctcagcgtctccttcaggcaaaagctccccga

SEQ ID NO: 18053 - DNA, 1812 bp, Zea mays
  Peptide Sequence Number=SeqID_59832
atggaggagtgcaccttcacctcggcggccatggccgtggggttcctgctggtcgtgtacctgtacgagccgtactggaaggtgcggcacgtgccggggcccgttccgctgccgttcgtcggccacctccacctgctggcgaggcacggcccggacgtcttcctcgtgctcgccaagaagtacgggccaatcttcaggttggtcggtgatacgatccgctcctcctgttcctgcttcacttctactagctcgtcgattctcttgcagcaggttgttgtccagctctgcctgcatgtagttttcagccgtgtgaagtcgaacggttttgatgattccatctgccggcctgctcgatctaggttccacatgggaaggcaacctttggtcatcgtggccaacgcagagctctgcaaggaggtcggcatcaagaagttcaagagcatgccgaaccggagcttaccttcggccatcgccaattccccgatccacctcaaaggcctcttctcgacaagggattcacggtggtcggcgttgcgaaacatcatcgtctccatctaccagccctcgcacctggcggggctgatcccgagcatgcagtcgcacatcgagcgcgcggccacgaacctggacgacggcggcgaggccgaggtcgccttctccaagctcgcgctcagcctcgccaccgacgtgatcggacaggcggcgttcggcgcggacttcggcctgaccacaaagcctgccgcgccgccccctcaccacggaccaccacgacagcacggcgaggaagacggagacggtagtcacagcaccaggtcgtcggagttcataaagatgcacatccactcgaccacgtcgctgaagatggacctgtcggggtcgctgtccaccatcgtcggcacgctcctgcccgtgctgcagtggccgctacggcagctgctcctgcgggtcccgggcgccgccgacagggagatccagcgcgtcaacggcgcgctctgccggatgatggacggcatcgtggccgacagggtggccgcgagggagcgcgcgccccaagcccagcggcagaaagacttcctgtccgtggtcctcgccgcgcgcgacagcgacgcggccgcgcggaagctgctcacgccggactacctcagcgctctcacctacgagcacctcctcgccgggtcggccaccacggccttcacgctgtcctccgtgctctacctcgtcgcccagcacccgcgggtggaggagaagctgctgagggaggttgacgcgttcggacctccggaccgcgttcccacggcggaagatcttcagagccgcttcccctacaccgatcaggccagcacgactgcacgaatgcatgccatatatttttttttggacgtgctgaaggaatcgatgagatttttcatggtctcgccgctggttgcgcgggagacctctgagcaggtggacatcgctggctatgtcctgcccaagagtacgtgggtgtggatggcaccgggggttctggcaaaggaccccgtcaacttccctgagccagagctcttccggccggagcggttcgaccctgccggcgacgagcagaagaggcggcacccctacgcgttcatcccgttcggaatcggtcccaggatttgcatcggccagaggttctccatccaggagatcaagcttgcgctgatccacctctaccggcagtacgtgttccggcactctccaagcatggagtcccctttggagtttcagttcggtgttgtgctcaacttcaaacatggagtgaagcttcagtccatcaagaggcacaaatgttag

SEQ ID NO: 18054 - DNA, 1539 bp, Zea mays
  Peptide Sequence Number=SeqID_59833
atggaggccacggcaccagcaaaccttttctacgctgctttcctttttctgtcggtactgtatctcgccgtcacccggcgccgcaccagccgcctgccgcctggaccgacgggcctaccgcttgtgggcagcctccctttcctcgaccggaacctacacgcctgcttcgctggcctcgccgcgaagtacggtcctgtcttcgccatccgtctgggctccaaggtggaaatcgttgtcacctccccggagctggcccacgaggtcctccgtgacaaggaccctgtcttctccaaccgcgtcatccccgacgccggccgcgcggtggcgttcgacggcgtggagaacatcgtgggcgtcccggtcggacccaagtggcgcctgctccggcgcctctgcgcgcaggagatgctgagccccgcaggcctcgacagcctgtacggccttcgccggcgcgagttcaggtctaccctgcgctacctctactcccagtcccaggccggcgagccggtggacctcggcgccctgatgttcgtcaacatgatgaacgtggtcaccagcaccctctggggtggcaccatcgggagcgagagcgagcgagctgccatagggaaggagttcagggcactcgtcgccaagttgaccgagctcctcggcacgcccaacctatccgacttctttccggtgctagcgccgttcgacctgcagggcgtccggaagaagatggagcggatcagggtgcgcttcgaccagatattcgacaagatcatccagcagagggtgaacgcccagcaggacggcagcaagatggccactgacttcctcgagtgcatgctcaagatggagagggaaggcggggacggcaaggccaccttcactatgactgacgtcaagtctctgctcctggacatggtggtcgccgggacggagaccatgtcaaataccgtggaatgggccatcgcagagatgctgcagaaacctgaggttcttcggaaggtgcaagaagagctcgacaaggtggtgtccagggacgccatcgtggaggagtcccagcttcctgagctccgctacctccggatggtgatcaaggaaacgctccggctgcacccagcactgcccctcatggtgccgcactccccgagcgaagagtccacgatcggcgggttccacgtcccggccggctgccgcgtcttcgtcaacgtctgggccatccacaggaaccccctggtgtggagcgagcctctcgagttcaaccccgagaggttcagcggggacgacgacggccgcaggtgggatttcacgggcagacagttcgactacctccccttcgggtccgggaggaggatctgcgccggcatcgccatggccgacaagatgactacgtactcgctggccatgctgctgcaggcgttcgactggaagctgccgcagggtaccgagctggacctatccgagaagttcggagtcgtgatgaagaaggctacgccactgatggtcatacccaagtcaaggttccctaagcccgatctgtattgttcctga

SEQ ID NO: 18055 - DNA, 642 bp, Zea mays
  Peptide Sequence Number=SeqID_59834
atgtgctaccatggctcctcccaaaccaaggcaccctcctcccaaacgaccaaggcgccagagttggcactttcctccacaacgaacctagccaacttgctcccaaccggtgtcctgctcgccttcaaccttctggcgctcaagtccccgtacgacggttgcgtctactacgtcgtcaccagctgcaccggccttaggctcctcaactacctgccagacgcgtcgccgctgcccgagggagtcaccaggcgttccccaccacaaggcacgggcacacgacatcgaatacccatcgtcgccaacaccgtcgcaaagcggtaccactactccgacacggcatgcccggacttccgcaagggcgggtgcaagcgcggcgacgcgtgcgagttggcgcacgaggtgttcgagtgctggctccacccgtcgcgctaccggacgcagccctgcaaggacggcaccgggtgccgccatcgcgtctgcttcttcgcgcacacgccggaccagctccgcgtgccgcaggcgcaacagttcagcccgaggggcgcgtccgcggcgtcgccgctggccgagccgtcgtatgacggctcgccgctccaccgccaggcgttcgagagctacctcaccaagagccataaagattga

SEQ ID NO: 18056 - DNA, 735 bp, Zea mays
  Peptide Sequence Number=SeqID_59835
atgagggacatcgggactggcgacaagtccgcaagctcggggagaacacattcaagggagtccgcccacaagcacaaggaggaatcctcttcctccatcaagtcccaacggaagggtgacaagaagaagaagatgaaaaaagtggtctactacgagaccgactcttcgtcaccctccacctccgactcggaatcgggatccaccacttctaaacgccatgagcgcaagaagtatagtaagatgccccttcgctaccctcgtatttcaaaacgcactccattacttccagtcccattaggtaaaccacctatgtttaaaggtgaagattattctatgtggagtgataaaatgaggcatcacctaacctcactccacaaaagcatatggtatattgttgagtatggagcgcaggtaccaaaaaaaggggacaaggattatgattcagaggaggtcgaacaaatccaacacttcaactcccaagccacaactatactcctcgcctctctaaatcgagaggagtataataaggtgcaagggttgaagagtgctaaagagatttgggacatgctcaagaccgtgcacgaaggagatgaggtgaccaagatcaccaagcgggaaacgatcgagggggagctcggtcgattcatgcttcaccaaggggaggagccacaagcgatgtacaaccggctcaagaccttggtgaaccaagtgcgcaacctcgagagcaccaaatag

SEQ ID NO: 18057 - DNA, 324 bp, Zea mays
  Peptide Sequence Number=SeqID_59836
atgggataccgaattccacccttttctgctatcattactgttagtggtttgagaatcaagttggtggtcgccgccaacctagaagggcggtaccgcaccgtgggcatggtcgatgacggcggcaggctcatggcggtgtgcagccgagaccaggttgtgcgtgtggatgcccgtaggatgagctcactggagacgcacgtggagctattccatgtggatctgcaggaggagacgctgtcacggatcgaggacctaggtgagcgggcggttttcgcagggctacgaggcgcggtaatagaaaagggatacgatcacaacacttga

SEQ ID NO: 18058 - DNA, 720 bp, Zea mays
  Peptide Sequence Number=SeqID_59837
atggagattcgcagcgatgacgggatcctagcaggagggcgttatggcggcggaagacgggatctgagagtggcctcctgcaccagcctgtccttggcgagagatccggtggcggcgggggctgcggcggctggccaggagaggtttaggacaataactagttcttactacagaggtgctcagggaattattttagtatatgatgtcacaaagagagagagtttctcaaatttggctgatgtttggactaaggaaatagaagcaaactcaacaaacaaagactgcataaaaatgcttgttggaaacaaagttgacaaggatgatgaaagaatggtcacagaagaagaaggtcttgcttttgctgaagaatctggttgtctgtttcttgagagcagtgcaaaaacacgagaaaatgttgagaaatgttttgaagaacttgcattgaagatccttgaggtccctagtctcctggaggaagggtcttcttcggttgtcaagaggaaacatcctgaaacagaagcaggaaagtcatgcaaagaacggcagtggatgctgtcaatagatgtgctgatccacgcgacaaggtccttcgaagcaatgatgaagttggctttgtccgatagctttctgttaaatggtgtattcacgaaagcgaagctaggaagctttggctccttgatcagggcatacaatagtaatgaaacaagggagaagacctag

SEQ ID NO: 18059 - DNA, 873 bp, Zea mays
  Peptide Sequence Number=SeqID_59838
atggattcggaggcggtgcagcacggccttctccctctgtctgcctgtcctcctaccgccaacagctgcgcgcattacagccgtgggtgcagcgtcgtggcgccctgctgcggccaggccttcggctgccgccattgccacaacgacgccaaggttcggtggtttccctccttccgttttcgcttcggctccggttcagcagatgttctgaaacaaccctgtcccgtgccccggcagaactcgctggaggtcgacccgcgcgaccggcacgagatcccccgccacgaaataaagaaggtgcaacagaactgctccagctgtggggcctgcatgggcaagtacttctgtaaagtatgcaagttcttcgatgatgatgtctcaaagggccagtaccactgtgacggatgtggaatatgtagaaccggcggcgtggagaactttttccactgtgataaatgtgggtgttgctacagcaatgtcttgaaggattcccaccactgcgtcgaaagagcaatgcatcacaactgccccgtctgctttgagtatctgttcgactccacgaaggacatcagcgtgctgcaatgtgggcataccatccatttggagtgcatgaacgagatgagagcacaccatcacttctcatgcccagtgtgctcgaggtccgcctgcgacatgtcggccacatggcggaagctcgacgaggaggtcgcggccacgccgatgcctgacatctaccagaagcacatggtgtggatcctgtgcaacgactgcagcgcgacctcgagcgtgcggttccacgtgctggggcacaagtgccccgcgtgcagctcgtacaacacccgggagacgagggctgcgtgccccaggatctga

SEQ ID NO: 18060 - DNA, 333 bp, Zea mays
  Peptide Sequence Number=SeqID_59839
atgtcgattgtacatgccaagaacaagaaggtgccattgggacccaagcccgaagacaaggtgtcgtcgggtgagatcaagatatccggtgataagcacgagcacaaggagcacagtggagaatccaccagctccaccaagtcgcataagaagaaaggcggcaagaagaataggatgaagaaagtggtctactacgagaccaactcctccgtgccatcaatatcggacaccgaatcaacctcctccaagcgcaacaagtgcaaaagagttaccaaattcctttctgttaccctcacattccaaaacacacgcaattactttcgatcccattag

SEQ ID NO: 18061 - DNA, 246 bp, Zea mays
  Peptide Sequence Number=SeqID_59840
atggacaagattaaacaaacgcgccccaacgccgtggcgtatacagactcgcgaaaggtactgcatcgcaagatcgtatccaaatgcgccaataacgaccatcagtattcgctcgcttggaccctggagactggtcgagtggtcgcagagtgtcgctgtcacgcacaggaccacgtgctggagggcactgacctctcccctactgcccttgcccctttcggaataacaacaagaattggaacatag

SEQ ID NO: 18062 - DNA, 813 bp, Zea mays
  Peptide Sequence Number=SeqID_59841
atgtcgccagggtttgcaaagcccttagacacttccgagtgtatctccatacccaaaaccacatatagcactagcaagtactacccagaaagttcagtggtgaacaagttctctggatcgggcctcgaataccagaaaacgcagggggtctcgggtaagacttctacagactcagcgcaccatacaggtggaccgcgggttgtttacagcaaagaccagggactcttatgcaaaagtacctggccgaagagacatcacccaatccgcgatatgatcggaaccgttgatccattgatcaaccgtccacgccccgtcgtcctcctccgcccaattccccccaaatgcccgacggcggcgaggatcaccaccggcgatgcaattctccggttcgggggcaccaaacataaattaacttctgctacacgttgcggatatgaaagcgggtttgggcgagggtttcttaccgggaattgttggcacaagcgagctgtctacggtgagcagcgggcggagatggaagcgcggcgacgacgagcaattgccggagttgtggtgcccttctactccaccgatgaccacccgcacgtccgcgatggccaaccgaacgccctgaagccacacaccgagaccaattggtggcgcaggcgcgattcccccgtcggtcgcgcatggccgatttctaccgagcgccgcgctgcttgggttctggcgttgggagctttcgatgggggaggaattcacgggcgtgttgtagtcaagagggggaaaggaactcctgagcttataggctcgacggaacggacgaatctctag

SEQ ID NO: 18063 - DNA, 750 bp, Zea mays
  Peptide Sequence Number=SeqID_59842
atgtgggcctgcaacgtcagtgcccaaacgcgcgtgcgctcccctggacagccgggtctcactgccgctggggccagctcgtcagctccacaacggactgccgcatccctcgcatcgctgacacaccggacccacctgccagcttcatcttctcaacaaccacgcgaaggccgcggcaaggatgtcgcgcacgatccgttccgtcgagcctataagctcaggagttcctttccccctcttgactacaacacgcccgtgaattcctcccccatcgaaagctcccaacgccagaacccaagcagcgcggcgctcggtagaaatcggccatgcgcgaccgacgggggaatcgcgcctgcgccaccaattggtctcggtgtgtggcttcagggcgttcggttggccatcgcggacgtgcgggtggtcatcggtggagtagaagggcaccacaactccggcaattgctcgtcgtcgccgcgcttccatctccgcccgctgctcaccgtagacagctcgcttgtgccaacaattcccgggcgatcatggccgttagatttggatcgtagggttcacaatgcgtaccgattcgttaagggagtaaatctaatcctgggtcgcacgattttgaatccaacggcccatatcacacgatacctcttcggccagatccattatgttaattggaacatggagaaccactcgggagaaacggtgctactgcgagggtttgaatgggacgccctggctgactaa

SEQ ID NO: 18064 - DNA, 303 bp, Zea mays
  Peptide Sequence Number=SeqID_59843
atggtactattcaatggaaggaataaggcaaggcagcgacagcaacaacagcagcagcagcgggcgtcgcgcttccagggtcactggaaggtccagggccccaaggcctcctcccgctccgcttctagggacgctcctcccccgccggacaccatgtccgccggcaggtctggctcccagcagcagacatctgctgggagtgttgtcggtggtccgccagcggcaactgcgacctcaacggcgtcgccgacgagtacaccgtcggcaatggccaaggaggttcccgcggcgcccgccctgtaa

SEQ ID NO: 18065 - DNA, 543 bp, Zea mays
  Peptide Sequence Number=SeqID_59844
atgcgtggaggccacagaccagttagccgcaaagacgggcacaacagttggaagggtctgttgaccggtacaggcttcgacccgttgcctttgccaagggatggtacggtgtctatttgtttttatggtgatccttttaaggttgctaagtccgatgaagaagatacttatgggcagagattatctggcgtgtttctgttgggcggcgggcttctccgatccgataggcgcaaaaacgattcggtagattataatggcaatgatggatggccatttggcactaacacgatgggccagcctaggcacggcacaaaaaagcacggttcaggcacgacccggcccgctggactgaaccacggatggacgcacgagatcttcgaggtatactatctcaatgacgaactggatgacctcaaagccatggttgggaaatggagcaaaggatcaattaggttcccgcgtagacgtcgcagtcccaacccagactcggaaagggcctcctcagcatccgcaccggctcaggcaggcacaagctgggaatga

SEQ ID NO: 18066 - DNA, 402 bp, Zea mays
  Peptide Sequence Number=SeqID_59845
gggtctgagcctcgtggtcaaggggagctgaaccgtcgtaataagtgtcctggaacgactgagctccctggtttcgtgcgatccgcaatcccagttttcggtcttttgccagaatttcaacccctggtgttcggcggaacggagttcgccttcttccgggttttatcccgagtacgagccctggggtcgggcggagcggagttcgccgtcttccgggtcttagcccgagtccgagccctggggtcgggcggagcggagttcgccttcttccgggtcttagcccgagtccgagccctgggatcgggcggagcggagttcgccgtcttccgggtcttagcccgagtccgagccctgggggtcgggcggagcggagttcgccgtggcgccttcggcaaggcctag

SEQ ID NO: 18067 - DNA, 1032 bp, Zea mays
  Peptide Sequence Number=SeqID_59846
atggcgctcatcgacgccgcgctcgccgccgccgcggcgggggcgcgcccgctcctctccgcagcggcccgccgcgccgccgtcccgctctcccgtgcggcgtgctcggccaccgacgggctcgccgccggcgacatcgaggacgcgcctccgcggtctcggctcgctcggttccgggagcgccgcgcgctcgccgtcaccgacatcaccgccacggaatggtgcgagaagcagatggagttcgtgctcgaacggggcaagccggaaaagaccgcggccatgagggtcggatcggaccgccatgcccagctcgagcaagaggttgttgagagagtggacgtcgccattagatctgcggaagagctatgggcagtaaaattcatgaacttcatcgtgggaacaaaccagctactgttcgagggcataacgcgggaaattccagtgatcggggttgtggaaggttcatggatatcaggaatcatagacgaaatccaaatggccacggttggcgtttcattgcaacccatgctggtggatacaaagacacggtccacacgaacagttccatcagaagcacaaaaaagaaatggaaggcttcaactaatgtgttacaagtatctatgggacaatttgatcgcagagaaattcccagcagataatttcttcagccattttaacctggaccccaactacttgttatcagatgatgtcaaggggtatattagctcattggggttcgatgcaaagacctttgaagatgtattgaaatatttcaaggttacctgtcacacgctaccacggtctcaagaacagctgctcttgagatacgagctacaggaagatcattcccttcttgaagaataccggttcacttatgatgctaggtggttcagggatcaaatccaggacgtcctcagcttctggacaggatcacacgagcctaaacttgtagctgaagaggagatgtggaagtgccgtttctgcaaatttgtgtcaagttgcccaatgaatgcttccatgccaaggtgttga

SEQ ID NO: 18068 - DNA, 195 bp, Zea mays
  Peptide Sequence Number=SeqID_59847
atggcgatggtgggtgcgctgcaaaggggcgtgggcggtggtagtgcgcatggaggcgaggcacgcatgcagggggcacagactggtccccttccaggcttcaaggataagcttctcgacatcttattgggtaagggctctggccaaagtgaagaaaaacttcactgcccaatgcatgcagagtactgggcataa

SEQ ID NO: 18069 - DNA, 804 bp, Zea mays
  Peptide Sequence Number=SeqID_59848
atggcaaaaccaactacaccccaagtttatccaattaatcagctaagggcatcccattccaccctcatggttgtattgttttccccggtggtcatccagcgaacaggtccttacggagagggtcctgggcgcaagaaacaggactgcaggttctatttccaagaaaccgaggggctctttaacaaaaaaaccacgcgaaggggtacagggtgttctcggccatccgatcacatatcaacggacaagatcatatctgagcgagagcgcgcacgggggcgcgggagagcgctgataagcgggccagggcggtcagcggctcggggggaaggcgggctgactggttgggcccagcgccagggggcgcaagcaaccgatgggtgggacccaggggtagtggtgcacgctctaagcggtatctggagatctacaccgttagattgggagcagacagttaggatcgggcgtcaggggggtaacgacacggtgaccggcgctgttcctatccacggcggtgggagtcgccggagaaggggcaggcgtggcctccgggggtctggggtcaccgggaattgggcagggccggtgagggggcccggtgaactcaatggcgggattccggctgtgagaacgggactaggggagagggaatggcggaggaagtgctccgagcgggtcggggtaactccagtaacatatagtagattgaaggctctcgaggatgtagagaaggacaaggctcaagttgctagagcacataataagaaagtcaagagcaagtcatttcaagttagagatctagtgtga

SEQ ID NO: 18070 - DNA, 1233 bp, Zea mays
  Peptide Sequence Number=SeqID_59849
atggcgccgaaggagagccagcagcagcagagtccggccgaggtggcggcgccggccgcgcggagcatcccggacgaggcgcggcggctgctgcacgagctggccgcggcgtgggaggacgtggccgggtgcgggtcgcgcgagcccgaggtggtgccgctcaagggcgccatgaccaacgaggtgtaccgggcgcggtgggccaccggcagcggggactcgtcggcgccggggcagagtgacgcgcggacggttctggtgcgggtctacggggagggcgtcgacctgttctttcgacagggaggacgagaagtctcacttgcatgcttgtatttaagggttgattgtacaacagtcgttgccgaagttgatttggctttacaggtgaaaagatttttggaagttgacgcatctattcctttcagacacttttcagctcctgacctacgtgatccggggaatttcagccatcatagcctccaaactgagggaatttcacagcctcgacatgcctggttcaaaatccgtgctcatctgggaaagattaaggtactgctggttttttttcccgcctacacagttgctctggtacagcatgttgtaaagcaaaacttatcgtcgaagcgaagtgctgattgccacagttgcatcgtttccgctaggaactggctcagaactgccaagagcctgtactcctcctctgatgaaaccgaagagttctgcttggatagcatggaggaggagatcgctgcgctggagaacgagttctcaggggagtgcgagcgcgtaggattttgccataacgatctccagtatgggaacatcatgatcgacgaagagacgaggctactgaccatcattgactacgagtatgcaggttttaacccagttgcttatgacatcgcaaaccatttctgtgaaatggccgcagactaccattcagaaaagcctcacatattggactacagcaaatatccagataccgatgagcggaagcaatttgtgcggacatacctgagctcctcaggtgaggaatctgaagaggaggtagagaacctgatcaaaagcattgagaagtacaccctcgccagccacctagtttggggcctatggggaataatttcggatcatgtcaacgatatcgacttcgactataaggattacgctaggcagaggttcgagcagtactggctgaagaagccgaccatccttgcttctcagactgctgaatag

SEQ ID NO: 18071 - DNA, 1060 bp, Zea mays
  Peptide Sequence Number=SeqID_59850
cttgattcgttctgttggcaatgaaccttttctgaagagctataatggcagcttcatcaacattacctttccagcactcaagaacatgcagagggctatagatgaggctggctttggccaacacatcaaagtagttgtgccattgaatgctgatatctacagctcccctgagaacaagccagtgccatctgctgggactttccgcaaggatatcaataccctcatggttgacattgttaattacctccatgcaaatgatgcaccctttgtggttaacatctacccatttctcagcctatatcagaatcccaactttccgctgaatttctccttctttgatggcgctaccaagccagtgtatgatcaaggaatggtctacaccaatgtgtttgatgccaactttgatactcttgtctggtcattaaggaaagctggtgtgcccgacatgagaatcattgttggtgaagttggctggccatctgatggtgataagaatgctaacaccaaatatgcacagaggttctataatggttttctgaagaaaatgacaaaaaatgtcggcacgcctctgagacctggtcgtatggaagtttacctgtttgcgctgattgatgagaaccagaagagtgtcctgcctggacgctttgagcgtcactggggactattcacatatgatggaaaaccaaagttctctatggatctcagtggaaatggcaagggcagtgtagctgaagtgaaaggggtgcagtacttgccaccacaatggtgtgtattcaacaaggatacaaaggataagtacaaagatctgccagcctctgtaaactatgcatgctcaaatgcagattgtacaccactggggtatgggtcctcatgcaatggtctcagccatgatgggaacatatcatatgcattcaacatctatttccagacaatggatcaggatgtcagggcttgttcttttggaggccttgcaaagatcacaacgacaaatgcttcacaaggagggttcgctctcgtctggatgtatgaaccaaggtgccgtttggttcctaaaatgtaa

SEQ ID NO: 18072 - DNA, 1560 bp, Zea mays
  Peptide Sequence Number=SeqID_59851
atggccaacagcgagtatgagtacgtgaagagggagttcgagtttgatcgctgcctcccgccctctaactggatcgttgtccgtatcgacggttgccacttccacaggttctcaaaggtccacgcctttgagaaaccaaatgatgagaacgctctaagattaatgaacgcttgtgccactgctgtgctcgagaaatttcctgacatagcctttgcttatggtgttagtgatgagtacaggtatgacatcagacattactcacattttcattttcagagaggaaacagagttctatcaccggcgagaaagtggaaagacttctttcctaacaaagagctgaaggagccaccatattttgatgctcgagctgtatgttacccgaatttgaagactattcgtgattatttggcttggagacaagtggactgtcatataaataatcagtacaatacctgcttctggatgttggtgaaatctggaaaaagtgaacaagaggcccagctagctttgaagggaacatttgcaaaggacaagaatgagctgcttgctaaacaattccaaataaactatgatgatgaactggctatgttccgcaaaggatctagtgtttaccgagagaaggtagaaacaactgtgaagattgatgactatggggagcccataaaaagaccaagattgaaagttacagtggcacatgttgataccatagggactgcgttttgggaaaaccatccacacattcttcgagaaggaaaatttatgcacgggtttgtaaagaaatttggcatcaatcacatattttcaccttgtaattggatcattgttcgcatcattgcttgccaatttgaccaattctcaacaattcattcatttgacaagccaaatgatgagactgcactaaggctgatgaatgaatctgcatctttgatgatggagcaataccctgacattgtctttggctatggttttagcaatgagtatagttttgtgttccatgagaagagtgaactatacccagagacgggaaaggtggttattatcattatgcagaatgtgttcctaatcctttcatcatgttcttcatatttcacttctctttacatgacgaaatggaaagagttcttcccctacacagaattaatgcagacaccacactttgaggcagatgctctatgttatccaaaactaaagatcatatgtgaatacttatcatggaggcaagcagagtgtcatgctggcaaccaatacaacacatgcttttggatgctagtgaaatctggaaaaagcgaaaaagaagcccatgagatattgaagggaacgttgtctaaagataaaaacgagttgctttttcagcaattccaaatgaactacaacaatgaacctgctatgttccgaaagggttcatgtgtctatcggcgaaaggtggaagaacttgcgggggctgaggacggcggcaatggcacatcaagagagcggtggcatgtgaaggtggaccacgttgacctagggcccggtttctggcgaaagcacccgtggttaatgactaattgcactcagtag

SEQ ID NO: 18073 - DNA, 858 bp, Zea mays
  Peptide Sequence Number=SeqID_59852
atgagcgatttaccttactgccttagaatgcacagatcagagatcagtcgtgctcagtatgttgatgttagagaactcaggatttatgtagggacatggaatgttggaggcagatttccacccagtgacttggacattgaagaatggctggctacggaggagccagctgaaatttatgttatcggctttcaagagattgttccactcaatgctgggaatatatttggtgctgaagacaatcgtccagttgcagtatgggagcacatcatccgtgaaactttgaataagaattgttcagataaatcagggtttaagtgccatagtgatcctctttcaccatcaaggtttaatccatcagatgttgttctttccatggaacatggattgcttagtgagtctgacaaggatagtgatggggagcttcatccattgattgaacgagaccataattgtggacttcaagctaaaacaaatgaaaatcttgaagctttcccagaagataatttagcctgtgatgccatcattgataatagaacaaaaaggaaaaggccagagtttgtacgtataataagcaagcaaatggtcgggatatttctttcgatttgggttcggagaagcctgcggaagcacattaagaatttgagagtatcaacagttggtgtaggcgcaataggttatattgaaaactatgtaagcgatgagagtgaatctgggagaagaactcctgcatggtgtgaccgcattctctcatacgggaagggaatcaggctactttcgtacaagaggggggagcttacactttctgatcaccgccctgtggctgcagtctacgtggcagagattgaagttttccactga

SEQ ID NO: 18074 - DNA, 711 bp, Zea mays
  Peptide Sequence Number=SeqID_59853
atggatcttgattctgaagatgaagacgaggagctgaatgttccagtagtcaaggaaaatggcaaagctgatgagaagaaacagaaaagtcaagaaaaggcagttgctgcaccttcaaaatcaagtccggattccaagaagagcaaggatgacgacgattctgatgaggacgagactgatgattctgatgaggatgagacggacgattctgatgagggtttgtctcctgaagaaggcgatgatgattcaagtgatgaagatgataccagtgacgatgaggaggaagacactccaactcctaagaagcctgaggtaggcaagaagagagctgctgaaagttccgtgctgaaaactcctctatctgataagaaagcaaaggttgccacaccgtcatctcagaagacaggtggcaagaagggcgccgccgtccatgtggcaactccacacccagcaaaaggcaagaccattgtaaacaatgacaaatcggtcaagtctccaaaatctgcgccaaaatctggtgtcccttgcaaatcgtgcagcaagtcattcatcagtgagacggcacttcaggctcactcgaaggcgaagcatgggggcaaggtctgcgcaggaacatggaacgttggaggcatatgtccacccaatgacttggatattgaagaatggctggatatagatgatgaaccagctgatatttatgttctcgggtaa

SEQ ID NO: 18075 - DNA, 1449 bp, Zea mays
  Peptide Sequence Number=SeqID_59854
atggccgccgccgctgccgccaagcacgtggtgctcttcccgttccccggtcagggccacctctccgcgttcatgtctctcgccggcctcctacacagtgctctccccgacgccgctatcaccttcgtctccaccccgcgcaacgttgcttcgctccagacttccgcgtggtccaacgcgccgttcctcggcttccacgcgctgcccttcaccccggcggatcacggcctgcctccggactgcgagtcgtccgacgccgtacagcccggcgccatcgcgttcctcctcgtggcgttcgagtcgctcgaggccgcgttcgacgactacctcaacaccgccatctccgccgccgccggcggtggccacgacgtctgcgtcgtctccgacccgttcacggcgtggacggtgaccgcggcccggcgccgcggctgcgcgcacgccttcttcgcctcctgcggcgcgtacggcagcgccgtcgtgcactcgctctggagccacctgcccgtccgccccgacccggctaccggccgcgtccacctgcccgagtaccccgaggtcgtaatccaccgctcgcagctctccaagaacgcgtccgccccgcccgccgtcagcaactgcgccgcgggattctacggccggcagatccctctcggctacgagacgggtgcggtgctcgtgaacaccgtggaggagttcgagcccaccggtctcgacatgctgcggcgcaccctcaagatcccggtctggcccatcggccctctcgtgcgcgccgccaacctaccagtctcgccggaggccgaggccgccgtcgcgagcttcctggactgccacccgccgtcgtcggtgctgtacatttcattcggctctcagaactccatacgagcagagcacatggcggagctggcattggcgttagagtcaaccggccggccgttcgtctgggctgtcaggccgccggacggacacgacgtcaagggcgagttccgggccgaccagtggctgccggacgggttcgaggagagggcgcgcacgagcaacagagggctgctggtacgcgggtgggcaccgcaggtgaggatcctggcgcacgcgtcgacgggcgccttcctgagccactgcgggtggaactcagtgctggagagcgtgacgcacggcgtgccaatcatcggctggccgctcgccggcgagcagttctacaatgccaagatgcttaaagaggagtggggagtgtgcgtggaagtggcgagggggaacatggaggatactatggtaaacagggctgcggttgccgacgtggtggagacggtgatgggccagacggcgaaggctgcagagatgcggcggcgcgtgtgggagatcaaggaggtggtggaagggtcctggaacgacggaggcgggtcatcgaggaaggcgatggaggatttcttgcgggcgatgaatctccggtga

SEQ ID NO: 18076 - DNA, 300 bp, Zea mays
  Peptide Sequence Number=SeqID_59855
atgggtggagggggtgggacatcatgggcccagtttacccccacggggggaggcccctgccccgcgggaggaggagcaggatcaccacggcggcaaggacgaaattgcggcggcgggggcgcggtgccatgggatcggaggtggaaggggagggggaggctgtcgtggggctacgggttgcgggagagaaggtgggaggagtgcgctggcatcggcgaagcaggcgaggagcgtggccgtcaggccgtgggcgtggagagatttcttcgcggcgtcgtgtactcgtgtagtcgtgtgtag

SEQ ID NO: 18077 - DNA, 855 bp, Zea mays
  Peptide Sequence Number=SeqID_59856
atgggctgtgatgagcgctcgcgcgtgcatccttatctaatcgagtctctccctctggcgcccgagttccgccccaccgtggccgagttcgccgaccccatcgcctacctcctcaagatcgagcctaccgcggcaccattcggcatctgcaagatcgtgccaccgctcccgccgccgcccaagcggaccacgctcgcaccagcagctgggcatctgcccgcgccgcccccgccccgcgctcaagcccatgtggctctctccccaccgctacacgctcccaagttcgaggccaaggccggcgcctcccggaaggcgctgctcgcgcgcctcaatgtccccgcctccaagcagctctcgtcgctcgacgtcgaggcgctcttctggcgctcatcggccgactaccccgtcgtcgtggagtacgccagcgacatgcctggctccgggttcgcgccctgcgccgcacgcctgacgcatctgcccccgacgaacgtgggcgagacgacgtggaacatgcgcggcgtggccaggagcctcgcgtctctgctgcgcttcgtcaatgcccgtgcgcgcgtgctcggcggtgggagctgcctcaacgctggcttctgcacccgcgccagcagcggctacgtgcgcaccgccggatggaccaccgtgaagtttgaaagcatcgacgagagcttaccggtgagaagacagcaaggaggatggctgtcgtcgctgcttcgcgccgccacgccgtcacttcgcgccgccatgctgtcacatggcgccgtcgtctcttcgcctcctccgccgccagcgttacagattggattcggagtgcaccagaccaggattaatgccggacagtag

SEQ ID NO: 18078 - DNA, 159 bp, Zea mays
  Peptide Sequence Number=SeqID_59857
atgagtatctcattgcgggatcgtattagaaagaggagggaagaagaagatgatgacatgatgatatttattttccccgccttatatctgatgggttctactagaggtgggggacaaaagaagaaacgtcatacctcagatgagacaggcgaggttaag

SEQ ID NO: 18079 - DNA, 327 bp, Zea mays
  Peptide Sequence Number=SeqID_59858
atggcggcgatgagcttgcgcagtacctggacgaccggcggccgatcgatcgtcgacgacgagcacgaaagaaggtcgctcctggatccgatggcggacggacggtcgtcggtcgggggagggaaaaggggggaagacgtgcggagtcaggcaggcaccaaattggacccgagaggaaggaaactctccaagtcgagacaaaatggagtgaagaagtttggccaaacttgcaccagtctggggagcaacggactgtccgacagtccagtgcacccgcagacaggaggcaaccaggaccttaaaaatgaagatgaagcgactccttga

SEQ ID NO: 18080 - DNA, 420 bp, Zea mays
  Peptide Sequence Number=SeqID_59859
atggggcccgctggtcatctccttcaccggtcgaccgtaacagactccacggagcttgccgagggcgtcgggctgggggttgttcggcgcgcctcctcgtggtatttaaccagctcaggtcggagcttcctccgtcgtcgccttgtgtccatcccggtagccagcagagagagggagggaagagtagagagaaaccgggcagagagcgctaggcttccaccagagcaaattcaaggctacaccgttaaccctaccccgattagtggacagaaagcttcactgatcggctctgatggtggccgtggcctcggtgcactgagaagatcactggaagcccttcaatttctcgccgtcgttcatttaccgccaaagatccacccttggcgtggacaaaagctcctgcgccaccctattctgtaa

SEQ ID NO: 18081 - DNA, 408 bp, Zea mays
  Peptide Sequence Number=SeqID_59860
atgcgtggggaaaacaacatagtcctccttctcctcctcctgtttgctgtaatttctccgaaccaagtaattggtagtgcttgtactccggaacagaaggctgccatcctaaatcaatgcgaagagtacatcaagcctggatacccccttatactgccatcgtacgccagtgtgtgttgcgacaaggtgagagatgtgccaaatagggacatgaactgcatcgtcgatctgctcacgcctccagagaaggcgaaacacggtgtcgacaagataaaacgtctgaaagatctctgcgacaactcgcctcatcatcagacagcagctgtcattgctaatggagttcggaggcaagatatatggtctattgaacaccaccactccgacgctccactgcacatctccgaatag

SEQ ID NO: 18082 - DNA, 876 bp, Zea mays
  Peptide Sequence Number=SeqID_59861
atggcgtctggcagggcgccgagaggagagggagggaaatgccgaggaggtgtacgtggaacaaccccctgcttcgaggatgacaggtaccccgaccatgtgtttaaactctctaaggcgctctatggacttaagcaagccccaagagcatggtatgaatgccttagagatttcttaattgccaatgctttcaaggttgggaaagccgatcccactcttttcactaagacttgcgatggtgatctttttgtgtgccaaatttatgtcgatgacataatatttggttctactaaccaaaagtcttgtgaggagtttagcagggtgatgactcaaaagtttgagatgtcaatgatgggcgagttgaactacttccttgggttccaagtaaagcaactcaaggacgacaccttcatctcccaaatgaagtacactcaagatcttctcaagcggtttgggatgaaggacgccaagcccgcgaagacacctatgggaaccgacggacatgtcgacctcaacaaaggagtctccgattatgctagatgcaagattgatataaagagtacatcagggacgtgccaattcctaggaaggtccctcgtgtcttggagttcaaagaaacaaacctctgttgccctatccaccgctgaggccgagtatgttgccgcaggacagtgttgcgcgcaactactttggatgaggcaaaccctccgggactttggctacaatctgagcaaagtcccactcctatgtgacaacgagagtgcaatccggatggcggataatcctgttgaacacagccgcactaagcatagacatccggcatcactttctgagggaccaccagcaaaagggagatatcgaggtgttccatattag

SEQ ID NO: 18083 - DNA, 667 bp, Zea mays
  Peptide Sequence Number=SeqID_59862
atggggtacccaaggcaaggcccacaaacctcgaccaagtccccgctgggtgggaaggagacaacactgagtcacgactcgcccaaggccaacctcgggtggaagacgaagtcacgactcacccgaggctatcgtcgagcgggagacatagtcatggctcgcctgtggccaaccctggacgaggagcgcattactgactcgcccgagggcatctcaagagatgctccggaaggtgcccgactccgccgaccaactctgcgaggcggaccgaccgaccaactctctgactcgcccgagtgcgtctcaagcgatgctccggaaggcgaccaactccgccaaccaactctacgagcggacaaggcgaccaactcactatcgagcaacccgacgaggcaaagagctgagtacggtgctagtgatccactcgccgccgcccgagctcaccggtggtccacgcccgccgcgtcgtctgcccgaagctccaaataccgcgccaagccctcatggagcgtagtcccgagccccaccccgtgcctgcttttcggccctatgtgtcccacatccctcatcagagcctacaccagcctcggcgcgcttgatcacccctccccgcggctgggattgcttgctggagtgaccccgacccgcccggagcgccccctctacc

SEQ ID NO: 18084 - DNA, 660 bp, Zea mays
  Peptide Sequence Number=SeqID_59863
atgggaatgaacatgatcacacttagagaactcccaccagaggagactaaagttactacccttaacttgcttaagaccatggacccaaatgatgtacaaaatgagaaatctcgtggtgagcttactctagagctcatatacaagcctttcaaggaagaagatatagagaaagaagatacagagagtgctgatgtgatagagaaagctccagatggtactccagctggtggtggcttgctttatgttattgttcatgaagcccaagatcttgaggggaagcaccatacaaacccatatgcaaaaattattttcaaaggcgaggagaagaaaacaaaggtcatcaagaagaatagggatccaagatgggaggatgaatttgagttcgtgtgtgaggagcctcctgtaaatgataaactgcatgttgatgtcctaagtaaagcctcgaagaaagggctaatacatggcaaggaaactttgggctacattgatattagcctcgcagacgtgatcagcaacaagcggattaatgaaaagtaccatctcatagactcaaaaaatgatctcctcttagttgctcaaatttccgacaagcactataccatacaagagcattctggcattggtgtggaatttgcatcaaatcaaaagacctcaaagtaa

SEQ ID NO: 18085 - DNA, 546 bp, Zea mays
  Peptide Sequence Number=SeqID_59864
atggcgccgttgttctcctcgtcagcgtcgcctctttctgctcacaccagcaagaagattgtagtacgtgaggtgacagaagctagagacttcgagaggaggtacgatagtggccaagtttcatggatgaaagtctacatcacagaggagcaagagctgataatggaaccatctcttaaatgggctgcaaacccaaatattactgttgttgtaaaagcctatggtttgaaagctactatccagattgtggatctacaagtctttgcatcacctcgcattactctgaagccattggtgcctacatttccttgctttgcaaaaatccttgtctcacttatggagaagccacacgttgactttgggctaaaacttcttggagcagatgtaatggctattcctggtctttacatatttgttcaggagccgacaacactgggtctatcctttatctggcctgttcgcgaaagggcactccttaggttctgggttgactccccgtgggagcgaatttcaagctgtgttaaacgaatcaagctgaattcttaa

SEQ ID NO: 18086 - DNA, 258 bp, Zea mays
  Peptide Sequence Number=SeqID_59865
atgcggaaggcgagtccatggaactctcggggatcggtgctccgggcggcggcggagaaatttgattcggccggcaggggggaggaatcgaattggtttgggccttcggctgtcggcacgtcgctgctcacgcacacggcggccgcgatccaaggtggggttaacaataatccgtggggcgcaaatgctataattaaggtcactaaactagcgcgtgtgcatgagggtggatcttctccacagtgttacatcggataa

SEQ ID NO: 18087 - DNA, 231 bp, Zea mays
  Peptide Sequence Number=SeqID_59866
atggagcataaccttcagccttttctatggttagaggtttttttggtggaatacaagacagcaaaagagaagtcgaaagagatagataagcttgcaagggagcagaaagcagaggagcgtcaaaagcagaggggaaaagagtatgatgtggaggcagggatagagataccagaagagagaggttgtggagatttttcggaggaaatttgtgatcgatttgttaagttatga

SEQ ID NO: 18088 - DNA, 888 bp, Zea mays
  Peptide Sequence Number=SeqID_59867
atggccatgatgggcttcgatgaggacctagaccaggtgctggcggcgatgggccccgccgacagctcggcgacgtcgtctgcgcccaacgccgccgcaccagcaccactagctgtcgtcccagcaggcagcagcgacgatgaggaggccgccgccgcggatagcgccgacgacctccggaggggcccctggacggtggacgaggacatcctcctcgtcaactacatcgccgcccacggcgagggccgctggaactcgctcgcccgctccgcgggcctgaaacgcaccggcaagagctgccgcctgcggtggctgaactacctgcggcccaacgtgcggcggggcaacataaccgccgaggagcagctgctgatcctggacctgcactcgcgctggggcaacaggtggtccaagatcgcgcagcagctccccgggcgcaccgacaacgagatcaagaactactggcgcacccgcgtgcagaagcacgccaggcacctccgctgcgacgtcaacagcgcccacttccgccacatcgtgcgccacgtctggatgcctcgcctgcgagagcgcgcccaggccggcggcgtacaggctccagctaccaccacggccagcgcgccgcccgcgtgttataactactgcgggagccaacacctgcttacacttacacctcggcggcacacggcgaccccgacgacgaacgaccaaggctacgaacaaactacgactgacgacgacgtgttcgccgggtcgaccacatcggagctcctcgtcaccgctaccggcggccctgacgacgagtacagctccatgatcggcctgcagctgcaggactttgggtttgaggatttcgagtacggcctgtggagcctggatgacctttgctaa

SEQ ID NO: 18089 - DNA, 291 bp, Zea mays
  Peptide Sequence Number=SeqID_59868
atgatgcatgggctcaggaggatgttcgtggcacacaacagcaagagctgggcacacagggatgagcagagcactgccattgcctctacatctacatacgagctactagttctggattccctcctttcaaaagcaaatcttgagaataacaggtataagaagacccaaagaggagcaaaatcattgattggatgtgatctgatcctgaggcgccaagccgccttcctcgcctcgccctctgccaccgtggtcatcgacgacaagggcagtgacgacgggagtatcctgtag

SEQ ID NO: 18090 - DNA, 624 bp, Zea mays
  Peptide Sequence Number=SeqID_59869
atgggaagttttcttatgaggaagctagagcagttggacgtcgcgcacaacttgctcaccggcgcggtaccgccggggatatgcgacctgctgcgcctcaagaacttcacgttggccacaaacttcttcacgtgcgagccgccgtcttgcgcgcgcgtcgtgccgcaagacggtgaccggagcaattgcctgcccaaccgctcgtcgcaacggacgtcgcagttggcacaatccttctatctcagcatgcaaatcagaacattcatccagatgaggactaacctgaaggtggttgataactctggggccaagcgggtgatgtccatccagtccttgagggggaagaaaggagcaaggctcggggacatgatcatcggatccgtaaaggaggcccagccttgtggcaaggtcaagaaaggagatgtagtctacggcgtggtcgtccgcgccgccatgaagaaagggcgcagcgacggcagcgaggtccagttcgacaacaacgcggtggtcctcgtgaacaagaagggcgagctgatcggcacccgcgtcttcatccccgtcccccacgagctgaggaagaagaagcacctcaagatcgtggccctggctgaacacatcgtttga

SEQ ID NO: 18091 - DNA, 282 bp, Zea mays
  Peptide Sequence Number=SeqID_59870
atggtggaggagcctagaggcctcggggcagaggcagccatggcacggctggaaggcccgccgcagagagcagccaaccgttggtcctcgggatcggttggtgcaccgaacactgtccagtgcacaccggacagtccggtgtgcccaaccgaccgttggcgcgaccacgtgtcgcgcgaagattgcgcggccgaccgttggctcaccggacagtccggtgcaccaccggacagtccggtgaattttagccacgtcgtctttcttcattcccgagagcgatga

SEQ ID NO: 18092 - DNA, 180 bp, Zea mays
  Peptide Sequence Number=SeqID_59871
atggcggcgggatccgggccgaggaggaggcaggcgcgtagagggagcgtggcgagtctcggtacgtatctgtttgctcctcaacgacctgacactgtgtcgccggagcagtcagtcggccgggcgacggagcgcgcagttatgccaaaaagcaacgggtaccggcagcgcgcctactag

SEQ ID NO: 18093 - DNA, 2340 bp, Zea mays
  Peptide Sequence Number=SeqID_59872
atgacgccgccgccgccgccgccgcaggcgcggctccaccaggggtcatcagccaagggcgggcacgcggagcggaggaagcaaccgctgcagagcagcgtgacacagcccaaggcagagcccgcggcggcggcggccgtgctgccggtgccggagggaggcaagaggtgcagagggggcgggaggcgccgcggcagggccaaggcgcccggtgagcctcgcgccgcgctactagcgccagcgcaggcgcagacgcaggcgcctccgccgcgcacggtcattgggccgcccgtgccgagcaaggggctgtcattctgccgccggccagggttcgggacggtgggcgcgcgctgcgtcgtcaaggccaaccacttcctcgccgagctcccggacaaggacctcacccagtacgatgtgaagatcacgccggaggtgagctcgcggaccgtgaaccgggccataatggcggagctggtccgcctctaccgcgcgtccgacctggggatgcgactcccggcctacgacggccgcaagaacctctacaccgccgggacactaccgttcgacgctcgcgagttcgtcgtgcgcctcgccgatgaggacgacggctccggcgtcccgcctcgggagagggagtacagggtcgccatcaagttcgccgcgcgcgccgacctccaccacctcaggcagttcatcgccgggcggcaggcggacgcgccgcaggaggccctacaggtactcgacatcgtgctccgcgagctcgccaaccagaggtacgtgtccatagggcggtccttctactcgccggacatcaggaagccgcagcggctcggcgacggcctgcagtcgtggcgtgggttctaccagagcatccggccgacccagatgggattgtcgcttaacatcgacatgtcgtccacggcatttattgaacccctgccggtgatcgagttcgtggcccagatattaggaaaggatgtcatatcaaggccattgtccgatgctaaccgaatcaagatcaagaaggcattgcggggtgtaaaagttgaggtcactcaccgggggaatgtacggcgcaagtatcgcatttcaggcctcacaacacagccaactcatgaattgattttcccgattgatgaacaaatgaatatgaaatctgtcgtggaatacttcaaggaaatgtatggtttcaccattcagcatcctcatcttccctgccttcaggttggaaaccaaaagaaggcaaactatctacccatggaggttttttaccaggcctgcaagatcattgaaggccagagatacacaaagaggctgaatgaaaaacagatcacatcgctgctaaagacagttcatcaaaatgattatgagcaagatccatatgcgaaggaatttgggatcaacattagtgagaagctaacctctgttgaagcccgagtccttcctgcaccttggttgaagtatcatgacactggaaaagagaaagagtgcttaccacaggttggtcagtggaacatggtaaacaagaaagtgataaatggatgcaaggtgagccattgggcatgtataaacttctcaaggagtgttccagaaaccacagctcggggattttgccaggaattggcacaaatgtgtcaaatttcgggcatggaatttaacagtgagcctgtgatgccaatatattcagctagaccagatcaagttgtgaaggcacttaaaaacgtgtataatattgcattgaacaaacttaagggtaaagatcttgaacttcttttggctatcctccctgacaacaatgggcagttatatggtgacatcaaacgtatttgtgaaactgatttggggttgatatcacaatgttgcttaaccaagcatgtttttaagatcagcaagcagtacttggcaaatgtctcactgaaaattaatgttaagatgggaggaagaaacactgtgctcctggacgcaataagttggaggattccgttggtcagtgacatcccaactattatatttggtgcagatgtaacacatcctgaaaccggggaggactcaagtccatcgattgctgccgttgttgcttctcaagattggccagaagttacaaagtatgctggattggtttgtgctcaggcacaccggcaagagctcattcaagacctttacaaaacatggcacgatcctcagagaggcactgtaacaggcggcatgatcagggagctcttaatatccttcaggaaggccactggacagaagccattgagaataatattctacagggacggtgttagtgaaggtcagttctatcaagttctcctttacgagttagatgccatccggaag

SEQ ID NO: 18094 - DNA, 648 bp, Zea mays
  Peptide Sequence Number=SeqID_59873
atgaccggcagcgacaccgccgcggcctcggcgcagcaggcggacgcggccgctatatgcggtcagatcgcgtccgtcttctccgcgccctcgccgcgcccgcccgcgcgctccgtcctggtctcggagctggaggccgcggcctcgcggggcggccgcgtgttcgtgcacggcgtcgggcgggagggcctcatgatgcgcgcgctctgcatgcggctggcgcacctgggcctccccgcccactgcgtcggcgacgtcacggcgccgccagcgggcggcggggacctcctcgtggcctcggcggggcccggcgcgttctccaccgtcgacgccatctgcggcgtggcgcgcggcgccggcgcgcgcgtcctgctgctcacggcgcgcctcgaaggggacttcccgcggcgtcaggccgacgtggtggcacacctccccgcgcagaccatggcggatgacgaggagggggcgggggagacggagacggagacggaggcggaggggtcgccggcgcgggcgaagctgccgatgggcagcctgtacgagggagctatgttcgtgctgttcgagatggtggtcctggagctcgcgcgcgtcttgggtcagagcccggcccagatgagggcccgccacacgaatttggagtag

SEQ ID NO: 18095 - DNA, 171 bp, Zea mays
  Peptide Sequence Number=SeqID_59874
atggggaacgagccggagctgcgcgcgcgcgcaagaaaatcgctcggcagaaaggacggacagggagctccaagcaccgaactgcagccggaaccagaggcactaaaattagatcgagacaagaaactgtcggcgtttcgagaccggggggtccctcaggccgacgagtga

SEQ ID NO: 18096 - DNA, 1296 bp, Zea mays
  Peptide Sequence Number=SeqID_59875
atggcgttgccggcggcggggacgccgcccttcctgacgaaaacttacgccatggtggaggactcggccacggacgatacgatctcgtggaacgacaccggcacggccttcgtgggattcaagaaggtagtcggggacagatgggagtttgccaacgacggcttccggagaggcgagaagcaccttctcgccggaatacagaggcggaaggggaccggcgccgtggcggcggtaccggtgccgggcataccggcggggataccgttaccgctctcgtccccgcccacgagctctggcggggagccggcggtctcctcgtcgccgccgcgtggctcgacggctggagttagcggcgcggtggccgagctggaggaggagaacgcgcggctgcgacgcgagaatgcgaggctggcgcgggagctggcccgcgcgcggcgcctctgcgacggcgtgcgccagctcatggctcggtacgacgacgaccaaggcagaggcggagatgaggatccggcggacggcgacgaggggcatggcggcagtggggaaggtcccagcggcccagaagtgaagccaatgctgttcggcgtcccaatcggggccaagcggctacgcggtgcgcgtggtgatggagacgatgtagatgacggcgaggacaacgacgaggaacaagatgaagacgacgagaggcaaacggtgcggaagcagggggttaaagcggccaggaggaacgaggcgtcggatctggacgtgctgacgctgtccgtgcgggcggccgcggcggcgaggacgggcggaggatcaccctcaggcgcaacaggaagctccgcctcgcccgaccttgggcctcagcctcaggaggaggtatccgcctcgcccgacccagggctcggcccccgcctcggcctcggaaggtggtctccgcctcgcccgaccccagggctcggcctcaacctcggcctcggaaggtggtctccgcctcgcccgaccccagggctcggcctcaacctcgacctcagaaggaatcgcgtcctcacccgaccccggcctcggcctcaggaggagtctccgcctcgcccgaccttgggctcggaccgaccgcgccatgggggatacatcattaccctacccctagctagctcaggctacggggaacaagaccggcgtcccatctggctcgccccgggaccccccggggtcgaaacgccgacagttggcgcgccaggtaggggcctgctgcgtgttgacgaacaacttcccgttgagttccagatgggtagtctccagcaacctctttag

SEQ ID NO: 18097 - DNA, 843 bp, Zea mays
  Peptide Sequence Number=SeqID_59876
atgtacttcgatgggtcgctgatgaaaacaggagccggcgcgggcctgctcttcatctcacccctcgggaagcacctctgctacgtgttgtgcctccatttcccggcgtcgaacaatgtggccgagtacgaggctctggttaatgggttgcgcatcgccatcgagctaggggttcagcgcctcgacgctcgtggcgactcgcagcttgtcattgaccaagtcatgaagaactcccactgccgcgaccggaagatggaggcctactgcgacgaagttcggcgcctggaagacaagttctacgggctcgagctcaaccacatcgctcgacggtacaacgagactgcggatgagctggctaaaatagcctcggggcggacagcggttcccccggacgtcttctccagagacatacatcaaccctccgtcaagaccgacgacacgtccgagcccgaggaggcctcggcccagcccgagaaggcacccaggggattctcgcacttgctggtcgccatcgacaaattctccaagtggatcgaggtccgacctctaaccagcatcaggtccgagcaggcggtggcgttcttcaccaacatcatccatcgctttggggtcccgaactccatcatcgccgataatggcacccagtccactgggaagaagttcctggacttctgcgaggaccaccacatccgtgtggactgggccaccgtagctcactccatgacgaatgggcaggtggagtgtgccaacggtatgcttctacagggacttaaaccgaggatctacaacgacctcaacaagttcggcaagcggtggatgaaggagctaccctcggtggtctag

SEQ ID NO: 18098 - DNA, 408 bp, Zea mays
  Peptide Sequence Number=SeqID_59877
atgccgcaaacatggtggtacagagctgaacaaccaaggggcaacaaaaagcagagagccatccagacgattaagcggatacgacacaggagacgggacttccggatccaagtgctggagaacatcttaaaaagagcacgagaagtaggagaagtttggctcaaaagagtcaaacttgagccagtcagcaacggtacccacatggactacacccccagagcggccatccgcttcgtgagcctcgatttcatcatcaaccaggagggcgatatgatcggaacggtgcctgcgtggcctcctccacccgagaaccccaatgcggtctcggaggccctaggtggcctcagcctcgtcccgcgcgcggcaaggggcacaaaccaaccccgccttccgatgctgacaaaataa

SEQ ID NO: 18099 - DNA, 270 bp, Zea mays
  Peptide Sequence Number=SeqID_59878
atggatgtggagcagcacacagttcggcaggtgaatgtggagctgcacgcaggagctgaggagcagcacgcagacacggcacacaggatgacaggaacaacacgtaggtcggcaggcgaggccgtgagaggcgatgtgctggactgctggagctggcaggctggggcccgatgggccgtgttccggggattggctccatccggaacccgccgatccggaatggattcattcctcacaggattgaatggttctttctttatgtttggttag

SEQ ID NO: 18100 - DNA, 1146 bp, Zea mays
  Peptide Sequence Number=SeqID_59879
atggagcgcttcgccggccctcccgtccgcggcgcggcgcggctgctgcgtcgcggcgggcggcgggccatgcgggagccctcggtgctggtgcgggaggccgccgcagagcacctcgaggagcggcaggctgactgggcctactcccgccccgtcgtggcgctcgacctgctgtggaacctcgctttcatcaccgtcgctgcggtcgtgctcgtgctcagccgcgacgaggactcgcccatgccgctccggacctgggtcgccggctacgcccttcagtgcgtcgtacacatgatttgcgtcgcaatcgagtacaggatgcgccacggccagcgcggcagcgccgtcgctggcgcagcgcctgcagacgtggaaaggggcagcgacgcatcgtcctcatccagtgacgaggatgacagggagctcgatctccatggtcgccgcactgattacgccagaagatattcacctaagagatggattgtgtcctatatgatttctgtttcgagatgccaagtaaatgatgacagcagccccaagtgcttcatatgtaccccccctcccccacggccagaagcgctcttcgctgctgctgcgtttggtgcagctctggtgctagagaagggcaggcttggtggggtggtgagacctgtctcactgagtcacgaggtcaccgctcaccggttcaaagcagcccctccgcttctgcggggtattgcgaagcacttggagtctgctaatacaatgttctccttcatatggtggataattggattttattggatatcagctgggggtgaggaggaaggagcatctgaagatgacattcgtcaaatcccaagatacaaatttcggcggacggatgagcctgagaagcaagatgttgaccccatgggtccttttggtggaataatgatagagtgtggcaccaatcaacctattgagaaagtgcttgcagctgaagatgcagagtgttgtatttgcctatcggcttacgatgacagtgcagagttgcgcgaactcccctgtgggcaccatttccactgcacctgtatcgataagtggcttcacatcaatgcaacatgccccctgtgcaagtacaacattcggaaaagcagcagtagcagtggaagtgaagaagtatga

SEQ ID NO: 18101 - DNA, 424 bp, Zea mays
  Peptide Sequence Number=SeqID_59880
ccggccgctggccgcccccaaccggccgctggccgcccccggcgcgccccctggccgcccagccggccgctggccagccttggccgtgccccagcccgcccgaccgcgccttggccccggccgcgccctggaccgccgcgccctcggccgcccgcccggccgcgcccagccgcgcgcccctggccgcgtccccctgcacagggccggctcagccgccctggccgcccagctcagccgcccgcgctcggccgcgcctagctcggccgcccctgctcggccggcccagccgcccagccccggccggttcaaccgccctagggccggtggttatgagatcgatgattctggttatgactatggtgctggagaagatgaagccgtggaaggagacttccaggagttccaagactacgacgagttctag

SEQ ID NO: 18102 - DNA, 306 bp, Zea mays
  Peptide Sequence Number=SeqID_59881
atgccgagaaaatctacagctgatgcctgttggctcactgttgccgcgagacagttgacagggcgcgtacatggcccgcaggcaggagcatctcgcagattgtcagggctgtgccgatgtgcgctcctgcgccaaaagcttgtgatgcagtgtgaaataaaaaccgaggcagcacggaagcctatgcctatggcgccagccggcagggctaggacagctccaagtgcaagaggtagagtcagggggagaccattacacaaagttgcagtatgccacacaaccaagggaagagctttcctccactga

SEQ ID NO: 18103 - DNA, 912 bp, Zea mays
  Peptide Sequence Number=SeqID_59882
atggcgattggattggtggggcaccgaggcggtggcgtgatggaaggggatgagtcttattacaccaagcttttgaatggaggatttgaaaattttgaagaactatctgaaacaccgactgagttaccgtgtatagtccctataaaggatagcaacacattttcgaagtcaaaccagaaacagaaaggaaaaaactttagtgaggaagaagacagagcccttgttgcagcctggttgaatgtcagtacagaccctacacaaggcacaaatcagactagaggcacattttggaaaagaattcatatgttctacgagaccaacagaggaaatcgtgctgaacgtactgagagttcgttgctacatcgttggagtgctatacaagacgccgtggagcaagctgagaagctgttcaaagacaatgatccccacaacaagtcctttcaattaagacactgttggatgttgttgaggaatcaacctaaatggcaagataagttgcagcaactaattgccataaaaactaatgttgacctttcagaagcggatgcgccacaaagacctatgggcaagaagaagtcgaaggatgcattgcgtcgaggtggtattgatgtttgcaaagaagcattggacattctttgggctaagaagtttgaggctgatgcagagaaagagaggaagcgggaggaacgatatgccaagtcttatgctctcgataaagagaggcttgacattgagaaagagaagattgtgctggagagggagaaagctagcaatgaggccaatacttcgtatttgaagagaatcgcagaagaagaaagaattatgaccattgatatgaattccttgaatgagatgcaacaacaattctacatgaatcttcaggccgagatcatggctcgtcgcaacaattag

SEQ ID NO: 18104 - DNA, 1287 bp, Zea mays
  Peptide Sequence Number=SeqID_59883
atgccggtcctccgctccccgttcgccgggggcgacctccccgccggcgacgccgacccggactacctctatttcctcgaacacatccgcatcgacggtgactcctacaccctcgagctcccctcccacggcgactccccgccatcactcatcaagtacgagaccccgttcgccagcccctccgacggcgagtgcgtctccgatccctcccagggccgcctcagcggcaaccgcagcgcgcaagacgagagggaaccggtggagtcggcgtcattggagacgggacccgcgtggtacgattgtctccatgacgtcgacgaggactaccgcctcttcctgcagcacacgcgcgttgtggacggccaattggttctggagatcgggggcgtcgtcgtcaactacgataacccggttgctgtggaatctccgggggagaaggatacgcagcggggggaagaggcggtttttgcttcgccgggggaagggatcagtgttgcagcggggagcgatcaggtcgcctccggtgctccagcgacggctgtttcggagcagaacgcgtccgattggcgtgcggatccatcaccacggcgtgaggtgaacgatggcggagatgaggggctgtcggatgcaagcgcgctgaagggcgcgtattgggaggcgagctcaagcgatggccgtcgtgcaccccctactaattcggggggaaaggtagaaaaggaactaggtattatatggcctacacatatcacaagaaggccagattcagatttcaagcgaaggttgatcaaggcccttacaaaaccagttgctcggaaggaatactatagattgtttgacacggttactatccgtactccgttaatgaagctgcggcaggtccgcaacgaaacaaaattctatcctaccgaagagatgggcagttcatatttggaccattacccagatctggcggagcaaattatgaacaatggccgtcgtaatggcctagctctgatgcgcgggtttctcttctggttgcaggatgctgcaaacaggatgcatagcagattggataaaaacttcgttagggcttctagaaaagtgagttttagaaagattcctgaagatgctctagggtcccttaaggagttctaccaaacaaagcttaatagaatttgtcaatgcctggaaaaggccatacccctcattcgtggccaagacacacttaggctccgttcggttgtgcccaaccagaccgggttcggtctggattggggggcaatccaggttgaaatccgaccccagtag

SEQ ID NO: 18105 - DNA, 378 bp, Zea mays
  Peptide Sequence Number=SeqID_59884
atggcgctgctacctccaggatgggagctcgacaccccaaagaaattccccctggacgctggaggcgccaagctcgcgccgctcgcgcaccacctgttcgacgttatgcacagtagctgcatgtctcagattatcgcagcagcgagctccttcgccggcgcctgtccacaacagcagtcccgacgcgacactgtgacccttggtgaggcaccttgctgtcctagccgctggatcgagctttgtcccagcccgcagcttgctatcgtcgagtattgggcttgccgtcgatgtcgtgcttgtcatgcgcagcaagaaccacagcgccacgacttgttccagctcgacgagagcagccacatcgtcgtcgacccgtggtga

SEQ ID NO: 18106 - DNA, 297 bp, Zea mays
  Peptide Sequence Number=SeqID_59885
atggaggggcttggagacgaagtttgggcgatgccccctggcgctcgtcgctggcggacccaacaaagggcgtgctctagccaaacagcaggggcgtggacgttcagtccatgggagaagaccatggatgacgcatcgatgcagggaggagcttggtggctagagaatggagaggggcgtgtagcagcagggaaggggatgttgctgtcggaatttctgggcgccgtggggagcttctacaggggatttcggccatggacagagaggggcgagctgcagaggggcgtccacgtgtga

SEQ ID NO: 18107 - DNA, 288 bp, Zea mays
  Peptide Sequence Number=SeqID_59886
atgtcgtgcgcgttcgatgactactatatcaaggactatggcgtcatcttggcgccagaggcaagcatgtatggtggtgcgtacctgatgactgacaatgtacgagggaacttctaccgacagatgtggcacgtgctcttcaatgatgagaccatgcaaatcgtggcatttatcgaatcagtgtgcatcggcgaggtcgtcgtcgcggcagctgcacactattgcctgctatccatcgggagggagaagaaatcatgtgatcatcagatcgacgagggtgttgattag

SEQ ID NO: 18108 - DNA, 1452 bp, Zea mays
  Peptide Sequence Number=SeqID_59887
atggcttccgccgacctcgcagaggccatggagcccgggaagaagagcaacgtcaagtatgcttccgtctgtgccatcatggcctccatggcctgcgtcatccttggctacgcggcgatttacatcaagaaggacctgaagatcacggacgtgcagctggagatcctgataggcatcatcagtctctactcgctcatcggatccttcgctggcgcgcggacgtccgacaggatcggccgccgcttgaccgtcgtcttcgccgcggtcatctttttcgtgggcgcgttgctcatgggcttctccgtcaactacggcatgctcatggtgggccgcttcgtggccggagttggcgtgggctacgggggcatgatcgcgcccgtgtacaccgccgagatctcgccggcggcgtcccgcggcttcctcacgtccttccctgaagtcttcatcaacctcggcatcctgctcggctacctgtcgaactacgcatttgcgggcctcccgctccacctcggctggcgtgttatgctcggcatcggcgcggcgccgtccgccctgctcgcgctcctgggcggtgctagagaagacctccggcctcgccagaggaggccgcagagcggctggctgacatcaaggttgcccgcggggattccgaaggacctcgacggagacgtggtcaccgtacccaaggagcgaaacagcggtgagatgcaggtgtggaaggacctcatcttgtccccgaccccggcgatccgacgcatattgctatcggccgtcggcctgcacttcttccagcaggcttctggctgcgattctgtcgtgctgtacagccctagcgtgttcaggagcgcgggaatcaccggcgacaacaagctcctgggcgtcacctgcgccgtgggcgtcaccaagacgctcttcatcctggtggccacgttcctgttggaccgcgtggggcgtcggcctctgctactgaccagcacgggtggaatggtcatctcgctcatcagcctcgggacggcgctcaccgtcgtggggcatcacccggacgccaagatcccgtcggtcgtcgctctgtgcatcgcgtccaccctggccttcgtcgccttcttctctatcggcctcgggcccatcacgggagtgtacaactcggagatattcccactgcagctgcgcgcgctgggctttgcggtcggcgtggcgtgcaaccgcgtaaccagcgccgttatctccatgaccttcctgtccctctccaaggctattaccatcggcggcagcttctttctctactccggcatcgccgcggtcgggtgggtttttttcttcacgtgccttccggagacccgtggtcgtacgctggaggagatgggcaagctgttcggcatgccagacacggacatggctgaagcagacgacaccgcagccaaggagaaggtggtggaaatgtccaccaagtag

SEQ ID NO: 18109 - DNA, 291 bp, Zea mays
  Peptide Sequence Number=SeqID_59888
atggctgcaatgatttcctcaatgcaaggtcgtcatggctcggtggacaactttgacgagttccagacggtactcggcaaagaaaagccgccatcacggtgccggaatgacggagacagcgtctttgccgagtgccgtctggaactcgtcaaagtctgtgccaagtgccgagaaaaagcactcgacaaagaaggctttgccgatgtactgttcgtcgagtcctttttgccgagtgtttttcaggctttatcgagtgcttctggcactcgacaaagcggacgattccggtag

SEQ ID NO: 18110 - DNA, 2271 bp, Zea mays
  Peptide Sequence Number=SeqID_59889
atgtgttcaggcgaacacatcggacgcacagtcgaggcctacgtcgatgacatcgtagtcaagacaaggaaggcctccgacctcctctccgaccttgaagcgacattccgatgtctcaaggcgaaaggagtcaagctcaatcctaagaagtgtgtcttcggggtgccccgaggcatgctcctggggttcatcgtctccgagcgaggcatcgaagccaacccggagaagatcgcggccatcaccagcatgggacccatcaagaacttaaaaggcgtacagagggtcatgggatgcctcgcggccctgagccgcttcatctcacgcctcggcgaaagaggtctgcctctgtaccgcctcttaaggaaggccgagtgtttcgcttggacccctgaggccgaggaagccctcgggaacctgaaggcgctccttacaaaggcgcctgtcttggtgccaccagctgatggagaagcccttttggtctacgtcgccgcgaccactcaggtggttagcgccgcgattgtggtcgagaggcaagaggaagggcatgcactgcccgttcagaggccggtctacttcgtcagcgaggtactatccgagaccaagatccgctacccacaagttcagaagctgatgtatgctgtgatcctgacaaggcggaagttacgacactacttcgagtctcatccggtaactgtggtgtcatccttccccctgggggagatcatccagtgccgagaggcctcgggcaggatcacaaagtgggcggtggaaatcatgggcgaaacaatctcgttcgcccctcggaaggccatcaagtcccaggtgttggcggatttcgtggccgaatgggtcgacacccagctgccgacggctccgatccaaccggagctctggaccatgtttttcgacgggtcgctgatgaagacgggagccggcgcgggcctgctcttcatctcgcccctcgggaagcacctacgctacgtgctgcgcctccatttcccggcatccaataatgtggctgagtacgaggctctggtcaacgggttgcgaatcgccatcgagctaggggtcagacgcctcgacgcccgcggcgactcgcaactcgtcatcgaccaagtcatgaagaattcccactgccgcgacccgaagatggaggcctactgcgatgaggttcgacgcctggaagacaagttctacgggctcgagctcaaccacatcgctcggcgctacaacgagactgcggacgagctggctaaaataacctcggggcgaacgacagtccccccggacgtcttctcccgggatctgcatcagccctccgtcaagatcaacgacgctcccgagcccggggcaccctcggcacagctcgaggcgccctcggcacagcccgaggcgttctcggcacagcccgaggcgccctcggctcagcccgaggtaccctcggcccccgagggcgaggcactggacgtcgaggaggagcagagcggggccacgcctgatcgagattggcaggccccgtacctgcaatatctccgccgaggagagctaccccccgaccaagccgaggctcggcggaaggcacccgggggctacacgcacctgctggtcgccatcgacaaattctccaagtggatcgaggtccgacccctgaacagcatcaggtccgagcaggcggtggcgttcttcaccaacatcatccatcgcttcggggtcccaaactccatcatcaccgacaacggtacccagttcactggcaaaaaattcttggatttttgcgaggatcaccatatccgggtggactgggccgccgtggctcatcccatgtcgaatgggcaagtagagcgtgccaacggcatgattctacgagggctcaagcctcggatctacaacgacctcaacaagttcggcaagcgatggatgaaggaactcccctcggtggtctggagcctaaggacgacaccgagtcgtgctacgggtttcacgccgtttttcctggtctacggggccgaagctatcttgcccactgacctggaatacggctccccgaggacgagggcctacaccgaccaaagcaaccaagctagccgagaagactcgctggaccagctggaggaggctcgggacagggccttactacactcggcgcggtaccagcagtccctgcgacgctaccacgcccgaggggtccgacctcgagacttccaggtgggcgacctggtgcttcggctacggcaagacgcccgagggaggcacaagctcacgcccccctag

SEQ ID NO: 18111 - DNA, 303 bp, Zea mays
  Peptide Sequence Number=SeqID_59890
atggatccttccacgaagcctttatgtcattgtgctctttgctcgatctcccagagccgtctcgaggctttggagaggaaagggttcctctcacctaaagtggcctcggacgtcctacctgtggatcccctcccttcctctgtccatggctacgagggcgagaggttcgacgtgtggaaccttgaggggagtgtgccaccgttcaccggtcgggtccctgtatccaagcctaaggggaactatggcgcgaataagaaattcaagccgaagatcgactacatgctggaggccatcgccatgtag

SEQ ID NO: 18112 - DNA, 1227 bp, Zea mays
  Peptide Sequence Number=SeqID_59891
atggtgaagcccgtctactctaccccgcaccctctcgccggcgagaaggtcccgctgaccgtcttcgaccgcgccgccttcgacatcttcgtgcccatcgtgttcgcctacccggcaccggcgccgtccaacgaggccctcaaggagggcctccgcagggccgtggcgctctaccctcacctcgcgggccgcctcgccgtcgacgggccggggccgccggttcttccacctaaacgacgagggcgtgcttgtggtagaagcagccgtctcgggcgacctggccgacgtgctcggcgacgctcaaccgctacaagtgcggcggcctcggtgatcggcatcaccagccaccaccaagtcgccgacggccactccatgagcaccttcctgaccacgtgggctaacgcggtgcgcgcgggcaaggacttcagcgttccggcggcggcgaaggcgcccttcctcaaccgcgcggcgaccgccgtgccccgcgccgcgccggcgccggctttcgaccaccgctccatcgagttcaagggaggggacgacgatggcgcccgcgcctccaagccttacaccgtcgtgcccatggacaagatcaagaacgtcaccgtgcatttcaccgacgagttcatcgctggcctcaaagcgcgcgtcggcgtccggtgcagcaccttccagtgcctcctcgcgcacgtgtggaagaagatcacggcggcgcgggacctcgacctggaggagctcacgcaggtcagggtggcggtgaactgcaggggtagggccagccctgccgtgcccacggacttcttcggcaacatggtgctgtgggcattcccaaggctccaggtcagggacctactcaactccagctacagccgcgtggtcgacgctatccgcgacgccgtggcgcgcgtcgacggcgagtacatccagtccttcgtcgactttggggccgtggcggacgcgagcggggaggagctcgtcgcgacggctgcggcgcccggcacgatgctgagcccggacatggaggtggacagctggctagggttccagttccaccagatggacctaggcaccgggccaccgtgcgcgttcctgccgccggacctgcccatcgaggggctcatgatcttcgtgccgtcgcgcactgccaagggcggcgtcgacctgttcatggccgtcgcggagtgccacgtcaacgcgtttgagcagatctgccactccatcgattga

SEQ ID NO: 18113 - DNA, 657 bp, Zea mays
  Peptide Sequence Number=SeqID_59892
atggcgcgccgcacgctctatgacgacgacggctctcagcccccttacggaagcaagaggacgtcctcatctgctcttggtgagctcttgtcccacattcttgaactggtagttgatggagaggaagagttccatgttggtagctgcttcgggcgaaggagtcgacctagtagggtagccgatggggtcattgctggaaaaggggttgtccagtctctaaatgcccatagacagttgctgcatcgtcaggctagccatgtagctggagatgatgagaagaaggacctggagcgcaaaggagagggcaacgatggatctagttgcagtgatggtgtgggacacgagcaagttgttggcgccctagggtgcagccatagacgcgaaccctgcgtgcgggtcgacggtggaggtgggcgcgagcgcgacaaggttggtggcggaggcctggaggtaggagctgctgggcaatggcacgtcgacctagagtttctggcccctacggcagattcagagcttctagccccagcggcagtggcccagtgcataagagttgccgttggcgagtctgggcatgggcgcgacagatcgcaggacgcgaaggcctccagtgccagccgacggattgctccgctgatgatgaacgacatcggaggatga

SEQ ID NO: 18114 - DNA, 3339 bp, Zea mays
  Peptide Sequence Number=SeqID_59893
atgagcggcggccgccgccgctcttcgccggtggcgccttcctgctcctccgtccccgggcgttcgttggttccgctatgctgcttgatcttggtgctcctttctttctccatgtcgtcgtccgcggtggcggcggaggattgcgttgaggatagtgacggcgctgatggcgacggttgctgtctcagcttccgggatgtgtgtgccgaccggagctccttctgcttctcgtcctcggtggctcagatgttgcttgcaagcgaggacgccgccgaggcgccggatttggagctgccaaggggctgggaaccgtcgtctctgccattgtccttcccgatgtccggcggcggaggcatggtaacttgctcttctgttgactcgtcgctcacacgggcgcgcgatggattgggacgaggtgacgacgctagagcgaggtatgacgtcgcgtcatgccaggcgccgcttgtgcctgacaattggatgcgggcatctgctggggtgcccatggaggtggagggccctgccacagatgccgacccgagtggtcttcaaagccccttgtcgatgaatgtggaaattaaccccccggtgctggattggggcaggagcgacttgtatgctgcaaccaaggccaacttgaccgtggtgaatttgaacaagaacagtgccctgcgtctgtatgaacccttcagcactgacccccagttttatgtgtatggttatgaggatctggagctgcagcctggggagaacgccacagtcaccttcgttttcttgccaaagttgttaggctcttcatcagctcatctagttgtgcagacaaattttggcggatttattatacatgcaaagggcatggctgtcagttcaccctatcagatactgccattgacagggatagatgttcttataggtggacagctagagaggaacttatcgatatacaacccatatgacgatactctctatgttgaggaagtgtctgtttggatgtcttcattggagagcacaaggtattcttctcaccttgtctgccagctgggcccctttgatggagcattggagctatcctcttcacgtagcaactggtatacagcaagcagtgaagaatttagatggccagtggtcaatatcaggcctagtgaacaatgggaggtgcttccttcaaagaggaacactgtgattgagttaaagctgcaagctgtttctgaaggcaaggtgtttggtgctatctgcttgaaactgcgcaattgcactcttagtacgactcatgcttttgtgatacctattgagctagagccaatggtcaggaaagcagtcaaagctgatgatagaatgcttaaacaatggaaatctcatggaacaagtgatgggatttctgttcttatggatcatgaaatgatgtttcccgttgtgcaaattggttcacagttttctaaatggataaaagtccataacccaagcctggagcgtgcagccatgcagctgatagtgaactccgaggagatcattgaccaatgcaaaactgtaactgatgtatgtgaactcacattctcaagcaaatctccagaggttaactcaactgagactagatttggtttctcgttaggtgatgcagcaatcaccgaggcctatgtcgatccttcagagactgctttgcttggtcctattgtcttccgtccctcgaatcactgtatgtggtcaagcatggttttgatcagaaacaacctgtcgggtgtggagatgctgcctctccgggcatatggtgggcgacaatctattgtccttctagaggaatctgagcctgcttggaagctagagttcagccttgggtccaatgttcataataaatcaacgatgaccaaacaagagatcccaagctctttgtgcagtcaacagctaaccaaagagatacatgttaaaaacagcggtgaccttcctctacaagtgacaaaggttaaagtttcaggagctgattgtggtgtggatggatttaccgtggacaactgcaaaggatttagcttagcaccgagtgaatcaataagaatgctcatttcttttcaagctgacttctcttcagctatggttcagagagatcttgagttggtcatgactactggcatctttccgatccctatgactgcaacaattccggtctgcatgcttaaccagtgcagaaaatcttatctcagatctgcccactggaagctgttggtaatcttgtttggagctttagcactgcttattctggtctttgtccgttatgccccagattctttgacagtgggctctcaagactatatcaagattgatgacaaaaaaagtgccattttcgaggagaacaagaaaagtaccattaacaagacccttttccttaaccaaagcagcaaaaagtccaggacaaataaggaacacaaaagaactgaagaagctgttgctgagaagtaccctgccagtgttgttgatagctcaaagagagcagatgacaagaataaacctgatgaacaactgcacacaacttcgacggtatccgtgtcccgaggtaatccagtggaagataaggcctcaagagaagctccgcagaccagtgaaaacctcacgatcaggattgctcgagacaaagggaaacgaaggaagcggaaagttggtgcaggactggcagggaagtttgaggtttctagcagccacagcgggaactcaacaccgtcttcgccattgtcgcagagctcaaccccgaaacatggctggtctttttctggggcgccatcagagccgaagcatgaaaacaaagtcgagagcagattcgatgtcgaggcaacggcatcaccaactcgcgctaatcatgagaagaagaaaacttggtcgcaagtcgctaaggagcagcctcgctctcgttcagcctcaccaggaatcacatcaccacctccaagccctgcagtgaccgcccccgtcgcatggcgctctccgtcattggcccccacgtcttcaccgacagctccacagtctcgtgctcctggctccaatctggtgaaagacaaggctgtgaagagagacgtgggtgctgctgcggctgcggctgcgccttccccgaagaaagagttcacctacgacatatggggagaccatttcccaggaaacctgctggtggtcgcaagggaggccgcgccacgcaagatgcctgacgcttctgaaggcgcctcctatagcttgtttgctagagagccccagaccctcatgatgaagccatcatcatctgcaccgccgcccatgtctcgcggccgcgacatgagggcaattatgttcctgtataaagcaggagaggtgcttgatgcatgctag

SEQ ID NO: 18115 - DNA, 403 bp, Zea mays
  Peptide Sequence Number=SeqID_59894
gcagatgagaggagaggagctccagaggctgagcgtcgaacagctgcaggagctcgagaagaccctcgaatccggcctcggctctgtactcaaaaccaaggtagcgtccgtcctcacctgtgttgttaaacagagaacgcagctgatcgaggagaactcaaggctgaaggagcaagtgacacggatgtcgaggatggagacgcagcttggcgccgatccagagttcgtgtacgaggaagggcagtcgtctgaatccgtgacgaacacgtcctatccgcgcccgtccaccgacaccgacgactgctccgacacatcgctcaggctcggtaggaacttcgatgcgaatgtagcaatagcatacggagcagcaatggaggctaaaactgaagatgctccaagataa

SEQ ID NO: 18116 - DNA, 420 bp, Zea mays
  Peptide Sequence Number=SeqID_59895
atgggggcactgcacgtcgtcggcgagcctaggatcagcttccgtcagcagcctgcagcagtcgttgcgaagaacggcagccacggcgccgtcatcgaggagatccacggcctgatccgcgcctacaaggacagaaacgtggagcggctcccggcgatcccagtcgtgccctgcatgtggggcggcacggccccggacgcgtcgggcggcgtcgtcgcgagggacgtggtggtcgaccccgccacgggggtgtgggcacggctgtacgcgccgacggcgacgtcggcgggggacggagccaggcgccccgtcatggtgtacttccacgacggcgggttctgcgttgggtccgcggcctggactgtcgggactttcgtcgaacagactccgggcgtccaggcaccggcggatccgccatag

SEQ ID NO: 18117 - DNA, 477 bp, Zea mays
  Peptide Sequence Number=SeqID_59896
atgagcagggcaggcagtcaggcccgcacgcaggcacatgggacgctccgctctgcccgacccagggctcggactcgggtcagccccggcagactgcggaattgcgatccgcccgacccagggctcggactcgggctacgccccgcaaggggggcgaactccgttccgcccgacccagggctcggactcgggctaagccccggaagacggcgaactccgctccgcccgacccagggctcgaacttgggctcggccccagaagacgacgaattctgctccgcccgacccagggctcggacttgggctcagccccagaagacgacgaactccgcttcgcccgaccccaggactcgaactccgccctggcctcagccaacggcctccgcctcgcccgacctaggggctcggactcgacctcaaccacgaaagacggactcgacctcgacctcggaggagcctccacatcgcccaacctag

SEQ ID NO: 18118 - DNA, 816 bp, Zea mays
  Peptide Sequence Number=SeqID_59897
atggccttctcttcgtcactggcgccgttcttcccaccttctggaaccttccgagcccatcccgctaggaggctgcgggccgatgcacccgggagattcgtggcgtcctgcttgccccctcccgacgtcgtggtgacgcgcgagcagggaaagaacgccaggctcatctccgcgctggaaaagcataatgtacaccctctggaacttcctcttattaagcatgttgaaggccctgatacagataggcttttagatgtcctacgtaatgacaagttcgactggattattgtaacctctcctgaggcagctgcagtgttccttcagggatggaaggctgctggaagtcctaaggtgcgagtagctgttgttggagaaggaactgcaagggtttttcatgaagtgtcagaatctgatgatcaatctctagagcttgcattttcaccttccaaagaggatgtgctatcagaacgaggatttgacgtgacccgactgaatacatatacaactgtagtggcatttagttctgttcctgtagaagatgtcgacccgctgacattaaaccttgctatatcagctccagttgttgcgttagcttctccttctgcactgagggcatggctaaatcttatctcaaaatctgataactggaacaactccgtcgcctgcatcggtgagaccactgcgtctgcagcgaagaaactgggcctgaagagcatatattacccaacgacccctggacttgaggggtgggtcgagagcattctcgaggcgctcagagtccacaggacagcatcaaaagaggccccaaaacgttga

SEQ ID NO: 18119 - DNA, 936 bp, Zea mays
  Peptide Sequence Number=SeqID_59898
atggccgaggcggcgacttcgccggcgtacttcccccgtctgcaccgcaggccgccaatcccaaagtctaaccgcgcaaaacagagactagcacacggtagattgaatggcgctcagtcagcgtttccgcacgccagcgccacagacagtttccccaagggtccgcgcaaggctccagtcaagcccagggttccggcgacggcgagggggtggattccgcggcagcgcggagtggagtcaaggcgaggtcgtggctatctccctccttactggcttaggttccgattcgtgcgcaaggccgaagcaaggacgcggcgcggcgtttatagtcgcggggggagccgacttcaagcgaaatgtgcacccctgactgaccccgggtcccacacggcagtgtccgcggtcaagggtgaaggggtatcgtccaccgcgggccacacgatcaagtatcagtggccaagattagagcagcgcgattatgaatcgccgttcccaagtcaggcggacggcccggatgatccgaccgaacgggtatggtttagatctaatctccaccgcccaaagaagatcgaacggttgaccgccgtcctcaacccccggctagcccaagtgctacggcggcacggccgaggcggcgacttcgccggcaatcccctggccgcggcatacggcggacccgagactccggtgagcgattggcaggcgctcagtcagcgtttccgcacgccagcgccacagacagtttccccaagggtccgcgcaaggctccagtcaagcccagggttccggcgacggcgagggggtggattccgcggcggcgcggagtggagtcaaggcgaggtcgtggctatctccctccttactggcttaggttccgattcgtgcgcaaggccgaagcaaggacgcggcgcggcgtttatagtcgcgggggtgtga

SEQ ID NO: 18120 - DNA, 165 bp, Zea mays
  Peptide Sequence Number=SeqID_59899
atggcgcggttaggacacgcggtggccaacggcgagggcacgtcggcgggtgcactcacaaatagtcactggatcatgcttaaaatcaagtccaaagttagctctattttactgaagttctggatttcagcatggaccagcctgacagccaaacttgaggcttaa

SEQ ID NO: 18121 - DNA, 165 bp, Zea mays
  Peptide Sequence Number=SeqID_59900
atggcgcggttaggacacgcggtggccaacggcgagggcacgtcggcgggtgcactcacaaatagtcactggatcatgcttaaaatcaagtccaaagttagctctgttttactgaagttctggatttcagcatggaccagcctgacagccaaacttgaggcttaa

SEQ ID NO: 18122 - DNA, 405 bp, Zea mays
  Peptide Sequence Number=SeqID_59901
atggaagcgaccgagcgagcggagcgggtggaacaggaggggcgcggtggaagggaggacggcgacccggcggtagtggatgggatcttctctaggtgggaggtaggggagattttagggcggtggcgaggcgagaactccggggggcagcgagatttccgaggacggggacgactcgtggggcggggatggtggaggccagggcatggagcacggtggggatggaaggggcgcgggaggagtatggaaggggtgggggaggcggcgcaacgcacgaccttccatcgatgcgacatttcgggggcgaggcggaagtgcgcggacgcgcgggacagaaccgtgcaccaccagggtgtggacgcctacggtagcctcttaaggaatagtagagattctaggttttag

SEQ ID NO: 18123 - DNA, 378 bp, Zea mays
  Peptide Sequence Number=SeqID_59902
atgcccacgaccaagaagaaggtggagatgggcggccgggccggctcaaccgagcctcagccatggcaaaagttcgccacgccgagggagtcggtgttgtcttgtggggcacactggctagtggtgggcgcgatgcgtggcaagggcatggcatgcacggtggcggtgggtggagagcgcacatgcgcactggcgcgagcgaggcggctgagcgcggctgctgggcctggggcgcgggaatgggtgggcaggctgagggggatgcgcgtgggccatgccagcacgttgggctggggtgagcgagcggccgaggaggggggcgtggcccagatagacaaggagaggctgggccgacgcatggcgaggggcggggagtga

SEQ ID NO: 18124 - DNA, 186 bp, Zea mays
  Peptide Sequence Number=SeqID_59903
atggaggccgagctcgcggtagtagaagccatcgcggcattccacgagggagttggcgaggttgagtgcgtcggcgagcttggactcaaggagacctctgaggcagaggcgcagctacaccaccagcatccgcggtgggcacccatggtcgcagggttagctcaacttaaggtctcctattcctaa

SEQ ID NO: 18125 - DNA, 360 bp, Zea mays
  Peptide Sequence Number=SeqID_59904
atggaggtggtggtcatcgggtctgggtggtggtcatcggacgcgtgcccaagcgccgtcgtggccccgcgcacgctgctatggttgatgtcgaatgacgtgcgcgataccatccaccgctccgcccatcgcagatgcccgtccacgtccatctccaccgatctcggacgagggcgtggtggtagctcgagtgggggagaaagtggcggcggcacagggggcgccgatctcggacgtgggcgtggcggcatctcgagcatgggagaaaggggtgggggcagcgagcgcgctcgtggttgtggatggagtggagggagggggcacaggggacgccgatctcggatgggggtgtggcgatag

SEQ ID NO: 18126 - DNA, 225 bp, Zea mays
  Peptide Sequence Number=SeqID_59905
atgggagaactactgatggaatgtgccgacgcgaggaagaaagcagacttgggcccaggcggctcgttggatatatggaagttttttagatcacttgtaaagaaggcaacgacctctaagcctcttggggctataaaaggaagccctaggcgccctctcatggtaccaagcaccacactccgagactctgcgaccacaccgttcaatgatttgagagagatttga

SEQ ID NO: 18127 - DNA, 444 bp, Zea mays
  Peptide Sequence Number=SeqID_59906
atgagatattcatgtgttgattgcttatatggtgctttacttggtatccttatagtgtatagtgtgtcatacgcatcacggtttgattctttacactatgcaccccacagacaattggacaagccaaggaaggaggcaagacaaactttgaggtaccgagtgcacgggagaaggtcaaggaggctgaggtacctaaagccaggggtgaagaagaagacttgcaaagtcaagagtctagcacttgaagtgataccaggggaagcaaacaaatccaagaagaacaaggacaaggagaagaagatgaagaatatttcatccactctagatcaaagaacaactgcaagaactccaagaaggaggagtgtcaaagcaagaactgcaagaactctaggaggtggttatctcctcctccaacaatggcacctctcgatcaagctcaagtag

SEQ ID NO: 18128 - DNA, 793 bp, Zea mays
  Peptide Sequence Number=SeqID_59907
tatttctggtaacaatgtattggagaagtctgatctgcagcctgcgctcaaagctctcaaagataggctgatggcaaagaacgtggcagaggaaattgcagagaagctttgcgaatctgtcgcagctagccttgagggcaagaagctaggatctttcactagaatatcatcaacagtccagacagctatggaggatgcgcttcttcgtattttgaccccaaggcgctctattgacatactgagggacgtgcacgctgccaaggagcgtgggaggccatatgttattgtttttgttggggtgaatggagttggcaaatccaccaatcttgcaaagcataacctcagtgttacacttgcagcatgtgacaccttcagatctggtgctgttgagcagctgagaactcatgcaaggaggcttcagatacctatatttgagaagggttatgagaaagatccggcagttgtagcgagggaggctattcaggaagcaacccggaacaaatcagatgttgttctggttgacactgctggacgtatgcaggacaacgagccactcatgagggcactctccaagctaatcaatctcaatagcccagacctggttttatttgttggagaagcattggttggaaatgatgctgtggatcagctcactaaatttaaccaggttggagcagcgctttccatggtctacatatctggagctccagtcatgttcgttggctgtggtcagtcctacacggacctgaagaagctgaacgtgaaatccattgtgaagaccctcctgaagtga

SEQ ID NO: 18129 - DNA, 1095 bp, Zea mays
  Peptide Sequence Number=SeqID_59908
atggcggcgccgtcgcctaaacccccgacaccacgcgggcgctgccaccacccgcccaacgccacccgccgcctccacgtggccacccgctgcttccccgacccaccaccaccacctgcctccatgccgccgatcccgagtccgaaccctgtgctgtcccttctctccgcggtgcccgactgggccgacgccatccaggagcgccgcgtccgcgaccgccgcccgctctacgaccacgccacctggcggcaccaccgcagctcccgccgccacctgcgccacctcctcacctcgctgtcctcccgcgccatcctctccctggcgcccccggtgtccgccttcaccgccttcgccgccgccatcgccacctacaacacgctcctaccggcctacgcgctcaccgcatcctcgctcccctacgagctcactgcgcccgcgctcgcgctcctcctcgtcttccgcaccgaggcttcctacgcgcgcttcgacgagggacgcaaggcgtggatgcgctgccacataatttgcgactctgacgtaaaaggggaccttgagggcttgcttggcgaagatgacctgagcgttgttctagcatcgaaacatcggccacgctgtattatcgagttcatcgcacagagtctccaaatgctagatctcgacgagcagaagaggagcatcatggtgtctaaactgtcttgttttcttgaaggaatcggcgtttgcgagcagctcatggggatccctatccctctcgcatacactagacttacttcaaggttccttgttctgtggcatcttacactcccaatcatactctgggaagaatgtaaatggattgttgttccagctacctttatcagtgctgcatcgctattctgcattgaggaagtgggtgttctaatcgaagagccgttccccatgctagctcttgatgccctgtgcaagcagctccacgacggtattaaggatgtgatggagatgcagaactcggttcactcgcgactagttgccaagactgctacggaccacaggggcagtaggcgcgagaacaatggttggcctagctccaaaagagaaggagccaagattgattga

SEQ ID NO: 18130 - DNA, 411 bp, Zea mays
  Peptide Sequence Number=SeqID_59909
atggagagttgcgagttgtgtcttctatcgaagcttgttcgaatggacggagactctagccaagagttgcatgaaatctcatgtgggcaccatttccactgcacctgcatagataagtacctctacatcattgcaacatgcccccgtgcaattggaatcatgcaatcagtcaaaaagggttgggttaaagtaacagactacaatagctatcaaactggccgattcaaggcgataaacgatgacgggatgtcgatcatgaaggggaagctctacattcatttcacggtgaagttccctgactctctggtactggagcagtgcaaggctctcgagtcggtacttccaccaaagctttcgtccaatctgatagacatggagatagatgaatgtgaggagacaaccatgcattaa

SEQ ID NO: 18131 - DNA, 474 bp, Zea mays
  Peptide Sequence Number=SeqID_59910
atgccctttttgtttgacaccagttttctagcaagggccgtggccgccagcaaccgccccagcgccgtggacctgctgggcaagatctggggagacaccacgcagaggctagcgcactgcttcgccgaggggctggaggcgcggctcgcgggcatggggaccccagcagctcacggcggcgatgaaaagttgctggtcgtcggcgggaggaagaaggtgcacatcgtggactacggcgaccactactacggtttccagtggccgtcgttgctgggctactggggtagcctggaggctgggccgcccgaggtgaggtcgtcgttggggcatcatctacgcgctgctcatggacatcatcgacgcgctgctcatggacatcatccacgcgcgccgccgccgccaccagggctgctgctggccggacgcgctgccgaaggagatggagcacgggctcgggctggcacgggccactaa

SEQ ID NO: 18132 - DNA, 654 bp, Zea mays
  Peptide Sequence Number=SeqID_59911
atgcgcgggatccagttgacgaagaagctgacgacgccggccgttgcgctcgggtgttacacgttcttcaccaacatcatccatcgctttggggtcccgaactccatcatcaccgacaacgacacccagttcaccggcagaaagttcctggacttctgcgaggatcaccacatccgggtggactgggacgtcgtggctcaccccatgacgaatgggcaagtagagcgtgccaacggcatgattctacaagggctcaagcctcggatctacaacgaactcaacaagttcggcaagcgatggatgaaggaactcccctcggtggtctggagcctgaggacaacgccgagccgagccacgggcttcacaccgttctttctagtctatggggtcgaggccatcttgcccacagacttagaatacggttccccgaggacgagggcctacgccgaccaaagcaaccaagctagtcgagaagactcgctggaccagctggaagaggctcgggacctggccttactacacttggcgcggtaccagcagtccctgcgacgctaccacgcccgaagggtccggtcccgagacctccaggtgggcgacctggtgcttcggctgcgacaggacacccgagggcggcacaagctcacgcctcactag

SEQ ID NO: 18133 - DNA, 396 bp, Zea mays
  Peptide Sequence Number=SeqID_59912
atggatgacctcggggccgcgccacctgagccatcgctctgcaccggtcgggcttcttcatcaagggatcttcaagctattggcgtcgtgaccggttcgtactgggtgccagcaccgggagcacgaggcccagggatttccgtgccggtgcctgggcatcaccgggcgccgccaccttgggtgctcacgctgttgggggccgggcgggcggatggtcatgggcatcgacggcgccgccgtctggccaaggctcgccagcggccagtgcgagcagggaagagaggaatgaagaatgggcctgtccgtctattttctgatgaacgactcggatcgggcaatgcatatttatttggctggggaatttgcgaccgtggatctggcaatagagggtcttga

SEQ ID NO: 18134 - DNA, 396 bp, Zea mays
  Peptide Sequence Number=SeqID_59913
atggatgacctcggggccgcgccacctgagccatcgctctgcaccggtcgggcttcttcatcaagggatcttcaagttattggcgtcgtgaccggttcgtactgggtgccagcaccgggagcaccaggcccagggatttccgtgccggtgcctgggcatcaccgggcgccgccaccttgggtgctcacgctgttgggggccgggcgggcggatggtcatgggcatcgacggcgccgccgtctggccaaggctcgccagcggccagtgcgagcagggaagagaggaatgaagaatgggcctgtccgtctattttctgatgaacgactcggatcgggcaatgcatatttatttggctggggaatttgcgaccgtggatctggcaatagagggtcttga

SEQ ID NO: 18135 - DNA, 261 bp, Zea mays
  Peptide Sequence Number=SeqID_59914
atggcgcgcataggctacggtgaccgcggctttgtggctagacaaacgctccgacgagcaattcgatgctcccaggatgaggacaagcccgggcgacccttgcgccggcttcaagggatcccagaggtgaacccggacactcaatggaggacagggataaatatttgtgacaaggttactcgtgtgtcatgggtgataactgacagagcagtgaatttacttgggagcaacacaagtgaagaacaaagtaagataacttag

SEQ ID NO: 18136 - DNA, 147 bp, Zea mays
  Peptide Sequence Number=SeqID_59915
atggtcatctcccctccctgcacctcccaacctgaccccttctctgctcccttgcgtggaggagatggctggaggttgaagaagacctccactgagtctatgatgagtgggtccaaggccatggctccagtgctccaaatggattga

SEQ ID NO: 18137 - DNA, 336 bp, Zea mays
  Peptide Sequence Number=SeqID_59916
atggctcaatctttagacccaggatggaagtttggattctgtccaaatcctgcaaacaaggatatggttcaatgcatgtttttgcaagaagattgtccctataggaatcaaaagagaagtgcccaaagaacacctgaggtagttaggaaagagatggcatcccacttgaagaagaatgtaaggaatgcgatagtgcaattggaaaatgaatgggaaggtgaagaagagcaggtgcaacaagatgatgcacaagaggcaaacccaacacgaagttataggacaaaaggaaagcaagcaaggaagaaaattgttcttttactattagttcctttatag

SEQ ID NO: 18138 - DNA, 660 bp, Zea mays
  Peptide Sequence Number=SeqID_59917
atgcctagagagccacagcgcaacgcatgcagctggtcaagaattccaaagctatggggggaggtgtccgaggagtacggacgcgaggtggtgcggctgtgcgagctgctgatgcgggtgatgtcagtgagcctagggctggacgaggcgcaccttcagcgggcgttcggcggggcgggctgctgcggcgccaccctgcgcgccaactactacccgcggtgcccgcagccggacctgacgctgggcctctccgcgcactcggacccgggcgtcctcaccgccctcctcgccgacgagcacgtccgcggcctgcaggtccgccgtagcgccggcgactgggtcgacgtgcgccccgtccgcgacgccttcatcgtcaacgtcggcgaccaagtccagataatgagcaactccgtgtacaagagcgtggagcaccgggtggtcgtgaacgccgaggaggagcgcatatccctcgccatcttctacaaccccaagggcgacgtccccatctccccggcgccggagctggtcacggccgcgaagctgccaccgctctacccgacgatgaccttcgacgagtacaggctctacgtgaggagtaagggcgccaggggcaaggcgcagatcgaggctctcaagggccaggcatcaccagaaaattaa

SEQ ID NO: 18139 - DNA, 789 bp, Zea mays
  Peptide Sequence Number=SeqID_59918
atgcaggcgctgggcctgggccgcgggtgcagccccctccatgccagccactgccgctgcaccgcttcttcctatcctccggctccaccccgtcctcgcaatcgcaacatcacaaggctaacctgcatcgccgccgtgcgcgccagcgctgcccagtccgcgcagatggaacgcaggcaggaggcgaaggttgtgaagctgcgggcggtggaggccacgcccgagtccttcgcttcgttcgggcaggtcatcggcgcctcccccgacggcgacgagttcggcccccacgacgcccagctcgatctcagcccgcggcatcccaaggtaaacccactgtatccccgcacgaaatccaattcagatcgtgtcatcctgacttcacccgacagagatttaagctttgctctcccttctctccgttacaggttctacatcatgcggttgcagaaccggccgctgaaattctctaccatcacccaccacgccagcgtgacccagtgcctgggctccgtcggcggccaggactggtacctcggggtggccaagccgtcgatcgtggatggggcgtccgagcagagtggcccggagggaaggaagttcttgcagtctgccgcagggcactattacctgcctcctgatccagccgaggtctgcgtgttccgggtttctggccccaagtttctcaagctgaacaaggggacctggcatgccgggcctttgttcaaggcggacgccgttgatttctataatctggaactgagcaacaccaacgtgagtgctaattgctaa

SEQ ID NO: 18140 - DNA, 3354 bp, Zea mays
  Peptide Sequence Number=SeqID_59919
atgggtagagatattaatcaggctaaccatgaattgctacacaatttttggcagatgcttccagttgagttaactcgccttcaatttcttgagaagttatatcttgacaacaataaattgtcagttttgccccctgaagttggtgctttgaagaatatgaaagtgctgtcatttaacaacaacatgctagtttctgtccctgcagtagaactgcggcaatgtgttatgctggaggaattatcattagaacataacaagcttgtccggcctctattggatttcaggtcaatgcccaagctccgaattttgcgcttgtttggaaatcctctagagttccttccagaaattttgccattgcataacctcaggcatgtcacacttgcaaatattagaattgaagcagtggaaagtcttaaatctgtcactgtacagatagaggttgagcaagcatgtcttgctatctcatcactggcatctgatatttcttcagcaatgcagctgattaagtgtgacattatgaagcctattgaagctgtactaaaatcatctgatgaagaagaactagtatcagtattgcaagttgtagtcaccttaactttcgtttctgatcatgttgctcaaaaggtgcaacgtctatctctgtttgcaattggcaatttggctttctgtttggagactcgtcgcatcctcatgcattctgaaagcatgtgtgacctgttaatccgattaactatttcacaagagtgtcgtgtcagcaaggcagctgcgcgcgctttggcaatcctaggggagaatgagaacttacgtcgagcaataagaggaaggccagttgcaaagaagggtctacgcatcctatcaatggatggtggtggcatgaaaggccttgcaactgttcaaatgcttaaacagatagagcaaggaactgggaaacgcatacatgaaatgtttgacctcatatgtggtacatccactggtggcatgcttgcaatggctcttgggatcaagcagatgactttggatcagtgtgaagaaatatacacaaaacttggtgattcccttttgccttttgaagtttccttgccaatgccaatgttgccaactgaacttttaattttcctaggaaaacttgtatttactgaacctatcccaaaggatgaagctgctacgtggaaggagaagattgatcaacttttcaaaagttcctcacaaagttttagagtggttgtacatgggtccaagcacagtgcagatcaatttgagaggttactaaaggaaatgtgcgagaatgaagatggtgaccttctaattgaatctgctgtaaaaggcattccgaaggtctttgctgtatccactttagtcagtgtcattcctgctcaaccgtatatattccgaaactatcagtatcctcctggcactctggaggtatcaccaggaatggcagaaagtccatcaattggtgcaattggcacggctgtttctggtgcaccagttggtattaaacgtggtgccttcatggggagctgcaagcatcgcgtgtgggaagccataagagcatcgtctgcagcaccatattatctggatgatttctctgtagatgcaaatcgttggcaagatggagctattgtagccaacaatcctacaatctttgccattagagaagcacaacttttgtggccagatgcacgaatagattgtctagtctcgataggatgtggctcagttccaactaagagtcgccgaggtggatggcgctacttggacacagggcaagtgttaatagaaagtgcatgctcagtggagagagttgaagaaactttggatacactgataccgatgcttcctgaaatgcaatatttccgctttaatccagtggatgaacggtgtggtatggagttagatgaaactgatcctactatctggctgaagttggaagctgcaactgatgagtacattcagaagaactttctgtctgtcaagaatctttgtgagcttctggtcccaaggtaccaagaggaagaaaagccatcagatatttacaaatctctttcattttcaagactgacatcgttaaatcaaggtttcagtgaaagtaatcctatcttaggatggaggcgtgtggttttacttgtagaggcttcatttagtcctgattttggaaagaaaataaatcatgcacgttcccttgaatccttctgctcccagaatggtattaggttagctctaatgaatagcacttctgggtttgggaagccagccactgcacttcctaccccaataacttctcccttgtttactggaagtttcccatctagtccacttctatatagtccagagggcactcaacggatcagtcgaattgacctagttcctccacttagtttggatggccacccaactacaaagtcctcacctccaacatcaccattgaagtcaagacagccatctgcacatgttcggtcattgtatgataaactgcagaatatgcctcaagttggtgtgatacacttggctcttcaaaatgattcaactggttcagtattgagttggcagaatgatgtatttgtggtcgctgaacccggggaacttgcagacaggtttctgcaatctgtcaaaactatcttgtcaaccttgttgcgtgggtgtaatagaaagggtgcatattccctgtccaagatttcatgtttatctgagttggttgctgaatggccatcttttgaaatcggtgggatacaccaccgctatataggtcgacaaacacaagtaatggaagataaccaagaaattggcgcatatatgtttaggaggacagtgcctgctgttcacatggcacctgaagatgttcgatggatggttggagcatggagggagaggattatcatatgcagtggtaagtatggccttgctcatggcctggtcaaggcattcatggattgtggtgccaaagcagtcatctcgtcgtccatcgagcctccggattccaagacaatagtctaccatgggatggatgtcaatagaagcctagagaatggcaagtttgtcatccgtgatgaagaagcggacgaatcagagcctgaacctgtcagccctataagcgactgggaggacagtgatgtggagaaaggcggcaaccatgacgtggatgatgaggagtacctggctcagttcatgtgcctgatgtatgacaaattgttccgtgaggggtgtgactgtggatacggctctgcagcaagcactccgctcacatcccaagttgaagtacagctgccacttacccaacgttttgtagttagggacattattgacaaaccatacataagtatagcaaaatggacatggataacagggaatgaataa

SEQ ID NO: 18141 - DNA, 567 bp, Zea mays
  Peptide Sequence Number=SeqID_59920
atgtcgtggggcctggcctggaagcgcagctccgagatcttccacctcacgctcaactacggtgactacgacgacaacgacgaccgccaaccctcgtcaccgccccctccggcgtcctcttcccctcccgcctctgcatcgtcgacccctgtatactcctcctcgcccattgccacccgcaacggcgaccttggcttccgcatcgagcttgactggtcggcgggggacgacgaggatcaggtcgcgctccgcctccagtcccagctcatggtcgcgctgcccccgccccacgacgccgtctccgtcgatctgaccccgagggaccacggggaggaggaaggggtgcggatcgaaatgcgtgtggtcaggaggcgggaggcgctccggtccgtgcgcgtgtcgcgggcccctgggtctgcgctgggcagcggcgatggcgcgggggtgctcgcacgcctcatcagatccaacctcgcgcccgcgcctgccgtggatggccccacagccgcctcgggcgtgcccgtgcttgcggatcactggcgccccatcaccatgggtgatgtatag

SEQ ID NO: 18142 - DNA, 2664 bp, Zea mays
  Peptide Sequence Number=SeqID_59921
atgagctcttcggggttcctgtatgcgacctcctgtcccccgtttcatgctctgcggactacgtataaactgaagaatctgttcggacaccaaattaaggtcgttggcaagacgggtactcttttcttggtcctcgggaagatgggctctgctcactttgctgccctgcttctgtgcgcctgcttgttcgtcagtggaaccgtggcagctgaccagaacggtaacctcacaaggccagctgaggtgcgcatcggtgcactgttcacgtttggttcggttatcggaatggcggtgagacctgctatcgagctcgccgttgcggatgtcaatgctgaccctagcttactctgggggacgaaactgagtgttcttatgcaggacaccaattgcagtggctttgttggcaccatagaagcattgcagcttctggctaaagatgtagtcgccgtattaggtccacaatcctcggctgttgctcatgtcatttcccatgctgtcaacgaactccatgtcccacttatctctttcgcggccactgatcctaccctttcttcccttgaatacccgtattttgtgagggctactcagagcgattactaccaaatgggtgctatcgctgccatcattagtcaatatgaatggaaacaagtcattgccatatatgttgatgatgactacggtagaggtggcatcactgcactaggtgatgcccttgcaaaaaggaagtgcaagatatcctacaaagctaagttgccacctggtgctgcaaaaactactatcgaggatatcttgatgcaggtaaatgacatggagtctcgcgtctatgttatccacgttaaccctgactctggtcttaacgtgttctcagctgcaaaatctttgggcatgatgagcagtggctatgtatggattgcaacagactggctttctgcagtgatagattcttctgtgcatggtattcctgatgtgatggaacttacacagggtgttcttgtgcttcggcagcatatagctgattctgatatccagcatgcctttttgtccaagtggaataatctaactaggaatggaagctcttactttatgcatgcttatgactctgtatggctagttgctcatgctgttgagcgctttctgagagaagggaatgccatgtctttttctgctgacccaaaattgcaagctaaaaagggaagtagccttcagttagattctctgaggattttcaacagtggagataaactactggagaaagtgtggagtgcaaacttctcaggggtttctggtccagttcaatttactttggaccgagatttggtacacccagcctacgatattctgaatattggtggtacgggattaagaaccattgggtattggtcaaattcttctggtctctcagctgttgctccagaaaacttaagctcatcagcacgggactcttcagccaacaatgtacaactccgtggtgttatatggcctggtcagacttctgagaaacctcgtggttgggtgttttcgcatcacgggatgcctatgaggatcggggtaccactccgaacgagctacaaagaatttgttatgcaagacgatggtcctgacggagtaaaggggttcgcagttgatgtcttcaaagctgcaataagtttgttgccctacccagtctcatgcaagtttgttttgttcggcgatggtttgaagaatcctagctacagtgaacttgttcagaagtacttcgacgccgcggtaggggacatagctatagtgacgaatagaacaagacttgttgattttacccaaccatatatagaatcgggagagaacacagttagcgcgcttggcagatttgtgctgcttatctggctcttcgctgtgctcattattaactcgagctacacggcaaacctgacatcgcttctcacggttcaggagctgacttcagggatacagggcctcgatagcttgatatctagttcgagtgcgattggctaccaagttggatctttctccagaaactacctcgtggacgagctcagtatcgcagagtcccgtctggttgcactaaacagcccatcggattatgcgagagcgctagagctaggttcaggaaacggtggcgtcgccgcaataatcgacgagctcccgtatgtcgagatcttcctgtcgaaatactgcaagttcaagacggttggtcaggccttcccaagagactcccctctcgccgaggacttgtcgacggcaatcctggcgctatcggagaacggcaagctccagaagatgcacgacgagtggttgagcgggacggagtgcagtgcagacaacggggctgggccgtcgaactccttgagcctgtcgagcttctggggcctcttcctcatatgcggcctcgcatgcttcctcgccctcgtgattttcttcctccggatattctgccagtacagcagatacagtaaccaggtcgaggcgcagttcgctgagccccgggttctgaacaggccggcgaggctaactaccatcaagtcgctgatctctttcgttgataagaaggaggaggaggtgaagaacgctctcaagaagagacccaatggtaccgcatgtcctgaagccgggtctgggctgagcctcaaatttcagcccgtcaggcccccggcacggcccgcatag

SEQ ID NO: 18143 - DNA, 672 bp, Zea mays
  Peptide Sequence Number=SeqID_59922
atgactcttgaattaggaacacagcaatcatgcgcggcaatcgcctgcaatacccttctcttcctgcgtctgcagtcacactacctgtatctgtatgtacggaaactaaccagtcgccagccttctcatctggctgaaacagaccatgccttgcgccgccaccgagctcgtccatggcgagggaggcacggtcaaggtaggcacaacgggcaccatcggctcgctcatgacaagggagctggactccaccaaggtggcggcgccgcaggcagccgcgcggccgcgggcgccccaccgctgaggcgccaaggcggcccggtctcggtgccgtgtggcgccaccactccccggaagctcatgctgaggaagagctcgtccgacgtctccagcagcagcagcagcaacagaaccggccgcgtgggcaccgaagaggcgtgcaagccgaggagggcctcgcggacgaacaccttcgactcaccgatgctgcggcccgacggcggcgcgctggtggaccgggccccgagcgccggcagggcgaagaagaaggggacgagcgtgggcgtgcacggcggcggggtccaggtggtggacgtcaagtgcggcaacccgatgagcatgagcagccggctcaggaagctcggcttctccaagctgtcgcagacgtttgcgtag

SEQ ID NO: 18144 - DNA, 225 bp, Zea mays
  Peptide Sequence Number=SeqID_59923
atggctttcttctaccttgggctcgtgtgcacagggagctcgacgagggagaggggaatgggcgcgcaggggcagggcggacgacgaggcgcagccgtgacggggtggtgcggcacggcgaggctcggccgcggacgactctggcgagcagggctcgacgcggtcggcggcgagatccgggtggctcggtgggcggtttacaaaactgatcggttttggcagtaa

SEQ ID NO: 18145 - DNA, 363 bp, Zea mays
  Peptide Sequence Number=SeqID_59924
atgtccggtgtgcaccggactgtccagtgtgccatcgaagcaacggatacttcggcgccaacggctacctgcagcacattgaatgcgcgccagcgcgcgcagaagtcagagacgcccatgctggcgcaccggacactctacagtgcatgtccggtgcgccaccggacatccaggcgggcccagaagacagagctccaacggtcggaacccaacggctttggtgatgtggctggcgcaccggacacagggccggccctgagggtatgcagggtatgcgaccgctcagggcccccaagattagtagggcccccgtttgtccaaattatgtccaaatacatatatgttacagaaaatttgctctaa

SEQ ID NO: 18146 - DNA, 270 bp, Zea mays
  Peptide Sequence Number=SeqID_59925
atggctgaatgcaccgttgctgaagaagcaagagaggcagctaggatgcggtggcccgaggaaggaggtggaactgggatgtggcggcccgacatgaattcgaacgggaggtgggaggggatgaaaatgcaaggcgtcaatgaagaagtacctctgtacctgcatcgccttcttctcctctgctccgcgcggcacggatccgaaggcgagcgcaacgtctcacaaaggttgatgtacaacgttgattcacgatctgacgacaggacttaa

SEQ ID NO: 18147 - DNA, 585 bp, Zea mays
  Peptide Sequence Number=SeqID_59926
atggcggcacggcgatggatcctgagccacggcgacgaattcccccggctccgagttgtcgcaccccccttaggttgccccaggaacctccaccgagcgccagcgaagctcccgagcacaaaccggagccccgatggcagtgtaggcgtgaatttcgtgttgcggcgcgggtgggtaaagacgctacgaagcccgctccagcagatgggagaagaggacgccaggcacagctacttaaaggcccaaggccagggaccccgaggagctagcacagggtacccgcacgatccggcacggtggttcatggcggagttcgcggctaggaaatcggcgacgccgttcgcccgactgcgcctgacgcggggctgggaaagtggagccggacccagggacccaacagacaacgaccaggggcacgaccgacaacgcgggccccgccaggcggtgggagcacgcactggtccgcccatgccgaaaagctcggcatcagttgcgcgcgattccggttttcacggggaagaaagcttctggcgcggatttgggaaggagataagcctgatgcatggggtccacacagcagagtag

SEQ ID NO: 18148 - DNA, 114 bp, Zea mays
  Peptide Sequence Number=SeqID_59927
atgggaatactgagaagtgtaatgtccttgcaacgatgcacctacgtctacgtaacaagatcttgcatcatgggaaattgggcagtgatagaattttctgcagacttaaaataa

SEQ ID NO: 18149 - DNA, 150 bp, Zea mays
  Peptide Sequence Number=SeqID_59928
atggagttgacaaaatactctgagttgttagacaaagcatatgaatgttaccgatatttgaattatgatagtacaacttgtatcacactttggtgcattaagcattggtgtcatatgttagctgtccggatccatattagcaagttctag

SEQ ID NO: 18150 - DNA, 258 bp, Zea mays
  Peptide Sequence Number=SeqID_59929
atggcgcccagcggaggggttaagaggtgctcgcggttccaatttatgggtaggtcagatagtactgacccactgctggtcaaccgggtggcgcaacagcctgtgccgagtcttgcggcggagaagaggaacagtggagagacccagcccgtgtgtgcgatggcgtggatagggaacctgacgggtagggcccacacagcaaacgcccacgcgcctgttttcacggtttgggccgcgcggactgtaaggaaaggttag

SEQ ID NO: 18151 - DNA, 585 bp, Zea mays
  Peptide Sequence Number=SeqID_59930
atgaacatcttcaagaagaaggtcgaccccaaagaggctctcaggaccagcaaacgtgaaatggcggtcgccacgcggggagttgagagagagattggttccctgcaaatggaggagaaaaagctggttgcagagataaagaagactgccaagactggaaatgaggcaatgtatgctggcacttcaatctctgctggaatgaaaggtgcaagcaaagctatgtcagcaatgaacaagcaaatggaaccggcgaaacagataaaggtcatgaaagaattccagaaacaatcaacacagttggacatgacgcttgagatgatgtctgatgctattgatgaaacacttgacaaagatgaggcggaggaggaaacagaagagcttacaaaccaggtccttgacgagattggcgtcgatgtggcttctcagctctcttcggctcctaaagggcgcatcggagctactaacaagaaagtcgataatggtcaagcacgtcctgcaaggaacgtggcggctcctgctctagaaccctcctctgctgaagttgaggatctggagaggcgactggcatctctgcgccgtacctga

SEQ ID NO: 18152 - DNA, 378 bp, Zea mays
  Peptide Sequence Number=SeqID_59931
atgaagtatctgccgccagcacccgacaatgggattggggtaaatgtaagaattggtgaagttaacttgttggagggctcatccttggcagcacctgacaatgaagaactggctgcaggaatggggcgattgcaagatagcaatgcagttctcacacattttaatgagtattccgaacgatgctttgtagaagtgtctggtgattttgctagtaaaactcgccttctcaagtctatgaaggctgatctcgaccatattttcacaaagctaagagagatgaaagctaggttagcagctacctatccagacgctttccctaatggtgcaatgtcaaagacgatggaccagagaccagaccttgaaagtcctttagattag

SEQ ID NO: 18153 - DNA, 423 bp, Zea mays
  Peptide Sequence Number=SeqID_59932
atgggcttgggggtggataagctcagctacgagatcttctccctgatgaaaagcgagttcctgttcggcgccgggtccgggtgcctgtccccggggccctgcacgccggcccaggtactccttggaggcgggcgcgtgcgggtgctggagatcgacggctgcggcgcgggcaccaaggacgcgctcctggccgccgccgcgctcgcgaggctcgaggccgggctgcgggaccacgccggcgaccccgacgcgcgcgtcgccgacttcttcgacctcgcggcgggcgccggcgcgcatggcgtgctcgcggcgatgctgttcctgaggcgcgccgactgtcggtcgcggtacacagccgacgatgtgctcgcgttcgtgtccgggagcgtcggcgataagcgcgggtggagaggccgccggcgc

SEQ ID NO: 18154 - DNA, 282 bp, Zea mays
  Peptide Sequence Number=SeqID_59933
atgccgaaggccggcagcggggtggcggacgaggaggacttccgcgccgagtggcttcccgaacgcaccgagccgccggggaaggaccactgggtccagaagatgatcctcggcacgcacacctccgataacgagcccaactacctcatgctcgcgcaggtccagctgccccacgaagacaccgaggccgacgtgcgccactacgacgatgagcactccgacaacgggttgttcggcgcggccaccggcgaggtggactttccgaccccgcccttcccataa

SEQ ID NO: 18155 - DNA, 261 bp, Zea mays
  Peptide Sequence Number=SeqID_59934
atggctaagacgaccctcatcgatagggaagtctttgtggtgtccttatcttccaatttagtggagaaggatctctatatcaagtacatgggcactcgcacctgtgagctcgaggagcaagtggagatccgggacaacaccattgaagtcctggggaacctgctccacgacttgcaagtcgagctgtatgaggccagtgcccacatggagatggcatggaggtggatgaggacaatgaggaggagtacccttaggagctag

SEQ ID NO: 18156 - DNA, 450 bp, Zea mays
  Peptide Sequence Number=SeqID_59935
atggcgagggagcaggcgcggcatgggctgggcgagcaaaggggagctgcgcgcgacgcgagcagagggagaaggcgagggcgcgccagtcagggagctccgcgagctgggagatggagctggggagaagctccgcgcgccagggaaatggagatcgaggacgatggcaccatggacgagcgccagggaaggattcggctgggcgcagtgggaggaagagaagataggcacagagaatgcgtgcgcagagaagaagacgcgggggccaagatatcacacatgcgggctctcacgaccttctatgggtttcacccactggagatgttgatgcatcccctcggtctctttcccactgagcgagaggatgatccgatgtggcacgacagggtgcgccatgcgaagcatgtatgggcactacaccctgagcaggcccctcgagtggcggtctag

SEQ ID NO: 18157 - DNA, 276 bp, Zea mays
  Peptide Sequence Number=SeqID_59936
atggggaggctagaaccccgggcagaatgggaatcacggcttgtggttaaagtgtgcgacctctgcagagtgttagaaactggtgtgacactttgtgagtgtctcaacactatcacggccaacggttacaatgagctagtcaacttggccatctctcaagaggactacataatagctcataggatagaaaagaaaaggaaggtgccaatggccagaccctcaacccaacctcaacgtttccgaatcgtgtctaaaacccataacaaaggaccttag

SEQ ID NO: 18158 - DNA, 210 bp, Zea mays
  Peptide Sequence Number=SeqID_59937
atgcatgacctcctacttgcgctggggctgcttggccatttgggttggttgatggggcaggaagacgagctgcctggttgtcctaacactggtactgatttcctccatgttgactgttctgacggtactgctgctgctgctgctgaggaaactgcctctggtactagtgctggtgctgacgttgatgctgatgctggtgaccttgcttga

SEQ ID NO: 18159 - DNA, 354 bp, Zea mays
  Peptide Sequence Number=SeqID_59938
atgatgctggtagactacacaacgggtctcctccagcagccgggatgccctgaggtggtgcagggggcatctctggctgaggtgcaggggaaggtggcctctcagactccacctcccgctgaggcgaggaggaagagtcctgctgctcttgctcctagcgtcggcgctcctgctcctcgtgcaggtgacgatgcagtctctcagactccacctcccgctgaggcgagggggaagagtcctgctgctcttgctcctgctcctagcgtcggccctcttgctcctcgtgcaggagacgatgcagtactccctccaagaggaaaaaccagagatcaaaattataaccatccttgctaa

SEQ ID NO: 18160 - DNA, 186 bp, Zea mays
  Peptide Sequence Number=SeqID_59939
atgtggaaatacatattatcatggttgcaaatgaatctcaagctgatagtgttctttttggaaatgctggtgctgtaccaggttttatctgctggaacatctgtcatcctttcttctatagtttctcctggatttgtgatccacctcaacagaagattagaagataatgacttcagggacagatga

SEQ ID NO: 18161 - DNA, 906 bp, Zea mays
  Peptide Sequence Number=SeqID_59940
atggccatcccagatgccttgtgcattgcatttatcaaagctacacccgtgacatctcgacaccactctcacagcctcctgagagagcagcacatgcttgacgcggtcctcccgcagatcgatggcctatcagaggtagcagcatactatccaactgccaccgatgaggccagcatagggcagttcgaaccagatgggacttccagagaccttagacgagcagactatgatgagtgcttcatggcagccgtagcagctggagggttcatgggtctggatggagccatgtatcagcaaactggagcagttcttccaggctgcagtgcagatgcatcacaacaggaattcttcagcagtgccggcagcaacagtatggtgatgattggcgagtatcagaagatgatggaaggtgaagggctgacaacaacatatgacgacacagattccatgcaagggacatttaacactaatgcagagatgcaggtaggaggaaataatcagcacctgataaacggatgcaacgggaacccagcaacgttacctccgacggaactatcagtactggaagactccacgtttaaggtcgtccgcttgtcgcctgaagagagaaaggaaaagatccataggtacataaagaaacggaacgagagaaatttccgcaaaaaaataaagtacgcatgtagaaaaaccttggcggatagcaggccccgtgtccgtggaaggtttgccaagaatgatgaactctgtgaagcagcgcaatcaggctcccagagtcatgaacattatgaacaaactgaccatatgaaagaagaggacatgctggacacatctgacattcttgcgcaactaaatggattaaatccctacaactacaagtataaatccaccattgaatcatggatatga

SEQ ID NO: 18162 - DNA, 213 bp, Zea mays
  Peptide Sequence Number=SeqID_59941
atgaggaggcggcatctgggtctgatgagcgggaaggggaggaaaactggtggtggtgggctggtgcctggtggcgatgaagccgttggggaaaaggagacgcgccgcgacccacgactgccccaagcccccaacaacatctcaaaacgaaagtacaggcatagcggcgtaaattcagatgcagagatgaaattctacaggccattttgttaa

SEQ ID NO: 18163 - DNA, 1530 bp, Zea mays
  Peptide Sequence Number=SeqID_59942
atgaatgttacccctaagaaggcagaagagactgctttgatatctgatgttgttgcagattcaccatacaagattttcatagcgggcattgctggagtgatctcatctaagatgctaatggagattgttagtgcatttggcccattggctgcataccgctttctttttaacaatgagctcggtggaccctgtgcatttcttgagtacgccgaccgctccgttacttctaaggcatgtgctggcctcaatgggatgatgcttggtggacgtgtactgactgctgtgcatgtgtttcctaatcctcatgtggaggctgctaatgaggcttccccattttatggtattcctgacaatgctaaattgcttctgaaagaaccaacaaaggtcctgcagctaaaaaatgtgtttgaacgagaagagtatatgctactttcaaaatctgagctggaagaaacattggaagatgtacgtgttgaatgtacgagtatggacaagattcacaggtttggagcagtcaaatctgtaaatgtagttgagtatcctgctgctggtgtcagtgctgcagaggagaacatagttgagctcaagattgaatgcactgaattttctgatacggaaaacattgcaaaggctgtatcagaatattctgtaccgattattccgagcatagatgttctaaatcattctgtcgcttcggatactaaagatgtggatcttattccagagagtcaggatcagaaggacaaacacctcccttcaaatgcagcactttgtgagagtgaggcacctgtagcagatgaggacgcagagcttgatgaaactcagtctagagctgctctccccacaccgcaacatgctgaagctgatcatacggaagcagctgtggatgagaataaacatacaggagcagggaaggttactgctactgcaacggacgacgatgcagtagaaaagagtcatggagacccaagaacctcagagacctgcaatcctgctggacctacagacaaagcggagaaacctggaaggtactccgaacaaggcgctggtgatgtgactgaagatcgtccagaaaaagaagcccaagctgttgggaccagcgacactggtttcgtgtttgaacctggttctgtgcttgtggagtttttgcgggaggaggctgcttgcatggccgcacattccttacatgggcgtcgcttcgggaacagaactgtgcatgctggatatgctccgtatgatctctacttgcagaaataccccagatataattgcgatagaagaaacatagggtatgtatacgaggaattgttgaagccaaactgtggaacagacgccgtgcaagagggaggacgatacacactcgctacatggatgctctgctcatctgaaactcttgtgataatggacctcagctcagtgcctcttcctgccagggcatctcaggccttgaatgctgaaaaggtcacggacacagagggtcctgatgctcgtatcgtcagtatgctgcggacgcgtttgctagtgaactaa

SEQ ID NO: 18164 - DNA, 627 bp, Zea mays
  Peptide Sequence Number=SeqID_59943
atgaagcaacccggacccgacgcagcgtgccctgccgccgtccgtcccccttcgtataatggacgtcgacgaggcaccggagcccgttgtatccgcacgcctctgccgccgattccgaaggtaggatttcgccctcccgcgcggcaatggggtgcacgacctcccacgacgccgtcgccgccgctgtcacctcctctaattccccgcccccgtgcgcgccgctcgtccgcgtccgagccctcaccgcggcgcggagaccccgccgcgctgtgccgcgagcgcgtggcactcatccgcgccgcgaccgaccgccggtacgcgctcgccgccgcgcacgctgcctacttccgctcgctcgccgtcgtcggtgacgcgctgcggcgcttcgtggcgtccgcgcccgcgcccgccacgcccgggtcctcgccggtgctcacgcttccgccttcccccgccaagctggtcgctaccgcgtccgccagcctcccgccgtggccgtcgtccaccgtctcgccgctctcgcactccctcgcagagaagcggccaccgctgctcacagctgcattagaatctgatttcgggtccgcgctcacacgtgtcaacgccgcatacgggacgctcccgtaa

SEQ ID NO: 18165 - DNA, 498 bp, Zea mays
  Peptide Sequence Number=SeqID_59944
atgagtgccacgcgctcgcggcacagcgcggcggggtctccgcgccgcggtgagggctcggacgcggacgagcggcgcgcacgggggcggggaattagaggaggtgacagcggcggcgacggcgtcgtgggaggtcgtgcaccccattgccgcgcgggagggcgaaatcctaccttcggaatcggcggcagaggcgtgcggatacaacgggctccgatacaaagaagtttgcagctaagaatcgaggaacaagggaagtgtcttcagatgatgctagagcagcagtgcatacccggggcagaaaaggcgcaggatgcttcaaccgctgcagatgaattgaggtcaccttctgagattccagaatcttctaccgtcaaggaagttccagaaaacagtcaaaatggatcaaccaagcaaacaagcttaaatcaagttgtttttgtccttccgtgggaacagatgaacgctatagttaacttccttgcaaagcctggctag

SEQ ID NO: 18166 - DNA, 1080 bp, Zea mays
  Peptide Sequence Number=SeqID_59945
attggagaccttaagggattttttggattgtttatggtccaaatgcagcaacttcggaaaaaattcaaagtcttggattttacctatggatttgggacagctaatactgcacttatatatcatcatggtaaactcatggccttgtcagaagcagataagccatactacacatccattgcagcaattatgctgatgcagaacatgtgttccacattttcagatgttgttaaggtccttgaagatggagacttgcagactcttggcttgttggattatgacaaaaggttgaaacattcttttactgcccatccaaaggttgacccttttacagatgaaatgttcacattcggatattcacatgaacctccatactgtacataccgtgtgattaacaaagaaggagctatgcttgatcctgtgccaataacaataccggaatctgtaatgatgcatgattttgccatcacagagaattactctatttttatggacctccctttattgttccgaccaaaggaaatggtgaagaacggtgagtttatctacaagtttgatcctacaaagaaaggtcgttttggtattctcccccgctatgcaaaggatgacaaactcatcagatggtttcaactccctaattgtttcatattccataatgctaatgcttgggaagagggtgatgaagttgttctcattacctgccgccttgagaatccagatttggacaaggtgaatggatatcaaagtgacaagctcgaaaacttcgggaatgagctgtacgagatgagattcaacatgaaaacgggtgctgcttcacaaaagcaattgtctgtttctgctgtggattttcctcgtgttaatgagagctatactggcagaaagcagcggtatgtctactgcactatacttgacagcattgcgaaggtgactggcatcataaagtttgatctgcatgctgaaccggaaagtggtgtgaaagaacttgaagtgggaggaaatgtacaaggcatatatgacctgggacctggtagatttggttcagaggcgatttttgttcccaagcatccaggaaatctgaagtaa

SEQ ID NO: 18167 - DNA, 1995 bp, Zea mays
  Peptide Sequence Number=SeqID_59946
atggaggcaacattagcattctcccaggacagcccaccaatttcgataatttgtgcagcaaagtttgtgggtctacccctaaccattgatcctagccttgcttctggcttggcacccaccctacgttttgcttctggagaatcactccatggtgtcaacccaatcctcctgtacattgccagcggtgcaacaattccctgcttctctgggaagaatgatattgagtttgggcatgttgttgaatggcttgaatatgtccccatctttctttcaggctctgaatttgaaaatgcctgcttatttgttgatggattcttggcctcccggacctttctggttggtcatggcctcacaattgctgacattgtagtttggtcaaatcttgctggaattggtcaacgatgggagagtctaaggaaatcaaagaaataccaaaatcttgtccgctggttcaacagcatagattcagaatacagtgacacactgaacgaagttttggctgcatatgttgggaaaagaggaattggaaaatctcctgcaccaagccttaaggaaaaggtacatgtttcaaaggatccatcagctccagaagttgatctccctggtgcaaaagttgggaaagtctgcgttcgttttgccccagaacctagcggttacctccatatcgggcatgcaaaggctgggctattgaacaaatactttgctgaaagatatcaagggcgcctaatagttcgatttgatgatacaaacccttcaaaagaaagtaatgagtttgtcgagaacgttttgaaagatattgagacgttggggatcaaatatgatgctgtcacatacacatctgattatttcccaaagttaatggaaatggctggaagcttgattaaacagggtaaagcatatattgatgacacaccgaaggagcaaatgaggaaagagaggatggatggtattgagtcaaggtgcagaaatagtaccgtggaggaaaatctgtcattatggaacgagatggttaatggaactgaaaggggtatgcagtgctgtgtacggggtaaacttgacatgcaggatcctaacaagtcactcagggatcctgtttactaccgctgtaatattgatcctcaccatcgtgttggttcaaagtacaaggtctatccaacatatgactttgcttgcccatttgttgatgcattggagggggtgacgcatgcccttcggtccagtgaatatcatgacaggaatgcacaatattatcgaatccttcaagacatggggttgaggagagtagaaatttatgaattcagccgattgaatatggtttacactcttctaagcaagcggaagcttctctggtttgtacaaaacaagaaggtcgaagattggactgatccacgttttcctactgtccaagggatagtacgtcgtggcttgaagattgaggcattgatacaatttatactccaacagggtgcttcaaaaaatctgaatctcatggagtgggataaactctggacaatcaacaagaagataattgatccattgtgcgcaaggcatactgctgtgctaaaagaccagcgtgtcatctttactcttacaaatggtccagagaagccatttgttcgaattttaccaaggcataagaaatttgtgggtgctggaaagaaggctacaaccttcgccaacagaatttggttagattatgctgatgcagcagccattagcaagggtgaggaagtaacccttatggattgggggaatgctatcgttaaagagatcaagctagaggaagatgatgacttcctcgagaatctcaacccttgcactcgacgagaaaacccagcccttggagatgcaaacatgatgaacctcaagcgtggagagatcatacagctcgagaggaaaggctactataggtgtgatgccccttttatcagatcgttgaaaccggtggttctgtttgcgatcccagatggccggcagcaggccttgcttaactag

SEQ ID NO: 18168 - DNA, 597 bp, Zea mays
  Peptide Sequence Number=SeqID_59947
atggccgccgcgctcaggtgcccggcctccgtcagggtctcgggccccgccgccgcggggctcgccaaggtgcgccaggcgtccagagtcgtcgcggtgagcggggcccggcagagccgcggcggcggcgtcgccgtgcgggcgtcgctgttctcgcccaagcccgcggcggccaaggacgcgcggccgaccaaggtgtacaacggcagcctggacaagcggctgggcgtcaccgcgggcatctgcgtgctcatccagcacgtccccgaccgcaacggcgaccgctacgaggccatctacagcttctacttcggagactacggccacatctcggtgcagggcccgtacctgacctacgaggagtcgtacctggcggtcaccggcggctccggcgtcttcgagggcgtctacggccaggtcaagctcaaccagatcgtcttccccttcaagatcttctacaccttctacctccggggcatcccggacctgcccagggacctgctctgcacgcccgtcccgccgtcgcccaccgtcgagcccacccccgccgccagggccgccgagccgcacgcatccctcgacaactacaccaactga

SEQ ID NO: 18169 - DNA, 231 bp, Zea mays
  Peptide Sequence Number=SeqID_59948
atgttccttctcctgctcgagagacctgtgaagaaacctgtgaaggactacatgtctgctcgagagaataaccgtcatgtcatgttatttttacatgagagtgagaaacctgtgaagagcactacagtggttgagcaggtggatgagtatgttgatactagggatgagatgccagcagccacttaccaatccatggagatcgagaaggacgctgaagtatttagtctctaa

SEQ ID NO: 18170 - DNA, 342 bp, Zea mays
  Peptide Sequence Number=SeqID_59949
atggtttcttttgagaagagcaaagtagtcgctgccgttagtatgcaagatctcgagcagaaggaagtaggcggagccggaactgaacatgcaactgacaagaagggttatcttgtgaggcttcctaccatcctttcactgtccacgaaatttgttccctctataatgaacatcttgaagagattagctgacgcgggtcaagaacctgcaacagcccccgagaggcaaagagagatgaagatccaaccaaaatccaccaggaacagttcttcatacagcaagcttttggctggcaacctactccaggagttgaggaaaatagggtgcctcaagaacatatga

SEQ ID NO: 18171 - DNA, 120 bp, Zea mays
  Peptide Sequence Number=SeqID_59950
atgccgacatatgggatgccgccttcggactttgcactgccaaatgccaatgttggcgcctccacctctgcctccatcacaattccctatgacaccacccgcttcagttgccgcacctag

SEQ ID NO: 18172 - DNA, 402 bp, Zea mays
  Peptide Sequence Number=SeqID_59951
atgtctcaccggagacaagggggacggccacggcggggctctaggggcttggggaaagactcggggcgcattcagggcgacatggagaactctaccgtgggcacaacgccgacgcgggaggcaccaaagggcgcggaacacggcggggtggctcaacggcggtgcgtatcaacattggctagaaattatgcggacactagggcagtaacaggcgaaataagggcatgggaaggttgctcacctcgagtgcagactcaggggcgcttgagcgacggcggggacaaggggaagcctcgggtcgacggtggcgggctccggctgcacggggaggtctccagtgagcgtggaccgggcgaaatcaaagggtttgggggcggaccgaggggtgtcccgagttggtga

SEQ ID NO: 18173 - DNA, 333 bp, Zea mays
  Peptide Sequence Number=SeqID_59952
atggaaattgtccataaattcctccaatgtgatggcttcagggtcgatatgggtggcaaggcaactgtggcatctgaacttgcacttgaggttgaggtgggggtggctgctgctgcacctgctgcattgctgctaagaaacatctgctcaatagtcatcggggtggcggtggcaactactgctgagttgcctcctcctggggtgcctgctaatcctgctgagcacaccttccacctctgctcctattctcagacatctgtagaaagcacacacacatcggatctgactctacagtctttcagcataagaaaagatatatggaaatcttcatag

SEQ ID NO: 18174 - DNA, 183 bp, Zea mays
  Peptide Sequence Number=SeqID_59953
atgatgcttcatatgggatgggaggttttcaaaagaaaaagacttgatggtggatccatcatggccgtgatggattcaacatcagaaaagatgtacctctgccagattcccaactgggtattaatcgatttggatcgccgttacttctcggacatgaagacttggtcactgacttacacgtag

SEQ ID NO: 18175 - DNA, 825 bp, Zea mays
  Peptide Sequence Number=SeqID_59954
atgacgctcggatcggcggcacacaagatcccgctggaggttgcgcacaccctcgtcgagatcgccgaggtcgcgcgctacgcctaccaccaccgccccggccgccctgcaacccacgagggggacccgactgcgccgcccgcaggggctgatagcagcgggggcaccaacgaggatgccgcgcggctgctggaggagaacgccatgctccgcgcccgactcgcagatgacctcgcgctcctgcgtgagctccacggcgcgccctgcgtctccaaggagtgccctcctgatctatacaaccgattgatggcggcggtcaacaatgttagcttccttgctcatctcgagaaattacaggatgagtcagcacgtcaacttaatgaactaacttctggcgacatgacagaggtggaagctgcagacattccggacaaagcgggtaacgggaagaaaggattgtgggtcttggtcccttgtgatacagctggagctaatttggaggaaattagtgggattgatgatgaaaattatgtcatagtaaatgaagacgatatagtcgatggtattgccgcctttgttgctaggtgcattcttgaagatccaaaatccaagttttctgattacttgatgatatctgttgcaaaggcattagatagcatgaaagctcgatggagatggtcaaccttttgggaggctggacagattatatatatcttggctacttggggcatcacattagcagggttgtacaagagccgccatgtcctgaaggtggcagcaaagggtgctgctgtgtctgccagatttgttatgaaggccatttga

SEQ ID NO: 18176 - DNA, 147 bp, Zea mays
  Peptide Sequence Number=SeqID_59955
atggagctcgacgcaatcacgaaggacagggctcatggagcgatggaaggccatgaaggtgccccggacaagttggcgatcgtggaggaggacgtgcacaacgacaacgtggaactgggcggagctggaggcaccaagggtatttga

SEQ ID NO: 18177 - DNA, 342 bp, Zea mays
  Peptide Sequence Number=SeqID_59956
atgaaggtaccaaatcatgatgagctagcaggaattgacaatgcaaaacagagtctgtgtatgatcaaatctttgttgactgagaagcaaaacgaagaagagattgaacagagaagagaactgaaggatgccattgaaattaagctaagagaggaagctatgataagtagggttctaaaggagaagcttgtgtccaaggaactaggcattgaacaattgcagtcagatctagcagcttcagtcaggtttcaagtggtactgcaaaatgagatccagagatttcaaaatgaactacgttgcctcacaaaagtacaagcacttggaagttcaggtgagaggtga

SEQ ID NO: 18178 - DNA, 663 bp, Zea mays
  Peptide Sequence Number=SeqID_59957
atggcaccggcttttatggagctagcactcgagcaggctaagtttgcgctggataacctcgaggtccctgttgggtgtgtgattgtggaggacgggaaagtgatttcctctgggagcaacaagacgaatgccacccggaatgctaccagacatgctgagatggaagctattgatgtcctgcttcgggagtggcagagcatgggtcttgatcagccacaggtcgcggagaaatttgcaggatgcgacctttatgtcacgtggataagagaagtatactttggttgtgccaacgacaaatttggtggatgtggatcaatcatgtcattgcacaatggtgctgcttcgtcgtcagatgaattatcaggtatgttgcaggacgctatcatgatttctgcaaagttggacctgcttgatctctctgtttttgatgcttttggagccaagcctctacaccaaaaggtttcaaatgcactggagggatcatggctgaagaagcagttgctctttttaggtgtttctacgaacaaggaaacccaaatgccccaaggcctcacagaccagtacgaatgcctcaacaataattggtttgttttcctggactacaatcataacgcaaaaacttcaggagtgcagacatacaaacttactgtaaaacttgtttag

SEQ ID NO: 18179 - DNA, 120 bp, Zea mays
  Peptide Sequence Number=SeqID_59958
atggagcccctggagctcttcttcgccatgttccagatgaagctcgtcgtcatcctcttctacctcgtcatcctcctcttcgccatggccttctccggccgggcgcccagcagcttctag

SEQ ID NO: 18180 - DNA, 747 bp, Zea mays
  Peptide Sequence Number=SeqID_59959
atggcggccgcgtcgctgctgagccgggcgcggtggctcctggtggagcacccggccgtggcctcgttccgctggcagccaggccgcacggtcggcgcgacgccgtccttcgcggccgccgtcatctgcggctacctcgccgcggtgctcgtcctccgccgcctcgtcctgccccgcctcccggcgctgcctccgccggcgctccgcgcgctctccgccgcccacaacgcggtcctgctggcgctctccgccgccatggccggcgggtgcgcgctgtcgacggccgcgacggcgccggcgccgcggtgtacgagcttcggcgacacgctgctcatcatgctcgcccgccgcccgctcacgctgctccacgtgtaccaccacgcgctcgtcgtggccatgtgctacctctggctcgccacccggcagtcgctgatgcccgtcgcgctcgtcaccaacgccggcgtgcacgtcgtgatgtactcctactacctctcctgcagcgtcggcctgcgctggcccgggcggtggaagcgcgccgtcacggagctgcagatcgcgcagttcctcttcagcttcgcggcctccgtggtgatgctgtggctccacttcgccgctggcggctgcgaggggatggccggctgggtgttcaacgccgtcttcaacgcgtcgctgctcgcgctcttcctcaacttccacggcgccgcctacaaaggcgccgccaaggccaacaagggtaaagcggaatga

SEQ ID NO: 18181 - DNA, 510 bp, Zea mays
  Peptide Sequence Number=SeqID_59960
atgtcgcagcacgggcacactaccgaccaaggaatggacaggcacgccgcctacaagatgcgccgcgcggcccagaggccttacgtcaggctccgcccgccggctcacgtcacgggcagtgagccacgtggcagcattgggtcttcgcctgagcagggagcgaaggtgtactgggtatggtccggacacgtgatggcagtggacccccgcctggccttaagcaaggcctgggtattctttttcccaaaatcccgggaccctgctgagagcggcctggaccacacactgagaggtccgggacccatcccgggggggtccggtactgtcccatgggggtccaaatccatcgctgataccttggagtgtattaccttctccggccacgtggcggccccggagccgtccacgtggtgggggcgggtgctgcttatcgcgtgtctagagatagacatgcttgattggaagatgatggttgatcttgtgcctatggaggctcttcggattccttag

SEQ ID NO: 18182 - DNA, 447 bp, Zea mays
  Peptide Sequence Number=SeqID_59961
atgtttgaagaagatcacgcctataattgggacgaggaggagaagaccgacgccaatgccccattcggtgccgagttcgtgccaatcgggaacaccacccaactggacatggatgacttgacgaactcgtcgagctcgttgtcctcgtcaccaagcacgtcgaagagtacatgttacggggctcccactcatttcgggggcccatgggatgttcagggtgagcagcaggtgcttacacccggtgccgtgggtgttgagtacgccacaccccctgatctagatgttgatcatgatgatgacgcgccacagagatatcgtatgctggagagtgtcctcgtggcagagaatgtcccagaacaaggtggtgatgttgcgattgaagaattactgatagccattggagaggagccatatttagtggatgaagctctgaagatcactgattag

SEQ ID NO: 18183 - DNA, 114 bp, Zea mays
  Peptide Sequence Number=SeqID_59962
atgaagccccattccatatctccacagggcagcgactctgcgtgcgcacctcccgcctccggtgggccgtcgcgccgcaccccggcggctgcactgctcgccgtgggcgggtag

SEQ ID NO: 18184 - DNA, 1704 bp, Zea mays
  Peptide Sequence Number=SeqID_59963
atgacgaggatcttcgtgcagcgcgggaccgccggctcctcgtccagctccggccgctcggacacgcagccagtgcagccggcagcagctgcccgggaggaggagttgccgctgcaacctcaaccacagctgccggagctattggccatagatgatacaactgataatttaaatgagggcagcgagaatatcagcaataagcctttgaggacggatgacaccatttcagagagctcaagctccgcagaggagagggctgccagggagaagcctcttaaggatgactctaatgtaatcaaccccactttcttagtagaggaacctgtagggatccagatccctgatcagattgagcatgaaaattctgtgctgtcagtcactggttcatcacagatggcaggtgcagcatcgcacccaccaccaccgccagctccacctccaaaaccattgttggggaataatggcttgcggagaatggggcctggaagttcgaatagtgtgcggattggatcttcaagaaggccagtagcttggccactagtggcagcccggacatctgcttcaggttctcggccttcttcacctaggtcacttgttgatggggaaggttacaacagtgctgatgaacagggcccctgttatgccttgagttatgatgattcggaaagggagcgtatgtttgaccatgacctaaggcgagtgaaagggttggaaatcagaaagatggccgaagatgggaactgtctattcagagctgttgctgatcaagtttatggagacgcagaagcttatgacatggctaggcagatgtgtgttgattatatggtcacaagggacatacaaggggatatcccttggtatatgtttcttgcggacgatgtagtgctagttgatgaaagctggataggagaaagggaacgggatcatttctctcagttcataactgaaattgaaagttttacattatactgtaagaggaaaaggagagataaggtttatggcaacaatgttgagatccaggcatttgcagagatgtacaatcgtcccattcacatatattcctacagtacagagcccattaatatttttcaaggaagctataacacagacgttcctccaattagattaagttaccatcatggtaatcattacaattcagtggttgatccccgacggcagacagttggggcaggacttggatttagctcccttagagggacaaataatgttgacagggaccaggtgaaggctgcaataaaagctcagcaagaccagcaaattgagaatgcacttttagcagaagggcgattctactctgatctggagttaacagagagggaaatagaacggatggtgatggagtcctctcgttcagaatatctcgccaaggagaaaaagcttaacattcgggagtcatcgacatcaagggcagagccatcttcatccgccgcaattagtggttcctcccgttcagttgctggagctgatagaggcaaagaggactactttgtgcttccagatactgcactgactcgcagcatgcagttgctcctcgcaatgggcttcagctacatccaggtcatggaggcctacagcatattcggcgaggacgtggactcgatggtctgctacctgttggagacaggaggcaccggagcctcagcgggcggtagcaatcgccggaaaggaaaggctgctgagtga

SEQ ID NO: 18185 - DNA, 870 bp, Zea mays
  Peptide Sequence Number=SeqID_59964
atggtgactactacgatcgaggacctccacggcgacgtgctgggctgcgcgctgcggcggctggacgggcggtcgcttgcggcggccagctgcgccacggtcgcgctccgggcgctggccacggacccggagacgtggcgcgcgctctgcgtcgccgagtggccgtcgctggcgctggcgctggcggcgcagcgccggctgctcgcggcggtcccgccgcagcggctcttcgccgacgcgcacccgttcccgtccgcggacaccgggggagccggaggtcccgaccccgaccccgtccccgccggggagctgacgcccgcgtcctcgccgtggttcctcggctcgccgttccgcgtggaggccgtggagcggaagaggccggcctccgccgccgcggtgccctcgccggcggagctcgagctgagctgggtggtcgtggacccggcccgcggccgcgcggtcaacgtctccagccggcgccccgtggcggtggcccggcactggtacacgggcgagacgctggcgcggttcgccgtggtgctgggagggtgcaagttcgaggccaccgtcgcctgctccgagggggcggatgggcacgtcagcgaggtcagcctggccgtggaggacgccgacggcgccgccgtcagcggcgagggcacgctgcggctcctcgccgcggcgatggaggccccccggaagggaggggcgcgggagccggaggaggcccggaggcggtacctcgacttcgtgaagcgcaagaaggggaggaaggagagcaaggcgcgccgcgaggcgctcgtggacctgtgctgctccgctgccagcgccgtcgtcgtgctcacctgcctcgccgctgtcgcgctccggtga

SEQ ID NO: 18186 - DNA, 240 bp, Zea mays
  Peptide Sequence Number=SeqID_59965
atggcggacaacataggttttctgaacctaaaggccatgttatcaaccatgtcctccgaagatttctcaaactgcctcgcctacacccatctaaagggcatgttcttgagcaaggccctggagaatagaaaaaaaatgtcgagggcgaagttgcccaaaggggaattgttaagcttagatccaaagtttctgagcttcggtataactgcggggaaaaggaaaaattctttaaaattctag

SEQ ID NO: 18187 - DNA, 276 bp, Zea mays
  Peptide Sequence Number=SeqID_59966
atgaccatgcctcactatttcatcaagatgaagggatttgccaatgagctcgcttcatccggtaaggatgatgtcgaggcagaggaaaccaaggatggtgcccaatctctagacacggttgaggctgtggtcacaaccagtgagacattagttacagaagtgatcagatcatgtgtcatatttgtaacaagctcaatcgtcgagcttctaagtgttggtacttgtatggtgatggttatcaaccgaaagatagatttgttggagggcactacataa

SEQ ID NO: 18188 - DNA, 1101 bp, Zea mays
  Peptide Sequence Number=SeqID_59967
atggctgctgatgctattgtaacagaatctggagctttacatgttgctggggtaccccttgttaatccatccactgtagttgtttgggaagtgatgccaggtcttggaaatggtattcaggcaactgcaaagataaatgcagcaagttctgttcctccatctctgaatcccccttcatggccgggttttgctccactagcagcctacctattttctttgcaagattatcttgtttctgagggtgcacagacaaaaaagctgacagacaataatgagactactgaggctgcatcaattcattgttgtccagtttctaatttttcagcttatgtcagtccagaagcagctgcacagtcagctactactaccacctgggggtctggggtcacctcagttgcttttgatccgactcgtggaggatcggtcattacagttgtaatagttgaagggcagtacatgtctccttatgaccctgatgaaggaccttctatcaccggatggagggtgcaatgctgggaatcttcgtgccaacctgttgttcttcatccaatatttggaagccctactagcttaggtgggcagcctcccatgcaaactgtttggtccactagagttaataaaagcattccaccaacggaggatcttaaaaatcctcaaacatatgttccgatgccaacgacatcagatgaacggagctcctctgagtgcagtgttgacagggcgaacagactcagctttgacccttacgatcttccaaatgatgttcgacaactagctcaaatagtttattctgctcatggtggtgaagttgctgttgctttcctccgtggaggagtgcacattttctcaggtccaaattttgatcaggttgacagctaccatgtcaatgttggctctgctattgctccaccagccttttcatcaagcagttgctgcttagcatcagtttggcatgacacgctcaaagatcgaaccatattgaagataatacgtgtgcttcctcctgcaattcttagcacacaaacaaagatcagctcagcagcatgggaacgtgcaatagcagataggtatgttaccaaatttatagacgctgattcctaa

SEQ ID NO: 18189 - DNA, 270 bp, Zea mays
  Peptide Sequence Number=SeqID_59968
atggcgagctcgtcggcgctcgtcgtccgctccatccctctccctctcccgggcacctataaaaggaaccgcccgagccccgtcctcaccacactagctccggccaactcctccgccttcccccgagcgaatcaagctagcgccgccgtgcttcccccatcgctccgggtcacaaggcgccccttttttccccctattgcacccggcaacctcaccggcgacatcaccgccgtggacacccgccaccgcgccgcggaccggccgccatag

SEQ ID NO: 18190 - DNA, 1557 bp, Zea mays
  Peptide Sequence Number=SeqID_59969
atgggggccaggcgcgcgtgtgtgcggcactactgtttggtgctgaaccttgataggattaagtgtaggttgttggaaggaacaaatgcccaagatgtacgggcacttgtgttggacatgcaagcaagattacttctggatatgctaggcaaaggaatcgagtctgcccttacaaatccatcaactctgctacctgagccctggcaagcttccagtgatatgttatccagcatcgatgctgacaaaatgactgttgagccagctctgcttccaaacatccagggttacgttgatgctgttcttgatttagcatcacatttcataactcgcttgcggcgttatgcgagtttctgtcgaactctggcgagccatgtggggccatcttctaccacaggcacttctagaaatatggttacaagtccaacaaacagttctccttcgccatcaaataatcaaggtaatcaagggggatcaacatctgcaacagggaactcacaaatgcaggagtgggtccaaggtgcaattgctaagattagtaacaattctgatggtgctgccactgcaacacagaatccaatgagcacgaggacatcatttatgcccatcagcattaatacgggcactttccctggcacacctgctattatgtcaattactgctattttgtctgcttttccgaagaaggcaatcaccaagaaaatacaacacatgatgaatgctaagacagaagataacagttcgacagtaagatctggtctaggggctgccaaagtagaagaaggtcactctgcgcgtggtggacaatttgttcttggtggtgcaaagggtcctgaagaaaatccaattggcaaatctgttagaataggttctggcaacgctgggcaaggttatacttcagatgaggtcaaggtcctttttcttatactggttgacctatgtcgaaggacatctaccttgccgcatccattgcctgcctctcaggttggttccagtagcattatcataaggctgcactacattgacggcaactacacagtgctccctgaggtagtggaagcgtctcttggtccccatatgcagaatatgcctcgtccacgaggagctgatgctgctggacttctacttcgagaattagaactgcaacctcctgcggaagaatggcatagacgcaacatgtttggtggaccctggtcagaaccagatgattttggtccattggacaatatgcctcgtctaaaaattagtggttccatcaactctcatttgtctgacatggaagtggatgctgtcagttccattgggattgatctttggccaagaaagcgtaggttatctgaaagagatgctgcatttggtctgaaaacatctgtaggtcttggaggttatctaggtgtcatgggatctcgaagagatgttgtcacggctgtgtggagaacaggtctcgatggtgattggtacaagtttttggaccttagttttgtgggaccattcaaaatcaaaaaggctccaagctcctcaaagtgggattttggctcagatgtttttcttggcttttaa

SEQ ID NO: 18191 - DNA, 210 bp, Zea mays
  Peptide Sequence Number=SeqID_59970
atggcgatgtgcccctaccaggggtggaagtacatcgtccacgagaccaatcccttatcgttggtgcctctggcacctagaggaggcatggcaggggtgttggtagagccaccacgaccgccattgtggtcgttccgttcgtcgttgtcgttgttgcgaggattgttccccttgctacggccgttgccgaaattggtgctgccatcatag

SEQ ID NO: 18192 - DNA, 348 bp, Zea mays
  Peptide Sequence Number=SeqID_59971
atggccacctcaaataccaccgtgctctgccaggggtcaccgcatgcgaccccgggcatgacggagcttgggtgggagcatacggtggtaacctcaagcaaagtgcttgagactcccagtgccttcttcatgatggcgttggcacgactcttgtggtatgttagcacagactcacttcgaatggtgagctacgaggggttcgagggtggatctgagagacctctcggtactgcttccacgatctgggcatggctcggtgatgtcccatcgtgtcgacatggcttgatagtactaggtcggctctccctgagagtcggctatcgtcttgctgggttgcttgatgggtag

SEQ ID NO: 18193 - DNA, 1866 bp, Zea mays
  Peptide Sequence Number=SeqID_59972
atgcgggaagcctcggtctacaccgggcgcacgcgcaacaccgcgcctgcggccccgggccgcctcggcaacgagcaccatcatcgcgaccgtcgggcccacctcgacgagagggtgcgccgaggctaccaccccaggcgtgggggacgctacgacagcggggaggatcggagtccctcgcccgaaccgcccggtccgcaggccttcagccgggccatccgacgggcaccgttcccgacccggttccgacccccgactactatcacaaagtactcgggggagacgagaccggaactgtggctcgcggactaccgtctggcctgccaactaggtggaacggacgatgacaacctcatcatccgcaacctccccctgttcctctccgacaccgctcgcgcctggttggagcacctgcctccggggcagatctccaactgggacgacctagtccaagctttcaccggcaatttccagggcacctgccggcagcagccgggagagtctctccgggactacatccggcgattctcgaagcagcgcaccgagctgcccaacatcaccgactcggatgtcatcggcgcgttcctcgccggcaccacctgccgcgacctggtgagcaagttgggtcgcaagacccccaccagggcgagcgagctgatggacatcgccaccaagttcgcctccggccaggaggcggtcgaggctatcttccgaaaggacaagcagccccagggccgcccatcggaagatgctcccgaggcgtcgactcagcgcggcgccaagaagaaaggcaagaagaagtcgcaagcgaaacgcgacgccgccgacgcggaccttgtcgccgccgccgagtacaagaaccctcggaaaccccccggaggtgccaacctcttcgacaagatgctcaaggagccgtgcccctatcaccaggggcccgtcaagcacacccttgaggagtgcgtcatgcttcggcgccacttccacagggccgggccacccgcggagggtggcagggcccgcgacgacgacaagaaggaagatcaccaagcaggagagttccccgaggtccgcgactgcttcatgatctacggtgggcaagcggcgaatgcctcggctcggcaccgcaagcaagagcgccgggaggtctgcatggtgaaggtggcggcgccagtctacctagactggtccgacaagcccatcaccttcgaccaagccgacaaccccgaccacgtgtcgagcccggggaaatacccgctcgtcgtcgaccccgtcatcggcgacgtcaggctcaccaaggtcctcatggacagaggcagcagcctcaacatcatctacaccgagaccctcgggctcctgcgtgtcgatctgtcctccgtccgagcaggcgctgcgcccttccatgggatcattcccgggaagcgcgtccagcccctcggacgactcgaccttcccgtctgcttcggaacaccctccaactttcgaagggagaccctgacgttcgaggtggtcgggttccgaggaacctaccacgcggtactgggaaggccatgctatgcgaagttcatggccgtccccaactacacctacctgcagctcaagatgccgggccccaacgaggtcatcaccgtcggccccacgtacaaacacgcgttcgaatgcgacgtggagtgcgtggagtacgccgaggccctcgccgagtccgaggccctcatcgccgacttggaaagcctctctaaggaggtgccagacgtgaaacgtcatgccggcaacttcgagccagtggagacggttaaggccgtccccctcgaccccagcggcgatgcctccaagcagatctggatcggctccgggctcgatcccaaatag

SEQ ID NO: 18194 - DNA, 270 bp, Zea mays
  Peptide Sequence Number=SeqID_59973
atggaaaaaaggaagaccaaaagggacaaggcttaccgggaggagcgtgtccatctgaatggcatcttctacgatggaggaaccgccgccgaaagcgatgacaatggtcctccctcacgacgctcgaccagtgctacggcggcacctgattatcctgaaataccctacgtcacaatgttccacgttgagttctgcaacctagcccacaggcatataccggacaagccaacatcaatgcttcctctgtttctcgatgcccgcagcccgtaa

SEQ ID NO: 18195 - DNA, 471 bp, Zea mays
  Peptide Sequence Number=SeqID_59974
atggaagttgttgaaactaccgaagctaccccatcagctttggagataatacctgttggggctaccgaagctgccaccgctcagctagagaaatcagaaccaaagagttctaggaccaagcagcaaccgaagctacagagtcttgcagcaatggcagggttgtcaaagacatctaccgttccagcggcaactcctaggaaagagaggagaatagccagcgttttggatgttgttctgaagccttcaaaggtgtcgactcctgcttctactaaggtttccgaggacaaaattgaagaattgggagaagttgctgctgcaagcgcttctccttcccgcgctgagggtggaccttcgaaaactaggtcagtggagcaagtaaaggaaaatctactagagaagctagagcaaggtcttattcttagcaaggctttgaatgctcaaaagatgctgaagatgagggcacccggatag

SEQ ID NO: 18196 - DNA, 519 bp, Zea mays
  Peptide Sequence Number=SeqID_59975
atggcgggcggcgaaggaacctacgacgagctgctcaaggggcgccaggagaaaacaagccggttcggctccaccttggatgcagatcaaaggcagacgaccttgcaaatacaagcaatgagagttgtcaaatccttggaaccctactcacctggagcgccgagcgccgccacaagttttgctctgcgtctcccaagttcccgatctcggccgcgcgagtcagtgcaccccgtgcgtgatcaacaggtccttcctgctgctgggctgtctaccccccgcggtgcggcgaaaggaacagtgaaaaaggaagaatctctgatcgaggttcctgtccggtttgcagaatcttggcggccagccatatatgggtgtactgctaggttccgggaggttcttggcgcgacggcctcccctcgctgctctcgaggctccccggacaaaagcggcagcgacaaaggacgcaactgcctgcttgatgcgatctgtttatctgatcgcgtagggcctgctaagatttga

SEQ ID NO: 18197 - DNA, 918 bp, Zea mays
  Peptide Sequence Number=SeqID_59976
atggctccgcccgccgcacccaccgcgctgcaccaccgcacgcccctcctcctcccccgccgcaccgtcgccttgggtgccaccgccaccgcgcgcgccgccagggccgcttctctcgccgtcagggcccagccggacaccaccgccgcagccgtctccacctccgcgcctgagccggcgcccgagttcaagcctccgccggggttcaaggcgcccgagcccaagaggtacgaggtcaagtccggccaggtgggcagcgtcctcggcgcctcgctcgccatcccccttcgcctcggcaccggcgtcttcgtcctcgggtactcgccatctcttgtttctccatcagagataccatcagaccagtatgcactggaatttggagcttggaaggtgaaagaggaatcaaaaataggacagtgcaaacgaccagaaaagcctatcgagatatatgaatttgaaggttgtccattttgtcggaaggtcagagagatggtaacagtcttggacctagatgtattattttacccctgtcctcaaaaaggcccaacattccgacctaaagtcctcgaaatgggtggaaagaaacaattcccttacatggtagatccaaacacaggggtcgccatgtatgaatccgatgacatcataaaatatctagctgatacatatggcgatggaactgttccaattatgctatcacttggtctgttgacagcaattacagcagggcttgctactcttggtcgtattggaaagggaaattcctacattgcttcaaaagtcccaccgcagcccatagagatatgggcatgtgaggcgccgtacatcgaagatcctaacacgggagtccagatgtttgaaagcgctgaaatcatagactacctgaaggcaacatatgccctgtacccaagctcgtag

SEQ ID NO: 18198 - DNA, 432 bp, Zea mays
  Peptide Sequence Number=SeqID_59977
atggatgaagacgtcacggtagcgcctgagcgcgaggagcgcgcccggagctccagcaccgcctcggcccgcggcgtcatctccagggcgaccgtgactaggccgagcgccgccgccgccgcgtcgtcggtgtcctgcgcggccgcagcgagagccgcccgcgcatttccgaggcaccaagtccatgtgcgacaggtgttcgacacgtatctcggcgaggcgcgggcggctctcactgcggccacacaggacaccgacgatgcggcggcggcggcactcagcctggtcacggccgccctggagatgtcgccgcgggccgaggtgacgctggagctccgggcgcacgctcctcgtgctcaggcgctatcacgacgtcttcatccatggctggagatcgacgaggctcgtcgtcgttgcgaccggactggatga

SEQ ID NO: 18199 - DNA, 1149 bp, Zea mays
  Peptide Sequence Number=SeqID_59978
atggagaagagaaatcggattctcgacctgcaggacctcctctctgacgcggacttcggcccactactcgcccgacagctactgtctccgttcgtgcggcggccacctacctacctcgtagcaagacaccatatcttaagtgctgccatggatttgcacctagagctctacattggtcgccggcgccgcggcggaggcaagagtcagaagtaccctctcccatgggaggcaccgtgttccagctgctccacttctgtcggcttgatggagctcctgatggatggagaggagaggagctcgcccaacagccacaagttttgctctgcgtctcccaagttcccgatctcgtacccgcgcgagtcagtgcaccccgtgcgtgatcaacaggtccttcctgctgccgcggccgcctcccacttcgactgctcccgcacctttcgttcacgcaagcgcaacctgcttctcccgctggctgtctcggatcggaccccctccctcctgccacgcatcctccccgcccacgagcctcccccgcaaccggataataaggaagaggaagagaaaccgtgcggttccgggaggttcttggcacgacggcctcccctcgcgctcgtccctcgctgctctcgaggctccccggacaaaagcggcagcgacaaagataattggtccacggtggtggccaggactttctttccctgtgtgaatggaatagaagatgggggtacaatacattctgggaccttttcaaacctgagagacgagctccttgctccccaaggaagtttgtcacacacactctcccccatcgccgcatgtccccagcatctcatctgctctgcggctataaaagtgagcaagccttcgcctcctgccgtcactcactctgacatcagacatcagacacaacacactcagcagacggctcttcagtcccttgattcccgtgccttcctgagcaagaagccacccgcggtggcgatggagcggcaggaggcggcgaggcggaccctgccgcggcgcgggcagatcaagctgcgcatcttcgcgagcctgttccggtgcttcatcacccccgaggcacccgcgcgcaaggaaggcgacaagaacagagatggcggcggccgcggcgtttccccaggtggctga

SEQ ID NO: 18200 - DNA, 234 bp, Zea mays
  Peptide Sequence Number=SeqID_59979
atgggggagagtgtgtgtgacaaacttccttggggagcaaggagctcgtctctcagagtgaagtttgaaatagttatgtggtggaagataggattggtcacgtacttgtccggtgagaaatcagaaaacagggtcctcttccctttcttcttgaaggcagaccatgccttgtcccaatcagcagaggtttcacctgacgaggaagagaagagatggttacttttaccgtcataa

SEQ ID NO: 18201 - DNA, 2235 bp, Zea mays
  Peptide Sequence Number=SeqID_59980
atgtcgtcgcggctggacaaggagaaggcggtgaacgtgcaggtcctcctccgctgcaggccgttcagcgacgatgaggtccgaagcaacgcgccgcaggtcatcacctgcaacgactaccagcgggaggtcgccgtcacgcagagcatcgccgggaagcagttcgaccgggtcttcaccttcgacaagtataagtgctctgtgctaaaagcagtgcaagacagtgatgcaatcatggtttttggaccgacagcaaagcagaaggacttgtatgaccaagccattattcctatcgtcaatgagagtgggccaaaaggtcaattacctgctgacgctggagttatacctcgggcagtgaagcaaatctttgatactttggagaggcagaacaccgagtacagtgttaaggtcacgtttcttgagctgtacaatgaggaaattacagatcttcttgcacctgaagagatatctaaggccacatttgaggatagacagaagaaaaccttacctcttatggaggatgggaagggcggagttcttgttcgaggtctagaggaagaaattgtcacgaatgcaagtgaaatattctctctattagaaagggggtctgcaaagcgccgcactgcagagacattactgaacaagcaatccagtcgatcgcactccctgttctcaatcactattcacataaaagaggcaacccctgaaggagaagaactgataaaatgtggaaaactgaatctagttgacttggctgggtctgagaacatctcccgttctggagctaaggagggccgcgcaagggaggctggcgaaatcaataaaagcttgcttactctgggccgtgtgattacggcactggtagaacaccttggtcatgttccttacagggacagcaaactcacaagattgctgcgtgattcattaggaggaagaacaaagacttgcattattgctactgtttcaccctccgtgcattgcctcgaagaaaccttgagtactttggattatgcacaccgggcaaagagcattaagaacagacctgaggtaaatcagaaaatgatgaaatcaacattaattaaagatctttatggtgaaattgaccgacttaaggcagaggtatacgctgctcgagaaaaagttggagtgtacattcctaaagacagatatcagcaggaggaaaatgagcgaaaggcaatggctgatcaaatagaacaaatgaatgcttctttggaagcaaaccagaagctaattagtgacctgcaagaaaagtatgattctgagcttcgacattctgctgatttgagcaaaaagcttgaagtcacggagaaatgtatggaccacacaagcaacctactctctgcgacaaaagaagatctgaaacaggcacagtataatctaaaggagaaagattatataatttccgagcagaaaaaagcagaaaatgctttaacacaccaagcttgtgtgctgagatcagacttggaaaaatatactcgcgataatacttcactgtattcaaaaattgctagaggagacaagctaagtgcaacaaacaggtcggtcgtgaatacattccaaactgaccttgcttcgaagttggatactctttccaatacactcaatgcatcaatagaccagcaaaatatgcacctaaaagctgtggaggatttatgccaatcctgtgttgattcccatgacagggctacttctgagctgaaaaagaagattttggcttcaaaatcattatacatgtcacatatggaagctttccaaaatgttgtcctcctacataaagcaagtgcaaatgccacactagaagatatatcatcactgtctgctacaagctgctgtagtcttgatcagctactagtttgtgttgagggagaggctcaaaatatatttaatgacatccataaattgttaaccacacaccgaagcgaaatgacacacttcactcaacaattaagggagagtttccaaataagcttggacaggacaaaagaaatgtctacctatattattgggctctttgacaagtatgttgaggagacctccaaattgcagagtcactcaaataatactcatgaagcacaaatgaaaagcattgaagattttcagatggtttacgaggagcaatcaaaatcagaggagcagaagcttctagcggacattagcagtttagtgtctaaacatattactcgacagagagagttggtgggtgctttctcatga

SEQ ID NO: 18202 - DNA, 648 bp, Zea mays
  Peptide Sequence Number=SeqID_59981
atgggagtccacttctgtcggcttgatggagcacctgatggatggagaggagctcgcccaacagccacaagttttgctctgcgtctcccaagttcccgatctcggccgcgcgagtcagtgcaccccgtgcgtgatcaacaggtccttcctgctgccgcggccgcctcccacttcgactgctcccgcacctttcgttcacgcaagcgcaacctgcttctcccgctggctgtctcggacaccccctccctcctgccacgcatcctccccgcccacgagtctcccccgcaaccggataataaggaagaggaagagaaaccgtgcggttcttggcgcgacggcctcccctcgcgctcgtccctcgctgctctcgaggctccccggacaaaagcggcagcgacaaagacacaacacactcagcagatggctcttcagtcccctgattcccgtgccttcctgagcaagaagccacccgcggcggcaatggagcggcaggaggcggcgaggcggaccctgccgcggcacgggcagatcaagctgcgcatcttcgcgagcctgttccggtgcttcatcacccccgaggcacccgcgcgcaaggaaggcgacaagaacagagatggcggcggccgccgcgtttccccaggaggctga

SEQ ID NO: 18203 - DNA, 287 bp, Zea mays
  Peptide Sequence Number=SeqID_59982
gggatgaggactatgatcaggatgaagtggcccaaatagagcaattcaactctcaagcaacaacaatgatcctcgcctgtctaagtagagaggagtataacaatgtacaagggttaaagatcgtcaaggagatttgggatgtactcaaaatcgcgcacgagggagacgagctcatcaagatcaacaagcgggaaacgcccaaccaccccacattcaagtcatccaagttttccgctttactcccacttacaagagctaggcattcaatacaagacacacccaagtga

SEQ ID NO: 18204 - DNA, 204 bp, Zea mays
  Peptide Sequence Number=SeqID_59983
gcaattacagcagggcttgctactcttggtcgtattggaaagggaaattcctacattgcttcaaaagtcccaccgcagcccatagagatatgggcatgtgaggcgccgtacatcgaagatcctaacacgggagtccagatgtttgaaagcgctgaaatcatagactacctgaaggcaacatatgccctgtacccaagctcgtag

SEQ ID NO: 18205 - DNA, 225 bp, Zea mays
  Peptide Sequence Number=SeqID_59984
atggagcggcaggaggcggcgaggcggaccctgccgcggcgcgggcagatcaagctgcgcatcttcgcgagcctgttccggtgcttcatcacccccgaggcacccgcgcgcaaggaaggcgacaagaacagagatggcggcggccgccgcgtttccccaggcttagctgcagtacagcctgcggaagagtggttcaatttttctgagaatttgtttcctgaatga

SEQ ID NO: 18206 - DNA, 201 bp, Zea mays
  Peptide Sequence Number=SeqID_59985
atgaagttacctgacccctcaacggaagctttgttgtcgtcaactagccgaatttcacgtcattgttcttctacgccgccggtgcacgtggccagatcgattctgacaaccttcgactacgactcctacctcaccgtgaccatcgtgccaccctcgacctcgccagacgcttccccggatatctatcgctgccggtgctaa

SEQ ID NO: 18207 - DNA, 435 bp, Zea mays
  Peptide Sequence Number=SeqID_59986
atgggcaagagtaacaaacgcaagcgcgagccgactcctccatcggaggacttcggcgactcggaatactcggaggaggagttctccttcgagtccgaggggtctccggctcccgtctctcccccagcgtcgtctgacgattcagatgactcccaggggattgtcgcggagggctcagatgagtcggagtactcctcggacgaggaggactcttcggactcgtccgaggagggcggtggcggcgatggcggagacgacgacgacgaggaggcgacggtgacgatggcggtgatgacggcagcaggggcagcaacggcggcagcgagggcggcaacggcggcagcagcaggggcagcaacggcggcggcagcagcaagggcagcaacaaggccagtggctagatgccactggtctttagatgttagtataggttag

SEQ ID NO: 18208 - DNA, 384 bp, Zea mays
  Peptide Sequence Number=SeqID_59987
atgggtgtgggcaagggacggcttgtctgggggggtcttcggctcccttccccctggcgtgagtcatctaacgactcaaacgactcccagggggctcgcgggcggaggtctgggacgtacatccgggccgtcgagcgctccaggctcgagggctcggatgagtcggagtactcctcggatgaggaggactcggacggcggcggcgaggacgaggacgacgacgacgacgaaggcagtggcgacggtgatggcagcggcaagggcggtggcggcggcagcaaggacggtgatggcggcagcagcaggggcagcaaccggggcggcagcagcaggggcagcaccaggggcggcagcggcggcggcagcaacagggccagtggctag

SEQ ID NO: 18209 - DNA, 324 bp, Zea mays
  Peptide Sequence Number=SeqID_59988
atggcgcttagagaggatgtggtgagcgactatggcgaggacatcagtgatgattctacctttgaggtgtcacttttcacgaatgaactcatcgctaagttggataagatggtggttgctttagctagatctatctcaccaaagatgagctcagataccagcacgtttgttcgtactaagtccatcgaagcccctagggatccaacattaaaatgcctagccgagctagtcctttgtaaggagtctgtccttgctcccacacagctaaaggatgaagccaccgttgttgctcctattgtgtttgagtcctccacgagcccctaa

SEQ ID NO: 18210 - DNA, 321 bp, Zea mays
  Peptide Sequence Number=SeqID_59989
atggaggttacaagcgacctcggttcggactcggtgaagaaacacctgacaaggggggacccacgctccagcgacatgggtgcgtgcgatggagaggcatctgggcagtgggccccaagcggcaacgacttcatgagtgagtccgcgcacgcgagagaggtcgagggggacacttacgtgctgggcccgtttgatgaggactttgtcccagatgagcgttatgctggatctactacattttatgcaatagattttaaatggttcacagacacaagaactaaacattatatcacaagatatcttgagactctagcggtctag

SEQ ID NO: 18211 - DNA, 561 bp, Zea mays
  Peptide Sequence Number=SeqID_59990
atggcggagtacttggcttcgatcttcggcactgagaaggacagggtcaactgccctttttacttcaagattggggtctgtcgtcatggggatcgctgctctcgtctgcacaataggccaactatatcaccaactcttgtgcttgctaacatgtatcagcgccctgatatgataacccctggagttgatgctcaaggccaacctattgaccctgagaagatgcaggagcattttgaggacttctatgaggacatctatgaggagttggggaagtttggtgagattgagaatctgaatgtttgtgataaccttgctgaccacatgattgggaatgtctatgtccagttcagggaggaagagcaagcagccgtagcatacaacgctcttcaagggcgcttttactctggccgccctataattgttgagtattctcctgtgaccgacttccgtgaagcaacctgtaggcagtttgaggagaacagctgcaaccgtggtggctctgaggtaccatgggagaagccgaagccgaagcccgccaccacaaaggaggggccaccgtga

SEQ ID NO: 18212 - DNA, 555 bp, Zea mays
  Peptide Sequence Number=SeqID_59991
atggttgcactgttatcctgggtggtcactcaacgaataggtccttacaaagagatctcagatcaagggccgagaacagatccgcaggcgagcgcgcggacgcgtgtgcgggcacgcgctgaccagcgggcctgggcggtcagcgaccaaggacggggaagcggactggccgactgggcccagtgccaggggcacaggcggcctacagatgggtccgggcgttgggcgcacgtgcgcaaagcggtatcccgagatctgggccatgcgatcgggatcggacggtggggatctaacgccggggggttttgcggctgcgggcgtcaccgcgtctgctccacagaggtgaagtcgccggatctggggcgggtgtgggctgcaagggttccgaagtcaccggggttggccaggatcggtgaggagaaccggcgaacacactggtggggtcctggccacgagaccggggccagagatgggagaacagaagagggagagctccaagcagtttggggtaactccagcgaggaatcccggccgcgggaagaggcaatcgagtga

SEQ ID NO: 18213 - DNA, 828 bp, Zea mays
  Peptide Sequence Number=SeqID_59992
atgccctcatcagggatgcttggcggtgcggtgtcgttgcgggcgggtcccacgcgtcagcccgctctctacagctatcccgcgggacccctttcgatcagaccactagtcaccacgcgcgcgcctcatatcgtcgattcgtggggccctttctggtccgagtcttccacctcgccgtctgcgcagaccgagtccgtcgccagcaatgtcgggatcccctcaaccacttcgccgctgaccttcgcgcgcgtcctgggcatcatccgctctgaccagtggagccactacgccagagatccacatccacacccctgttgtggttgttggttggacttgccgcgcgacgcggacctccaccatgggcgcatcgcgagctccgcggaccctttccctcggaacaaaaatcgccgccaccagagactctacgcgccgccgccgtcaacacctagatactaccttgcccgagctctatcttggacccgggaaggttcgcgggcgctcgtggatcatctgcgagtcgtggggggaaacactggcgcactcgagtactccgaattgcttgccggtcttcacgggatcttcagaagccgcccctcgccgcggatagcatccttgtggccgtctctgctcttgggcccgcctgtcatgccctcattagagatgcttggcggtgcggtgtcgttgcgggcggtcccacgcaccgagtccgtcgccagcaatgccgggatcccctcaaccacttcgtcgctgaccttcgcgcgcgtcctgggcatcatccgctctgatcagtggagccactacgccagagatccacatccacacccctga

SEQ ID NO: 18214 - DNA, 261 bp, Zea mays
  Peptide Sequence Number=SeqID_59993
atggccctggcgaggcgagatcctgtggcggacgaagagaagaggccaacagtgaggggcggtgcgcgcatgcagaagcttagggtggagagaaaaggtcaggaagttatgccttccacgtcgggccactggatccgtggcggctgcgatccggatgcagcggcagcttcgactgcgggggtgggggcgatgccatcttgggaggtcgaggggttagggttttgggaggaggggttgaacggggaagggcgagactcgtga

SEQ ID NO: 18215 - DNA, 279 bp, Zea mays
  Peptide Sequence Number=SeqID_59994
atggccaaccactctgattccagaacggtgcctatcctcgccttatgggcaggtccggtgctgccatgtgtccagggaggcggtatgctcagggacttcgccaatgggtctggacccccaagtacgcaattcagacctcccagaaggttcaagacctccactgaccgatcgaacgtgacagcacatgcgactgtgcacgctcctacgcacgtcagtgtgccagtctacgctgcaacccttactagagcctttgcccatatgctgacaagacaggcctag

SEQ ID NO: 18216 - DNA, 390 bp, Zea mays
  Peptide Sequence Number=SeqID_59995
atggagggaagacgacggcgagaaattgtcgtcaatgtgctagcgaatccgacccggaagttggtccaacacccgcgacggagcccactagtgcacctaggatggatcgctgtgaccgagaggcagaccgagtgtgaatcaatggcggtggcgcgggtcgactcccactccctctcctactatgatctctccctggtggtggtgcaaggtgccctggtttttcttcaggatgtacaagggtgcggtcgtatatgtagccagttagtgtttgagaagggagtaaaacaccacaggcaggggaggctgacaccagggaatttgttgaagccgcatcgtctgggagcgagattcacggcgaaggaatcggctgcgctccattggtgcggatag

SEQ ID NO: 18217 - DNA, 807 bp, Zea mays
  Peptide Sequence Number=SeqID_59996
atgggcatgccaccacacgacacgctcgcagagtcagccgcgatgtacgagacgatgctctcgtcgcaacagcggatgatgcgaccggactggcaggcgatgtacgatgctcttattctccccgaaatcccaacgcgcttcgtctacaggccgcagacggtgatggatgtgatgtcgggttctagctcgttgtgggagatgggcgcgccgccgcacgacacgctcgcagagtcagccgcgatgtacgcggcgatgctgtcatcgcagcagcagcacatggcgcgaccggaccgacaggcgatgtacaacgctcctgatctccccaaagtcccgacgcgcttcgtctacaggctgcagacggcgatgaatgtgatgtcgggttctatctcgttgtgggagacgggcgctgaaagtcgcctagagggggctcttgtaaggtgtagaagagtggaaaacttggatgccattgaatgtggggtgggtggggtatttatagccccaaccaccaaaaatggttgttggaagtgtgctgtcgcatggcgcaccgaacagtccggtgcgccaccggacactgtccggcgtgcatttaatgcgttgcagtcgaccattgcttcgcgaagtagccgttgctccattggcacaccggacagtccagtgaattatagtggagtgcccttgaattttcccgaaggtgaagagttcgagctgaagtgccctggtgcaccgaacactgtcctgtggcacaccggacagtccggtgcgccagaccagggtgcctttcgggttgtcttttgctctcttgtttga

SEQ ID NO: 18218 - DNA, 654 bp, Zea mays
  Peptide Sequence Number=SeqID_59997
atgggcggatccaggctcggcgctctcgtcggtgagcaattgaggtcgccccaatcgccgatcacgcccacttccgccacgagcacccgacagggacaatggcggaatgctaccacccgacttcgagtccccaacggaaccaggaccggaatcgacgacggcagcgcggacgggctctcacacggctacggtggtggcacggttgaggggttagggatgacggacgtgggtatgggggagaagtccgcaggtcgtacggggttttatccccagctttcggggcgccggacccgcgcggtggttgaacagagcgcatgcggtagactcggcatggagtcccgaggcgaggatttcgcgagctcagttacgaaggggaagcaaaatcaacctgagaacctccctgcacgcaactcccctactacccttgcccctttcgggtaccagggtgattcttcagatcctcgaaacctcgtgtcggggaccataattaggggtaccctcaagactcctaattctcagctgaaggacagcgccgcctgcgccgcgccgactgcagtgccacttgacagagtgagactgacaggcagtcaggtcctgcagaaggcaccacaggaaactccgctccgcccgacccagggctcggactcgggctaa

SEQ ID NO: 18219 - DNA, 378 bp, Zea mays
  Peptide Sequence Number=SeqID_59998
atgggccaattgggccaaggggggggcgcaggggcggctgggctgccggggtcggccacggcgcgggagagagagaaaaagaggagagagaaagagagagagaaaaaagaaagaaaagatcttctcctcattttcgaaatccgatctttctacatgaatgcatttgcactttcaaagcaatcaaaagaaatgcaagaggacctgaatgaggcaaacaagcttgcatctttgcactatccaaacgtagtagcattctatggtgttgttctagatggatctggtggatcttttgcaatcgtaacggagtacatggacaatggctcactccgacaagcattgcaaagacatgaaaagtatgctactctttttcaatgctaa

SEQ ID NO: 18220 - DNA, 324 bp, Zea mays
  Peptide Sequence Number=SeqID_59999
atgtcagtcgtcccccttgccggctcgcaacaaactccgcgcacgtcgcacggggcggccgcggaagcttcgccggtcagcgccgcacccttcggatcgcctaccccggtgtcgcgtgcctataagaactcccttgacctcgcctctttcgcgccccatgatcccttttcttcgttgccactgctacgcctctcccagccgcgctgtcgtgctccgcgcagagaccacccgccatcgttgattgccgccattggcgcaactcggtccttaacccggtcagccgtggcttgggcagttcacgaagaagccgcgcgtggaaagtaa

SEQ ID NO: 18221 - DNA, 1557 bp, Zea mays
  Peptide Sequence Number=SeqID_60000
atggccggagtgccatcgtcgctagcgcgcctctacttcctcctcctcccgctagccaccggatgcctcctcctgctgtctgctgaagccgcgcggctcccgctgtccctcgctcccgccgacgccgcggccgacgcgctcctcaggctcaaggctggcatcaacgacagcggcggcgctctcgggcagctgctcgaggggatgggcctctccggcgtgctcgacctgcgcgccctcacgagcctgcccggccccggcctccgcacgctgagcttcatggacaacgatttcgccggcccgttgcccgacgtcaaggcgctgagcggcctccgcgctctttttctgtccgggaacaagttttccggcgtgatccccgccgatgcgttcgccgggatgggctcgctaaagaaggtggtcctctccaataatgacttcaccggccccatcccggcgtcgctcgccgacgcgccccggctcctcgagctgcagctcaatggcaacaagtttcaggggaagatccctgacctgaaacaggacgagctgacggcagtcaacctcgcaaacaatgagctcgagggggagatcccgccgagcctcaaattcacgccgcctgacatgtttgccggtgagcaacatggatttctagttttctacaccatgcatgcatgctgttcgtgcaatgtccacgcaacaccaagctttgcgggcccaccgcttggtgtcaaatgcgaggcccctccgccgccgtcagcgtcgccgtcgccatcaccgccgccgtcaccgaagacaccgcctccagcctccgtcaaagaaggcaccacgccatcccaaccagcagcagacaccgtggcgtccacaggcgcgtcgtcagctgacgatgcgaagcaagacgagggccataagcccgtcgagggctccacctccacgtcgttcggcgtcctcgccgcattcattggcacgcttgggatcgccggcgtggcgttcgtcgcgctgcggaggcgacgggggtacaagaccaagaacttcggcccgaccgcgtcgtcggctcggccctcggatccgccgagggtcgagccgcacccgccggcggcgaaggccgaagccagcgcggcgcaggcgccccctgccgccgccgggtgcgtggcgcgcgctggcggcgcggcgcggaaggtggagcaggggcggctgacgttcgtgcgcgacgaccgcggccggttcttcgagttgcaggacctgctcaaggccacggcggaggtgctcggcaccgccaacctcggcgtgtgctactgcgccacgctcacgacgggccactctgtcgtggtgaagcggttcaaggagatgaaccgggtgggcaaggaggacttcgaggagcacatgcggcggctgggccggctcagccaccccaacctcctcccgctcgtcgcctactactaccgcaaggaggagaagctgctcatccacgactacgtccccaaccggagcttgccgaacctcctccatggcggcggcgacgagcgcgggatgaagacgccggcgctgcattgcacgctgcgctga

SEQ ID NO: 18222 - DNA, 2820 bp, Zea mays
  Peptide Sequence Number=SeqID_60001
atgccgttcggcttgagaaatgtgggtgcgatgtaccagcggtgcatgaatcatgtgttcggcgaacacattggccgaacggtcgaggcctacgtcgatgacatcgtagtcaagacgaggaaagcctccgacctcctttccgaccttgaagtgacattccgatgtctcaaggcaaaaggcgtgaagctcaatcccgaaaagtgtgtcttcggggtaccccgaggcatgctcttggggttcatcgtctccgagctgggcatcgaagccaacccggagaagatcgcggccatcaccagcatggggcccatcaaggacttgaaaggcgtacagagagtcacgggatgtcttgcggctctgagccgcttcatctcgcacctcggcgaaagagatctgcctctgtaccgcctcttaaggaaggccgagtgcttcacttggacccctgaggccgaagaagccctcgggaacctgaaggcgctcctcacgaacgcgcccatcttggtgccccccgctaccggagaagccctcttgatctacgtcgccgcgaccactcaggtggttagcgccgcgattgtggttgagatacgagaagaggggcatgcattgcccgtccagaggccagtctacttcatcagcgaggtactgtccgagaccaagatccgctacccacaagttcagaagctgttatacgcagtggtcctgacgcggcggaagttgcgacactacttcgagtctcatccggtaactgtggtgtcatccttccccctgggggagatcatccagtgccgagaggcctcgggtagaatcgcaaagtgggcggtggaaatcatgggcgaaacaatctcgttcgcccctcggaaggccatcaagtcccaggtcttggcggacttcgtggctgaatgggtcgacacccagctcccaacagttctgatccagccggaactctggaccatgttcttcgatgggtcgctgatgaagataggagccggcgcatgcctactcttcatctcgcccctcgggaagcacctacgctacgtgctacgcctccatttcccggcgtccaacaatgtggctgagtacgaggctctggtcaacgggttgcggatcgccatcgagctaggggtccgacgcctcgacgctcgcgatgactcgcagctcatcatcgaccaagtcatgaagaactcccactgccgcgacctgaagatggaggcctactgcgatgaggttcggcgcctggaagacaagtgctacgggctcgagctcaaccacatcgcccggcgctacaacgagactgcggacgagctagctaaaatagcctcggggcgaacaacggttcccccggacgtcatctcccgagacttgcatcaaccctccgtcaagatcgacgacacgcccgagcccgaggcaccctcggcccagcccgaggtaccctcggctcagtccgaggcaccctcggctcggctcgaggcaccctcagctcagcccgaggcaccctcggttcagcccgaggtaccctcggcccccgagggtgaggcactgcgcgtcgaggaggagcgaagcggggtcacgcctaatcgaaactggcagaccccgtacctgcaatatctccaccgaggagagctacccctcgaccgagccgaagcttggcggttggcgcgacgcgccaagtcgttcgtcttgttgggagatgagaatgagctctaccaccgcagcccctcaggcatcctccagcgatgcatccccatcgccgaaggtcaggagctcctacgagagatacactcgggggcttgcggccatcacgcagcacctcgagcccttgttggaaacgccttccgacaaggtttctactggccgacggcggtggccgacgccactagaattgtttgcacctgcgaagggtgtcagttctacgcgaggcagacccacctgcccgctcaggctctgcagatgatacccatcacctggccttttgctgtgtggggtctggacctcgttggccccttgcagaaggcacccgggggctacacgcacctgttggtcgccatcgacaaattcttcgagtggatcgaggtccgacccctaaacagcatcaggtccaaacaggcggtggcgttcttcaccaacatcatccatcattttggggtcccgaactccatcatcaccgacaacggcacccagttcaccggcagaaggttcctggacttatgcgaggatcaccacatccgggtggactgggccgccgtggctcaccccatgacgaatgggcaagtagagcgtgccaacgacatgattctacaaggactcaagcctcggatctacaacgacctcaacaagttcggcaagcgatggatgaaggaactcccctcggtggtctggagtctgaggacaacgccgagccgagccacgggcttcatgtcgttctttctagtctatggggccgaggccatcttgcccacagacttagaatacggttccccgaggacgagggcctacgccgaccaaagcaaccaagctagtcgagaaaacttgctggaccagctggaagaggcttgggacatggccttactacactcggcgcggtaccagcagtccctgcgacgctaccacgcccgaggggtccagtcccgagacctccaggtgggcgacctggtttttcggctgcgacaggacgctcgagggcggcacaagctcacgcctccctgggaagggccgttcatcatcgccaaagttctgaagcctggaacgtacaagctggccaacagtcaaggcgaggtctacagcaacgcttggaacatccaacagctacgtcgcttctacccttaa

SEQ ID NO: 18223 - DNA, 195 bp, Zea mays
  Peptide Sequence Number=SeqID_60002
atgactcaccagtgtgataaagtggttccccgcgtcctttcgggccgatccgatttagatttggggctgctggggctgaacagggcgtggccggcgtcggcaccgccgagcaaacctggctgcgccgccgtccgcgcaacctggaggctcgagataccccttcggccttcaacttttgctaaagagaccctgtga

SEQ ID NO: 18224 - DNA, 369 bp, Zea mays
  Peptide Sequence Number=SeqID_60003
atggcaatggcaatcagcatgcttggggtctccgaggcctttgctcttggccagaaccttgggatcaaagcaaccactgtcacagacattttcaactgttcaagcgctcgctgctggagtagggaccatgatggcaaagtgatccctgaagaggtggcgacggcaatagtctatctcaaggacaccataggaaaagaagccgtgcaagagatcatcatcaacctttctaaagacagagattggttcatccatgacacctacatgtttctccaatgttgcatctgtccaattttcttgtatttttctaaatgttctctttatgcacaccttcagtattcagaaggaaaaattcttgttgagatattgtga

SEQ ID NO: 18225 - DNA, 1539 bp, Zea mays
  Peptide Sequence Number=SeqID_60004
atgaccagcgccggcgtcaacgtaccgggcgacgacggggtcgggaacccggccgccgcgtccgggtccgcctccgccccagaatgccggacgatgcagcgcaggcggcggcgcctcgagccacaaggatccggcgacgccgccgcggggccgagctgggtgcgccggctccgcccggccgcctcccggttctcgccgtcgccgtcgcagggctctgcggacaggcccaacgacgaggagcaggaagaggatgacccggacgtgcaggagatggagctcgtcccgctcccgccggcggggccgcaggagctccagcctgccgacgtccccgcgcaggtgtggcccgtggcgttcggctccctgtccatggcggggcggatgcgcatgatggaggacaccatctcgctccacccggacctgtgcacctgggccgacggctcgcccgtgcacttcttcgcggtcttcgacggccacggcggctcccatgtgtccgcgctgtgccgcgaccggatgcacgagttcgtggcggaggagctgggcaaggagggggccgccttccttcggcggcggcaggagtggctggcgtggggcgacggcgccggcgccgagacgagcgccgcggcgttcgtcagggggccccgcggcgcgtggccggagcgcgaggaggaggagcgcgcgtggcgctcggcgctgcggaggagcttccgtcgcgccgacgcgatggcggcgctggcgtgcgcgtgcgggcgcgtggcgcgcccgagctgccgctgcccgctttccagcgtcgtctccggcatcgtcgggtccacggccgtggtggcgctcctcgtccgcggccgcctcgtcgtcgccaactgcggcgactcccgcgccgtgctctgccgcgggcccgccggcacgccgcccgtcccgctctcctccgaccacaaggtatgtgtcgcgctcgcgcctccagaagtttcagtcgaagccgactcgtggttggcctccggcggcgggctgttcgtgctcgccgacgtgcagcgccctgacgtcagcggcaacggaggtaccaccgtgtgctggcccatgacactcctgcggctcacggtgccgccaaaccggccggacgagagggcgcggatcgaggcggccggcggcctggtggtgttcaacaacggccaccgcgtgcgtgggatcctcgccatgtcacgcgcgctaggtaccaatgtctggtgggacaggctgctgaggcctgaagtgatcgcggagccggagatcaccgtgacggagcggacggcggaggacgagtgcatgatcctggcgaccgacgggatgtgggacgtgatcgccaacgacgtcgcctgcaacgtcgcccgccactgcctggaggacgggaacccgcctccagccgccaccgccgccgccgccaccgccggccgcgaggaggagccgcggtgcgtccgcgccacctcgctcctggccaggctcgccatcggcagggagaccctggataacgtcagcatcatcgtcgttgacctcaagcacagggagtga

SEQ ID NO: 18226 - DNA, 1032 bp, Zea mays
  Peptide Sequence Number=SeqID_60005
atggtgagctccagggctttcctcctcctccttgccatccttactggctgcgcctgcagcttccctagtcctgtcctggcggctcgtgagctgagcgacgatgcagccatggccgagaggcatgagaggtggatggcggtgtatggccgcgtctacaaggatgcagccgagaaggcacgacgcttcgaggtgttcaaggacaatctcgcattcgtcgagtcgttcaacgccgataagaagaacaagttctggcttggcgtgaaccagttcgccgacctgactaccgaagagttcaaagcaaacaaaggcttcaaaccgatctcagcagaagaggtcccaacgactggattcaagtacgagaacttaagcgttagcgcgcttccgacggccgtcgactggaggaccaagggagctgtcacacccatcaagaaccaaggccagtgtggttgctgctgggcgttctcggccgtagctgccatggagggcatcgtgaagctgagcaccgacaacctcgtctcactctcagagcaagaactggtggactgtgacacccacagcatggacgagggttgcgaggggggctggatggacagcgccttcgagttcgtcatcaagaacggaggcctcgccaccgagtctagctacccgtacaaggccgtagacggcaagtgcaagggcgggtcaaagagcgccgcgacgatcaaaggccatgaggacgtgccgcccaacaacgaggccgcgctcatgaaggccgtggccagtcagcctgtgtcggtcgccgtcgatgcaagcgacaggactttcatgctttactccggcggtgtgatgaccggctcctgcggcactcagctggaccatgggatcgctgcgatcggctacggcgtggagagtgacggcacaaagtattggattctgaagaactcatggggcaccacttggggagagaagagattcctacggatggagaaggacatttctgacaagcaagggatgtgcggccttgccatgaagccttcctaccccaccgagtag

SEQ ID NO: 18227 - DNA, 192 bp, Zea mays
  Peptide Sequence Number=SeqID_60006
atgacccagctcttcgagttctacgaagctgaagaccctgagcatctgtttggtgaaggcaaagatgttcggtttacaagtggtgatgaggatgatggttttgattgtgcttatggtaatggtaaagaaagagaagaagtcgtcgaggtggatctccgagagttccaggacgtcgatgagttcgaggattag

SEQ ID NO: 18228 - DNA, 576 bp, Zea mays
  Peptide Sequence Number=SeqID_60007
atggcgggctttgcggactctattgtgggcactcacaaaccgatctcgggcgaccataagaaggacgaagctgagtccttatcctcccctttattccgtcaatgcgcaaacagtcccaaccgaaccaacctccaccatcgccgtgagggccgagatccgcccgcacggggcaagctttccctctcaccgatctgggtgcgttgtcgggtcgtggagcatcgcgggtgcatggtgaagctgtccgtggtctcggcgaggcgaatcaagagtcggggcaggaggaatcgctcatcggcgtgtcaccgacgacggaaactgtggcgtcccgtgggcagcctcttcctcgcctctatccctagtgagtacctccccaagggcttcatattcatccgcgcatcgtgtagagggcaccaggagggaatttcagactcgaatttggtggttcggccgtccgtggccatggcgctgccatggatattggggcgccaccgtctcgggttgatcggagaaaaggagagagtggaggaatcgtgggcaccgttgatccgattacccgcggtggagattagacggtag

SEQ ID NO: 18229 - DNA, 522 bp, Zea mays
  Peptide Sequence Number=SeqID_60008
atggataatatcgatgaggacaaacttactgttgacaaaacctacaataagaatataaaggctaagccatttcaaactagagaccagattgacttaagaagctttgggtggcctaccgacgctgaagcaaccccaatatccttcttccctgatgggttccctcccataggggatcttgcttcttcccaaagctctctaggcgacaataactatgacaatgaccagccacacatgaactatcacttccgtaggtacttgacttggcccctcgccgaagttgacatgcagcctcctatggagcctcctctgcaccgccttgatgcttctatgctcgcaatgagtacatctatagaagcaaaaagctcctcgcattcgacacgggatacatatgttgttgtgaaggatgacgacgatgatgatgaggatgacgacgagcttgatgagaagtcgtggccgcatgccacaacatggttggactgtcccagctcgctcaactcagccgtcataggtcaccccacatag

SEQ ID NO: 18230 - DNA, 390 bp, Zea mays
  Peptide Sequence Number=SeqID_60009
atgcacccgggctacggccaggccgcatgggggaacgaccaggccggccaaggcaccacgaaaagcattaagacctcagaggagtcaaaccactcctccgacgcctcgggggctacacccggcgggtgcgctcgcgcgcacccaccggaacaaagtataaccgagaaaggaaaacagccccgctcgccccgctccgattgctgtgccacccaccggggtaagaccgacaacagccgagttcagcctcgggcgcaacaggaagctccgcctcgcccgaccttaggcctcggcctcgggaagaggtctccgcctcgcccgaccccaggacccagcctcagcctcggcctcgggaggaaccgcgtcctcgcccgaccccggcctcggccttag

SEQ ID NO: 18231 - DNA, 749 bp, Zea mays
  Peptide Sequence Number=SeqID_60010
accaggggtccacgccgagcgtcgcgccgggcagcagcgagcgggccacgccgggtcaccgtgggcatggcgcacgagcagccgtgcacagtcagtcgagtcagccgaggggcaagaggactatgatgaggaaaagggaggcgagctcaccacaggggcaaattcgacgcgagttgggaatcttcgggggggctccaggcgattcggaggagagaaaaacgaactgcgggttttataggaagacaaacgttgtggtagattttaatatgttttggttcggcccttacagggggtccctcgcgtttgggcggcggctggattgtcgtccatggcgcacgcgtgcggggatcgttgctattgctgttggctggggctcgcgccagccgggtcccccaagccctggggaggtgggccgcgcgtgggggggggctggggtgggcaacgccacaacgccgagctgggccacgagccggccagccggcccaggagaggaggaggcgcgagggggccacgagagaaggggtggcgccaaatgggccgccagagggggaaacaccgacccaagaaggagaggggagaaagagaagggaaaaggaaaggggaaggtgttttcgaaccttcggcatccagaagccttcgtgtttttcgtggatcgggctcattatgaaaaacgacctagcaccgcgaaggggctactattgagggtcttcttctctgccgaaggtcctcaagacggagacactgtctga

SEQ ID NO: 18232 - DNA, 207 bp, Zea mays
  Peptide Sequence Number=SeqID_60011
atggcggcaaaggaccagataaggagaaatgggcgtgcccagccggaggctcctcccacggggggaccaattccccctatctttggccggccgggtggcgcgtggcccagccgccccccaaaaagtgaatcccgctctctcccgaacgctagtgcagtttgggcggttgcccagcctccagccgcccccggttggggccgtctgtaa

SEQ ID NO: 18233 - DNA, 165 bp, Zea mays
  Peptide Sequence Number=SeqID_60012
atggagccgccgtgtcacatgggtggcatcgcggtcaccccgatacgtgtcatgattacctcaccaatgcggctctcaaagttttctggtggtcctccgccgcatgctggggcggcgccgctcggcctggctcaaggatggaggaagacgggtccctggccatag

SEQ ID NO: 18234 - DNA, 3990 bp, Zea mays
  Peptide Sequence Number=SeqID_60013
atggtgctgctccttgagtgtctcttgctcgccctcgtctctctagcatgctctaccataaacatggcagggacctcacttgcagctcatccagcgtccacctcaaacatctccgaccacttcgcactcgtgtcgttcaaatctcacataatgagtgacccgtcccgagcccttgcgacatggggcaaccagtctgtcccgacgtgccggtggcgtggcgtgtcgtgtggcttaaaaggacaccgccatggccgtgtggtggcattggacctcggcgagctcaaccttgttggcaccatcactcatgcgttgggaaacctcacgtacctgaggctgctcaacctttcgtcgaatcacatccatgggatcctgccaccagagctaggtaatctccatgaccttgaggacctgcaacttagctacaactacatcgaaggggagattccgtcgtcactctccaactgcagccaccttgtcaatattttgatcgatgtcaaccaattgcaaggagggataccagtcgagctcagctcattgcgcaatgtccagtcagtcaaccttgcccacaatatgcttactggaagaattccttccaagattgcaagccttttaagtctgaaacagctcaacctaaaatttaacaacttgacaggagaaattccaacggagataggagcacttgtcaatctcaattttctagatctaggtttcaaccagttttatggaaccattcctggttcacttggaaacctctcagcattgacatcgctcagaatcccctccaacgaactagaaggacgtatcccgacactgaaaggtctatcatctctcactgaacttgagttgggaaaaaacaagctcgaaggaaccattccatcttggttaggaaacatctcttcactagaaatcattgatcttcagagaaatggtatagttggtcaaatcccagaatccttaggaagtcttgagctgcttacaatcctctctctctcgtccaacagactctcaggttccatacctcatgagctcggaaacctccaagccctgactggacttttcatagataataatgaactagaaagcactttgccgccttcaatatttaatatatcttctcttcagattctgaatgaaactgggtttgaagcaagaaatgatgctgactgggactttcttgcaagtctaaccaactgtagcaatttgaaactcttagatgttaataccaacagtctccaagcatctcttggcaaactaaagaagttaaatgaactgatgttttcaaataattctttctccggatccattcctgcaacattgggcaatctaactaaacttactatcctcacactcagtagtaatgtgattagtggagctataccttctactctcagcaactgtcctttagaagttttggatctttctcacaacaatctttctggtccgatacctaaagaactatttttcatatcaacactgtcaagtttcatggatcttgcgcacaattccctatctgggacattgccattagaagtgggtaatctaaaaaatttaggtgaacttgatttctccagcaatatgatttctggtgaaattccgatatctatcggcgagtgccaaagcttggaatatctcaacatatctggaaacctgctccaagggaccattccactttcactaggaaatctaaagggtctcttggtgcttgatctttcctacaataatctatctgggaccatccctgaaatccttggcaacctgaaaggcctttcttccttgaacctctcatttaacaaattccaaggtggtcttccaacagatggggtatttctcaatgcgtctgtcatcacagttactggaaacgatgacctgtgcggtggtatccctcaattgaaattaccaccctgctcaaaccacaccaccaagaagccacctcagaggctcggcatggtagccctaatatgcggagcggttgtttttgttacatcagtagttgtgctgtctgtgttctaccaaaactgccggaagaagaaagcaaacctacaaatttctgtcataaaccagcaatatatgagggttccttatgctgaattggccagtgcaacaaatggttttgcatctgagaacctcataggagaagggagctttggctcagtctacaaagggagaatgagaggcgacggccagcacatagctgttgctgttaaggttctcaacctcatgcaacgcggcgcaactcagagttttattgcagaatgcgagactttaagatgcgctcggcatcgaaaccttgtgaagatcttgacagtctgctccagagatggtgaacaaaaatcgctagatctggcagcaaggctaagcattgtaatagatgtggcatctgcggttgattatctacaccaatataagccaacaccaattattcactgtgatcttaaaccaagcaatgttctcctggatagtgacatggttgctcacgttggggattttggtcttgcgaggtttctgcatcaagacaaagacaaatcaagtggctgggcatcaatgagaggatcgattggctatgcggccccagagtatggactgggtaatgaagtctccactcatggggatgtctacagttttggtatactgttgctggagattttcactggaaaaagtccaacagacagtgaatttggagaagccattggactccgcaagccatctggagtcttcacttggctcattggatacttctacagtccatcacctacacgccccactatttcagattactggtcaaagctgcctcatcacaagctccagttggagctcctgccaaggccagtacctcccctcccacggcagtcaagcaagctcaaccccacctcctaccttcgcgcgctcacggggtggtcgccgcccatggcttaccctggggacccgagggcacgtccagacctggagacctgtgcagttttagcatccggcgacatcaagcttagtcgcgactctctggtggggcgggctgcggtgtgtcagcttaatggcaatagccatgacacctctccaccccatgtggaggcggctctctgggaccagttaggcattcacaaggagaggctgcagattctagggatcgatagagggtggttcgtcaaggggcaattccgcacaggggccacactttcaattttgaagcatggactgagcaaaggtatggatcgctggctcgttgggaatttcgggtgcgccttcgcattgaggggaggaagggaagataccaccgaagggatgatgaggatagggaggatccaggccatggaggtcgccatcttcggagcaggtcttggtgggatgggagaggctctcattgtggctgttgtggaaccacagcacaagggtacctacccgttaaagcctccaagcatcggcaagaatgtctcttttgcctcccccatcgcaactgttctaggtgcgacaatcactggggggcacaactcttcggtgatgtgcgaggagcggcagaattctgttgctcgggtggggagtgcggcgtcccccaaccatgatggagacagcttgaaccatataccctctgatattgctgttgaaccagacttaccacaacctcatgtacatgaaacaaatgggtacagtcctttgcatattctgggagcagcctcagaaccaacctcaaccccccaagatcagctgtcaaaaacagttccattttctggaccttccacctccacacaaatgccaattaaaacagctgcctacgctgtaactcgccatagtacaagactagcaaacaaatcaaaaaaacgagacggtaaaggggcgattcagattgcccaagaactgcttgctcataagttaaaagatttggcccctaacgttgctgactcacataatgatttggtccaacagcttgtgcagcattttgatcaaccactgtccaaaggaaagattgaggccatcaagaacctgctggaaaatgggaagtag

SEQ ID NO: 18235 - DNA, 312 bp, Zea mays
  Peptide Sequence Number=SeqID_60014
atggggcgagcggttagagtaaaggggacgtactgggttcgcaggcgtgttgtggtcaagaaagagagagggactcctgagcttataggctcgccatggcgaatcgttcgcggacgcatcgccgcggtcttcgcggttcgttgcggcggcaacgatgcagctgacctgtggggtcacatgtcagtgtcaagagaagataagagactgaccctcagggcccgcgtggcagagggcatcgagcgcgcgcgcgtggagaaggcgggtgggggagttgggctgtgcgctgtgggagcagaagtgggccgaaagtga

SEQ ID NO: 18236 - DNA, 330 bp, Zea mays
  Peptide Sequence Number=SeqID_60015
atgggaggaggcgtctctgctgatccaggccggcgcgagcctagcgctcgcggtcagaggaaccaatcacgcggtatatttcaaggagtggtcaacgaagacgacagaagtggccatacctgcagcggtactgcgatggagccaatcccctgcgaggggcagagtcgaggtgacgccaagctccggttatcgattccgaccacgcccagccatgcaccaacttgcgtgacccgcaccggaggcgctacggctcccccaacccggtctttgaccacggcgcggtcccagcgaccctctcctcaacgaatcaagctgatcatcgtagtctga

SEQ ID NO: 18237 - DNA, 204 bp, Zea mays
  Peptide Sequence Number=SeqID_60016
atgggtacatatgtcgttgggcgccgggttgatgaactccggcggggtcatcaccatgaacacgacggcgcacccgtgctcggggttgggcaagggtggcactgcatccgaccgttgatctatgacgagcagcccgtggtgcctgagtgtgttgctgaagatcttcctgagagcaacaacctggtgaaggcaagtgtcctctaa

SEQ ID NO: 18238 - DNA, 504 bp, Zea mays
  Peptide Sequence Number=SeqID_60017
atggtggtggagacccccgagaagaggcccatgacgcccttggagagtaggatcgtgacggccagcagctcgggtttcctcgatggcgccgaaatatcgtggtggtgtgggagtgtgacggctctccctcccctgagcatgcttcgccttggtgtcgggaatggaacgacagacgaaagggttcttatccacgcggggcgggcggatgaagcggatgtccgactggcggcggcgggtgaaccggagtccgttgtaggcggcgggctggggagctgcgtacctacggcgcgttcgtgggatgggaacgcgggtgtgggggtggcggcagcgggtcgagcggagtctgttgcaggcagcgaccggggtggtggctgtgggccttcggttgatggggggagcagcgtggctggggcagttgttgcgcgcggggtatgccgtgcaattgcgtggaggaaaggcggaggcacaaatggtctacactatttactacttaatagatactag

SEQ ID NO: 18239 - DNA, 324 bp, Zea mays
  Peptide Sequence Number=SeqID_60018
atggaggccaggatcaaagatataacatgtagtcgaggtctgttcgaagctgaacttggcgtgcctggaggtgccgagcagataatgtctcagctgaagaataaaaagactaccaagaagggtgaagagaccacggtgaccaagatcaaagacataacatgcagtcccaaaacaaaaatgcttgcggtcactgtgggggacagatatcccccgggtccactagaaggcaagaaggcctcgcaaaaggctttgggcctattatctcgcaaagccatccctttgtgggccaggggaggactactgatggaatgggccgatgcgtga

SEQ ID NO: 18240 - DNA, 552 bp, Zea mays
  Peptide Sequence Number=SeqID_60019
atgaagaaaatgacggggacttactggtggtgcaaaaataggattcatggggcaggtagggtgatgggcgtggcaggagcgggggaacgcggggcaccgtactcagggaagaagagagcagggttagcgacggtgtggggaggaagagggcgaggtgagggtcggggcgccgtggacaggggcacagcgggcagcgttgcgggggaggagaacgcaagggggcagaaaatcgtctgggcgacgcccacgatcgggcgaggatggaggtgcggcatgcggggcgaggatggaggcatgacagctgtagaatcacgggcgtcgcgagaagggtgcaatggctggattttgtgggacgatggagtcgggggcggtagcggggggagtaaatcacgcagatgtgccatcgggtgggctccttctatggagagagtgagcgagaagatttcggatcggggatggggaggagatcacggtgttgcgtgcacgaggggagccgaggcgacgacatgcttcaccaggggagatgtggacgcccatgttcctatcatatag

SEQ ID NO: 18241 - DNA, 276 bp, Zea mays
  Peptide Sequence Number=SeqID_60020
atggcgagcggcgtggaagaactccggcgagtctccacggatggcgggcgattgacgaacggcgtggtcacggggtgctacgcggacggcgaagttccggcggggaacgtggatagtgagcacgaactccggcgaggcactccagcgaggcacgacgacgatgtcacaaagagacaccaattgtgtggtggtccttgtggggacttagtgtcccaattgattgaggagaaaagctcactcggtctaagtgaccgtttgagagagggaaagggttga

SEQ ID NO: 18242 - DNA, 1092 bp, Zea mays
  Peptide Sequence Number=SeqID_60021
gtggcgctgacggtgccggcgtgggacgacccggcgacgccggcgctgacgttccggacgtgggtgctgggcacggcgtcctgcgccgcgctctccttcctcaacgccttcttcgggtaccgcaaggagccgctcaccgtcaccgccgtgtcggcgcaggtcgccgtgctccccgtcggccgcctcatggccgcggcgctgccggagcgcgccttcttccgcggccgcccgtgcgagttcaccctcaacccggggcccttcagcgtgaaggagcatgtcctcatcaccatcttcgccaacgccggcgccggcaccgtgttcgccaagaatcttgtgacctctgtccgcgtcttttacggccagcacatgtccttcctcatcgccctcctcctcatcctcaccagccaggtgatggggttcggttgggcgggagttttccggcggtatctggtggagccggcggcgatgtggtggccctccaacctcgtgcaggtctccctcttcagggcacttcatgagaaggagcgaaggagaaaaggtagcatgacacgcaaccagttcttcacggtggcattcatctgcagtttcgcctactacatcttcccgggctacctgttccagatgctcacctccctctcctggatctgctgggtgtttcccagctctgtgattgcccagcagctcggctcaggcctccatggccttggcatcggtgcagttggactcgactggtcgtccatctcctcctacctcggaagcccccttgctagcccctggtttgccaccgccaacatcgcggctgccttcttcattgtcgtgtacataatcacaccgatcaactactggttcaatgtttacaaggcacgcaacttccccatctactcagatggcctctacacggtggctgggcagaagtacaacatctctagcatcatggactcccatttctacttcgatacagacgcctatgagaagagtgggccactgtacatcagcacgttcttcgcttccagctacggtcttagttttgcatgccttaccgcgacggtttcccacgttctccttttccatggaaggttgtgggcactttga

SEQ ID NO: 18243 - DNA, 783 bp, Zea mays
  Peptide Sequence Number=SeqID_60022
atgaactgcgtgctcgccgcgcaccacctgctctacgatgagaccggcgccgctgtcgtcgacttcctcgggctcgcgcgcagcacgggcgccactatcctcctgctgggcgagcacgaggacaccctcaactcgaggcgatgggaggcgcgattcgcgctcgcgttgcgttactatgccacggcgttcgacgtcatgggcacggccgggctggcggacgccggccccgcgagggccaaggcggaggagatgttcgcgcgggagatatgcaacacggtggcgttcgaagccgcggaccgcttcgagcgggcgcttgatcgcgaggatggcgacgatgaagggctcacgctctggtggatggatcaggccatgtacaccgtgtccgcgtggacgcccgtcagcgacggcggcggcggaggcagcacggttcattccggttcgtccctgctcccggtatcctcatgtgctccgtgctggcccgaccgccatcgcgtggccatggccgcccaacaggcccgccgtctgccgaatcacccactcgcccggggagcggggacgcacctcgtgcatgtttcttcgccaccccatgacgtcgcccccctcggcgcctcgcgcgagccggtgctcgtgattggtgaccccggcgtgctcgacgaaatgcctgaacgcgggggactgttccgggtgctgcagtgtagccccacgagcagcggtgctgcaatgctactcctgtcagactccagccatttgtattcattaatggctgctattcctgctgattag

SEQ ID NO: 18244 - DNA, 591 bp, Zea mays
  Peptide Sequence Number=SeqID_60023
atggccgccgggatcggggcttacggttgtatcgcgagccgtggacgggtatatgaccagccaaaatctgcgaccccctttcctctcatccacctggtagactttcgccatcactcacacctgcttcctgttcaagctcctccatgggcgagattcagtgggaaggagatggtcgccttgtgcttcgattccgcgggccgcaccgagcgggagcggagtactgcctcggcgcaggatctgacgagcaagccactgtggaaactgaggttcaacaaaatagagatagctgagcaggagctcattgaaggcaagttcctcgggcacaacagggagctccgcctcgctcgatcccaggcctcggcctcagcctcggcctcgggagaaggtctccgcctcgcccgatcccaggcctcggcctcagcctcagcctcgggagaaggtctccgcctctcccgaccccaggcctcgacctcgggaggagtcacaacctcgcccgaccacagcctcggcctcaggagaagtcactgcctcgcccgacctcggcctcagaccgactacgctacaagggatacatcattaccctacctctag

SEQ ID NO: 18245 - DNA, 1128 bp, Zea mays
  Peptide Sequence Number=SeqID_60024
atggcgcgcctggcgggccaccccaacgtcgtggggctcaaggccgtgtacgaggaccgcgactcggtgcacctcgtcatggagctctgcgccggcggcgagctcttccaccgcctccacgagcgcggctgcttccccgagcgcgaggccgccgcgctcttccgccacctcatggaggtcgtcgcgcactgccacgccaaggggatcgtgcaccgcgacctcaagcccgagaacatcctcctcgtcagcaggtcgccccagtcgccgatcaaactcgcggactttggactcgccacctacacccagcctggccgaagcttgagcggcatggtaggcagcccgttctacattgcgccggaggtgctctccggcgggtacaacgaggccgccgacgtctggagcgcgggggtcatactctacatcctcctcagcggcatcccgccgttttggggcaagaccaagtccaagatcttcgactgcatcaggtccatggagctgcggttcccttctgacccatgggacagggtttctgattccgccaaggagctcgtcaccgggatgctgcggcgcgaccctaggctgcggctcacggccaagcaggttctagagcatccgtggatgcaggaacacgcggacccacaagactcgtgcgggcagtgccacgagaccggcctccaacgggagggcgccggctcgtgctccttctccacgccgttggcgtcgcggagcagggacgtgagctttgacacgcgtggccccatcgcgtggaggggtgggggcgaggacgaggcgacctgctgctcgcccacgttcgccgccgtctgcaggtcgtcgttctcggcgttcatcaccgacccggcccccgccgccctgctcggcctcctccgccttgggtggctctggcttctcgttcgcagcgagccagctgagccacagccggtcgctgcctcctcgactccgaggacggcgaggggatccacgccacggggcgtcaacggcaggcggaaccacacgatcggcggcggcgggcgggagcacctggacgtggcggtggagtctgtcatccgctgggcgtcgtgcaccaacttctccacggcgccctcacttcgggcctccctcgtatgctag

SEQ ID NO: 18246 - DNA, 231 bp, Zea mays
  Peptide Sequence Number=SeqID_60025
atggccctcgtggcacaccagacagtctggttgcacatcggacagtctggaccaaagacccaaacgaacaaggataagggccctaaacctactaatggtgattgtgtctcccatctggaattgaaagagatggggccaaacccaggcgcaattcacatgtgtgctaggatcgagtcttacacatatgatgactcatggtatagaaatgaatgtcacatcattaatatttaa

SEQ ID NO: 18247 - DNA, 261 bp, Zea mays
  Peptide Sequence Number=SeqID_60026
atggccaacgattggatcaccacctactgcatcaatgaagatggattccccaaggtgctttatgctgcaactgtccgtctgggtattccggagcgtccggaatacatgagccgcgagttcacagagcatggtaccgaaagctgcgaggtcaccgtccacattggcgcaagtgacaagtacttggagatgcaaccctggagcgtcaccgccactggaagccgtatgcaagacaccgtccaacttgtagctcggaaggcatga

SEQ ID NO: 18248 - DNA, 831 bp, Zea mays
  Peptide Sequence Number=SeqID_60027
atggccagcaagtcgcagctgcaggaccaactgatcatcactcgccccgacgactggcacctccatcttcgcgaaggcggtgtcctcgaggctgtagtgccacacagtgcacgccgggtgttcgacgtaatgtttctgagatcgtgtggcagcgcgaggcattttgggagggccatcatcatgcccaacctgaagccgccggtgaccacaacggcacgggccgtggagtacagggaggagataatgagggcgctgccgccagggagtagcttcgagccgctcatgacactatacctcacagacaacacaagcccagaggagatcaagctcgcaagaaagagtggtataatttttgctgtgaagttgtatcctgctggagcaactaccaattcccaagatggtgtcactgatatatttgggaagtgcttgccggtcctcgaggagatggtcaggcaggaaatgccgttgcttgttcatggagaagtcacagatccacatgttgacacatttgaccgcgagaaggttttcattgacaaaatattagcaccacttgtacaaaaacttccgcagctgaaaattgtcatggaacatatcacaactatggatgcagtgaacttcatagaatcatgtgaagaaggacaagctattgtgtctgctgtaacaaatgggagtagacggtacttccttggtactgacagcgctccccatgataaacggaacaaagagtgttcctgtggatgtgctggaatatatagcgctcctgttgccttgtctctttatgtgaaggtatttgaagaggtaatatctatctccagctgttatggttgctag

SEQ ID NO: 18249 - DNA, 825 bp, Zea mays
  Peptide Sequence Number=SeqID_60028
atgtgctgcgtggtgttcgacttcgcggacccgaccaaggacgtgcgggagaaggaggtcaagaggcagacgctgctcgagctggtggactacatcacctccgccaccagcaagttcccggagcccgtcgtgcaggaggtcgtcaggatggtgtctgtgaatctgttcagggtgcccagccctgccccgagagagaacaaggcgctcgagtcgttcgacatggaggaggaggagtccgtcatggaccctgcgtggtcacacttgcagatcgtgtatgagttgttcttgaggtttattcagtcgcccgagacgaacgcgaagctggccaagagatacattgaccacggcttcattatcaggcttcttgatctctttgactcggaggatcctagggagagggagtacctgaagacgatccttcacaggatatacgacaagttcatcaggaaggcaatcaacaatatattctacaggtttatattcgagacggagaagcataatggtatcgcagagctgttagagattctggggagtataattaatggctttgctttgccgctcaaggaagagcacaaattgtttctagtctgccacttccacatgagtagtcggattgaccattctaggctgccacttccacatgatggaatcatgccaattctcgccttcctaataaatgacttctctggcctgagtgaggcagttgaggaaggcgatagctggctgagcggttattcacttgatactgatagatatgcaaagaacaaggtgcagaggcctagaattgaagggaggaaaggtcatatggtggcctgcccgttatag

SEQ ID NO: 18250 - DNA, 579 bp, Zea mays
  Peptide Sequence Number=SeqID_60029
atgccggtgctgggccgggctattttcgtgccgtgttgcgggccacccggggttttcggcttttcgctggagttttcggcttctgttcgttcacctggggcttatcgaggcgaccgggagtcgaagcccgatccggtctcgtgttcgttccttgcgatcaactcaacagcacgagtggaaagggagcacgtgggcgtgattggtattgcgggagacgggacgagacgagaggcgcgtctgccgagccgtggaacgtggcctgtgggcgccggcgcgattggtggccgcagttggcgaggacgaccagctgggcaagcaaagcagccgggagcggtttccgacgccaccaaggtactacagtacaacagagctgggggaaaaaacgcgaatggagagccgttctgcaccgattcatgcattggcctggaaacactaaacgatagtttacctgcatatggctatgggtttcagaagaggcctgtcacgaaatttggtgcagagttgttcgtgctagtcaagggatggcgccgacacccagaacgatggttttctgaaatggaagaagataccgatggctag

SEQ ID NO: 18251 - DNA, 348 bp, Zea mays
  Peptide Sequence Number=SeqID_60030
atgcccacctccttgtacatggcaggcagcaacatctcgtctatcttttccggcaccgacgccatgttcaccaacaccagcgtccatcggcggcgcgacgtcaccaccgcctccgaggatcactcatttcccttgcggttcgcagcaggcgacgacgcatccaccacgggcaggatggcgatggtgatgagcgtgatgccgttggcccccacctccatggtgatggcgaacccaaatctggggattgaggcagcggacgacaagatctggggaaagcgcttgaaggacggggcacgggcagagggggccaccaaatcggggatgcatgtctatttcggtggacgatag

SEQ ID NO: 18252 - DNA, 426 bp, Zea mays
  Peptide Sequence Number=SeqID_60031
atgggcaagagcaagaaaggtggtggctcttcgcatcactcgggcaaccagcgcaagcgcgagccgactcctccctcggaggacttcagcgactcggagtactcggaggaggagttctcctccgagtccgagggctctccggctcctgcctctcccccgacgtcgtctgatgattcagacgactcccaggggatcgccgcggtggtatggacttacatctgggccgtcgagcgcgccgggcttgagggctcggatgagtcggagtactcctcggacgaggagaattcctccgactcgtccgaggggggtggcggcggcgacggcgacgacgatggaggcgacggtgacggtggcggcgacagcggcaagggtggcagcggcgacggcagcggcggcagcaagggcagcaacaaggccagtggctag

SEQ ID NO: 18253 - DNA, 1656 bp, Zea mays
  Peptide Sequence Number=SeqID_60032
atgaggtcccgggtttggttggtaggatccgcggaaatcgcgggggaggaggacttgaagcagttcaggcaatggggaagcagaacaccgggccaccctgagaactttgagactccaggagttgaagttaccaccgggcctcttggtcagggtatcgccaatgccgttgggttggcacttgctgagaagcacctggctgcccgcttcaacaagcctgacagtgagatcgtcgaccactacacgtacgttattttgggagatggctgccaaatggagggtattgctaatgaagcttgctccttggctggacactggggtcttggcaagctgattgctttctacgatgacaaccacatttccatcgacggagacacggagattgcattcacagaggacgtgactaccacgatcggttttggatctcccaacaaggccaactcatacagtgttcatggaagtgcactgggtgccaaagaggttgaagcaaccaggcagaaccttggatggccctatgacacattctttgtaccagaggacgtcaagagtcactggagccgccacacacccgaaggtgctgcacttgaggctgattggaacgctaagtttgcagagtacgagaagaagtatgcagatgatgcagcaaccttgaaaagtatcatcacgggggagttacccactggctgggttgatgctcttcctaaatacactccagagagcccaggagatgccaccaggaacctctcccagcagtgcctgaacgcccttgctaatgttgtgcctggtcttatcggaggcagtgctgatcttgcatcctccaacatgactctgctgaagatgtttggtgacttccagaaggatacagctgaagagcgcaatgtccgcttcggagtcagagagcacggaatgggcgccatttgcaacggcattgctctgcacagcccagggtttgttccgtactgtgctacattctttgtcttcactgattacatgagaggtgccatgaggatctcggccctgtctgaagccggagtcatctatgtcatgacccacgactctattggtctcggagaagatggcccgacccatcagcccatcgagcacctggtgagcttccgtgcgatgccgaacatactgatgctccgccctgctgatggcaacgagactgccggagcatacaaagtcgcggtcctcaacaggaagaggccgtccatcctcgctctctccaggcaaaagctccctcacctgcctggcacctcgatcgagggcgtggagaagggcgggtacaccatctctgacaactcgaccggcaacaagcctgacatcattgtgatgggcaccggctccgagctggagatcgcggccaaggccgccgacgagctgaggaaggaggggaagacggtccgcgtcgtctcgttcgtctcctgggaactctttgatgagcagtcggatgagtacaaggagagcgtcctccctgccgccgtcacagcgaggatcagcatcgaggccgggtccactctcggctggcagaagtacgtcggagcccagggcaaggccattggcatcgacaagttcggcgcgagtgctcctgccgggacgatctacaaggagtacggcatcaccgtggagagcatcattgcagctgccaagagcttttaa

SEQ ID NO: 18254 - DNA, 342 bp, Zea mays
  Peptide Sequence Number=SeqID_60033
atgccaacagcgttccctggtacccgaccccctcgtaacccggatgcaaaacgaaattgggaaggtagcgaacttgggacatgtgttctcaccacgattcctgtcgtcaccaggtccgcccacgacgatccgcggatttgcaatggcggcgtcgaattcccggcgccacagtcagggattccgcctggcttcgcgacgaaccgacccgctacaccagggaggaccaccacagcgtacccaaacggtgaaaatgtggcccgagccggcaacccgaggagtggcgcggcgatgtttctaccgacggtgtggattccgcggcgcgggtgtgaagttcatacttaa

SEQ ID NO: 18255 - DNA, 648 bp, Zea mays
  Peptide Sequence Number=SeqID_60034
atgtatactattgaaacttggtttataagagaatctaggtcccctaaaaatgcctatgttgaaggtgatgcctcaagcgcaagctatttcttggctggtgctgcaattactggagggactgtgactgtggaaggttgtggcaccaccagtttgcagggtgatgtgaagtttgctgaggtactggagatgatgggagcgaaggttacatggaccgagactagcgtaactgttactggcccaccgcgggagccatttgggaggaaacacctcaaggcgattgatgtcaacatgaacaagatgcctgatgtcgccatgactcttgctgtggttgccctctttgccgatggcccgacagccatcagagacgtggcttcctggagagtaaaggagaccgagaggatggttgcgatccggacggagctaaccaagctgggagcatctgttgaggaagggccggactactgcatcatcacgccgccggagaagctgaacgtgacggcgatcgacacgtacgacgaccacaggatggccatggccttctcccttgccgcctgtgccgaggtccccgtgaccatccgggaccctgggtgcacccggaagaccttccccgactacttcgatgtgctgagcactttcgtcaagaattaa

SEQ ID NO: 18256 - DNA, 498 bp, Zea mays
  Peptide Sequence Number=SeqID_60035
atggcggcggatatggcgtacgcgccgccgatgaaggctggcaaggccgggttcgaggctggcatgatggatccacagcacaggatccgcatcacgctctcctccaagagcgtcaagaacctcgagaaagtctgcggggatctggtgaagggcgccaagggtaaggagctcaaggtcaagggccccgtgcggatgcctaccaaggtgctccacatcaccaccaggaagtctccctgtggagaaggtgacctctccttacctccccctcaacttctcacgtccaacaggaaggttaatatatgggttatgtcattttcagactatggttttgttattttctggacatgctgggcaggtaccaacacctgggatcgctttgagatgaggattcacaagagggtgatcgatctcgtcagtacaccagacgttgtcaagcagatcacctcaatcaccattgaaccaggtgtcgaggttgaggtgactatcagtgacgcttaa

SEQ ID NO: 18257 - DNA, 318 bp, Zea mays
  Peptide Sequence Number=SeqID_60036
atggaggctttgaatttgtcttggaatggattgctagctcttgtattgaatgttgaagtcgtgagctctcccggaggttgcgaaatcgacgacttcttccccccgtggcggaagatcatcctccgggtttgtcccgccaccttcctcgtcgtaggaggaggcgacagggcaaccatggccaggcaggacgcggtacctcgatcagatgtcaaaccagtcaatgacgccggaaccccagcgggggacttgtcgggcattgtcctcgcacctgagacaactaccggatgtctttttccccgcaacgtgccaaccccctag

SEQ ID NO: 18258 - DNA, 867 bp, Zea mays
  Peptide Sequence Number=SeqID_60037
atggcgataccggtagcacgcgtccacctcgccgtggcacacgcagcactcccggcgctcgtcccgaccccgcccaagtgcgagatgctgccgctgctcccgacgccgtgcgtcgccgttgtcctcccgaagccgctcgccaagcccagccgcgccgactccgacgagaggtgggacgcgcgcaagaccatgaccggcttggccgccagcacagatcagtcctcaacatcgtcaagccctcgttccaccgccggcagcgtctggagcagcgcccgacgacgcggatctgcctcccgcaagatcgcgacaacgccgcctaagcccggccgcgccgactccgacgagaggtgggacgtgcgcaagacaatgaccggcttggccgccagcacagatcagtcctcagcatcgtcaacgtcaagccctcgttccaccgccgacagcgtctggagcagcgcccaacgacgcggatcctcctgcaaaagcgcgacagcgctgccccccaagcccggccgagctgactccgctgtgcgatgggacgcgcacaagaagacggcaatcccagcttcgtcgtcgtcgtcgtcgtcttcaggcacgtcttcccacgtaagcagcggcaagtggacgatgagccgcgcgtcgtcgtctgcagagcgctgggacgtgcacaagaaatatcgcccgccgcaggccgccgtggcgctggacgacggcgagagcagtactgcttccagcaacgacattgacacggataaggaggagattgtatggaagccacgggccatctacgctgaaccgtgcttcatctccgccgcgccagcacccagcatgcttcccatgccgacagcgatcttgcttcgcgttgcatag

SEQ ID NO: 18259 - DNA, 1080 bp, Zea mays
  Peptide Sequence Number=SeqID_60038
atgtatggtattgctatggacactggacgcagcctacccatttactataaaccaacgaactggaggtcatcagagacagacaccacaaaaaccttttcctttccccggccggcctcccgccaccgttctcatgggtgttggtgcgatggaagcatcttccccggcctgcgacgacgccggcacgaccatatcgaggacctcccggcggacgtcctcgccctcgtgctccgccgcctcgacggcgcgtctctggcggcggtcgggtgcgcgagctcggggctccacgccctcgccaccgacccggccacgtggcgggcgctctgcctcgccatgtggcccgccgtccgcgacctcccctgcgtcgaccaccgggcgctgttcgccgacgccttcccggtcccgtgccccgtctcccctcccactcccactccgcagcccctgcccgcgcgcctcgtgtcggccgtcgacctgcgccacgcgggggcctgcgtcctgtcgtgcgtcgtgggcacggatgccgcctccgactggttcctgggcgcgccgttccgcgtcgacgtcgacgcgccgctgcatgagggcttcgcgtcgtcgccggccgccgtcgcgccggccgacctcgagctcagctgggtcctcgtcgacccggccacgggccgcgcgctcagcgccgccagccgccgcgccgtgtccgtcgaccgcaagtggctcacgggggacaccgtggcgcgcttcgccgtcgtgatcggcggcggcgtcgcgctcgaagccgccgtcacctgcgacgacggccggtacggccacgtccgggaggtcagcctgcgcgtcgaggacgccgacggcgctggcgtcagcggcagggacgggctggccgccgtcgccgccgccatggccgcgcccaggcgggggtgccgcggcgccggggaggacgcggccagggtcaggtacgaggacttcgtcagggagaggagggtgcgcaaggagtggaaggccaggcgcgagggcatcctcgacctctgctgctccggcgtcggggccgctgccttcctcggcttcctgctcatgctcacgttccggtga

SEQ ID NO: 18260 - DNA, 921 bp, Zea mays
  Peptide Sequence Number=SeqID_60039
atggcgatcccggttgcccgcgtgcacctcgccatggaacacgcggctctcccgcccctgctcccggccccgcccaactgcaagatgctgccgctgctcccgacgccaccgtgcgtggccaccatcatcctcccaaagccgcacgccaatgagcccagccgcgccgactccgacgagaggtgggacgcgcacaagaccaggccggccagcgcagaatcaacagcctcatcgcgccctcgttccttttcctgcggggccgccggacgcagatccacctaccgcatgaacgcgacgtcgccgcctaggcctggcctggcggctgactcggcagagagatggaacgcgcacaagaaggcggcggcgagtacagcttcttcgtcgccaggcacgtcttccctcaaaggcaacacgtgcacgatcagccgcagccacgcgtcgtccacggaacgctgggacgcgcacaagaaggcggcgagtccatcttcctcgtcgacgacgacgtcgtcgtcatcatcaggcacgtctttcttcaaaggcagcccgtgcacgatgatcagccgcagccgcgcgtcgtccacggaacgctgggacgcgcacaagaaggcggcgagtccagcttcatcgtcgtcatcatgcacgtcttccctcaaaggcagcccatgcacaatgatcagccgcagccgcgcgtcgtgcacggaacgctgggacgcgcacaggaagcgccgctgcccgccgcaggccgcgctgctcgacgatgatggcgagcgcagcagtactggcagcaacgacaacatcgaaacggaggagatagtatggaaaccacggcccacggccatctacgctgaaccgtgcttcatctccaccgcgccggaacccagcatgcttcccatgccgacagctttcttggctagcgttgcatag

SEQ ID NO: 18261 - DNA, 825 bp, Zea mays
  Peptide Sequence Number=SeqID_60040
atggcgataccggtagcacgcgtccacctcgccgtggcacacgcagcactcccggcgctcgtcccgaccccgcccaagtgcgagatgctgccgctgctcccgacgccgtgcgtcgccgttgtcctcccgaagccgctcgccaagcccagccgcgccgactccgacgagaggtgggacgcgcgcaagaccatgaccggcttggccgccagcacagatcagtcctcaacatcgtcaagccctcgttccaccgccggcagcgtctggagcagcgcccgacgacgcggatctgcctcccgcaagatcgcgacaacgccgcctaagcccggccgcgccgactccgacgagaggtgggacatcagtcctcagcatcgtcaacgtcaagccctcgttccaccgccgacagcgtctggagcagcgcccaacgacgcggatcctcctgcaaaagcgcgacagcgccgcgcgccccccaagcccggccgagctgactccgctgtgcgatgggacgcgcacaagaagacggcaatcccagcttcgtcgtcgtcttcaggcacgtcttcccacgtaagcagcggcaagtggacgatgagccgcgcgtcgtcgtctgcagagcgctgggacgtgcacaagaaatatcgcccgccgcaggccgccgtggcgctggacgacggcgagagcagtactgcttccagcaacgacattgacacggataaggaggagattgtatggaagccacggaccatctacgctgaaccgtgcttcatctccgccgcgccagcacccagcatgcttcccatgccgacagcgttcttgcttcgcgttgcatag

SEQ ID NO: 18262 - DNA, 2250 bp, Zea mays
  Peptide Sequence Number=SeqID_60041
atggtgaacaatgaatcttggttcttgcaatcagagactataacggtggtcaacaacacattagtaaatggtacaacaaaaagtggcgcaacaactatatcaacaccaagtctgcatgacctccagatctacggtgtgatcgtgaccatattactctgttttattgtattcggaggcgtcaagatcatcaacaaggttgcacctgctttcttggtcccagtcctcttctcaatactatgcatttacattggcgtctccattgcgccagagcctggtgcttcaaagggaatcactgggttgagcatcgtcacacttgcggagaactggggttcagagtaccaacctacaaacgatgctggtgttcctgatccaaatggatcgatatactgggatttcaatgcattgctaggactctttttcccggcagtcaccggaatcatggctggttcaaaccggtctgcatcactaagagacacacagagttccataccagttggaacgttaagtgctaccctttcgactactgtgatgtacctgctatctgtgtttatttttggagccttggctacaagagaagagcttctaactgacaggcttctcgctgcagcgatcgcgtggcctggtccagcaatgatctacattggaatcattctgtccaccttgggcgcagcgctacagagcatgacaggggctccgaggttactcgcggcgatagcgaacgacgacatcctccccatcctcaactgtttcaaggcctacgaagggtctgagcctcatgtggcgactctgttcacgagcttcatatgcgttgcctgtgtcgtgatcgggaacctggatctgatcacgcccaccatcaccatgttcttccttctgtgctatgctggtgttaacttgtcgtgctttcttctggatctcctggacgctcctagctggcgccctcgctggaagatacaccactggctcctctcgctggtcggtgcaactcaatgtatcgttatcatgtttatgatctcatggacatttaccgtggtgtccctcgccctcgcaagcctaatctactactacgtgagcttaaaaggaaaggctggggactggggagatggattcaaaagcgcatactttcagctggctctgcgaagcctcagatcgctgggagcaaacagcgtacatccaaagaactggtacccgattcctctcatattctgccgcccttggggcaagcttccagagaacgtcccgtgccatccgaagctcgcggacttcgccaactgcatgaagaagaagggccgcggcatgtccatcttcgtctcgatcatcgacggcgactaccacgaatcggtcgaggaagccaacgcggcgtaccgccagctcagcgcctacatcgactacaagcagtgcgagggcgtcgcggagatcatcgtggctcgctccatatccgacggtttccgcagcatcgtccagatcatggggctcggcaacctcaagccgaacatcgtcgtcatgcggtacccggagatatggcggcgcgagaacctggcgcagattccgtcgtcgttcaccagcatcataaacgactgcatcatcgcgaacaaggccatcgtcatcgtgaaagggctggacgagtggccgaacgagttccagaggctgtacgggaccattgacctgtactggatcgtgagggacgggggcctgatgcttctgctgtctcagctcctgctcgccagagacggcttcgagagctgcaagatccaggtgttctgcatcgcggaagagggcacggaagccgaggagctgaaggctgacgtcaagaagttcctgtatgatctgaggatgcgagctgaggtcatcgttgtgaccatgaagtcgatggaagcgcactctgagatcagccctaacgctaagaaggatccccaggaagagtacgcgagcgcccaggatagaatcagagcgtacctgtcgcagatgaaggaggatgcgcagagggaaggtcggccattgatggaggacggcaggcaggtcgtggttaacgaagagaaggtcgagaagttcctctacacgatgctgaagctgaatacaaccatcgtcaagtactccatgatggcagccgtggtgctggtgagcctcccgccgccgccgctgaaccacccggcctactgctacatggaatacatggatctgctcgtcgtcaacgtcccacggatgctgatagttaggggatatagaagagacgttgtcacacttttcacgtga

SEQ ID NO: 18263 - DNA, 297 bp, Zea mays
  Peptide Sequence Number=SeqID_60042
atgtcgggtgaacactccaagaatgagaaggttttgtcaggcggaaaacctgagccattgggatccatgcccgaaaacacgatgccagcgggcgggatgaagccatccgacgacaagcataagcacaaggagcatgaggaagaatccaccggctccaccaagttgcacaaaaagaaaggcaacaagaagaagaagatgatgaaagtggtctactacgcggctgactcctctgtggcatcgacctcggatgttgagtcaacatcctcgaagtgccaagagcgcaaaaagattaactga

SEQ ID NO: 18264 - DNA, 930 bp, Zea mays
  Peptide Sequence Number=SeqID_60043
atgatggaaagcagtggtggtagtggcagcagtgatccgttgctgctggcgccgggattcaggttctacccgacggaggaggagctgctgaccttctacctccggcaccgcctcgccggcaccaagcccgtcgtcgagcacctgatccccgtcatggacatctacggctaccacccctccgagctccaggcgatggccggcgcggcgaacgtgtgcgacacggagcagtggttcttcttctgcccccgcgcggagcgggagctgcacggtgggcggcccgcgcgcaccacgccgtcgggctactggaaggccactgggtcgccgtcctacgtctactcctcctcgcccaacaaccgggtcatcggggagaagcgcaccatggtcttctaccagggccgcgcgcccaccggcaacaggacccgctggaagatgaacgagtacaaggccgtcgccgacgatgcgccgccggcgccaggggcgcccgtcatgctgcggaacgacttcagcgtctgccgggtgtacatcagcacgggcacgctgaggtccttcgaccgccggccgctcaaccggccgggcggcctcgccgtcgtctccgctcatcaacaagccgtccactgcggttaccaacagcaacagctacagccacagctaccgccaccagcggcggtggcgaagacgacgacgagacaccaccatcagcagatgcatgctgcggtcgtcgtggacgacgacgcggccgacagcaacggacggcatgcagcggcggcggagaactcccacgacagctcgtcgtcggggtcgcggggcggcgtggacggagcagaagacgccgccatggccatcgactgggactcgctcatccctcctgtggatgatctcgccttcagaggcgtcgatgacttgacccgtgtcatttggccccataattga

SEQ ID NO: 18265 - DNA, 285 bp, Zea mays
  Peptide Sequence Number=SeqID_60044
atggcattcaccgaggcagtgtctcaggcgatggacgggctacctacggcggtctacagcgatgcggtaacacttctaagtaggtggcgtccaggcggcaagcggcagactccagcgagggtcatcttgatcggctgcagggcaagtgggtacggtggccagctcacagcctcatccgcggtcaagatctttccaccgccggccgttatccgcacccaaggcgcacgaatcgcaacacaggcgaggatcgtggcgcacgcccaccggcggcgacaggttcactga

SEQ ID NO: 18266 - DNA, 384 bp, Zea mays
  Peptide Sequence Number=SeqID_60045
atgccgcggatatttccgccacaaccagatgaagcctccgcactctccaagaccgaccgaggtggcgacgaagagcggtccgacgtcgagctcgcggtgaccgaacacccggtgatgatggcgcttcctgttgacgtggcgggcctgtgccctaggtcgggcgacgtggaggctcctccgaagccgaggtcgagtctgtcttccatgggccgaggccgagcccgagcccctggggtcgggcgaggcggaggttgttcggcagaggccagggcggagtccgagccctgggggtcgggcgaaccggagttcgtcatcttctggggcctagcccgagtccgagccctgggtcgggcggagcggagttcgccgtcttccggggcttag

SEQ ID NO: 18267 - DNA, 174 bp, Zea mays
  Peptide Sequence Number=SeqID_60046
atggctgggaaaattctaatctcaaccgttggccgccagatcaacggctggcgatctctcccctaccccgagcacccgagacggcggcgccgccccgcgcctacggcggaggccatggccggcggcccaattcccgtgttccagccccccaaacctaattccgagctgagctag

SEQ ID NO: 18268 - DNA, 705 bp, Zea mays
  Peptide Sequence Number=SeqID_60047
atggatgctggagccagacgggcgtgtgcctcgacaacgcggggggcgggggcgggggtggggctctggggatgggcacgacaatctcgagtaggggcatggcgacagtcttgggaagaaggggacagacaggtaaggagggtgaagcgctggggcgggggcacggatttgagagaggccgaggcggcatggattgcggcattcttgccggatccgattcgcggcgacgacgctagggttttggcgattttggtgaggagcgaggggggcggggtcgacagcgcgaggtggtgtgagctgtgccgatggtgtaggacacaggatgggcgcggagcggggttctggtggggaagggcggggacggcggagctcgcggcgggcgtggcggtagaaggcagcggcggacgtggaggcggctttcatggcggaggaggcgagcggagggcatcagccttaccgggatcccccgcggcggctcctgcggcagccgcgacggcgagcagggccagcgccgccacgctgatcctcgaggcacaacgcccgcgccacatcccctacgcagcccatgcgcaaccaggtctcctcgacccagatctcagccccgggagcggaggatgggagttgtggacggcgtcgggtatggaggatgggatgggggcgccatgtaaggaagggagcgcagatggttgggacctcgccgtgtaa

SEQ ID NO: 18269 - DNA, 273 bp, Zea mays
  Peptide Sequence Number=SeqID_60048
atgaggctgcacatcgtcgtcgttgtcctgctcgtcaccacctacgtcgcgccaacggcgtcgctacagcagtatcacaagcccagcaggatctcaggtatagggccttcagatgcaacaaaaatttggagaagagtttggaaattttcactggttttttcgatatttgaagactttggcatctctgttgattgtgtggctaccagtgaagctgaaaaagaggcctacgaaggagctgagaagaaaaggaaggctacagaagagattaattaa

SEQ ID NO: 18270 - DNA, 393 bp, Zea mays
  Peptide Sequence Number=SeqID_60049
atgccgggcggagctttataccaggtcgaccccatctctccgccccagctagccgaatcgcagaggtgccaactacccaggtccacctatcacccaccacgcacaatcaccactcgcaccaggaatctacccgggggcccactgttgttacaagccattggtgaaacccttgacgaaagaggaagagctattctcgatgacaaaccagagaacaccataacatgccctaaaaatcaaacgagccaatttagtataagattaaataccagagataaacaaaagacacaaaatcctattaggctaccaaagagaaggctcgtacaagaccacagttggcacagagaacaactgaagaagagtataaacaccaagacaatcaacacagtgaagtaa

SEQ ID NO: 18271 - DNA, 150 bp, Zea mays
  Peptide Sequence Number=SeqID_60050
atggcagtcctagggctaggtagcctcgggcgaggcggagatggggccctagggcgcgggaggcttgggcgaggtggagatatgcccgagcatgtggcctactcgagatcaatctcagtagctcgcgagccttccgaggaagtgtgttga

SEQ ID NO: 18272 - DNA, 408 bp, Zea mays
  Peptide Sequence Number=SeqID_60051
atggcggagcgcaagcaagaaacaagaaaatttcctagattaactatgactagattagatgatgcactgaggctagagaaattcactagtgtgcacttcaagaggtggcaagttaaggccacaatctggttaactgcgatgaacgtgtttcacatgacaatgggtaagctagagggtgatatcacttctaaagaagagaagaaattcgccgaggctaatactctatctgtggtatacattccagcgtacttgtcgaccgtttgtgtgattctaagatgcattatacatataggaaggaactatgggatgcacttactacaaaatatggtgcatctgatgcttgcagtgaactatatgtcatggagagctttcatgattataagatggttgataattgctctggtgtag

SEQ ID NO: 18273 - DNA, 123 bp, Zea mays
  Peptide Sequence Number=SeqID_60052
atggagcaccagacctggaaccagagcaccaatgaggcagacgagaggagctccaacggtcgaacctggccgtgcgggagggtgtgcagggtgttcatccgaacagggcccctaaatctctaa

SEQ ID NO: 18274 - DNA, 1419 bp, Zea mays
  Peptide Sequence Number=SeqID_60053
atgggcgaaacaatctcgttcgcccctcagaaggccatcaagtcccaggtcttggcggacttcgtggctgaatgggtcgacacccagctcccaacagctccgatccaaccggaactctggaccatgttcttcgatgggtcgctgatgaagacaggagcaggcgcgggcctgctcttcatctcacccctcggaaagcacctacgctacgtgctacgcctccatttcccggcgtccaacaatgtggctaagtacgaggctctggtcaacgggttgtggatcgccattgagctaggggtccgacgcctcgacgctcgcggtgactcgcagctcgtcatcgaccaagtcatgaagaactcccactgccgcgacccgaagatggaggcctactgcgatgaggttcggcgcctagaagacaagttctacgggctcgagctcaaccacatcgcccgacgctacaacgagactgcggacgagctggctaaaacagcctcgaggcgaacaacggttcccccggacgtcttctcccgagacctgcatcaaccctccgtcaagatcgacgacatgcccaagcccgaggcaacctcggccgagcctgaggcaccctcggctcagcccgaggtaccctcggctcagtccgaggtaccctcggctcggcccgagaaggcacccgggggctacacgcacctgttggtcgccatcgacaaattctccaagtggatcgaggtccgacccctaaacagcatcaggtccgaacaggcggtggcgttcttcaccaacatcatccatcgtttcggggtcccgaactccatcatcaccgacaacggcacccagttcaccggcagaaagttcctggacttctgcgaggatcaccacatccgggtggactgggccgccgtggctcaccccatgacaaatgggcaagtggagcgtgccaacgacatgattctacaaggactcaagcctcggatctacaacgacctcaacaagttcggcaagcgatggatgaaggaactcccctcgatggtctggagtctgaggacaacaccgagccgagccacgggcttcatgccgttctttctagtctatggggtcgaggccatcttgcccacagacttagaatacggttccccgaggacgagggcctatgctgaccaaagcaaccaagctaatcgagaagactcgctggaccagctggaagaggctcgggacatggccttgctacactcggcgcgttaccagcagtccctgcgacgctaccacgcccgaggggtccggtcccgagacctccaggtgggcgacctggtgcttcggctgcgacaagacgcccgagggcggcacaagctcacgcctccctgggaagggccgttcgtcatcgccaaagttctgaagcccggaacatacaagctggccaacagctaa

SEQ ID NO: 18275 - DNA, 1572 bp, Zea mays
  Peptide Sequence Number=SeqID_60054
atgtccgccgcggtgacggcgccgccctgccacagccggccgtctcctctcaaccccagctcgagggccacgccgtcgccgagcagcaacggcggcaagcccaacgcggtctccacgacacggaggcacctcgccaacctcgaccgcctcctcgtcaagccgccaccgctcccgctcccggctcagcccaggaaacagccaaccggggtacccgtaccaggcgacggggaggccagccccgacaaccgcagcggccacggtgggctcctcaacgcgctgaacctatccacgtttctgcccttcacgcggaaggcagccgtggacgagctgtccccgcgcagcctggcgtacatgcagcgcctcctcacgctctccccgcggctgtcgcccaagggctccatcgcgggcgagtggcggaggtaccacggcgagggcggctgggagggcctcctcgacccgctcgaccagaacctgcgccgcgagctccttcgctacggcgacttcgtgcaggccgcctacacggcgttccactccatgccggcggcggcggaggcatcctccagcagcggtcagcaacgcaccctcgtgctgccggaccgcacctaccacccgacgcgcagcctgttcgcctcgtcgtcgctgtccatcccgccgtgggcgcagcggcggtcggcgcccaactggctcacgcagcgcaccagcttcgtcggctacgtcgccgtctgcgacaacgagcaggaggtccgtcgcatgggccgacgcgacgtagcgatcgtgctacgtggcaccgccacgtgccccgagtgggccgagaatctccgcgccagcctcgtgccgctcacggcggacgacgacgcgtccgcgcccaaggtggcgaaggggttcctgagcctatacaagacgccgggagaccatgcgcccagtctctcggccgccatagtggaggaggtgaagcgtctcatggagacggcaccacagatcaccgcccggccgccgatcgcggtggtctccttcggtggccccaagaccggaaaccgcgcgttcgcggagcggctgcagcgcgagcgaggcgtgaacgtcctgcgggtggtgaacgcgggcgacgtcgtgacgcgcgtaccggcgccgatcgcgcgggaagggtatgtgcacgcgggtggcgctgagctgagactgcacagcagcgactcgccgtgcctgcgtcccgacgcggggccagcgtgctgccacgacttggaggcgtacctacaccttctggacgggttcgccggctccgggcggccgttccgcccagacgcgagccgcagcgtggcgaggctgctgacataccagcggcccaacgtgaagcttgcgtacgtggagcgcgcgcggatgctcgggttcgagcaggcttcgcccaggaccgccaccgccaacggcgccgccgccgacggccatgtgtcctcggcggcaatggcgacaacaagagatggaatcggcggcaacaacggcggcccgcggtggcgagcaggaagtagccgaagcgaagtagctgcaacaatgagttggacagaacgggagccgtacgactag

SEQ ID NO: 18276 - DNA, 219 bp, Zea mays
  Peptide Sequence Number=SeqID_60055
atggggcccgcatggcggccactcggtccgtgctcgcgtctcaccttcccctggcgcatgggtcccactgcaactgctcttcttcccggacggaagaatcggcatggtagttgcgccaccccggtctacagctatgggtcggagtccaccgccggggctgctacacgcgtggtcgcggctttcgacgtcggggttactggtaataacgtgttcctatag

SEQ ID NO: 18277 - DNA, 984 bp, Zea mays
  Peptide Sequence Number=SeqID_60056
atggcgacatccaagaaggatccccccaatcctagcagaggcaggacgtcacccaacctcatgtcgtccagcagtgagtcctctgggcacggatatggtgctaggcgggctcggtctgtaccgagttccgcgcaccgcaaatttggctcatcgtcgccgtctgtgtctgcctctggctccacagacgtgcatcattcatcattgttcaacgctggtaggtccatctcatcacggaccatgggctcttccatccagggcaccaaggcccagccattcccatctgcagcctcaaaacctacactggcaaaggagaaatccgacaagagggtcatgttgccaggtgctgctcaaggagacaaagttcagccactgtctaccgcacagtcacctggtgcagctgcaaggaagagattggatactgttaatggtgctactaccaactcaaaggctaaaagtgtttctcagaaggcaatgggggcatcttcagccaggaaggagaaacataaggacccatcaatgcagattaagggaactgagtgcataaacaccaccacgtctatagaagagcacttgcacaaggagctccccgacccagttgatctgaaatccatggagatgactgtacctgatcagcatgagccatctttcaatgaaccagaacatgtactcaaagacgatgagaaatccgagggtcatttctctgaagagaaagtagatgcaggagctaatgagattcataatggagggcaagatgacaatggtggtgtcaagactatatatgaatgtgggattgttgagaagaaggctgaccggagtgtggataagacagtgccgaagactgaagtggctcaggtatggaggaaggatgatccaaagggcaatgacgtgattgaggaaaccaaaagcaagctcctgctggagaggaagagccgggtgaaggccttggtgggggcctttgaaactgtattgtcgttcaaggagtag

SEQ ID NO: 18278 - DNA, 2538 bp, Zea mays
  Peptide Sequence Number=SeqID_60057
accaagcaaaagaagaaccgtaaggctaaagacaaggaaagagatgagaaatgcgaggttaaaattctggaaaggcttcgtgatgaaactgccattgataatagtgatggcttaccatctcaggtggaagtgatagcaaagattgatgccttggaagaaggttcttcagatgggtcagacatgtcaaatagtttttctgtgtatcatgatctttttaagaaattgagtctaactcagttgttggagaaaaacattgaggggcagaaacttctcaaaaaacattttgaagctagggacgcaaaagcgaaggaagaaccttctgactcatctaattctttggataagccacctgatgttccagagatcccggtgcattcatcagaagataccgttgatcttaaagtgaatggaacaccaaagaaggatgcatctgtggtcaaccctgttctggaggattctgtttcaggcataccagtcactgcaaacaatgaacctgtgccttctcccaccacaacaaaaatggacccagtttcaaacaaagttaatggatcaagtttgaaaatgaaagtcaccatggcatctccttgctccaaatcacatccagctgatatggataaagatgcctctcttccttctaaatcaccacgaaccaatagagctgctccagttcctcctaagctgccttcagctgataaagcaacgctagttccctcaaagctaccttcggttgataaagctactccagttcctcaaaaatctccgttggtaaacaaagtagctcaggcccgtcccaaatctccagcagttgacaaagcaactccacatcgtcccaaatctccagcagttgacaaagcaactccagttcgttctcaatctccagcagttgacaaagccactctagttcgccctcaatctccagcagttgacaaagcaactccagttcgtcctcaatccgcagcagttgacaaagcaactccagttcgcccaaaatctccagccattgataaagcaactccaattgctcccaaatctccaccagttgataaagcctctccagctctgccaaaatcattatcaggtgctaaagatgcgctttttccttctaggtcgctgcagattgataagtttactccagccgccccaaggttatcacaagatgataaggctgctctgccttcttcagaacagtcacatatatctccagctactagttctgaagctcaaggggcaactactaggaaggtcacaactaccacctcactttcagaggctgctgcagcatggaggccttcaagtgctcctgtgttacccacaccaagatcaaccgggccagctgcttcacatattcaaacttccacattgctttcccgctcgatgagtgaagcagctgggagaaggccagtaaatgatccttcattttctgccccatcttatactccacagacctaccggaatgcaataattggtaagtctggtctgtctatgacctccgcaagccttgcgtatcagccgtcttctctggatcaagacactgctccttcacggcctctatcagcatatgcatcaagtacagtcatgatgcctcctgcaggaagatctgatcagtcatcagctaggcatggattcaagtctgggcctggtaagttagaagcacatgacggctggcagcagtggaaaggtgacagtaatgttgatatgcatctctggagggaccacgctccttaccaacaaatgaccaacagtcaagcatatgagcagtctcggagggacgatacttatcagcaagcatgcagcagaggaacagaaaagttcagcaggcatgcaggactgcaagctaggcagcagttccaaaccgagacacccgccagtcatgtatggcatcaaccgcaggggccagtggcagaagaatttccacaccttgacatcataaacgacttgcttgaggaggaccagatcaacggcagtataccggagtcgtttcgtcaagactacaacgtgtttggcctgccgttttcaccgagaggaaacttgtcagacatggaaatggcttctgttagaagtcccgctcggttcaattcacccaagtacgatggtggattgtcgggggcttatgacatgaatgctgtcaatgggttgagggaacggcagtttccctcgttggatatctactctaatggcctgtctgacgtgagtgcttctaagccttggctgaatggctctgccagtccatcggtgagccttggggtcaacacaaatggataccacccccagctaaatttggcggtggcctgtgggagagagaagaacggtatgaaggtgagtgtgaatgtggagccaacaaccaagagcggatatcacctccttacgcagaacggcacccgcgccacgctgctcgactacagcctcctcgacggtgccacagcgaaggggcacgtggccgcaaccaccgaccaacatgtctccacgtcctcattcgacctcgacgtgtcatggcaagccgtcggacgccagcaccagactgacgatacgggtctctga

SEQ ID NO: 18279 - DNA, 1002 bp, Zea mays
  Peptide Sequence Number=SeqID_60058
atggttgacatgtttctttttatcaaatggtctgttggtgcccgtggggactggggagctagaagtatattcttgtatatcctcaaggatgtgatgtctctaatcatctttcattattcctttgcgttgctaatcatgacaaacttctcccagttcactatagctgtagccaatatagatcctaaaaagatgaagtactcaggtgagctgaacttggtttgttttcttcttggaaggttctggaagaaggagcatgattggggatggaaaaaatttatggagctatcaaagattcaggatggttttcttgttgatgatgttcttgaaatcatagctcaagttcaggttatcagggagaaagtggatagaccttttcgttgccttgatcgtccttaccggagagaattgatccgcatctatatgacaaatgtggaacaaatataccgacgttttattgaggagcgaagaagtaaattaagcaagctcattgaggacaaaataaaatggtccagttttcgtgctttctggtcagcaattgacccaaacaccaggcatcgcatgtccagggaaaagactgacaccatattgaaaatgttagtgaagcaattctttgtagagaaagaagttacttccacattagtgatggactccttgtatacgagtctgaaggcacttgaataccagatgaagggcaggaaaggcaaaacaaaattagcagatttggaagaactacctgcgcctatggtccatgttgacatggacatgtttattttggctgatgatgtcatagctttgcttgagagagctgccttagaacccttgccttgtcaacctttagcccccaaggatgataaaacttcccaaccccgcatgaaggtgtctactttcttggccctagaacctcggatcaattatgttaggacaattttcttgctagtttctcatgcttacttgcagatatttgagcatgcaattagtatgttctctgcactatcttggtag

SEQ ID NO: 18280 - DNA, 2064 bp, Zea mays
  Peptide Sequence Number=SeqID_60059
atgcgcggcatcagggagagcctcagaacggtgcagggcagcctgctgcgcctggaggcagtcgtgctcctgagcgcgctcatcctcgccgccctggtgctctacggctccgccaaccgccgcagcagcgacaagctgctccgcggcgccatgtggatggcctactccatgtcctacgtggtggtctcctacgccgtggggatcatccaggacgggcccttccgcggcgagacgttcgtgctctgggcggccgcgctgctgctcatccaggcgagcgcgtactcggcgcccgtgcacagccgccgcgacgtggaccagcgcaagaagctgctgctgcagcacgtcctccagacgggcctcgtgctctggctcatcgtcaacgccaccggccacaacgccagctaccgcgccgccatctgggcgttctgggcgctcaacgtgctcaagacggctgccaagatagccgagatgatcgaggtcagccgccccgacctgtctgtcagggttgtcgccgagtacatggccgagtacatggctgaggctgacggcgtccagcagcagcctgcagctgaccccgccaccatgcaagggtacgcgtacatcttccacggcgaggaggtgatggagccggtcatccacaccggcggccaccgcgtccgggaaaacatgctctcccagagcgccgtcaagtcggtcgtcacgatcgaccaagtttaccagtggatcgatcagcagccggacagcgatgtcgagaaggacagggccaaggacttctgcctcgcgttcgccctgttcaagctgctgaagcgccggttctacgggtacgttccggcggaggccggctcggagaaggcgcgcagcctcgtcctcaacgggctcatccacatggacgccaccggccctgacgccgccttccgggtcgtcgaggcggagctcgccttcctctacgacttcttctacaccaggaacattgtgctggtgggagccaagacgtacatctgcatcgccgttgccgtggcggggctgaccatgtggacggcgttcttcggcacgctcggccccggctaccaccgcctccacatcggcgtgcgcaacctcgaccgctccgtcaccatgctccttgtcgtgatcaccgcgggccttgaggtgttccaggcggtggccggcttctcctccaactggaggtacgttaagaccgtgtaccgctgcgtgcgcgacgaccggcggtggtcggggcggcggctgggccaccacctgtggtggaagcagagcatcgcgccgccggagacgaggtactgggaagacaaggtcggccagtacgtgctcctgaagcgattcgaacgccggccgtgtaacctgctctcgtggctgacgctttacctggtggagccgcgtcggcagggccagaagcggggcaggaggaagccgctgcctcccgaggtgaagcgcgccgtgctcctctggctcaaacagaaccattgccacctcagcaatggtgtggcgacactgcgaaagcaccatctgttgccgcgtctggcatgggcgtgcaggcttcccatggtcaccgatcagatcttggcgtggcacgtggtcaccacgagctgtgactggtcttatagtttccgtccagctggccgcttcgcagccggtgacgaccaccatcggctcgtcgcgaagaagttgtccaactactgcgcctacctggtggcgttcgtgccggagatgctgccggaccccagctacaacgccgagcagatattcgacacggcggtgcagcaggcgcgggaccacctggacggctgcaaaacgcatagcagcataatcgccaggctagaggagatggagatcgcagagcggccggcggcctttggagtcgacgacgcgcggcggtgggaggtgctggccgagttctggacggagctcgtgctgttcctcgcgccatcggacaacgtggacattcacgctgagatgctcggcgccggcggcgagttcatgacgcagctgtgggcgctgctgtctcatgccggcgtcctggagcgaccaccaatcatgcagaggcaatga

SEQ ID NO: 18281 - DNA, 459 bp, Zea mays
  Peptide Sequence Number=SeqID_60060
atggtctccgcctcgcccgacccggggctcggactcgacctcgacctcggaagacagactcgacctcgacctcggaggagcctccgcctcgcccgatccagggctcggaccgaccatgtcaaagccggttcagtttttgacaacattttgatttgcgatgaaccagactacgcaagacatgtcgtagacgaaacttttgctgcaaataaggaggctgaaaaagaggcctttgaaggagctgaaaagaagaggaaggctagagaagaagaggaagcacgacgggcacgggaggagggggagagacgaaggcgggagagggacagggaccgtggcagggatcggtacatttcttccatttgccatgctggatctcttttccctcttggtattattttcgtcttgtccttgccatataagcgccagcgccacaggcactacgactatcatgacgagctatag

SEQ ID NO: 18282 - DNA, 363 bp, Zea mays
  Peptide Sequence Number=SeqID_60061
atggcgcccgagactggacttggctgttgtcagcctcaccctggcgggtggcacagcagtcggagcagggcagtcagtgctgttttcctgtcagttgtgaaggatatgcaaaagtcgagccctcgaagggcattacaaggacaggatgcggtgctcgtatttagttcagtgttagtaaagaagggatttggtcggtgcaaaaggttgtattggagcacaatcattataggagaagatccaaacaacacatctggaaatggggacaatgacgttgatacaaacttcagtgttggttatgatcaatcttcaaccatggcgattccagtgatgcaaggtgggaatgttgtcggggaccataattag

SEQ ID NO: 18283 - DNA, 456 bp, Zea mays
  Peptide Sequence Number=SeqID_60062
atgggtagaagcagaaggggtcgtggctggcctcgccgtgctgacggcaagtgcaagcgtgccccgagtcccccctcggaggactttggggactcggagtactcggaggaagcatcctccgagtcagactgttcatctgctccggtttcgcccccggcgtcatccgaggacttggatgactccatggggctttccaccgcggcccaggtgtactggcgctccatcgagcgtgctaggctcgatgaggtagactcctccgactcttccgaggagtggagcggtggcgatggcaatgacaacggcgacgacagtggtgatgatagtgagggcgacagcggcgacgacggagtaagggtgacggtggtggcggcagcagcgacgacggcaagggcgacaacggtggcagcagcgactgtggcatgggtgacggcggcgacggcaaggccagtggcatag

SEQ ID NO: 18284 - DNA, 771 bp, Zea mays
  Peptide Sequence Number=SeqID_60063
atggccgcggcggccgacggccaaagggcgcggcagcaccgcggcaccggcaccggcacggagccgtcgcggatcgatcacgagcctcaagatctcctgcagaggcagaggcgacgtgctgcggaggaagcactcaaggcgaaggcgaaggcgaaggcgacgaccgacgtgtcggctagtgcgcgcgcggtcggagtctcggaagatccggcaacagtgacgacgatgtggatcgctgacggatcgacaggtcgtcaacggagccaaatcgacaagcacgtcctgtcacgggctccctgcaacgcgactgcggagagcaggatcggacacgccgttaatatacctttctttctcggcgggcaaatgatctcgcttttgactccgccgtacgtggatggaaaagcgggcatgaaagatgaaacgcacaaggtacagtgcgtcccggaagcgatgagcataccaggcgaccgagcagcgtgcaggatcgtgcgccggtccgccaatgatcgctgtgcggtgcctgaagagtttgttgatcatccatcaacgtcgcagaaggcgtcacactcgcataatactgccagacgccgtcggctaggctacctaaaagactgcaatcagtcgcgcgcacagcacaaagatcagaggccgttgagctatgccagtcgccgtgccgagcgctgcgtttgtatggggcatagctcgtacagatttggatttggatttggaagaacgtttaagttagccgcgtcctccgtactactaaagtga

SEQ ID NO: 18285 - DNA, 180 bp, Zea mays
  Peptide Sequence Number=SeqID_60064
atggcggcgctggccgagtttgccgccgtctcgggggcaacaccgacgctgttgcctgtcgggtcctcgagaacccacaccttcctagagatcccaatggcgatgactgacgaccgcggtggtgaacagaactccaactccatcgacaaccggaggagcatgagaaatctttcgatttaa

SEQ ID NO: 18286 - DNA, 117 bp, Zea mays
  Peptide Sequence Number=SeqID_60065
atgggtgactacgtcttaggtcacgtgaggagtaaagtctgcgggcaggttcactcaggtctctatgttaaaaatcacagaaaaagacctaccggatatttagttgtgattttctaa

SEQ ID NO: 18287 - DNA, 160 bp, Zea mays
  Peptide Sequence Number=SeqID_60066
atggcgaacgaggtggcggcaaatgaggcgagaactatcattatcgtgcggagggctgccgcctgccggagagataacattatcttcatcgtaccgaacaggggcgatgccagccagtgcgtcgttgacatctatgcgggagtggcaatcctttctgcag

SEQ ID NO: 18288 - DNA, 132 bp, Zea mays
  Peptide Sequence Number=SeqID_60067
atggagagctccgccactgagtacacaggatccatccctgaagctacccgagcactttccttaagtcaatttgactggttccaccttaattcacatctgcccacgacgatggcggagccagagctccggtga

SEQ ID NO: 18289 - DNA, 4422 bp, Zea mays
  Peptide Sequence Number=SeqID_60068
tgcagctttctgtttgctcctgaagaattaaaccaatctgagttgactagtctttataccttgaaaggaaaaggccatgatgtaataactcaaacaagtctgaaccatgacattcctgaaggcagaagtaaagagaaactatcatctgaccctttcctgctagataatgttgttgcagctgattattttgattcacaggctgattatcaacagctggaaaactaccaggactgtgagttaagagctcaagaatttcatcgcatagcactcaacctatgcatgcaacaagaaccaacattagaagggcataatgctggaattgatgctttgctattagccgcagaatgttatgttaatccattttttctattgggattccagtctaatttagagcctctggacaagattgaacgtattcattcagagttgatgcaagggaatgcttcctctgtatcaaaaaatttgcacttgaaagatttcaacaaaaaaacaatctacaatttggagaacaagcgtgatagatctgttatagatttactcctacaagccgccagatttgactttgaatatcatggaaagatacctgaaggggaactatatccaaatattgctgaagatggcaagcgatctgtagaaatctcacctgaagctcttcagtttgctgatgctgtaactttggtccgaaagaaccaggctatgctgtgccactttattatgaagcaattccaaaggaaaggacacttgggtagtgaaattcttctccagagcttgttgttcctgttgcactcagcaactgatctattttgtccaccagagaatgtagttgatataattttgaagtctgctgaaagcctcaatgatcagcttacatgtctttacagtttttttagtgcagggaataagaaattggataggataaaaatacatggtctaagaagacgttggatgcttctccagaaactggttctggcttcatcaggcagtgatagtactagagaacttgccagaaataaaagagatggtttccattttagaagtttagtccctccatcaacatggatacaaaagatatctgatttctccatgttttctagcccactccctcgatttttcggatggatggcagtgtcttgctatgccaaggaatatttaaatgagaagctgtttcttgcttctgatttctcacagcttacatctttgctatcaatttacatggatgaactttgtttgatggatggagttgcaatcccgaaagtcaggtctgcaaaaggtgaacaatttagttgtacggacttgtttcttaaaaaggaaactactctgtcagaccaaccaagcatgaccgaacagtttaaaatcttacttccggagctacatttcttctttccaagcatgggtaaattgtttaatgcatttggggagagcatcttggaggctgttgggctacagttaaaatgtctgcccaatagtgcaataccagacgtcctttgttggttttctgagttgtgcttatggccttatctcgaacacattaaggagcatcttgtagttgcaaacggagttagttatataagaggaagtattgctgctaatgcaaaatcagttgtcttctacctacttgagtctattgttactgagcacttggaggctgttattcctgaaatgcccaggatagtgcacattcttgtgtctctctgtagagcttcttatactgatgtggccttcctaaaatctgtgctatgtctaatcaagccactcatctcctacttcttaaggaagggaactaatgaaacaaaagtactgggccatataaaggagggcagcaattttgagttgctttgttttgaagaattgtttgaaattgttcgctgtggtaaagattcggtggatacaactgaagataatattcaggcaccgttggtcatcttcattctgggatctatgtttcttgatttctcatttgagagaaggattgaaatgttaggctccttgttagtatggattgattgcatcagttccgatccaccatcgttattatgcaactatcttcaaggtttccagacacttctagatggttttgaagctgtgctaattcaaaatattgaactacttggtgtcggcatcctttctgcgacaaactcgtctatagaatcttctgattccttgggcattgatggcactatgctactagagaagaaggcacaagataatgaagaacaaacactaatgaaatccgtaacatactgtgagaacgatggaaatcataagggtcttcgtaatctgcatcctaatagtatcatagagttttgtggcaccctggagaagtttattttgcaccttacttcatatattgaggatagttggaaatggcaccatcagttggcctctaggatctctttgtctatggcaaagtgtttgttgtttgcaaaatttttgaagtccatagcgcaagaagacacaatatctagtagcagtgagcaagatgtcgctgtgaaaatttcctgtgagcttgcacaaaagcattggcaaagtgctcttgaaggtctaggagataccattttgataaatcaggaaacacagttctggcaggtggcatcagctatgcttgattatataatggggataccaaacgtccttgcttggggtaatgttcttaatactacatgctctgcggtcaagcacttctgctcccatgcacctaggctatcttggaggctgcagacagataagtggttgtcattattagtttcaggtggaattgagggcttcaaaaacagtgagatctgtttgattgatcttttctgtacaatgttgaatcattctgaaccagagcagcgttttgttgctgtacaacagcttgggaggattattaactcaacaagttctactgaagctgatttgaaatatccaaactatgaccaaaatttcctcatatctgtttcgacagtaacatcccttttggtaactcatacatgggacagagtagcagcattggctctccatgactcttctatgctattaaggaatcatgcaatggcattgcttactgaatatgtgccttttgttgataggaagcacctgcagtccttcctttcatccagtaacggtatcctgactggtttgggacaactttctggtgtaattgaagagggctattttacacgaatgtctttgctgttgttttctaaggcatgtctttattctaatcctgaagatatcgctttgatacctgaatgtgtttggcagaagttggaaaacatgcaaacatcaactggaggttttggatatatggagaaagatctctgcctagctctgtgccaactaaaaagtgaatcagatgctacaactgtactgccccttcccaccccctctccggttgcaaaagttctttctggatgtaatagtcaaccagtcagccctgatttcaagagcatccgtgaatcaatccttcaggtgatgtcctctttgagttctattgaagcatactttgagttcttcgcagccagatctgcacaagaacatgaggaacttgaagaagctgagattgaattggagcttattgaaaaagagaagtcagttcctaactttgttgagcataccaatgatacgatggtgcttgccatgccatcatatgaccgtgatggtagtgaggttaataaacggctccagcaaatccgggaaaatattcggtccctggaaaggtctaggctgaaagaggaaattacagcgcgcagacaaaagaagctgcttctaagacatgcccgtgaaaagtacctagaagagacacgctccagggaaacggagcttatgcaagagctcgacagggaaagagctctcgagatggaacgtgaagtagaaaggcagcgtcaactggatattgagcgtgcaaagtctagggaactgcaattcaacattgatttggaaaaagagaaacaaactcagagagagcttcaacgcgaactggagcaagtcgagttggggcggtcatcaaggcgtgagttctctgccaatcccaacagccgctccagggagaggtaccgcgaaagggatggtggaggcagagcacagcaggaggcggggagcctgaggtcttcgagcagccgaggccaggaggggggctctgcccaggcgcccgcaccggccgggccgggccctaccgtcatgctcgccgggtcaaggacgttctcgggggccaaccttccaacgattctgcagcctcgcgagcgcgctgccgacgaggacagcgcttgggccgaggacgctagcagcaacggagatcctgaactggacggcgtgaggccgcatgggccgcgaggcagcaggtcatcctcctctaggcaggttgcggagaggagggagcgggatggcactgctgccggcacgggcaggagagaagggaaatgggagaggaagcagcacccgtga

SEQ ID NO: 18290 - DNA, 567 bp, Zea mays
  Peptide Sequence Number=SeqID_60069
atgtaccgcactcctccccaagggacaaatcaaccttggcagagcgagccgcatacaccgagccccattgacggcacgacggcgaagcgaactacaccccgtgccgctactgattcttcttccaatgatgatgagaacctaaggatcctgccaccgcctcctatgccacctcgctcacatgatcacaaggctcgtagttccggtgttgctcctgttgcccctccagctattgaccctactctggcttttatccttcagtctcttactcagcagcaggctcatctggcagcagagcaggctcgacacgcagctattcaacaacagatgtccaagcggatgatctcaatgtttcagactattcaggaccgtcaggacacccttcagcagcagctcttagcagacaggatagagcatcgggcattcatgacgcatatccttcagcacactggtgttcagctcccactagtgcggctagtcacattggatttctcgtcatcgatcgacggccccgtcagtgctccgcagctattgccaccagcgcctgctgttaccactgctaccgtggcg

SEQ ID NO: 18291 - DNA, 798 bp, Zea mays
  Peptide Sequence Number=SeqID_60070
atggaggcagcggcggcgctgccgccggagagggatacgtcagcggactggggagatggcgtggtaccgctaggtttccgggtgaaggcatcctctcgcgagtcgccgtcacagaaggcggggaacgtgctggaggccgacctgcgctcccactgggccaccgccaccaacaccaaggaatggatcctccttgagctccaggaaccgtgcctcctctcccacatccgcatctacaacaaatccgtcctcgagtgggagctcactgccggactgcgatacaagcccgatgcattcgtcaagttgcgcccccgctgcgaggcccccaagcgcgacgtcgtctaccccgccaaccacaccccttgccgctaccttcgcatttcctgcctgcgcggcaaccccatcgccatcttcttcatccaactctttggcatccccgtgcctggcctcgaacctgagctccagccactgctcagctatttactcccgcaaatcacatcctccaaacaacccctttctcacaacatgcacctccaggctgaccttaatagtgtcgtggacaccccagaaagcagcgtgcggttcttggctctacttgctggtccattttatcctatccttcaccttataaatgaaagagatcctaccaaatctttgtttggttctgctgattcagatgccctcagaactagtccagcttctactccaacagtttcttcaaactttgaggcatgcacaaccaaggagatcacggagtccatctgttcagcctgcttcatatttgctggcatttcgatctga

SEQ ID NO: 18292 - DNA, 450 bp, Zea mays
  Peptide Sequence Number=SeqID_60071
atggtgcggctccgcggcggaatagcgacgccggcgagcaattcacgtcgtgcgggcgcccgtctccatggtccgagcgcgcgtatgggttccccggacacaggcgcgcgcgttgaccacacgccgaggccgagctttagcgcaaacaagcgcacaccggcggcggcactcccttcttctctggttggcgaggtaagcctggatttgggttatggcggcaggaagggtcaacgaggcaagggttacgaggtggagtcggtccgcctttgtagcctccgtgggacggagtcgtgccgcgatccagctgatgccgtggccatcaatctcgcgtgcaccgttcggcgaagccgtttgcgagaagataaacaggacttcgtcaatggtcactggcgcgaggaccccatctggcagcgagccagtgcgagcagaggcaatgcgcatacacgatag

SEQ ID NO: 18293 - DNA, 516 bp, Zea mays
  Peptide Sequence Number=SeqID_60072
atggagctcgacgtcgtggctacgcagaccgagccgacgcagaggcgcgagggagctgcgacggccatggagacggaggtgcggccctgggctccggcgggagctgggcatctccagcgcccacgggagtttcattggggtgtcgagcgccatgggcagaaggtgcctgcaccgaccagccgccatggaggagcagagggcgttggcttgggcgttcactggccatgggtacggaagagcaggggaaggtggtcgttgtgcagggcgccgaatgggggagaggagagctcctgctcctgcggcaagggacacagggaggaagaaggggcgcgcgccaggaggaggacgacagggagggcgctcggcggcatgggagcttggaggaaggagctcgccgcagggaaggttggcggccatggagctcctgcgctggctgctgttgccgcctgggcagggaggaagacaggagagaatgcgtgcgtgggagagaaaaggagaagagagagtggcggctag

SEQ ID NO: 18294 - DNA, 384 bp, Zea mays
  Peptide Sequence Number=SeqID_60073
atggtccgagcgcgcgtatgggttccccggacacaggcgcgcgtcgtcgaccacacgccgaggccgagcttcagcgcaaacaagcgcacaccggcggtggcactcccttcttctctggttggcgaggtaagcctggatttgggttatggcggcaggaagggtcaacgaggcaagggttacgaggtggagtcggtccgcctttgtagcctccgtgggacggagtcgtgccgcgatccagctgatgccgtggccatcaatctcgcgcgcaccgttcggcgaagccgtttgcgagaagataaacaggacttcgtcaatggtcactggcgcgaggaccccatctggcagcgagccagtgcgagcagaggcaatgcgcatacacgatag

SEQ ID NO: 18295 - DNA, 192 bp, Zea mays
  Peptide Sequence Number=SeqID_60074
atggatggccctactccggcgatgggccgtcgcgatttagtgggcggcgccaccgtgtgccgtcgggaggatgacggctgtacgccgatcgtggatctgggaatcgacgaagagcccgttgctgaggagcctggtgagcagcaggttgaagtagctgagcaggagctcattgaaggcaagttgtgcccttga

SEQ ID NO: 18296 - DNA, 147 bp, Zea mays
  Peptide Sequence Number=SeqID_60075
atggcggacctagaggtgggctcaatttggtcagaggaggtcgggagggggctgcccgcggggaggtggcggagcttcgcggcggggttgccgtcggtgagctctgggcgagcaatcggggtgggggagtggtgtattgcgtttgcg

SEQ ID NO: 18297 - DNA, 852 bp, Zea mays
  Peptide Sequence Number=SeqID_60076
atggcggtggcgcggctgtgcgcggcggccgccgccgcccggctgcagccggcgctcgccgcgggcgcccgcggcctcgggacggcggcggaggtggccgcgggcgccaggtgggagcccatgggggcgcgggagtactacgactaccgccgggccatgtacggcgacatcacgcacaaggccatcctcgtcgacgccgccggcacgctgctcgccccaaccgagcccatggcgcaggcccagaagtatggggttgattactccgaggatgagattctgatgcggtatcgctgggcgtatgcgcagccttggggtagatcacgtctgaggtatgtcaatgatggaaggcccttctggcaatacatagtgagttcatctactggctgctcaaatctagagtactttgaggagctgtatcaatattacacaactgaaaaggcttggcatctctgcgatccagatgctggacgtgtttttgaggcattgaggaaggctggtgtcaaaacagctgtcgtgtccaattttgacactcgtcttcggccacttttacaggcactgaaatgtgaccgctggtttgatgcagttgctgtatctgctgaggtcgcagcagaaaagccaaaccctacaatattcttgaaggcctgcgagctgttaggagtgaaaccagaagaagtcgtgcatattggtgacgaccgtaggaatgatctatggggagctagggatgcaggctgtgatgcctggctttggggcagtgatgtttactccttcaaggaggttgcggagaggatcggggttgagcatatcaagttcatggatctaatgatacaatatgccaagtttaacgaccgatga

SEQ ID NO: 18298 - DNA, 2424 bp, Zea mays
  Peptide Sequence Number=SeqID_60077
atgtcgtgtggagatgagatgccatgtataggtacaatatttctgacatgttttgaccttctggcaggaattggatggaaatcatggaaaaaacgttggttcatcctcacacgaacgtcactggttttcttcaagaatgatcctagtacattaccacagagaagtggtgaagtgaaccttacattgggggggattgaccttaataattctgggagtgtagtggtcagggaagacaaaaggctgctgaccgtcctttttccagatggccgtgatggaataaaggtggaaggaattttgcgtcaagctgcagatgtggaggaggttgacaggagattgcaagaatatgagcaaggaaggacagagtttgcaccagaagaggatgctcatgttattggtgactgtgtaaaacatgttctccgggagcttccatcttctcctgttccagcttcctgctgtacagcattattggaagctttccgtctggacatcaaggaatctcggatcaaatctatgcgtgcagcaatatctgaaacatttcctgagcctactaggcggctgctacagagaattttgaaaatgatgcataccgttgcttctcatactgccgagaatagaatgactccatcagcagttgctgcatgtatggccccactcttgttgcgtccccttctttctggtgaatgcgagctggaagatgattttgacatgagtgatgacagtgctgctcagcttattgctgctgcaaatgctgctaacagcgctcaaggcattgtaactactctattagaggaatacgagagtatattcaatgatgagcactttaggtgctccttatcacctgattctcaaacaggagatagtggaagtgaagaatcaactgatgatgaaactgtggatatcaaggataatgggtttcatgatgcagaaaatgatgtagatcaagaattagatgatgccgagcgaatactgaatggaaaattgagtgaaaccagtgcatgtgtccatgctgacctccatgactacaaggaagttaatggcaacgattcagacgctgagctctttgttgaggataacacatttgaaccaaatgtaaatttaaatgatactcccctaagtcgtttaatagaaaatggaaagaaaccatcaaatctggcgtccagtcatgaaactccattatcagtgggagaaattctttcgtctttggatgctggagttccattacctggtcgtgcagctgaatattccaaggacagactctctagcaaacccaatggaattcagcagcatgtgaagcgtactaacttatggggacggagcaatgcaagaaagggccaacgttcagagttagttgatccttcaagtgaagaagagcttgctattcaacgacttgaggtaatgaagaatgacctacaggtcaggattgcaaaggaggctagaagtaatgcaatcctacaggcaagtttagaaagaagaaaacaagcactacatgagcgccgtgtggctctggaacaaaatgtgtcaaggttgcaagagcagctacaggctgaaagggatcttagagctgcactggagattggattaagcatgtattcttcacaattttctagctcgcactccatggactcaaagacaaaggcagagcttgaggaaattgctctcgcagaagctgatgttgcaagattaaaacagaaggttgcagagctgcatctccaactcaatcaacagcgccagcaccagtatggctcttcggtagatgcaaatgattgtcctccgcaccttccaaatcatctctcacagaacactgtccaaactggatttgataggaccgttgctttttgtaatcaagagaagcaaagaaatgaggagagcttgccgtgcacatcccactggagaagcatcaaacagcatgtgctctctcaggattcttcaaggcctttctcccgaaagcattcctcagacacctccttgagtgattcaatggaggcatcaacaagtgtgcttgcagagggcgggccactgttggtgaacatcgccagaacaacagaacagggtgttgaatacgggagacctccgactgtgccgtcatctactctagttgaactaacaaccaggctagatttcttcaaagaacggcggtcacaattgatggaacagctccacagcctcgatttagggcatggatccgcgtcccatggtttcccatacaaatcttcatctccctggaacaacccaaggagaggcaaatgttgccatttcgaaaacctgatctgtgtccattatgtggctgatccttattcggttaattctctccccaaagggataggaggaaatgcgtggacttttgacaatccctatctaactcaacaagagcattggattctgcaaagagtctcgatgccaaccttcacaaatcagagcaaatga

SEQ ID NO: 18299 - DNA, 2325 bp, Zea mays
  Peptide Sequence Number=SeqID_60078
atgcacgaccacacccgtgccagggcgtgggaggcgacggcgcgcaaggtgcagcccgtgggcaggcgccgggtgtccccgatgtctgccgcggacgactccgagacggcgtcgtcgtcgtcctcctcctcctcgcccgccggcgacgacgccgaccacgtggaccgcggcctccccaacggcgacttctacacgggccagtggcgcggcggcgcgccgcacgggaacggaaagtacctgtggaccgacgggtgcatgtacgagggggagtggcggcacggcaaggccacggggcggggcaagttctcctggccgtcgggcgccacctacgagggcgagttcaaggacggcttcatggacggctccggcacctacaccggcgccgctggggacacctaccggggctcctggtccgctaacctcaagcacggcgacggcaacaagagctacgccaacggcgaccagtacgacggcgagtggcgcgcggggctgcaggacggcgccggccgctacacctggcgcaacggcaccgagtacacggggcagtggcgcgcggggctcatccacggccgcggcgcgctcgcctggtccaacggcaaccgctacgacggcggctgggaggacggctccccgcgcggccaggggaccttccgctgggccgacggcagcgtctacgtcggctactggacgcgcgacgcccacaccggcattgtccagcagaagggagtctactacccgtccccggcggcgtcctccccgacggcgcgcgatccccgcgacgtgttcgccagggaccttccgggtttcctgggcgccggccccgacaccgcgtcgccgcgcaagtcacgcgcgtcgtctgggaccagggcgcccaacgggcggccgagctcagtgtccgggctgagcaacagctccggcggcgacaggaagtacgacaagatttgcatttgggagtccgacggtgacatcacgtgcgacattgtggacgggcctgccttgggggacgaggcggtgaccgcgcagaggagcgtgaggacggacgacggcggcggtgacgaccggggcctgccgccaccatcgccggcgccgcacgtcacacagtggttgcctcagcgggagtccaagcgacaaggggagaccatcgccaagggacacaagcactacgagcttatgctaaacttgcagctcgggatcaggcatgcagtggggaagcaaggcccaattgtgctcgatctgaaatcgtctgctttcgacccaaaggaaaaagtatggacgaagtttcctcctgaaggctcaaaatgcacccctccccacaattcttgtgacttcagatggaaggattactgccccaaggtcttccggacgctgcgcaagctgttcaaggtggatgccgctgactatatgttatcactatgtggaaatgaggctctcagggagctttcatctcctggtaagagtggaagctttttctacctaactaacgatgatcggtacatgataaagacgatgaagaaatccgaagtgaagatgcttctgaagatgctcccggcttattacaatcatgtccgggcatttgagaatactctagtaaccaagttttttggtctacattgtgtcaagttagctggagcgaatcagaagaaggttcgttttgtcataatgggaaatctattctgctcggaatatccaattcataggcgttttgatctcaaaggttcatctcttggccgcacaactgataagccacagacggagatcgatcagtatacaactctgaaggatctcgacctgaacttcatctttagattgaagaagcaatggtttcatgagttccaaaggcaagtggacagggattgtgagttccttgagcaggagaaaattatggattacagccttcttgttggtgtacatttcagagaaaacacagagaagcttctgactgaaggttccattgactatgatatcatcaacaacgtaccaacacctcgtctttcaagaggaaatacagatcggtttcttgctgatccaaacaggtctcctaaaaccaagctcggggccaacatgccttcacgagctgaactcaccgctcgcaagagcgactgcgaaccgcagctgatcggagagccaaccggggagtactacgacgtcatactgtatttcggaatcatagacatactccaagactacgatatcagcaagaagctcgagcacgcgtacaagtctttccagcatgacccggcctctatatcggcggtggacccaaggcagtattccagacggtttagggagttcatatacaaagcgttccaagaagaagacggctag

SEQ ID NO: 18300 - DNA, 621 bp, Zea mays
  Peptide Sequence Number=SeqID_60079
atgccgggcaacggcctgccgctgcggcggtggctggttgcctgcgtgcgcccggcgcggcgcgaggcgcggctggcggtgtggggcggcgggggcacgcggggagcggagcccgggcaggcggcgggggaggtgatggtggagcacctgggccacgtggtgtgccgcgccgacgggttccgcgtcggccgccccgcgccggtgctgggcatcggggaccggctcgaggccgggcgcacgcgccgggctggaccacggaactgcccgttcgagtacgccaaggacggcgacgggcgcacggtgatcagggtcgcggaggagttcctcgtcagggccgtcgcgggtggcgccaacgccggcaggaatggaaagccgcgcggtggggacggcgacggcgacggcgacggctgcgggtcggccgcgctttgcagcacgcctgagctgaggaaacactatgagcagctggtgggcgccgtgaggggccgcccgtggtcgccgcggctggacaccatcgcggagcgcaaagggcggcggaggctcgccgacgtcgtaagccccgggaggctgtcgccggcacgattgctggggatgggcaaggacaaagggctcagcttcagctag

SEQ ID NO: 18301 - DNA, 318 bp, Zea mays
  Peptide Sequence Number=SeqID_60080
atggaggatgtgatgcttggggcagctccccttcctgttttggatatgaccaaaaagcgttctcgcagttcagcaataaggattattaaaagagtttctcgttctgtgaaactgagactaggcactggaggaactacagagaggatcatatctgcattgcacactgttcttagtgaacaaggagatgaggatgatgacctgaaaaatgcaagacttctatgtgtcatgttggaaagatgcagaaggacgttgacagtgcctgtagcaaaggtaaggaatctattgcaacatacagttggcaatcttgatcctttgtga

SEQ ID NO: 18302 - DNA, 732 bp, Zea mays
  Peptide Sequence Number=SeqID_60081
atggctgcccctcgagaggaaggcgccaccgagctcaaccaggagagccgatggccggtgtggtcttctctgctcctgtaccggcagatcctcgacgagatcgaggccaacgactacgacaacttcacccggagggcctacgttcctaagacgaagaagttgatggcgctgcccaaggcgtacctgagatcactggtgcctgtgtgggagaagctctccaagttctctggccatgctgctggcggctcctccatagagtccttgatgaagatgtcagagccggctgtgctttcgcacttcaagcccgcggactatgtcagcatactggctcagatacacaaggagctagagtgccgccctcctgacgacaaggcctccctgttcatcattgcagaagctgaggatgagatcaaacggctaaatggagaggcagaaaagcgcatattgatttttgatcctttagacgaacccattagacagcctgatttgcgtgggacaacactacaaaacatggccacaatggatccaaacatgcaggctcgatcagtacaggaaagcctgcactcatccttgagatacatcagactgccaccaaaaacgacaagagagatgagagttcctaggcacataggaaccttcactttcaagccttatctatactacttattggatatgcttaacaaggacatcaattccttctccatgagagtcaggtttgtgtctgttgcttga

SEQ ID NO: 18303 - DNA, 354 bp, Zea mays
  Peptide Sequence Number=SeqID_60082
atgaaggtggtgtctccggagcgagcatggtggagtcctcgttcctcggagttgaggtgggcaaccagacctgcggcgacagagtctggtgaggaggaggggagcgcactggccccagaggacaggcacgaagagcggggcgcgcacgacgcgtgggtagtccgccatggtcgtcgatggaagggcacggtgggcgaggatttcggcgtggcgcaggggcgacgaagatgcaaggaggatgcgcggcgcttcggtagcgatctcatcgttggaagggcggttagggcgacgaagaccggggcgtgcgcggcgtggtggcggtgggagaggttttcggcgcggcgcagtggatga

SEQ ID NO: 18304 - DNA, 927 bp, Zea mays
  Peptide Sequence Number=SeqID_60083
atggccacctcccctgccgcctcgtcctcctccgctccgaccgcctccgcggtggctgcggctacgatggctgttgaggccaccgacgggccggtgctcagcgtagtatcgaagcgtctccgcgcactgcggaagaagtacaaccgaatcacgcagatggaggagtcgctcgccgccggcaagacgctcaaccgagagcaggaggaggttctccgctccaagcccgtcgtcgccgctctgatcgacgagctcgagcgcctccgccctccgctcgcctccgccctcgcggaggagctctcctcccgccccgcccccgccccctccgccgcttcctcctccgactcagattcgtcagtccaggacttgcttgcgctcgtctacttcggctccctctttgacgtcaagcagcaaagcgacttcgtctctttggtttacacgcgcgaactcgagcggagcagctgcctcacttatgactacgtcggggatgatccggaggacagtctcgcggagaccgatctgaacgcggtttctgcccttgcctccctcgccgcgttgcgccctcctgctgcagccggagtctcgcaccgtgacgcccttcaggcttgtgctcatcacgcccgcctctggctctgccgtgcggatgaacccatccatcctgactccaccatcacatatgctggggtgagggcaaagctggataggatcatggcatcgggctacttcacagcgcagctagaaatgaggacaccattggatctggctgctgcagtggcaagttttggagctggaggtgtgcaggtgcaagagagcatggttgtgtcacctcaggcaccggaagcagtggaggagagccaggctgttgaaggacacaaggtctgctggagcttgggaaggggcagggtggagactacagttggtgaaccttaa

SEQ ID NO: 18305 - DNA, 522 bp, Zea mays
  Peptide Sequence Number=SeqID_60084
atgcggcgcagatgcgctgaagggggagcgctgcagaatgagaaggaagattctcaggctacagaaatctacaatgatcatcctgttgttgactctgaacatgtggaggatgaagtcctggtgcatccaactgatgaagttcctccagctgagacagagcaggagcaggagacatttgatgctgatgtgaaggatcaggagcaaaaggaccaacaattcatccagcggcggtcttaccagaaccagcgtggtggtggtcgtggtggcagcaggagaggctatcctaatggtcgtggaggacgtggtggccgaggtggcgggtaccagaatggccgtggtggataccagaatggtcgtggcggtgctggcgggtactactacgaatctggatactaccagccgaggaactacaacagaggccggggtggtcgctccggcggtggcaactcttactacaacagccatggtggaggtgcacaggggcatcatcctgggagtgttgagctgggcgcaaacgcctag

SEQ ID NO: 18306 - DNA, 507 bp, Zea mays
  Peptide Sequence Number=SeqID_60085
atggtggacaccagttggatgcgcgacaccgagggtcagggcaccacacgctctccaccaccgctgccaacttcgtgcccccatgcaagcctcttcggctacaccatcagcaccgccaagagtggagcaccgcaggcgcacgtcgccacttacaaggtctgctggtcaaaggagtgcagtgccgccgtcctcacgggctttgagtccgccatccacgacggtgttgatgtcatctctgtatccttcgaccaggacacgcccctcgccaacgatgccaagcccctctttcatgagcctgtcacgcttagatccctccacgccgccatccacgatgtctctgtcgtatgctccactggcaactccgtcccctacgacgacataatagtcaccactgttgtcgccgccaccatcaccaccatcgtcaacagggacttccacaacatactgacacgtgcaacagcgtgcgtctcaggggacaagcctcgagtccaccacactacactctaa

SEQ ID NO: 18307 - DNA, 534 bp, Zea mays
  Peptide Sequence Number=SeqID_60086
atggaggaggacccacgtcgtccaagtcgacgtcccatcgccagagacttggcgcaggcccgtccactaccatgccacagtccccgcgcgccgcaggaggcgctcacgatgcgggagctcggcgtcgctaaagccgtcgacatgggggacgattggacactatgctcgtcgtcggccacgctcgcccctcctctcctattatctcctcgcccccaacaccacgccagccttggcctcgatctgggccgccgcaggtgtcctcgttgctcttctggcacatcggtggttgattcctcaactccttcctctgaggcgatgcacaagctggcgcagatcctgctgctaggcctcatcgccgtgcacgtggacgtcatcacgggggacccattctgcggcccgtccgtggtggtcgtggacctacacagggagatggaccacgacaccgcctacccgtacaagttactttgttgcgagcaggggtgcaagaagcagctgctgcagcaagacatgtcctctgtttggaaccgcttctga

SEQ ID NO: 18308 - DNA, 1974 bp, Zea mays
  Peptide Sequence Number=SeqID_60087
atgccactccgcttggcggcctgccgcgtcttcctgctcctcgccgcggccgcggccgccgccacctctccgtctccggtggcaacggccacgtccaacggctccgcgaactgcaccctccgcgacggagaaatcgtccgcgcggcgttcaggcaggtcgccaacttccccttgccgctgcccggccgccgccgcgcgtgccgccacgtcaggcggctccgcttcccgtcgcgcaacctcacgggcgccgtggactgggacgagctaggcaacctgagcggcctcctcaccgtcgacctctccggcaactcgctccacggccgcgtcggcagctcgttctggcgcgcgccgtcgctccgggccgtggacgtctcctgcaaccgcctcgaaggcgccctccggttcggcggccacccaggcacgcgcctagccacgctcaacgtgtccggcaaccggttcacctccgtcgagaacgtggccgggctctccggcttggtcggcctcgacgtgtccaggaacgccatcggagcggtgccggaggggctgcggggcctgacgctggtgcgccagctcaacctgtcgtggaacaacatggccgggacgttccccaccgacttgccgcctctcgccggcctccaggtcctggacatctcgcacaacgacttctccggcgcggttgacgccgacaccatccgtaagttcggcagttcctccttcgtccaagccggcgacgcgttgcgggtggtcgaggacctcgcgccggcgccggcgccggcgtctagtggcggcagacacaaacgcagacgtgcggtcaccatggcgctggtctcagtcggcgcagcggtgacgctggtgttcttggccgcgtgcgtggcgtgcgccatgacgcgtcggtggaataagaagaagaaggacaaggacaaggaccggaagacagcggcgtgggaggacgacgaggtggccgtgggggcgttgaagctggccgccgccgcgccggtggtggtgctcgagcggccgctgatggagctgactctggcggacctggccgcggccacgtccgggttcgggcgcgagtcgcagctcgcggacacgggcggccgcagcggggccgcgtaccgcgccgtgctccccggggaccttcacgtcgtcgtgcgcgtcgtggagggcgccgtggccggagttggggaggacgccgacgccgccgccaccgaggctgccttccgggagcttgcccggctcagacatccaaacattctcccgctccttggttactgcatcgcaggggaccaaaagcttgtgctctacgagtacatggagaagggcgacctgcaccggtggctgcacgagctgccagtgggcagcatggacacggaggacatatgcatcgacgcaatggaagccatgacggaagacagcagaaagcccgcgggcgactggcccacgcgctaccgcatcatcctaggcgtcgcgcgagggctggcgttcctgcaccagggatgggccggggccgggggcgggcggcggccgatcgtgcacgggcgcctggtcccgaccaacgtcctgctcggcgacgacatggagccgcggatctcggacttcctcccgcaccccggcggcggcggcggcgccgagacggcggagggcgacgtgtaccgcttcggcgcgctggtgttcgaggtggtgacggggcaggcgcggtggggcgacgcggcgaccacaagctgggcgcgcggcgtggtccgcaaccgcaagggcctcaacctcgtggacgagcggctgcgtgacgagacggcggggacgggcgcggagagggagctgctcgagtgcctgcaggtggggttcctctgcacggccgccgcgccggagaagcggcccaccatgcagcaggtggtcgggctgctcaaggacgtccgaccggccgccaccgctggaggtggcgtgccgccgccgccgctcaggtcgctggccgaatga

SEQ ID NO: 18309 - DNA, 1133 bp, Zea mays
  Peptide Sequence Number=SeqID_60088
atgggggatcagcaccaaagctggcagcataacgcccctccaccaccccctgatcatgttatcaagatcaattcacatcctacccttccgccgcctccgcataacgtacatagcagtggttccgcttcgaaccactcgggtggtgagagccgccctgcgctgtcgcctggcactgcccttagcttttcaaggagcacattcacttacgagcagctgatgacagcaacgaatgggttttctgacgctaatctgctggggcaaggaggttttgggtttgttcacaaaggagtgctaccagatggcacagaggttgccgttaagcagttaagagatggcagtggccagggagagcgcgagttccaggctgaagttgagattatcagcagagtacatcacaagcatcttgtatccttggttggctattgcatttctggagcccacaggttgctcgtctacgagtttgttccaaacaatacattggaattccacttacatggaagaggcagaccaaccttggattggccaacaagactaaaaattgctttgggttctgcgaagggattggcatatcttcatgaagattgtcatcctaagattattcatcgtgacataaaggcctcaaatattcttctcgatctaagatttgaagctaaggtggcagattttggacttgcaaaattcacttctgatgcaaacacccacgtttcaaccagagtgatgggcacatttgggtatctagcacctgagtatgctgcttctggcaagctcactgagaaatcagatgtcttctcttttggagtaatgcttcttgagctaataactgggcggcgccctgtaaattcaagacaagcggacgacaacctggttgactggatatcattgttattatcgactattgaggcaaggcctctgatgataaaagcatttgaggatggtaatcatgatgctctagtggacccccggctgggaagtgagtacaatgataatgagatggcgaggatgatagcctgcgcagctgcatgcgtccggcattcttcacggcggcggccacggatgggtcaggtcgtccgggcgctggaaggcgacgtatctctggacgacctgaacgagggcgtgcggcccgggcacagccg

SEQ ID NO: 18310 - DNA, 4017 bp, Zea mays
  Peptide Sequence Number=SeqID_60089
atggccgggccgacgccgacttgctccgcgatcgtgtcccacacggctgccttcctggccgagctcgtcgccgacccgctcctgcgtcgtcacctcctctcggcggccgcggctgcgggcggcggacagcagcacccggccgccacgctccaggcgctgtccctcgtgtcggacgcgctcgacaccgccgcctcgtgttccccgtccccgtcgtcgctccgcgccgcggagcgcctgctgcggtcgctgccggccgccaccccgctctcgtgcctcctcctcgcgctcgcgcgcgccgcacggcgcggcgccggggccgcggccgccgtgctcgacctcttcgcgctggaccccgcgctggcgcgccacgagctcgcgcccgccgccttcgaggcgctcttcgcgccgcggctgctccccgtcatgcgccacttcgccgcgcgccgcgccgcggccgccgccaggaccaagggcgaggagggcgggtcggacgaggccacgccgatgcgggtcctgtcgctcatgagcggggcgcaagcgcaggagatgagggcgctggagcgggagtatgacaaggtgctcgacgccaactgcagggcgtacgcgctctacctcaagaggatcctcgaggccggcgagccatcatcgccggcggtgtcgtcgccgctgccgcagcctcttcctcctccggagctcgtgttcggcgtcgaggacgacgacgacagtcgcggcgacgaggacaccgcgccggagaacgacgagtccgctgccagctcgcagagcgaactacgtgacaatccgatgtgggcggagacggaggagcagccgggcgatctttacccgcggcggcagggcagcgtgaaaggcaggagggacctcttgaggccgccgagcctgtacccgcagcgcgtgccgccgcacctcatagttcagcagcagcaagcgctgccggtgggcagagggagcccagcgtcaaggctccgagcggagcactcacggtcgcggtcgccggccacgccatcagacgacagcatggaggagtcttcctccgagctctgtgcggccaaagaggaaaagatcgcggcgtcgccactgtcctccaagcagccacgtccacgcgccgacgccggccagctgtcaccggagccagcgagcttcccagtacgctgcgacgccgccgccgtcgacccgctgcagccgctgccgacgcccaaggacttcgtgtgcccgatcacgagccaggtgttcgacgacccggtgacgctcgagaccgggcagacgtacgagcggcgcgccatccaggagtggctggaccggggcaacgccacctgccccatcacccggcagcgcctccacggcgcgcagctgcccaagaccaactacgtcctcaagcgcctcatcggcgcctggcgagaccagcggcggacgccgtccccttcctcctccccttccccttcgccgccgccggccacgcctccccccgctcccgcgaccgccatggcgggcgacagccccgcgccgccgttccccctccccgtcaaggctgccgccgcctcgtcgccgtccccggacgccaacaccagcgccagcgcgccgtcgcccaccagcgtcatcgcgcaggcctcgctcgagagcgccgtggccgagctccgcgccgccgtgtcctgcctctgcacgtccgaggacctggcgcagtcggagcggtcggtgctcaagatcgagcgcctctggcgtgacgcaaccgccggcggagccgacgccgagccggccatcctcgccgcgctcgccaggcccgccgtcctgaacggcttcgtggagatcctcttcaactccgtcagcgcgcaggtgctgcgggtcgccgtcttcctgctcgccgagctcgcgtcccgggatgacgccgtcgtgcagacgctgaccaggctcgtcgagatggacctggcggaggcgctcgtcgccacaatccgccgcggcggcggcgacgaggacccgctcaagatgtgcgtcagccccaaggccgcgtcggtcatcctcctcagccagatcctcgtcgaggacgccgctgccgccgccgacgatgacagctcctccacgccgccggtgccgaggtctgcgctgatgtccgagaggttcattcggagcctcgccgccagcctggaggccgagccggtggaggagaggctagccgccatgcgcatcctcctcaggtgcatctgggaggacggccactgtcggagaagcatcgccgagaaggcgtccctcggggccgtcctcgacgccttccacgccgtcggcgacgccgacaagatcgacatcgtgcgcttcctctacgagctgctcaagctgaaaaagcgatcggcggcggagcgtcttcttcgcacaatcaaggagggtggctcgttcagcatgatgcacacgctgctggtgtaccttcagtcggcgccgccggagcacagccctgtcgtggcggggctgctcctccagcttgatctcctggtggagccgaggaagatcagcatgtaccgcgaggaagccctggactgcctcatccagtgcctgaagaacgccgacttccctcggtgccagctcctcgccgccgagaccatcatgtgcctcccggggaggttctcgtcgtcggggaggccgctcgcccgttccacgctgctgaagctggccagggtgaaggaaaggtaccggcagtcgcaggacctgagcgccgctcgcgccgacggcgaggacgagatggaggaagggaaggccgcgtcggagtgggagaggaaggcggcgtacgcggtggtgagccacgagttcgggctggtgttcgaggccctgtccgagtgcctgaggaccaagaacgcggagctgttcacgacgagcctcgtgtgcgccgcctggctcgtgcacatgctctccctgctccccgacaccggcgtcctcggggcggccagggtctgcctgctccgccagttcgtcgtggtgctccgctccgccaagcacggcagcgaccgggtcctcgccatggtggcgctcaggagcttcatgaacgaccgcgaggggatgcacgacatcacgacgtacatcaaggacgtgctcaggacgctgagggagctgaagaaatcgtccggcctcgcgttcgagatgctcaagctgctatcagacggccaggaatccagcgtcgacatgtggagccacaaggagatcaatcaggtagactgcagcgcgaacggcgaggtcacgtcggtcgtttacctcaacaactacatcttctccggccactccgacggcacccttaaggtgtggcaagggagcgaaaacatccttgcccttgtccacgaggcccaggagcacagcaaggccatcaccagcttgtcggtcctgcactcggagtcggaggagaagctctacagcggctcactggacagaagcataagggcgtggcagctccgggacggcgtgctccggtgcgtggaggtccacgacacccgagaccccgtgcagagcctggccgtggccagcgccgtggcctgcttcgttccgcagggcgcgggcgtgaaggtgctgagctggggcagcggcagctccagggtcgtgaacgccaacaagtacgtgaggtccatggcgctgcccggcagcaagcggatcctgggcaaggccagccccgtctacgcgctgcaggcccacggcgggctgctctacaccggcggcacgccgtcgtcgtcgtcggcggcgtccgcggacggcggcggcggtgcggccgtcaaggtgtggagctgcgccaactacggcctcgtcgggtcgatggccacggcggcggaggcgcgctcactggtcgtcagcgccgacctcgtctacgtcgcctccagggccgccgccgtcgagatctggtccagggagaagctcgccaggatcggcacgctgcaggcgggcggccgcgtccagtgcatggccgtcgacgccgacggcgacgtcctcgtcgtcgggacgtccgacggcaagatccaggcgtggggattgacttga

SEQ ID NO: 18311 - DNA, 492 bp, Zea mays
  Peptide Sequence Number=SeqID_60090
atgggcgacggcgagacgcggctggtggccgccgcgacggcgaggaagtggctggaggacccgcgcgtggggtacgacggcggcgtcggcagccaggcgctgagctgcgtggcgatcgccggcgcgcgggtctccgtcgccgagcgcggccgcgtcgtctgctcgctccgcgtgcgcgcccccgtcgccgacgcggaggggaggtggcacgccggagcgatcgcggcggcggtggactgcgtgtgctcggcggtggcgtacacggtggaggccgcgcccacggctaccgtccactacagcttgtcctacttctcgccggccgatcgcgacacggaggtggaggtggaggggcgagtggtgggccggatggggaagctgacggccgcggtggtggtggtgcgcgataaggagtccggcgagctggtcgccgtagggaggcagtgggtgacccccgcctggccgaccaaggccaacaaaaccagcaagctctga

SEQ ID NO: 18312 - DNA, 582 bp, Zea mays
  Peptide Sequence Number=SeqID_60091
atggcggccgcccactacgatcgcgaggacggcctgcctccatcggcgccgccgcacgcggcggcggacgcgtacgaccccaactacgtgccggactccgtcaagaccttcgtggtgcacctgtaccgccacatccgggacaagaacgtgtacgagatccaccagatgtacgagggcggcttccagcgcctctccgaccgcctcttccgcgacgtgttctggccctccgcggaggccgtgtctccctactgcgacggcgaccacgtattcctcctcctctaccgcgagctctggtaccgccacgcccacgcccgcctctccccgctcaccgccgcgcaccgcgccgagtcgtggaccaactactgcgacctctttagcgtcgtcctccacggcgtcgtcaacatgcagctgcctaaccagtggctctgggacatggtcgacgagttcgtctaccaatttcagagcttctgccagtaccgagccaagctcaagaccaagacggaagacgagctcaaccagctcaagcagttcgacaaggttgctatatactccaaatcattactctctccgacgaatctctag

SEQ ID NO: 18313 - DNA, 723 bp, Zea mays
  Peptide Sequence Number=SeqID_60092
atgaccgggctcagcatgctgaacgccgggctcacgacccagctgctgctgagcctgttcagagtgaaaggcatcgtgcactggggcatcgctggcaacgccaacgaggacctccagatcggcgacgtgaccatccctgagtcctgggcccacctgtccctgtggaactggcagaggcacggcgacgggcctgagaacgagctgccgctagagaacgccggcgactacacgagggagtacggcttcctcaacttctccgactacacggtggggcaggacgccggcaacccggagctggcggcgaacacgctcaacagccgctactacgcgctcgccgggaagctggaggggctggagctgccggcgtgcgtgaacgcgacgacgtgcctgccccgcgcgccccgggtgacgcgggtgcccaggggctgcagcgccaacatctacaccgacaacgccagctaccgccagttcatccgctcccacttcgggtgcacccccgtggagatggagagcgccgccgtggccctcgtcgcgcaccagcacggcgtccccttcatcaccatccgctccctctccgacctcgccggcggcggctcctccatcagcaacgaggcagccacgttcctcgacatcgcggcgcagaacgccgtggacgtcatgctcaagttcgtgcccctcatcgcgcgccgcggtggcgaacaggagcacgccgccgacatgtaa

SEQ ID NO: 18314 - DNA, 759 bp, Zea mays
  Peptide Sequence Number=SeqID_60093
atgcgcaaccccagcgccgataccggagtagtcgcgcacgccgggcgcctctactggctcgccctcgcctacggcgtctttgtctgcgaccccttcgccgacaccgcgcacctgcgcttcctggcgctgcccgcggactgcgatttgggggagaagccctaccgaatcaaccgcgcgtacgtcgcgcagtgccgccgcgtcgcgcccagcgagggccagctccgctacgtcgagatccggggcctctcctacgaggcgtacgtggcccccgctgtggcgcctccgccggtgcaccccaccgtctggatgtggacgctcgtcgacccggaggcgacggagccctggaggttcgagtatgaggcgcccttcgccgaggtctgggcgcacgagtcctacgccgcggccgggctgccgcacggggaggtgccccacgtcgctctcgtcgaccccgacgaccacggcatcgtctacttcttccagggctccaagtccaagctcttcggcctggacgtgcgcgccagacgagtcgtctcctgcgaggaatgctcggtgcgcgacgacctgaagatgaaggactggaactcccgccccattgtcgatgcctgggaggtgccgccaccctcgcctccctgcagcgagctttcttcgccatctcctcaaggcagtgacgaacttgcccccgtcgccaagcgggtgatagagatattgaggctgatgagcgacacggacgacgacgatggaggatatgcgacgatatga

SEQ ID NO: 18315 - DNA, 270 bp, Zea mays
  Peptide Sequence Number=SeqID_60094
atggccgtgccctgctctacctgctgctgcgtgcagcagtggcagtggtggaggaagctgtcgatcctgatgacatacaagcacaaaatgcatgcagttgacagtgaaggaaagatagtatcaagtgcagactttgacttctacatcgtcgaggatgtgattcatgttgtggagtccaaacctaccaagcgtcatggtgattactttttgagacaaattttgaagtttgaggaaatgattggtgaactggagaaggtacagcttgactga

SEQ ID NO: 18316 - DNA, 1908 bp, Zea mays
  Peptide Sequence Number=SeqID_60095
atggcgcggtgctctacgtgcgatcgtttctcgaggttcatggagacgacggacgagttcgcggtgccgccacgtcccgcgctcgtgcacccggacgccgacggcgttcgaaccccgtcggccctcggcccgctctcccccgaggacccgccacccgcgttcatggagcgagattggcgacacggcggcgataacacggccgcgtatccagggtgctcgccgttccagccgtccgcggccgggcgcccggtctcgatcagcctgccggcgtcgccgacaggcgggttcgacatctccagcaggacggaggcggagctgcagcgggatgccgccgccgtcacggacgcgccgccgccgaggatgatgatgctgccgccgttcgccccggcgccggccatggctctcgagcagcctggcaaggtggtgttccggtcccagccgatccccgctgcgccgccgcgcgccggcgccatggccctcgagcagcctggcaaggtggtgttccggtcccagccgatcatccccggccccgagctcgacaagctgagggtactgacgccgatgacaccatccatacgttatactagtactactagtgctgttgacgcgaacgccaggtggcgtgcgtttgttagcttcgtcgccgccgtgctgctgtggccggcgcacgtgcctttagctgtcgctgatgccgatgaagaagctgacgtcgttttgtcgtactggtggcagtcctcggaggagctgatcctgccgtccgacaagacgtggccgttcctgctccgtttcccggtgtcggcgttcggcatgtgcctgggcatgagcagccaggcgatcctgtggaagcggatcgccatgttggagtcgagccggttcctgcacatcacggtgaagatcaacctggtgctgtggtgcgcctcggtggcgctgatggcggccgtgtcggcgctgtacggctgcaagctggtgttgtacttcgaggcggtgcggcgggagtactaccacccgatccgcgtgaacttcttcttcgcgccgtggatcgcgtgcctgttcctggcgatcggcgtgccggacgtggtggcggccacgctcccgcactggctgtggtacgtgctgatggcgccgatcgtgtgcctggagctgaagatctacgggcagtggatctcgggcgggcagcggcggctgtcccgcgtggcgaacccgtcgaaccacctgtccatcgtgggcaacttcgtgggcgcgctgctgggcggcatcatggggctgaaggagggtcccatgttcttcttctccgtggggctggcgcactacatggtgctgttcgtgacgctgtaccagcggctgccgacgagcgagacgctgccccgcgacctgcacccggtgttcttcctgttcgtggcggcgcccagcgtggcgtgcctggcgtgggcgcgcatcaccggcgagttcggctacggctcccgcgtcgcctacttcatcgccatgttcctgtacgcgtcgctggccgtgcgcatcaacctgttcagagggttcagcttctcgctggcgtggtgggcctacacgttccccatgaccagcgcggcgatcgcctccatccgctactcgtccgaggtgaagaacgccttcacgcagtgcatgtgcatcgggctggccgcggcggccacgctggccgtggcggcgctcttcctcgccacgctgctgcacgcggtggtgtaccgggacctcttccccaacgacatctccatcgccatcacggagcgccggcgcagcaagcccctcgtcggggaaaagatgctgctccgcctgcgcagcggcaagaaggtgcagcaggcgctctccaccgcccccgccgacgccgccgcggacctggaggccgcgcgcgccgccacgacgacgtcgtacacgtag

SEQ ID NO: 18317 - DNA, 783 bp, Zea mays
  Peptide Sequence Number=SeqID_60096
atgaactacggcggcggcagcaggagcagcagccggctccgggaccggctggcccggatgttccgcccgagcgcgctgctccgctccacctgcaacacggccgccgccgcgtcctcctgctcctcctccagcaagaacgacagcaggatgaagctgctgctgtccaacccctacggcttcagcagctccgacgacaccgacgtcttcagcagcgacggcgaggacgacgaccgcgccgccggccgcggcagcaagaggccgggcgagtcggcggcggagaccttcttctcctcgtcgcgaagcttctcgtcggactcctccgagttctacaccaataataagaagcagcacaagaagaagacggcgacgaaggcgaaggcgaaggcgaagggaatggcaaaggcaaaaccccctgcagcagcaccctccgaccgcagtagcaaggctccggcatcgtcgtcccgccgccgtccccagtaccaccggcgcgcggcgagcagctgcgacacgtgcggcgtgcgcgacgggttccggcccgtggtggtggtgtcggcggcggcggaggagcaggtgcgcagggggttcgcggtggtgaagcggtcgcgggacccgtacggcgacttccggtcctccatggtggagatgatcgtggggcggcagctgctgggcgcgccggacatggagcgcctgctgcggtcgtacctgtccctgaacgcgccgcgccaccaccccgtcatcctgcaggccttctccgacatctgggtagtcgtccacggcggctag

SEQ ID NO: 18318 - DNA, 705 bp, Zea mays
  Peptide Sequence Number=SeqID_60097
atgttctcgtacgccgcaccgcccattacttactcacctgtgccgccaccaccgccgtatgccgctggtttgctgtatccgccgccgtactacggcggacccgtcgtccccacgcccgccgttcatgttgtacaactacggtcagtgacagccaccaacttcgcagcagagctagatttgattggctcgctactccagaactacccctacatcgtcgtggatacggaatatcccggcaccgtccaccgccctcccgccggtcgacgtgacgacgacttgagccccgacgagtggtacgccatgctgaaggcgaatgttgatgagctgccccccgtgcagctcgggatcacgctctgcgactcccacggcaatctacccgtcgtcctcgactacggctacggctacaccgagggctgctgggaagtggagttatcggacttcgacatccgccgccaccgccacgcagcccagtccgtggcgttcctccgctctcagggcgtggacttcgacgcggtgcgcgcccgcggcgttggctcggcggcgttcggggcgaagctcgccgagatcctgttggcgtcgcgcggggccggcgtcggcctgacgtgggtggccttcggcggcgcctacgacctgacataccttgtcaagatgatcggcggcatcggacagccgctgccggagacgaggcagggtttcctggagcgg

SEQ ID NO: 18319 - DNA, 249 bp, Zea mays
  Peptide Sequence Number=SeqID_60098
atgacgagggaatgtctatccgaggtggaattaagatctattgtaagcagtgggaaaagtaggctatttcctgtagaggcattgaaaaaaacaagagatgaagctcaagctcaagatgctgagaaaactctccaaaatttaaagagatttggtagagaagagtcaaactctcagccaggaaacacactcgatgatgaggatataaagctactaggtgatgatgaggatgctttagcagatgatgaatga

SEQ ID NO: 18320 - DNA, 550 bp, Zea mays
  Peptide Sequence Number=SeqID_60099
atggccacaccccgcctccctgcactacgcctcccttccccaccgccggcgaggtgcaccgctgccatcagaggacgagcacgagcaacagaagaccttgaggagaagcccaccgtcgaggatctgtccgtcttctccgctaccactgtgccgcctcgcccagccatgcagatacgtggatttgatccaccaccagctcgagtttttgcttggcatgccctggagttggatgcattcaagtatttgcaaatagttgcttcatatggaggatgcacaggtgcaaacaatcttgataagaatgaggagattttgagtgggagagcgcgacagcgacatgttgacaggagacggtgggaagcgcccgacaagctaattaacctgaaagagcttgggcaacatctaggaagtgtcggggtcttctgccgggtctggccgctcttgaacaccgagtcaccagttaccgtcgagcaagagaggatcacggtcaagtcagtcgggatcaagaaagagttcgatgctgatagggtatttgggcaggagtatgcacaag

SEQ ID NO: 18321 - DNA, 288 bp, Zea mays
  Peptide Sequence Number=SeqID_60100
atggatgagctcggtgctcaaacttgcttattggccaacgccggagggagctcacgcgcctggggaagggaacgcgtgtgggggagctcagggcttgcacgccatggggagagggaaagatccctgctgctggcgaggtgcgccagggaggcctgcaggagcgcagggaggaagacgcagggggaagccggctggagatttgtggcgccatgggaagttgagggagctcgggcgtcggttggggagaccacgagcagggcactgggaaggcagaggccgatggcctag

SEQ ID NO: 18322 - DNA, 676 bp, Zea mays
  Peptide Sequence Number=SeqID_60101
atggctcgtcttagacacaccgcatggaagtcagtcattcctttcttgccttctcgtctcacgaagcgttcgcttcgccgtctggaggtagagtctgtgaggggctgctctcctgtgcccccgctggaggcgccccctgcaccaccaataggtgtcccgaccactggagtagctgctggaggagaccccgacgatggagaggactccaactcaaactcgtcgcctttgggaaaatccagaggcaactccactataattcaccggactgtccggtgctccaaggaagagcggcctcaggaactcgccagcttcgggaaactgcaacggctgctccgctataattcaccggacatgtccggtacgtcaggcacgcccatactggcgcaccggacactctacagtatatgtccggtgcgccaccggacatccaggcgggcccagaagacagagctccaacggtcgaatcccaacggctttggtgatatggctggcgcaccggacatgtccggtgaccgttggccgcgaagtaagtcgtttgccccgcagttacaccggaacagtccggtgtacaccaggaacatgttcggtgaaattatagccggagcagccgtcgcagtttcaccgaagcttgcgaggttcctggagggccgttccttccttgggagcaccgcaacag

SEQ ID NO: 18323 - DNA, 499 bp, Zea mays
  Peptide Sequence Number=SeqID_60102
gatacgtggatttgatccaccaccagctcgagtttttgcttggcatgccctggagttggatgcattcaagtatttgcaaatagttgcttcatatggaggatgcacaggtgcaaacaatcttgataagaatgaggagattttgagtgggagagcgcgacagcgacatgttgacaggagacggtgggaagcgcccgacaagctaattaacctgaaagagcttgggcaacatctaggaagtgtcggggtcttctgccgggtctggccgctcttgaacaccgagtcaccagttaccgtcgagcaagagaggatcacggtcaagtcagtcgggatcaagaaagagttcgatgctgatagggtatttgggcaggagtatgcacaaggtagccttagtgataacttctgtgcgatcattgtgctgactgagtatggttgtttaacggccatcattaggaagaaggaaattgttgatgtcatagttaaggctatcaagagcacatga

SEQ ID NO: 18324 - DNA, 1002 bp, Zea mays
  Peptide Sequence Number=SeqID_60103
atggccgcctgtgccggcgtaggacctgttgtggggatggtggtgttccagattatctttgcatttgtcaatatcttctataagctagctgtgtcggacggcatggatctgagggtactcatcgcctaccgctaccttttcggatcagccttcctcggcccgctcgcctacttcgtcgagaggggcacgatggcgcagaacctgtacatcgccggcatgaagttcacctcggccactttcgcctccgcgacaaccaacctcctcccggcgtgtaccttcgtcatcgccctcgtcttccgctacgagaagttcgccatccgcagcctggccagccaggccaaggtcgccgggaccctgctgggcgtcggcggggccatgctgctcaccttctacaagggcgtcgacatcacgccctggcacagcaacctgaacctcgtcgccacgctcacccagcaccaccaccatcacaccaccaccaccaccaccaactacgccatggggtcgctgctctgcgtctgcagctgcttcttctacgcgctttggatcgtcgtgcaggccaagctgagcaacgacaccgccctcatgtgcatcatgaccacgctgcagtcctccatcttcgcgctctgcttcgacagggacgcctcgcaatggcgactcaagttcgacatcaggctgctctcctgcgcctactcgggcatctttgcgtcgggcgtcgcgctggtgataatggcgtggtgcgtgcagcagcgcgggccactgttcgtctccgtgtttagcccgctgatgctgctcattgtggccgtgctgagctcgctgctgctgggtgagaagctgcacctcggcacggcaatgggcgcggtgctcatcgtcatgggactctacgccgtgctctggggcaagggacgcgaggcagcggctgaggcggccagggtcagcgtcaacgaccaccccaccaccagcaacagcaacagcagcgaggaggacgacgacaagaagcggcac

SEQ ID NO: 18325 - DNA, 456 bp, Zea mays
  Peptide Sequence Number=SeqID_60104
atgacggggtatgggacaacaacattcctatccttcacttacggtgggcacctgttccaccccgggggacttcatgcgtcgacccctggcgcctcgaccctcagggcatatgttctggcccttgcgacatctgttttggccctcaaggcatttggtcttcgaggcccttcgtgtgccgatcactggtgccctggccctcggggcacttgtgttggcctctggcgcctcagtcctggtgcatttgttctggtcctcgagccacttcttgcgctagctctcagggctgggcctctcagggcatctgttttggcccttgcggcacatctattccaactccttaggtcactcttcttctggctccggaggcaactctttcgacccctagggcaccttggcattaaagacgtcctggtgtggtgtggacaagcaaccatctggctaggagagggcatgtga

SEQ ID NO: 18326 - DNA, 432 bp, Zea mays
  Peptide Sequence Number=SeqID_60105
atgatgagacggccctcaaataaggttgtttggttcagggtcaaagggttgggacaaaactatcccagtgttgtcccagttatccctcaaaattggatagacgagaaagaacgtcaggggacgtccctgtcctggctgtcccacaaccaaacgcaccatgaccacagtgcaacatgcaccttctccttcacgagtaacctaccaccacgggcaaactaccaggccgccgccgtgcagtcgctctccttgatggctaccgctgttggtgtttcccgtccagatccagctgccttctacttcgatattacagcgcttggctccagcattccacaagaatcatggcaacaaccagatcctgctcccgccttccccagttccagcttcagcataggctccaaggcagctgtcacctccagcaacaagagttggtga

SEQ ID NO: 18327 - DNA, 483 bp, Zea mays
  Peptide Sequence Number=SeqID_60106
atggtcgtgatgggttcaacatcggacaagaggtacctctgccaggaccgtgtcgatgtgggcctgctgaccgaggacccttttactggtcacatgcctcatcatggggagctcaactccaaacttgccaccttcgggaattcggggaggccgctccgctataattcaccggactgtccggtgcaccgccggactgtccggtgtgccaagcggagcaacggctactcgcgccaacagtcgtctgcaacgaagctccaacggtcagaacctaacggcctggtgacatggctggcgcaccggacactggttggcgcaccggacagtgtccggtgcgcccatacgacagaagccttcaccaacgctcaagccaagaaggagatggtgatcggcgacaagctcgccacaagccacgggaaggctccatcgggggagtccgccaacaagaatagggaggaatcacctccccgcgtcaagtcgcactag

SEQ ID NO: 18328 - DNA, 549 bp, Zea mays
  Peptide Sequence Number=SeqID_60107
atgtcgctcacggaggagcagtgcgcggcagtgttcgaggaagcagcgcgccgcgccgcggtggtcatcacggaggaggagcggcggcgcaaccgcatgacctccaacaggctgtcggcgcgcaagtcccgcatgaagcggcagcggcacgtggacgacctggccgcggaggcggagcgcctgcggcgcgagaacgaggcgatgcgcgctggcgtcggcgacgccgtgctgcggagccgcgcgctcgagcaggagaaccgggtgctcgccgcgcacgcgcgccagctgtgcgccgcgctcctgctgcgcaactcccagctcagcctgctcggcgacgtcgccggcgtaccgctcgacgtgccgggcgtgcccgaccatctcgtgcagctctacggcggcgtgcaggtgccagtcatgccgctctcgccgtcagtcatgccgctctcgccgtcgccgccgccgcccctgcatctgcaattgccgctggagatccagctgatgttgctccagcccgacgtcatggacgccgtcggtatgctcgagctctga

SEQ ID NO: 18329 - DNA, 462 bp, Zea mays
  Peptide Sequence Number=SeqID_60108
atgggatcacccatctgcatcgcacccccttctccaccaaccctccgacgtctccagagcgcccagatcccgctccggcacctcgccaacacacaccacgcgcgcgccgatctgctcgctcgcccgccccaaatcccgcccggttcctctcccttcctcacatcgggcgtcaacgttcgcggaccaacgttccccaaatccacccggttcctctcccttccccacatcgcctgtcgacattcgcggacggtgcttccccacatcgagttgccacaccattgtcgcgggttcctgacaacgtcgacagtgcatggccccatcatcgccccaattcgtgcgtcgacattcgcggacaagcttcccgcgccacaacatgcccacacctaccaccatctcaatcacgtgcgggaccccgacatcgccccagatcgacaagaatctgggagcctaaaagcccgctaa

SEQ ID NO: 18330 - DNA, 225 bp, Zea mays
  Peptide Sequence Number=SeqID_60109
atggcttcgggcgaggctaagcattgggtcgtcgcggattggctagaagtcatggctgggcaacacctcgtcggtgccattgctgatgtcatttgtgttgtcgtggagggagcgatggtgcccagggcggtggcggattgcctcctccagcgggtccaaggcgcatcaaatagaatagctcgtcggccctgcatgtcagtggcgatagagacgacaaggccctag

SEQ ID NO: 18331 - DNA, 1830 bp, Zea mays
  Peptide Sequence Number=SeqID_60110
atggaggggcatgtgccattgccattgccattgctcccggacggagaaactgcggtgggctacagcaaggacgacgcctcctcgcctctgcaagaggagatttcgagcctgcggtcaaggcagcggcgtgttgacaggagacggcgggaggcgctcgacaggctcgttgaactgaaaggagaggatcacggtcaagcagccgggatcaagagggagttcggcgctgatagggttttcggccaggagtccacgcaagaggatgtgttcgaagaagtgaaaccgatcctcaggtctgcactcgacggccacaacgtctgcatcctcgcgtacggccagaccgggacggggaagacctacacaatggaaggaaccggcggtaataagctcggcgtcgtgcctcgggctatccaggagctgttctctcgcgcttcggaggacggctcatgcgcctactctttctccatgagcatgcttgaggtctacctggggagtctcagggacttgctggcagcaccgaggcagcctctcttcaggcgaacagagtgcaaagcagcggcgtgtagtagtagcctcagcatactggcaacgaaaggtggcgccgtggaagtggaggggctgacggacgtctcgacgccggacctcaagaacgccagccagtggtaccgcagagggcggcgagcccggtcgacggcctggacgaacgtcaacgacgcctccagccggtcgcactgcctgacgaggatcaccataaggagaaggatgaggcatggaggaggaggaggagtcagcaagctctggctcgtcgacctcggcggcagcgagcggctgctcaagaccggcgcgtccgggctcaccatggacgagggcaaggccatcaacctctccctgtcggcgctcggagacgtcattgctgcgctcaggaggaagaggccccatgttccttatagaaacagcaagcttacccagattctcagcgactcgctcggcgatggttcgaaagttgtaatggtggtgcacgtcagcctatccgaggacgacgtcggcgagacggtctgctcgctgaacctggcgaaacgagccagatcgatcgagccgaacagagaaatcccacaggatctgaaaacgctgaagcagaagagggtcgcagagctggacagggagatccgcgccgccgaggaagagctgaagcgtctcgacgagcagataaggagagcggaggagaaggagatctcactcgaggaggaggaggaggaggaggaggagaagaagctcttcgcctcgtcggtctgccaggctctcagcgacgacgagaaggggtcgccgaggagcactctggtggtggtggggcacaccgatgccgcggagagcccgcgcgcgacgacggagaaggcgaagggcaggaggccgccgccggctcgtggccatggtggctcagcagctccccacttcatgtcctccacggtgtgcagccggcagagacggtgcgcgggaggctaccattctgtcggtaacggtaagccgaggctgacggcggtgtcggtgaacaggtacccgccgccggctgctgagctgagtgggagccagaacgcggcggccagggctagcaggtcggcgtcagtggcactctcgtccggtgtgcacaagttgaggtgcttgcgtgtcaacaagtccgatcaggtcaacgtaataagcaacagcagcgtcgactcgaccgctgcgtcggcaccgccgccgcggcggagggaaagctgcttcggctccaggccggttctacaaagagcggcagcgcccctgcatctgcacaggaggaggatgtctagcctgacatga

SEQ ID NO: 18332 - DNA, 1437 bp, Zea mays
  Peptide Sequence Number=SeqID_60111
atgggccccccactcgtcatattctttgggctgatgatagacatggtgtctgctgttgaagagcttagtgggttaagctctaaagaacttaatgagatgctgaaggagtcagacaactttgttttgcagtccaaggcagaaggcggaggtccaaagcagacacttgtggacatggaaaaactcgtgtcctcgcttcctcttcatctcattgctgtatgtttggagcttcggcaaggccccgatttgacatatgtgcttcgtggcatgcgctttttgcatagtttgtctgacctagcatcccgccatactagactggagcaggttcttcttgatgatgtcaaattatctgaacaagtcatggatctgatattcttcttactttctattcttgctgaacagaagaaggagaataatgttggcgcttctccgcttgtgcatgcgtcacttgtagcagctagtcttcatctgctaacaagttacttctcttcccagtggcatgaacttgtccatattctgcttgcacatccaaaggttgatatctttgtggatgtggcctttgatagtttgcatgaagatgtgaggctgttaaatatcagattatcatcaatggacttcggtatctttcctgttggttctttggaatctcgtcttgctcacttcatctgccaacagtgtgaagcatcattgcaatttctcttgttgttgtgccagcaaaagctgtttcgagatcggattttaagaaataaggaactctctagaaatggaggcatactgtcactttctcacactatactgaagttagctgtccctgaatgtttgaagcaatcaaccgatcttgttgcttctatttccaggctcaaggcaaagatactttctattctgctgcaactttgtgaggctgaaagtgtctcttacctcgatgaagttgccactaattcaaacagcatgcggctagggcaaaccttggctctagaggttcttaatttgctgaagattgcatttggaaagaaaaaatacattacttctgattctcatgataaggttaagatttaccccatgggatctatgcttatcagtgcattgcgtcttgttgacgtcttctctgatgattcaaacttcagatcatcctttttgactaacactgttccgtttttaacccagattctagcaactcctcacggtgaatttgtttctagttggtgctctgtcaacttaccagcaattgaggaagatgcaagtctagattatgatccttttgttgcatctgaggtggcactgttagcttctaataatgtgttgactgaagctaaagctgactattcatgcccttttcgccctagcctgccttcagtggcatatgcacagacaagaacatcatgcgtagtgaaaataatagcaaatttgcatgtttttattccaaacatatgtgaaggttag

SEQ ID NO: 18333 - DNA, 186 bp, Zea mays
  Peptide Sequence Number=SeqID_60112
atgacggcgggtcccggcgagccgcggagcccgcgggagctagcacgcgccgcgctgggcggaggagtgaaccagctcacgaggagcctggctgctgagtgggcctgtgacaagattcgtgtcaactcggtcgcgccaggaatcgtcatgactgacatggttaagaacttgccgtccattgtttga

SEQ ID NO: 18334 - DNA, 315 bp, Zea mays
  Peptide Sequence Number=SeqID_60113
atggttgatgcttgcccttgtcctgtccttgtccgcaacgcaagcaacagttccaagagagggttgcgataccttgcccatgtctgcaagccatccccggtcccaatcccaaacagtaaacactgcaggcacaagcaaccggcacctggaaagagcccagagcctagcataaatagcaatgcttgcgctccggcagccagcagtggtgagaaaaggagttttctttcaccggggcggcagcaaactgatgaattgagcacagctgcgactctctgcctgaaccagcacttggatcgtgaactgtataaccactga

SEQ ID NO: 18335 - DNA, 1110 bp, Zea mays
  Peptide Sequence Number=SeqID_60114
atggaggacatgcacccaatgcagcagcccttgccaacacgggcaagcactccggactccaaaatgaataactttccaaaggatgtgcagaacatggaagtgtctgcaccaatacccccaataaatcgggaaggaaatgataaggatgagactccaaagaacacagtctctagaaatggtggtttcctacagaatgcagttggtcaagacctagtccatcttggcgttgcaagaacagccagtggtggctcttcggccgtcacttccgttgttagcactggacaccagcgcagcaaaatggatcttgatccagcttccggtagcgtggacaatttcaaaacaccagaactcacaaaagaaaatggtctccagggggatgacaaaggagaaagtagtgtgtatgatgagaggcaacctaagagaaggaagcggaacattatgaatagtgagcaaatagatgaattagagaaggctctagtagatgagcctgagatgcacaggaaccctgttctattgcagggttggtcagagaagctaagtctgcagggcccagagatcacatcatcacaacttaaaaactggctgaacaatcggaaagctaagcttgctcgcattgcaaaagaaagagggacatttgagggagataatgctgataagccatctacccctcatcccggcgagtcttccgaaagtgctggggaggacaactatataccccctgcaagggtgatgactgctccatccaaaggcagactggtgagcccggacggcaatgagaaaacatcgcaggcagagctatcccccaacacgatgctgatccgcccattcacgagatccttctcactggagcccggtcggctcgtttcactagttgacagcgacgggaaggaggttggcaggggcaagatattccaagcgccagggaagagcccagccccagtggagagccgcatctgcacggttgatgtcaccgagctcaggaccgagaagtggagggagctcccacacccttctgaggcatctgggaggaccttccaggaggcggaggcgaggaatggtggaatcatgagggtctcttgggactccggcaggctgttgcctgtagtgtag

SEQ ID NO: 18336 - DNA, 141 bp, Zea mays
  Peptide Sequence Number=SeqID_60115
atggagaagagcaggggcttgactacagacggcgtagctccggcgaactccacgggctccggcgacgagcggcaaactccggcgacgaacggcaacgttaatggagagcaaatgggagaggaagaagaaacggtcgcgtga

SEQ ID NO: 18337 - DNA, 1946 bp, Zea mays
  Peptide Sequence Number=SeqID_60116
gctgttggaatatgaacatagatgcacaatctctgatgcttgcaactgttgcgaaaagtcttgtgagtctgggctacgaggttgaggttttagcatttacagatgggaaagctcgtgatatttgggaaaatatttgtcttgtaaatgttgtgaacactggggctttgaaatctgttgactggtcacagtacaatgctgtgctagaaccttttcggcttctaccagtgatttggcttatacatgaagacactcttggacaatatcttagaagttatgcaaagttacatgattctattcaaaatgtcattgaagattggaggactcattttaatgcatgcgcttatgttgtttttccagatagctaccatcctttgttgtactcgcctcttgattctggtaactttttagtgatttctggttctccagttgatatctggtctgctaaaagatttggctcatcacattctgacgaaactacaagaaagcagcatgggattgaaaaagatgatgttgttattttggttgttggaagctacttattttttgatgatttaccatgggattatgtcacagtcatgcgtgcatcagctacacaaattttggatatagcaaaaactaaaaatctgagggtgcagtttgtttttttctgtggaaatggctctgatgcctacaactctgctttccaggaacttacctcacacatggggttacctgatgtctccataaagcgattttctgtgactcatgatattagaaacctgttaatgtttgtggatgttgttctctatggatctttaagacaagaacctgtcttccctcctttgttattgctgtccatgtcctccgaaattccagttgttgcaccaaatcttactgttataacaaaatatgtcagtgatggtgtccatggattccttttcgattctgctgacccaagcacgatttcttcagctttcatacaaattttaggagaaaaaaagcttttggatactgcctattctgttgctctggaagggaagctactttccaagaacatgttagcacatgattgtatcaaagctcatgttaagcttcttgaaagtgttattcattttccttcttatgcaaaattgccatcttctgtttctaaagttcaagaacgaacatggttgtgggatcctttcgagttgaaagctgcactagaaaatagtttgttggaagatgaaagccatgccagcacaaaggctgttgatattcttagagaattctctcaaagtaaccaaacaacttatgctgatacaaatgatacttcttcatatgattaccctcgtttgtccgattgggtggaaagacctttgttatcatgggatgaagtgtacaaaaacgctcgtaaatcagaaaggctaaagtcagaaggaaatgaacgtgacgaaggtgaactagaaaggactgggcaacctgtgtgtatatatgagatctatagtggagagggggcatggccatttttacaccatggatctttgtatcgtggtgttacacttgaattccctccacagcagttaatattctgtgcacgtgtttattcaaagcttatgcctatttttgcatattatctcaagtcgaaaggaggaaggcgaccaagatcagatgatgttgatgctgttaccaggctttcagttctagacaacccatactatcgagatcttctttgtgaatttggtgctatatttgccattgcaaacagagtcgatactgtacataagttaccatggataggtttccagtcatggcgggctgctggaagaaagtttcaatatcctgcttcccttgctataatgtctctctctaataatatcagtaacagcaatgttgcaaggatgtcctccatgctccagtcaaagctcgccatgggtgacttgactgtctgggactcctacacacctgtcctcagcactatgttgatatga

SEQ ID NO: 18338 - DNA, 509 bp, Zea mays
  Peptide Sequence Number=SeqID_60117
atgcagagagcaacgtccaagacggaaggtggctgtggtctggtctgggcgtccccattttcccgcagggcagggacagaagagactgagagccgccaaagaagcgaatcgtctgcctgccgcgcgcctcagtacagccaaaaaagcgaatcgactgcctgccgcgcgcttgcgcggaacgcgctgcccttcgtcggcgcttcgctccagatctggcagccgtcgtctcctcgcgccgcggcctgccgcgcggccgcgtggaactcgcctccagatctcgccgtggatccggtcatcaacgcgtcggacgaggtcaccatgacgccgaccgtcccatcggtcgaagcgtgcggtggacgctcctcaccatccctctacagctacagcgcgccctacttcgtccgttgtgtgcccatgtcgtcctctagccaaacaccctgcttagggctcccccgctttgaagctgatggcgttcggcgagttcttctgaaatccctccgtgcgtccag

SEQ ID NO: 18339 - DNA, 375 bp, Zea mays
  Peptide Sequence Number=SeqID_60118
atgggttggcaaggtgctgtacagaaccattcctcctacattgtcaagaagatcgtgcgattggaagttccaacagatgcttaccccaattttaacttcattggccgtttgcttgggccgaggggacactcactaaagagaatcgaagctactacaggttgccgtgttttcatcagagggaaaggctccataaaagatcctgtgaaagaggaacagctcaagggaagacctggctatgaacacttggatgatccaacacatatcttgattgaggccgaattacctgctgatgttattgatgctagactggcacaagcacaggagatactagaggagtcgctgaaaccagtgggaaggtttgcacaaatggaatga

SEQ ID NO: 18340 - DNA, 246 bp, Zea mays
  Peptide Sequence Number=SeqID_60119
atgaagctgtggaaggagacttccaggagttccaagattacgacgagttctaggtgtgggttagcggcaacccccagtcggctgcctgtgaaggccgcgtttatctacgtttcttttccgcactttgatttattactgttcgatgagccaacggcgccaacggcaatggtcgtctgcgcgacatttggcctgtccggtgtgccaaccagccccgaggagcaacggtcggctgcgcccgatatgtaa

SEQ ID NO: 18341 - DNA, 516 bp, Zea mays
  Peptide Sequence Number=SeqID_60120
atgagcggcgaccctgtcgcggttaacggacgtgagctgtggctagaggtggtggcacgtggcggggtcggatcaggcgaatgcgacatcgagagcgtaacgaggagcacggggcgcgcgagggcaagggactacgctattggaggggagcggcggcaggagacgtctgtgggggtaagacggacgaccaagtcttccattgagcaagtctgtgagccagggtggacgaccaagtccctcgtcgagcaagtctatgaggcgaagtggacggccaagtctcccgccaaacaagtctacgaggtagagtggacgaccaagtcccccgccgagcaagtctacgaggtgaagcggacaaccaagtcccctgccgagcaagtctatgaggtggagcggacgaccaagtctcccgctaagcaagtatgcaaggcgaagcgggtgaccaagttcgccgccgaatggccaagcgttgggcagaagccacaagcacacatcaatcacgacaggacatgtcgctag

SEQ ID NO: 18342 - DNA, 246 bp, Zea mays
  Peptide Sequence Number=SeqID_60121
atgtgcccggaagattccttaagccgccgcgggggtgatcgtttatctgactgggcgcgtgaggcgatcggtgggcagcaattcctcgtcggagtgggcgtgccaccgtggatcgcgccgcgccgtggaccagggtctgtgcagctcaaaacctcgatcattaaattaatgggaacatggagcgaccacccgggaaaacagtgctaccacaagggtataatgggacgcccttggctgactaattag

SEQ ID NO: 18343 - DNA, 456 bp, Zea mays
  Peptide Sequence Number=SeqID_60122
atgcagacgacatacaactgcaccaagggggcgcaccctttcgacttcgacgcgtccagcatggaggcccaggcccacatgtcatgtaatcggcgcgctagttactacgtgcgagaaactgcaccgccacttgcgccagtgccgcacatcctcgaccgcggaatcggtgccgcgactcgaggcaaccctgcgcacggcccagcagtgccaaccaagcacgccggtcacggggaccaggaaagggatactccgaaagggatccttctccgcgaaggaagcgggccccgagccctcctactaatcagaggttcgaaggctggccccttggaagggttcgacagccgcctcagagcactcgggccccgagccctcctactgattagaggttcgaaggctgtcccctcggaagggttcgacagccgcctcaggccactcgggctccgcgcccactactga

SEQ ID NO: 18344 - DNA, 399 bp, Zea mays
  Peptide Sequence Number=SeqID_60123
atgggtggcagcaagcgcgacacgagaccctttgtgctaagctccaagacacactctctagcaccagcaatgtcccaaagcttcagcccatcgaacgcggaggacacagggcagctcgagcgacggtgggatgcgagcgacgacgtcgaggttaggactcaggaggaggaggcaacgagagggacgacgtcagaatctggatgggcggtgggccggtggcctggtgggtcagaccatcagagtggggagagggggcagaccgcagacgtgacgcacggctcagctgaaacgaacaaaaaatttgggtctgaccattggggcacgcgtcggctcgcgaatgactatttggccgtgaagcatggagagacgctcaaacccgagtgccttttaatactttag

SEQ ID NO: 18345 - DNA, 1191 bp, Zea mays
  Peptide Sequence Number=SeqID_60124
atgggcgccgaaagccgccgccgtggcttcctgctggcctacaactctgcacggtacgtcggtaccggtgcacatgaaaagcctcctggttcgcgcgcgggggtcctggggtcccctgtgttcacgcggcggaagcggaaggaggctgcaatgtgcatacaaccacacgctcttccacgaccagcaggccagaagctccttctttcccgccaccgcgcgcccaacaagctagagcccctgtcgcctgctgcctcggcggcctcaccgtcagcggcgccgaagccgccgcggaagcgcccgcgggtgtcgcgccggccgcctcccaccgtgatcaccacggacgtctccaacttccgcgccatggtgcaggagttcaccggcatccccacgccgctaccgttcgcgccccaccatctcgcggccctgccggcggcgcgctcttcggtggcgctccccacgatcccaccgcggcaggttccgcgcgcccccgtcgactcgtcggagcatgcatgtagtggcggcgctaccgtatcctatctttggctatccatggatggtgcctgcgtcgccgtctgcaacctccggtgcgagatcagcaccgtcagcgtaacgggcctcggttgcggcggcggaggtgagctcttcctccggtgccacgtccccgcgggcggcgggagggcgatccagatcgacagccgcggcgcggggcagacgggcggcgaagccttgctgtggcgcgacgtggcgtcgctgagctgcgacggctcgccggcctgcgtccggcagctcgtggaccagggcagcgtcgtcttcgaggtgcgaaggcggcggggccgcgcggcgctgctggggcgggtccgggggtccgagctggtgggccgggccgaggtcccatggagggacgccggcgacctcggtctcggtgctgctgcggcgacgctggagcggcgtgtcgagcttgccgcgcccgcgatcggcagccgccgggtcccggcgcgcgaggcggcagtggcaccggtgctgtacgcgaggatcagcgtgcgcttgtcggaaacggcggtgcccgttagccggaggcgagcggacgcgtcggcgcgacagcacggcggtgagagcggctgcgagtggagtgtgggcgacgatgacgcgttcgcggcagtagcttgtgctgttgacgatgcgtttgagtag

SEQ ID NO: 18346 - DNA, 681 bp, Zea mays
  Peptide Sequence Number=SeqID_60125
atgtcggaggagatgcgagacgcggtgagaggcgtggccgagcacttcccgacggcgatcgtgagcgggaggtgtagagacaaggtgttcaacttcgtgaagctggcggagctgtactacgccgggagccacggcatggacatcaagggacccacggcgcagtccaagcacaccaaggcaaaggccgaagctgttctgtgccaaccagcgagcgcgttcctgcccgtcatcgacgaggcgtaccgcgcgctgacggcgaggacggcgccgatccccggcgcgacggtggagaacaacaagttctgcctctccgtccacttccgctgcgtccaggaggagaaatggcgcgctctggaggagcaggtgcggtcggtgctcaaggagtacccggacctccggctcaccaagggcaggaaggtcttggaggtccggccgtccatcaagtgggacaagggcaacgccattcagttcttgctcgagtgtctcggttttgctgacagtaacaatgtcttcccgatatatattggagacgatcgcaccgacgaggacgcgttcaaggggatcggaatcctcgtgagcaagattccaaaggagaccagtgcatcctactccttgcgtgaaccttccgaggtgaaggagttcctgcacatgttggtcaggtccaagcagcggcgggactag

SEQ ID NO: 18347 - DNA, 870 bp, Zea mays
  Peptide Sequence Number=SeqID_60126
atggaggcggtgggagaggagaagggagcgacggtggcggaggaggggaagatgatgaaggagcagggagagaaaggagtggtggcctcgacctcggaggcggagaaggagaagatggtggaggcgaagggagagaaggcagtggcggcatcggaggcagagggtgggaagatggtggaggggcagggagagaaggcagtggcgacctcggaggcggaggatgtgaagatggtggaggggaagggagagaaggcagtggcgaccacggaggcggaggatgtgaagatggtggaggggaagggagagaaggcagtggcgaccacggaggcggaagatgtgaagatggtggagtggaagggagagaaggcagtggcggccacggaggcggagatagggacttcggaaccgaaggatgtggctggcgggaggcttatcaccttgaaagagctcggacggcaagaggaagtcgtcaccgacgacgaagtcgtcatagtccctttagtcgacgggcccaccctggtcacggtgctggagtactgcaccaagcacgccgaggtcgcggccgccgccagaggcaccagcgcagtcgctttcgccacggcgtccaaggccctcgaggcttgggaccgcgacttcctcgaccgcctcaccatggacgcgctccacgacctcttcgtcgcctccaacttcctcgaaattcaagggctcctcaacgccatcgctcagaaggccgccgacgtgatcaagggcaagaccaccgagcagatccgggacgccttcaacatcgtcaacgacctcaccccggaacaggaggcgacggccgcggagctgcgtcggaagtacacctgggactaccatccagaagcctga

SEQ ID NO: 18348 - DNA, 843 bp, Zea mays
  Peptide Sequence Number=SeqID_60127
atgccgttgatggtcggtcgtcggccagagggagcggggacgtggtggcgccgcgcggatccggcggcagacgacgagcccctagaagacctcgtcgtccgcgctggcaggccacgggacgacgactccgccgcctttaaaagagccgcgccgcgcgccaagcgagacgcatatcagattcccagtcgcgcctccaagcccactagcgcaacacaagtcgcctcctccctcgttctgtcgttcagtccaggtccagccatggcgcgcctcggcctcttggccctcgcggtggccgtcctcgcgcttgcgtccggcgtggcgtcgcaggcgccggggccggcgccgtcggccgactgcgcgtcggcgctggccgggctcatgggctgcctgccgtacgtgcagcaggggagcacgcagggcaagcccgatagggagtgctgcgccggcgtcaaggccgcgctgaagagccccgccaccgtcgtctgcctctgcgccgccgtcgggcagaactacggcatgcccgtcaacctcacccgcggcgccgggctgcccgcggcgtgcggcgaagaccccgccgccttgagcaagtgcaacagtcagtactctgccgccctcgtctctgctctcacaactgctagagattaccgccacgcctgcacgaaaatcgctctcgcgcgtaaggcgggcacgtcgcagcagcccacagcttccggaacggctccggcagtcccaagcccgggctcttccaagtcgtcgtcgtcggcggcggcggcgatccgattcccggtctcagcgttcgccgttgtcgtcgccgcgactctgctctcgcactgcctcctctga

SEQ ID NO: 18349 - DNA, 3024 bp, Zea mays
  Peptide Sequence Number=SeqID_60128
atggccgcgctactcgcgttcctcctcctcctgctgctgctgctctccgggggcgccgccggcgacgacgtggcggcgctgctcgagttcaagaagggcatcgcggggcgagaccgggacagggtgctggggtcctggtcgcggcccgcgacgaccgaggccggcagcggcggcgggtgccccgcgtcgtggcgcggcgtggcgtgcgacggcggcgcggtggtcggcgtggcgctcgacggcctcggcctggggggcgagctcaagctcgcgaccctcgccggcatgcgcgcgctccagaacctctccctcgccgggaacgccttctccggccgcctgccgcccggcatcggctccctctcctcgctgcgccacctcgacctctcccggaaccgcttctacgggcccgtcccggcccgcctcgccaacctctcgggcctcgtccacctcgacctctcccgcaacaacttcacctccgcctttccccaccgacgggaatccagcagctggcagaacctgcgccgcgcgacgtccgcggcaaccagcttttggggcaacgcccaccgacctgccgccaagctccgcaacgccgagcacgtcgaccttagcgaaaacctttcacggggacatcgatttggacccccgcaccactccacatcgggaacacggtcagcgttgccgggaaatgggctattcgggatgatgcctgagacactcctccagaattccatgcggcttgtcgaggttgatctcagcaggaacggcttctcagggtcattgccgattgtgaattctacgactttgaaggtgttgaatctctcttcaaatgtcttatcaggatcattaccagccaccatgggcaaatgtacctcagttgatcttagtgggaacctgttttcaggggaattagctatattacgttcctgggatgggattgttgaggtcattgacttgagctcaaacaaattggtgggaagctacccaaatgatgcctcccagtttcagaacttagtgtcactgaaattacgaaacaattcattgtcagggtctctcccttcggtgttgggtacctatcagaagttatctgtccttgatctgagtcagaacaccctcgagggatctgtgttgcctactttcttcatgtcaccaactttgactgtgttaaatctttctggaaataaattttctggaactattccatttgagagcacccattcaacggaatcaatacttctttcatctcaaccaggtctcaggattgttgatctgtccagcaattctttgactgggccattgccaccagatatctcgaacctgcaaaaacttgagttcctcattcttatgatgaatgaattatctggggagattcccagtgagataagcaagcttcaagcactggagtatattgacttatcacacaaccacctgacaggcagaattccggatatgcctcaaaatggcctgaaggtgttcaatgtatcttacaacaatctacaaggaactgttcccaaaagtatcgaaaagtttcctttatcttgcttccgacctggaaatgacatgttagttttcccagatggcctccctgctggaaatgatgattacaccggagtttctcagggccaaacatctcatgtacataaggctggtgttcgagttgctcttattattggttgcattggagctgttttgctagttatcttcatagccctagcattctatgtggtcaggtctcaagagctttgcggaagaaatggatttagaagtcagatcactatcagggatctgaaggggagaataagccctccaaatctgttcaagcccccgaaagataatgtgataccaagtaaaacaagtttctcaaatgatcatctcttaagagccgcagctagatcgatgtctgcccagaaagagttattggctgaagcctctgttgaatatggctacactgatccaaaggaagttgccgagtccacaagtttaggtgtgaccgagacttcttctgcaatccaggctcaggagtcttctccacggtctgcattgccaacatcgccacattttgctgattctagattccttgaggaacctgttgcttttgaagtatactctccagaccggctggctggagaattgatcttcatggacagcactttggttttcacagctgaggatctgtcacgtgcaccggcggaagttcttggaaggagcagccatggaacaacgtataaagctgttctacaaagcgggcatgtcctaacagtgaaatggctgcgtgtcggtcttgtgaagcataaaaaggagttcacaaaggagataaagaggattggcactatcaggaatccaaatataatttcatggagagccttctattggggccctaaggagcaagagagattaattatttctgactatgtcaatggtgatagcttggcactttacctttatgagtcgactccaagaagatactcccgcctatcggttcctcagcgtctcagaatcgccatcgacctagcccgctgcctccagttcctacaccaggagaagggcttgccgcacggcaacttgaagccaactaacatattcttggctggtcctgacctctctccaaagctggtggactacggcctgcacaggttcatgactccaagcggcaccgccgagcagatactgaatctaggagcgctagggtaccgagccccggagctggcgaacgcggccaagcccgcgcccacgttcaaggcggacgtgtatgcgttcggggtgatcgtcatggagatgctgacacggaggagcgctggggacatcatctcgggccagtccggcgcggtcgacctgaccgactgggtccagatgtgcagcagggaagggcggggcactgactgcttcgaccgagacatcgccggcctggaagagtccccgagggtcatggacgagctgctggcggtctcgcttaggtgcgtcctccctgtaaatgagaggcctagcatgaagacggtctgcgatgacctgtgctccataacagcgtga

SEQ ID NO: 18350 - DNA, 741 bp, Zea mays
  Peptide Sequence Number=SeqID_60129
atgggggaaaaaaagtatgcggtgaaaatgaccgcgagtcgcgcgcgcctcttctgtcttcttccccctccacacatggaagccagcccgggagctgtggtgacggtgacggggacacgagctagcgccgccgccgcggtggtgggcagccctgggatggggaggaaaaaaatcattagcagggacgcggagaaagaacgtggagctttatcaggattgacgggggggaggggaggagactcaacgagactaagcagccaaaaacaaacggtgcctaaccagcaaagctgccatcgatggtcaggggcagaggaatggggggaggctttgcttcggtctgaatcatgtggcaaagtaattcgtcagtgcatcagccagcaagatgatgttttctccatcagtggcgtccgtctgttggagttaaacccaggcgggtgggtccaaggtctgacagtcaacgaaagtcttccagaggcacacagacagacgacaggtacacacgtagggagagaagagagcgagagggttggcgcggcgacaggaatatctggaagcaagcgaagcgacgcgctcgcagccagagcaccaccggcccggcgcgttccattccgtggcggcatcggcgccgcggcgtgctttacagaaggttatgcagcggcacactcaagctcatacggcgtgaaccgcaagcggaagatgccgtccgactcgccgctcaaggaggccctgccccaggattag

SEQ ID NO: 18351 - DNA, 1197 bp, Zea mays
  Peptide Sequence Number=SeqID_60130
atggccaatcgagaagatggctttgaccaatttgatgacaacatgaccaaccaaggggaaggcattacccagcctggtggaaaaggtgatggagtaaatcagcatagagaaaggggacttaatatgggacttggtctccaaaggatgaaccgagctcggcgtggcaaactgccaattgtcattactgaaggaaggataaggcctgtggcaccaattgttgctgcaaagtttgcaactgagtgcaacattgcagttcggaatcatgtgcttgtgcttaagtcatggaaggaatacgagaagcatcctgggctctttaaattgtttacagcaaaacttagtgcaaagtttgatatcaatacagaagatgcgctagttaaaaatgcttgtttccaaatgatgaggaatgcactgcgccaacaacgatataagctgaagaaacaatattttgacccttttccgctacatctagtgaggaaaacatctcctatcaaatcgacaagtgatgaacaatggaatgaccttgtggaacattggaaaggtccaaaaaatatggcgacatgtgaacataacaaaggcaaccgaggcaaagttaagttccatcaaacaactggatctcgtagctatatggttcatgtagaaaatttgggggacaagtacatggatcaagaacctgatgcattggatctgttcaaggagtgccactacagtaagaaaaagcaaggctacacttccactgtacaactggctattgtaaggcaatataatgctttttgcaatgcttattttaaattgtctcatgaaacaaattacatgtatgttgattgcattctagactcaatggaagacaagcgatctacaccaggagaaggtgaacaaccaatgtctacgactcaggttgtagctgatgtgcttgctgagaacacaaagaagaatcggtttcttcaaaatgtgggaatccaaaatgcacgacctagatctagtgtacaaaatattgaagcacaacttgaagtagagaggaaggcaaatgcagagcttcaatcacttgtcagcatccaacgtgagcgcatggatgtattattaaagcaagtgcatgaagcagaactggtaaggattagagagcaagaagagatgaagaagaagcaagatgccatggatgctcaacttgagcttatgctaagtcagattcaaccaagttaa

SEQ ID NO: 18352 - DNA, 354 bp, Zea mays
  Peptide Sequence Number=SeqID_60131
atgccgatgagaacaaaggcaacaacgaggcaaactcaggctgagggcgttatcagtacctgggcttgcggaggcgcttggccacggcgtggcgcagatcctaaggcggtggcatcctccggcgaggaattacacagagctccgaggtccccaatgctcgcagatacctcgcacaggtaccacgggacttggcagtcttcctggcttattcgtagagggagcgacaacgacggtggtgaatctccacggcggccgcccttccctctcttctatgctcgcgacaagcattcacggtggggtggattcagcatcagatcgatagaacagacgacaaattcgtacagtgggaagtga

SEQ ID NO: 18353 - DNA, 1083 bp, Zea mays
  Peptide Sequence Number=SeqID_60132
atggcgaagcccggccaagtcactcctcctggtcctctcctgcagaggtgttggtgctgcgaggagttcctcggtggtaggttcgggagcaggctcctgggcttcttcttgatcaaccccttgctccgggatcaacacaaagaaattaataatgtacaaatagcctcagaaatctatgaaattatacgaaggtatctaacccacaacccttggttcatcggaaaagtgcatgtgagcaagaatagagcaaagcatcttaccgacggcggtagctttctggtggagtggtcggcgaggttgagggcgtcacaagggtcacatcgatggccgactcatcgccggaggtggccggagctacccggtccacgtgtgcaggcggcggcggtcgacgacggctctaattctggccaattgatgacggtagagctcaatccgatggctcggggagcttcactggatgttggtgaggttgtgggtgtgagcaatcggactgtgggacttcgggtggctctggccacgtttgtcggcggagcttatctactccggcgagctatggcgatggctttggcacgactcagacatggcggtggtcgaccgtcactcgagggcgcgcgggccacgctctggcctgccagtcggtgtcgaacacgtggcccgatcacttgtgccttagttcttgctcatgctgtcacaattccaagccagatctcgggtgtgcccaggataattcagcgcctttttgttaattggagctcatggattttaggtttaaaaaaactcgacctgcgggcggttacaaggtcaattggtgatgatgacctcaagccagctgtcacagcacaacctgaggttattgaaactgctttatcagctgatgatgagttcctggtgatggctagtgatggcctatgggatgtggtaagcaaccaggacgtgctgtcaataatcaaggacacggttaaagagcctggaatgtgctcgaagaggttggccacggaggctgcggagcggggcagcaaagacaatatcactgtcattgttgtctttcttcgccccgtctccacagctgagcgaatctactga

SEQ ID NO: 18354 - DNA, 192 bp, Zea mays
  Peptide Sequence Number=SeqID_60133
atgccccaggggagtctttgtaaaggctacgtagtgtatccctggccattcacctcagtagtgaagatcgggtctgtacaacccaggctggaaagggatcatgactcgtgggtaaagaggtacatttgggtaataattgggttattactaaaacttggctttactaatagtgataaatacttgaccaactaa

SEQ ID NO: 18355 - DNA, 282 bp, Zea mays
  Peptide Sequence Number=SeqID_60134
atgaaggaggcgagaaaccactaccacacgcggggctcctcgcgcggcggcggcggcaccgctgccgagcgcgacctggtgttacagtggggcaaccggaagcgcctgcgccgtgtcaaggtgcagcgccgcgacgaggccgccgccaccgcggccgccgagaaggccgccatcagccagcgccgcgccgcggtcgcagctgcccagcaccacccaaccggcgacacccaccaacaccaccgtgttcttagaaatgatagtcgcctagaggggggtgaatag

SEQ ID NO: 18356 - DNA, 384 bp, Zea mays
  Peptide Sequence Number=SeqID_60135
atgaccgtatgtgatcccacccttgttataatcacaccaggtcaagaacgggagactatgacatcgaaaaagctaaaggaggtgatagcgcgggtgacggaagttaccgggggcaagtggtggtgcaacgagtcttgtggtctcaggcaaattggtcaacgccgctgccaaggcgctgttaaggtgcgccaagtctgcaagggtggcattgacaacaacgaaggcatccttcgaggtggcagacgcagtggcgctttaggtctttgccgaccatgttgtatcggggccttcatcaggtctgtggcatcgaggctggaagcggagaagaaggccctggagaggcaagttgaaagactacactctgaagctactaagaagctatag

SEQ ID NO: 18357 - DNA, 210 bp, Zea mays
  Peptide Sequence Number=SeqID_60136
atggcggacgggtcgcaccggcaagagcttcgtccgcggcgcaccgaggattccgccatggttgtggattccgacgagaaatctgggttgcctaggaattcaaatttgaattcagttttaactggctttacagaaggtcgcctccgtgcccgatgccgctgtacaccgtggtccgggcttcactgcaacatcatcgctgtggcaacataa

SEQ ID NO: 18358 - DNA, 369 bp, Zea mays
  Peptide Sequence Number=SeqID_60137
atggcgaacacaactgtgggcatcacaccggcgcgggaacaccagagggcgcagaacgcggcggaaaggtcccgcggcggcgcgaaacctacttcggtgagcaatttcgcgatgaccaggacaataaacggagaaataggggtgcgaggaggttgcttaccacaagcacgaactctggagcacctggaggatgacagggaggcgttgaagtcccgggttgatggcggcggactccagatgcacgggaaacactccggtgagcgtggatcgggcgaaccagaggggctgggggcgaaccaaggggtgtcccaagttgcgggtggtgcggcggagcttaccgaggaaacggacgcgacgcgggcccaatga

SEQ ID NO: 18359 - DNA, 1203 bp, Zea mays
  Peptide Sequence Number=SeqID_60138
atgggcgctgccgcggcagaggtcgtggcaccgaggccgccgtcggccaagaggaagtcgaccacgctcaagttcctgttcgagctcgagaagccggacggtggcctgctccccggcacggccaagctgccgccgccgtcgccggagcccgaggcggacagcctgatcgacaagatcgcgtcgtgcaaccgcgcgttcacgttcgtcgacgcggcggagcgcgaggaggagcgggacgcgaagcgggaccggctcgtggaggtgctgggcgccgtgcggtcgagcgggggcaagcggcagccgctggaccaccgcgtgatggtggcgctggtggagatggtcggcgccaacctgttccgcgcaatgccgccgccggcgtacccggcgctgccccccgacggcgccgacgaggaggcgccggcggtggctctggccccgtcgtggccgcacctgcaggtggtctacgacatcctcctctccgtggtggccgcgtcggacgccaggacgctgcgcaaccacgtggaccgcgccttcctctccgccctcctggcgctcatcgtcaacggcttcgccgttccgctcaaggaggagcaccgtatgttcctggcgcgcgtgctgctgccgctgcaccgcacgcgctgggcgcacacgtaccaccgccagctcgcctactgcgtgctccagttcgtgcgcaaggagccggggctcgccgacgcggtggtcacggacatcctgcgccactggcccgtcaccaactgccagaaggaggtgctcctcattgaggagctcgaggagattgtcgagctgctcgagccggtgcagttccagaggctcgccgtgcccatctgctcccggatcgcccgctgtgtcagtagctacagctctcaggtggcggagagggcgctgtacgtgtggaacaacgagcgcttcctggagctggcgacggcgtcgccggacgtggcggagaggatcctgccggcgttcgtggccagcgtggagagcaacctggagcggcactggagcaagtgcgtgcagcaggtgacggccagcgtgaagtccctgctggagcaggtcgcgcccgacctgtacgcgcggtgcgccgccgacctcgccacgcggcggtccgaggccgaggccgccgccgccgtgcgcgacgcccggtggcgtaggctcgaggcggcggccgccgccgccgccaaatag

SEQ ID NO: 18360 - DNA, 1011 bp, Zea mays
  Peptide Sequence Number=SeqID_60139
atgtctctcctcctcaagcccaagccccacctctccgccaccggcctcatcatcttcctgcgccatctctgcgaggggtcaccaagccagccgggccaaacgggtacggacacctcgcccccgcccctgacccgcgatgacaccaagctcgtggacgccctgctcgcggcgcttctcgaccaccgccgcgccaacccggccgccgagctcccggttccttctctatccaacacgctcccgtccctctcgtccgccatctccgacctgctcccttccccgcctccgcctcacctcccgctccacctcctcctccgcctcctcgcgctccgccgcggcgtaccgctcccggaggccgtcgccttcttccaccacgtttccccctcccttcccgccgactccctccctgatctctacgcctccatgatagtcctgctcgccaagcaccgtcatttcggcctcgcgcgccacctgctcgatgaaatgagagagcgggccgtccccatctcacggcagctcatcctcgccttgacccgccgctatgtccgagcggagatgccgtcggaggctgccgacctgttccgtcgcatggaggagtacggcgccggggctccggaccctgccacgctggcatccctcctggctgctctctccaagaagcgccttgccagcgaggcgcaggcgctgttcgacagctgcaggactgtcttcacaccggatgttgtgctctacacagccgtggtccacgcgtggtgccgcgccgggcgcctcgatgaggcggagcgcgtcttcacagagatgcagcagtcagggatcatgccgaatgtgtatacctacaccgctgtgatcgacgcgatgtatcgtgcggggcaggttccccgtgcacaggagcttctgtgccaaatgatcgattctgggtgccccccaaacacgacgacgttcaacgctatcatgcggtcgcatgtcaaggccggccgttctgagcaggtgctgcagattgttatggaagtgtag

SEQ ID NO: 18361 - DNA, 687 bp, Zea mays
  Peptide Sequence Number=SeqID_60140
atggcgtcgccggccggcggcgagtctccagcgaagcccgtcctcctgcatggcgacctcgacctctggatcctagaggcgcgcctgctccccaacatggacatgttctccgagcaggtccgccgctgcctcgccgtatgccgcccgcccacctcctgcgggaccaaccacccgcctgccgccgcgcgcggcggcggcggccgccaacaccaccaccggaagatcatcaccagaggcccctacgtcacgctgtccgtctccggcgccgtcgtggcgcgcaccgccgtcatccccaactcccaggaccccgtctgggaggagcgttttgccgtgccgctcgcgcaccgcgccgccgagctcgagttccaggtcaaggataacgataccttcggcgcgcagctcatcggcaccgtcaccgtccccgccgactgcgttgtgtcgggcaccgaggccgaggattggttccccgtcaaaggcaccaacggcaagccgtacaaacccgacaccgcgctgcgcctccgcttcacattccaccccatcgccaacaacccggcctaccgccacggcatccctggcgacccctggccacaggggcatcggggagtcctactacccgctccgccacggtggccaagtgacgctgtaccaggacgcgcacatcagggaaggggacctgccagagattga

SEQ ID NO: 18362 - DNA, 204 bp, Zea mays
  Peptide Sequence Number=SeqID_60141
atgtcttgccgttctactagctggacttcggcacgggctgcccaagctacttcatgctgtcctacttccccaccgtgcatcgaggggatgctgttcctggtgccgtcctacatcggcgacggcagcgtggacgccttcgtgcccgtcttccagttccagcaaaacctcgaggccttcaaggagtgctgctacgccatggagtag

SEQ ID NO: 18363 - DNA, 231 bp, Zea mays
  Peptide Sequence Number=SeqID_60142
atggcttgcttaagggtaaatactctactaggatcgcaggaggaagtgccagtagcagttgccgaggaactgcaggaaactcctgccgaggagattgagcctgaagctgaagtccaagagtgccctgaccaccgccccagtacttttgagaaaggcaagccccggcatatatttcccatgatttacaataattggtttattcactatacctgcctatacttgttgcattaa

SEQ ID NO: 18364 - DNA, 2304 bp, Zea mays
  Peptide Sequence Number=SeqID_60143
atgaaggagtccgaccagctcgcgacttctttcatcacgcccttcggcatgtactgctatgtcaccatgccgttcggcttgaggaacacaggtgtgacataccagcggtgcatgaaccatgtgttcgaccaacacattggtcggacggttgaggcctacgtcgatgacatcgtagtcaagacgaggaaagcctccgacctcctttccaaccttgaagtgacattccgatgtctcaaggcgaaaggcgtgaagcttaatcccgaaaagtgtgtcttcggggtaccccgaggcatgctcttggggttcatcgtctccgagcggggcatcgaagccaacccggtgaagatcgcagccatcaccagcatggggcccatcaaggacttgaagggcgtacagagggtcatgggatgtctcgcggctctgagtcgtttcatctcacgcctcggcgaaagaggtctgcctctgtaccgcctcttaaggaaggccaagagcttcacttggacccctaaggccgaggaagcccccgggaacctgaaggcgcttctcacgaatgcgcctatcttggtgcccccagctgccggagaagccctcttgatctacgtcgccgcgaccactcaggtggttagcgccgcgattgtggtcgagagacgagaagaggggcatgcattgcccattcagaggccagtctacttcatcagcgaggtactgtccgaaaccaagatccgctacccacaagttcagaagctgctatacgtggtgatcctgacacggcggaagctgcgacactacttcgagtctcatccggaaactgtggtgtcatccttccccctgggggagatcatccagtgccgagaggcctcgggtagaatcgcaaagtgggcggtggaaatcatgggcgaagcaatctcgttcacccctcggaaggccatcaagtcccaggtcctggcggacttcgtggctgaatgggtcgacacccagctcccaacagctccgatccagccagagctctggaccatgttcttcgacgggtcgctgatgaagacaggagccggcgcaggcctactcttcatctcgcccctcgagaagcacctacgctacgtgctgcgcctccatttcccggtgtccaacaatgtggctgagtacgaggctctggtcaacgggttgcggatcgccatcaagcaaggggtccgacgcctcgactctcgcggtgactcgcagctcgtcatcgaccaagtcatgaagaactcccactgccgcgacctgaagatggaggcctactgcgatgaggttcggcgcctggaagacaagttctatgggctcgagctcaaccacatcgcccggcgctacaacgagactgcggacgagctggctaaaatagcctcggggcgaacaacggttcccccagacgtcttctcccgagacctgcatcaaccctccatcaagatcgacgacacgcccgagcccgaggcaccctcggcccagcccgagaaggcacccgggggctacacgcacctgttggtcgccatcgacaaattctccaagtggatcgaggtccgacccctaaacagcatcaggtccgaacaggcggtggcgttcttcaccaacatcgtccatcgttttggggtcccgaactccatcatcacggacaacggcacccagttcaccggcagaaagttcctggacttctgcgaggatcaccacatccaggtggactgggccgccgtggctcaccacatgacgaatgggcaagtagagcgtgccaacggcatcattctacaaggactcaagcctcggatctacaacgacctcaacaagttcggcaagcgatggatgaaggaactcccctcggtagtctggagcctgaggacaacgccgagccgagccacgggcttcatgccgttctttctagtctatggggccgaggccatcttgcccacagacttagaatacggttccccgaggacgaaggcctacgccgaccaaagcaaccaagctagtcgagaagactcgttggaccagctggaagaggctcgggataaggccttgctacactcggcgcggtaccagcagtccctgcgacgctaccacgcccgaggggtccggtcccgagacctccaggtgggcgacctggtgcttcggctgcgacaagacgcccgagggcggcacaagctcacgcccccctgggaggggccgttcgtcatcgccgaagttctgaagcccggaacgtacaagctggccaacagtcaaggcaaggtctacagcaatgcttggaacatccaacagctacgtcgcttctacccttaa

SEQ ID NO: 18365 - DNA, 276 bp, Zea mays
  Peptide Sequence Number=SeqID_60144
atggaaatggagggcgcggaggagaaccaaggcaacccaccccagcaggcggcaagcggcggcgcagaacactggagcagggaggcgccagtcacagtgaagaagaaagtccggcgtcgcaggtcatggcaaatctccggcgagctactgccaagggagcctcgacgcggcgtcggggttaggctcggccggcagctgcgggctatggctgaggaaggcgcgagctcacggatgaatggagcaaagctcacacggctgggctgctgctggctttaa

SEQ ID NO: 18366 - DNA, 1221 bp, Zea mays
  Peptide Sequence Number=SeqID_60145
atggaggtgaaggtgctgagctccaagctcgtgaaaccgtcctacccggcgggcgcgccgcggccggacaccacaaagcacgtgccgtcgtcggtgttcgacaaggccacgtaccacacgcagacggtcaccatctactacatctctccgccggtcccgtccccagacgccatcgagcgcggctacgccacggcgctgggcgcgtaccggctcttcgccggccaggtccgcccgggtccggacggcgcgccaggggtgctgctcaacgaccacggcgcccgcctcgtggaggcgtccgtggacgcgcgcctcgccgacatcgcccccacgaagccgccccccgccgtgctgcggctgcacccggacctcgacatcgtggaggtggtgcaggtgcagctcacgcggttcgcgtgcggctcgctcgccgtgggcttcaccgccaaccccgccgtggcggacggccacgccaccagcgacttcctcgtcgcctgggaccgcgccgcgcgcgggctccccgtcggcccgtcgccgccggtccacttcccgccgcgccacgacccgccgcgcgccgggttcgagcaccgcggcgtggagtactacaggcccgcgccgtcgttggcccacggccacgtccacggcgacactacccagcacagcatcgtggtccacaaggctcacttcaccaaggacttcgtggcggggctccgcgccagggcgtccgaaggccgtggccgtcccttcagccggttcgagacgatcctcgcccacgtctggcgcaccatgacgcgcgcgcgcgggctgggcagcaacccgctccagatctccaccatccgcatctccgtggacggccggccgcgcctcgcggcggcgccggcaggctacttcgggaacctggtcctctgggcgttcccgcgcgccacggtggggagcctcctcggccggccgctgaagcacgcggcgcaggcgatccacgacgccgtggcgcgggtggacggggcctacgacttccagtcgttcgtcgacttcgcgggctccggcacggtggagaaggaagggctggagacgacggcccctgctcaaggaggaagggcctacttccccacggagggcatgctgttactggtgccgtcctacatcggcgacggcagcatcgacgccatcgtgccggtgttcgagcacaacctggatgcgttcaagcagtgctgctactccatggagtag

SEQ ID NO: 18367 - DNA, 450 bp, Zea mays
  Peptide Sequence Number=SeqID_60146
atgcacgacctcctccttgcactggagctactaggttgttctggttggttcctggggcaggaaggcaaggtgcctggttgttctgacgcaggtactgatttccttcctgctggttgttctaacggtactgctggtggtgctgaggaaactgcgtctagtacggctgctggtgctgacgctgatgctggtgctggggggcttgcttcagcgctagaaaatttcctccttccttactatcatcagtccgtcaggtacatggtaacgactgaagttgtccccgaactcctcctacgtgatggcttcagggtaggcaagggtggcgcggaacatctgctcaatggtcatagggggtgggggtggcaactactgctaagctgcctcctcctggggtgcctgctgctcctgctgagcacatcttccacctctgcgcctgttctcagacatctgtag

SEQ ID NO: 18368 - DNA, 2115 bp, Zea mays
  Peptide Sequence Number=SeqID_60147
atggcgcctcctacctctgcatcggcgcggccgctatccctccccctcaccgtccctctctcctgtcaccgctcccacttgctccccgcgcccaacgctcgcctcctcacccggcgccgcgtcgcgctcgcgccgacccggcctggcgccacgctcctatccagcctcagtgacgcccgggaggaggaggaggatgaaagtggtttctatgaggaggatgagcaacaggaattcgaggatgaggaggaacaggggtacgacggggagaacgaggagctggtcgaggtgggatacgtgtcaggcgcgcacggggtgcgcggcgacgtcctcgtcacgccacgcaccgactttccggagctccgccttgccacgccggggacgagatggctgagggctcgagctgctggcaagcagcaggtcagggaattcgagcttgttcggggaagggcgcacacggggaagaagagttggatcgtcagctttgatggcgtcaacaacctggacgaggctaggcaaatagttggttcagctgtacttgtgaaagctcgagatagaccagaaattgaggatgatgaattctattcacttgaccttgttggaatgagagttattgtcaaggatacaggcaagctcgtaggaacagttggtcaggttttcaatttcggaggtggagatcttctacaggtgataatgggctcttctgagggtactgctgttgatccagattcagaaaatcaagattcaatttcatcacgtgagcatgtgtggattccatttgctgaagatattgtacctgatgttgatatggcaagcagagaaatgcggattacacctccgaaggggttacttgagctcaattctcgttctgacaagagatcgaagaaagaaaggcgtgcgatggagtggaaggacaggaaaaggtttcaacgtcgtgtaattgcaggaaagaaggtactctccgaaatggaccaagtccatgttctggaaggtttggtatcaggggacaaggtccaaaaggcatcacttgcagagcagattgggagcattgactttcaattgttccgacatgcagtacattgtgttagcaagcagattgagagctcttcaatgaatttgctcgctaactcttcactgtcaaggaaaaaagtgatcaaaataccatacaagactctcatcaaccttggggacaaagctgaacatgcattcagtactgaatttaaaaatggacttgacattcttttgaagtccaaagcagctattgtgcttgttagaaacggctctgactctgatactgagtttctgagtttgctcaattcttttagtgaattaatgaaggttgtagaaaataaagtttctccccctttaattgtcattgccccagctggtcatgtggagtcagttcggaaatgcctggtagagaatgactattttggttttgacactcaaaaggtgtgggtgctggaagaggtggagcttccagttgtcagtatatgctcggagggaaacagaaaaaaagttctgatgaagtctccctgggagataataaaaaagccaacaggttctggagcaatcttcagcttactgttatcaaacaaaattttggaaaccctcaatgaaatgggtgtacagtatacacagatctgcagctcatccaacaaaccaatcatcgggcatcctttgctctttggggctgtcgcttcccgcggggctgatgttggcatccaggtctccaagaccggtgaaacattagacgatttcgacgtgatcctttccatcgaccagctgaacaagatgtgccgagatgtcacccagatcaggttctccgctcgctccgaacagaacgtgcacgtcgagcatgtcgacgggcagtgggtcgccgtccagccggaggtggcaaattcccatcgcctgcatgccgaggggagcatctacgaaggggaataccagccacccactgccaattctactggtcccagaaggattaaaaacttgttagaggataaggtcgtcctctactcaatccaacagcgatctctaaacagtcctatagatttagagtacactactggatcctctatatataaagtttctataaacgattatctatccatttga

SEQ ID NO: 18369 - DNA, 396 bp, Zea mays
  Peptide Sequence Number=SeqID_60148
atggcccaatacttcacattgatatggtgctcacagatgcaatgcatatatgctgagattccaagcgacatagtagatgagcagaatcctctaattaatgtgaacaaggtgtacattataaggcgctttcgagtcatctatgcaaaatcatcttacaaagttgttgatgctccttttatgatatgcttcacaaaattcactataattgagctatgtcgtgaaccaccaacaacatttcctcaatatgtttatcgattgacaccatacaatgaaattgacccatttggtccaaaagcttggaggttactaaaatcaacccgatatattatggacccactcaatcaacctctaagattagaaatgtattcatcacagatctcagtgataacattatga

SEQ ID NO: 18370 - DNA, 819 bp, Zea mays
  Peptide Sequence Number=SeqID_60149
atggcgagcagcaccatggccctctcctccacggccttcgccggcaaggccgtgaacgtgccgtcgtcgtccgccttcggcgaggcccgcgtgacgatgcgcaagacggcggcgaaggccaagccagcggcggcgtccgggagcccgtggtacggccccgaccgcgtgctgtacctgggcccactgtccggcgagccgccgagctacctgacgggcgagttcccgggcgactacggctgggacaccgcggggctgtcggcggacccggagacgttcgccaagaaccgggagctggaggccggctcccagatcttcagcgagggcgggctggactacctcgggaacccgagcctcatccacgcgcagagcatccttgccatctgggcctgccaggtcgtgctcatgggcgccgtcgagggctaccgcatcgccggcggcccgctcggcgaggtcgtcgacccgctctaccccggcggcagcttcgacccgctcggcctcgccgacgaccccgaggccttcgccgagctcaaggtcaaggagctcaagaacggccgcctcgccatgttctccatgttcggattcttcgtccaggccatcgtcaccgggaagggcccgctcgagaacctcgctgaccacattgccgaccccgtcaacaacaacgcttgggcctacgccaccaacttcgtccccggcaagcggcgcgtcccctccgcaataaaggcaaaggttgcatggctgtatggactttccatcaggctcgacctactggcttatgtcacgggccacactccacgcggcagtaagcaggccttcgcctga

SEQ ID NO: 18371 - DNA, 546 bp, Zea mays
  Peptide Sequence Number=SeqID_60150
atgtccatctctatgcggctcgcgatccctgctcctgccgtcaccgccgccgcgccgacgcggctgagggtgcgagcggcagcggcggggaaccgcggctctctctccgtcgcgcgcgccgccgtacgggcggagacgggcgcgctcagagtgctattagttgctaaaggcactgccatacacaaatctttccttgtgccattttttgctcttcaggcaccttgcagcataatctcatggatcaagggtgactatggtcagtggactgcttttcttgctctgttggtgcgtctattcttcttcattccaggtgaactggagcttccactgtcaacaatgctgcttgtgagtgttgctccttaccaattcatggatctgaggggaactcaaggtggtgccgtactgtcactggccatagctgcgtatctcgccttccagcacttcactagggtgggcggcccaggcaaagccttcgagcagggatccattgttgcgaccttggccatcatctgcatcatgattgtgcccttgatgcttctattctga

SEQ ID NO: 18372 - DNA, 561 bp, Zea mays
  Peptide Sequence Number=SeqID_60151
atggctcgtgatgagggggggagaagaagaagaagaagaaacagtctctttccgcacgatggaaccgagctccccaccttcttcctctgcggcgtcgcaccggcattcgcctccggcaacgtcatgccgcggccgtggagaaagggctcgcgcgcgggagaagcgagaggctgtgccgactgccgtgccgccccaatccgcaggcaaggacgacaaggagacgacgggtgggggagaggagaggagcggacgacggaggagcagaagcggcgtcccacttgttgcggggttatatttacgcgcaccgtgcagcagctgcagcagtgggtgggtgggacgaacgagtacctcgatcggcctcttgacttgacgttcagcgagaggtggcgatgcaagagacaaggagagatcctctgctctctgatcccccgatgcagtagcatatctgtccgtgtcaacttggcacgaggcgactgtggggagatagaggtggatataaagaacgcagaaagaaaaagaaaagaaaaaagatacgccggagataccagagtttatgtttga

SEQ ID NO: 18373 - DNA, 4608 bp, Zea mays
  Peptide Sequence Number=SeqID_60152
atggcggagaggaagctggatcgaccctcggcgctcggcaaaggtgggctgtcgcttgggatcgaggaggacagggttgccgccgccatggggttcgtcgaccactcgaaagatcagcaccacctggataacagcattcccctctctcctcagtggctctacgccaaacctgctgatggaaagatctcgctgcctcatgggtcctcccttgaacttgctgaaaaggaagtgaggatgttggaaggaactgttgacaggaaagaacgaaggagaaatgcatttgatgctgacagtggtcttcgttggcttgaagaggagagggagacaagcctgcttgggagaagggagcgcaagaaggatgtggaccgggatgtggataatcgcaagattgatcgccgatctgacaatgtttctgcaagggatatcactgatccgcgtgcagctcctgcatctgaaaggtggcatgatggttccacccgtggcctggggaacgagggtcgccgggatggaaaatggtcatcaagatggggacccgatgacaaggagaaggactctaggtcagacaagaaggttgatgcagagaaggatgaaacccatgctgataaactgacattcacaggaaggctgctgtctgagtctgattcccgtgataaatggaggcctcgtcaccggcaggaaagtcattctgtcggaacagctacgcaccgtgctgctccaggctttggatccgagaaaggacgtgttaaggactcaacaaatgttggttttgccgctggaagaggaaggggaaacccgaactcagttgcatccttcaaccggccatcatctgcaggatcaatcggtgctccagctgtgcatgggaaatttgcaaaaactgctgttagtttctgctacccaagagggaagcttcttgatatatacaggcagaaaaatatgatgtcgtcgtttgatgatgtccacatgaaactggacgaaattccttctgtgacactctctactgctgcaaaacctctagcatttgttgcaccagatactgttgaagaggctctcctggaagatattagaaagggtaaagtcattagcagtgaaggaatcaatgggattggaaacaaaaaggagagggcaaaagagctcgaagaacctgcttctggcattgatgatgacatgggcaaagccagttttgcaattgctgggttgggtcaagaagggtcgtcaggtttaatctcagtgaatgatgcctcctatgttgaagggacacttcctagtggtgtcagtacatctctgctgaagataagtctggaggaaaatgccatcagcaatcaacatgggattactgacacccaggaaggtttgaaaactgctgaaatcaaggaaaatgctgatcatgctcttggcactaagttacctgatgattcgaacaccctgtttgaggtaccatcctttgagcatcttcaagaacccactaggccataccaaagcaacaacatggatataaaagtgggtggccatgctaattatccagaagagttgacattatattatctggatccccaaggaggtgtgcagggtccatttctgggtgctgacataatctcttggtatgaagatggatacttcggtttggagttaccagtacgtctgtctcagtttccagatgatgttcctttccgtccacttgtcgaagtcatgccccaccttgcgcaaaagacgcaatcgcgtatacctctgccttgtgatggaaattctgagtctctggaatcatctcaaagtaaatttgaatccagtgtcccttctacttcctctgggaggactgaccaattttctatttgggattctgaaagcaatgctgttgatcctaaaagaggtgatcatgaagcatcaataccttctcgtagtggttggctgtcttcaccggaaacaggaaaggatatatcaaatactagtaatcgccagcaacacattcctgaatcagtgaatcaggatgctgaagaagtgttgtacactggtaggcctaacagcagcatgggtcaatccctacgagaccttgagaatgaccgtgcagatttccaatcgacaccacatgaccctcattctgtggctggagaagctaatttgctgcaacataatgtcccaagggacagtgatctgagtcctcttggcttactttggtctgagctggaaggacgtccaaaacaacctctctcatctaatgtacttagtgtaaatgaacgtagaaatcccaagcctacaacacccaaggacattccacctgtaaacatgagacaagggccacttagcagaatgaatgaagtttctagtgtgcgcgatgagtggcctgcaaactttggtcggctggacaacatgaatgatgcaaacatttctggcagaatccatcaggttgaagcggagcatcatttgaattttgatgggcacctgctgcttcaacagatccgacgggagcaacagcaacagcggcaggagcaattgatggcccataataatttagagttttctggtgcatttcccgggcaggtgtttgatcctttgaaccaacaccgacagcctatgaatcaacagattcctgatgtggagcatcttttgagaatccagtttgaacttgagcaacagcagcaacgccaactccaacaagagcagcaccaacggcagctacagcagcaacggcaagcccagcttttgcaacggcagcagcagcagcagcagcaacagcaacaacaaatgatccttgagcaattgttgcagcaacagctgcagggttcaaattttggcccaacaagtatggttgatcaagtcttacttcgtgaacatgtattaaatgaactgcaccagcagcctcaccatttgcaaaggcagcatgatgcagctattgaacagctcattcaagcaaaatttggtcatgggcttcatagggagcaccataatgatatgttggatgttctctcgcgttcaaatcagagacagatgcttcctttagagcagcaacttcttttaggccttcaacacgagcagcaacttaagtctcaacaattggcaaatgctctgcggcaacattcaggccaggaagaagaaaggcacttaagtggggtctggccaatggatgctgctgcccagtttatccgctcaggaaccagtccaaatcagatacacagtcgtttcgatctccttgagaaccttcagagatcgtcatcgtttgatcatcatgaacatctagaccgcagcttatccttacacgaacagttgcatatgggaggtcaaggtattcgctccctagagcggactggttctttgcctggtggtggtcctggaccaaacccagatgtcataaatgccctaacacgtcatcatggacttagtcagttggaaacacatggtgatgtataccctttagttcaaatgcctatgcttccttcaggtgttcatccccagcaacttaggcatcaggatcagcttcctggttctcacataggaaggcttgaaaggcactggtcggatgccaatggacagttacaaaacagtctaatggaatcttcacacatcaaccagttgcagattgaagcggagaaggagaggaggaatgtggaaatgaacctttctgttgacaatccacatgcatggggagcccttatgaataaagataggaatacagagcaagatttgactgatatgattcataaaaaacttgtccttcaatcacagcagtcccggggttttcctgatgtttctgttccggcatcatttcgacgtaaagatcactttgtgcaacctgttgtggagagccctctgagatcagtggacatgtcgtttgaggagtctctttctgaaaggtcactttatgcaaaatcagggcagttggcacaagaaggatcatctaatcttggtactttacccaacagtattgagaacactggaaaatttaaccttagatcaggatctggatcaatgcttgagcagaagcattttcttggaattgacgatgttcaaagtgactttctagagaccacaggtggtagaacatcagctaatcaactggttgggagtgtcaatgaattaacaaggggtaaaaggcagggttctagtgcgagtttggctggggatgatcctaatttggctgatgaaggtgttagtaaatggtctgattctggcatgtccaaaggaagctctcactccttactaaagcgctctacaaaccaacatactactacatctcagtctgttcccacagatctgtcagcaatcaggctgaagaaagcaggacttgcgtcctctgatgagaataagatggaagcaggatttgcctcagtagcccagggtatggaaggctgcgttcctagcaacaaagagacgggggcgtatggcatgccatcagccaccaacaatccagatgcctctggtcagtccttcagcgaagcgttgaagagctcgaggaagcctccgttgcagtacgatgcctccgaatctgcagactgtggcccaggtggtaagggcgcgaaaaagaaaacgaagaaaggaaagcagattgacccttctcttcttgggttcaaggtccacagtaaccggatcatgatgggcgagattgttcgagatgattag

SEQ ID NO: 18374 - DNA, 2088 bp, Zea mays
  Peptide Sequence Number=SeqID_60153
atggattgccatggaaggggcaagggcaatgagaaggccatacttgacagcggcgaatcatctagtgcagctggtgggttgtcaaagacatatgtggttactaaagaaggaaaaaggatagaattgaaaggaacaattaaggacccatggagccatggcactaagaggggtaaacttggctggaagtgtggatactgtaatgcaagccacgcaagcggaggtgctacacgtctaagggaacatttgtgtggattacaaggtaatgtgaagccatgtttcaatgtgccacgtgatgttaagaacatattgttggaagaagtagcattgagcaaaaagaagaagagggatacaacggaaaatcgtctctatatacaaaaggctctcgtagagcatgattataggacaattattgctagacttaatgaagaggaacaacttgagatggcaatgagggaatcacttagggatgttggattgacctatgatggtagctcaaggggtagtggtattgttattggggctgcaagtggtagcagagtatctaatagtgtggctggaaattatggccagacaagtggcagtaggtcgggtagctcaactaaacaaagtccacttcgtagtttctaccctggcccaagttcttcaaaagctccttttgacatagatttggcacgtagtagagcaccctcacagcctcgggtggatatcatgctgtgtcgggattctaagctgaagctctggaaagctttatcaaaatggttccatgccaatgacatacctggtaggaaagctgattgtccctattttagggctgcaatgaaattggctcaacaacttggggaagtgcctctcccaaaaggaaaagatatagatggtcaactattagatatgaactacaatgatttggaagctcaaatggaatcttttaaggaagattggagtcgatatggggtaaccatcatgtgtggttcatggacgggtcctacaatgatgtgtataattaacttcatgatcttttgcaatggtcgcatgtttttccacaagtctgtgaacgcaaccggggaagtccaaaatgcagaatttatttatgattgtattaaagaggttgtggtcgatgatgttggggctaaatttgtcgttcagatagtgacagataatggttctaattacaagaaagcatgcaaacagctcatagctgagcatccacacattacttggcaaccatgtgctgctcatactgttaatttgatgctgaaggacataggaaaatttgatgatgttgcaaatgtagtggacagtgcaaagcgtatatgtaggttcttctataaacataataggctgcatgctatgatgagggagaagattggtggggagctaattcgttggaatgccactaggtttggcacagtgtttatgtgcttgcagagtttttgggataggcaggaccagttgaaggcatggatgatctctgctgagtggagaaatagtcaatggagaaatgaggaagaccattcatttgcatatgattgcctaacagataggatttggtgggatgatatggaattggtgttgaatgctgttggaccaatcttttttgttcttcgatatgctgaccagcaaaagaatgctaccgtatctggctttcttccaaagatgatacaagcatataatgatataagtgcaaaattaaaaaaaagtgaacgtggtaaaggaggtctacttaagaggacaactgaagtaatcagtaagagaattagatatcttctcaatgaaacacttatgcttgcaggtgctgcacttgatcctcaagagctatataggtcaaatcttgcaaagaaatcaagttgtcaattggctgtgactttggcaattaagaaacttgccacctcaactaaagaagttgcagctgcaattgaccagttttctaggttcattgaaaagaaaggactatttgaagatccagaagctaagtggtcagcacttaatggcaaaccagatgcaggttcgagacatggggaaccaactcctttgcgtccaagatcaacaagaaaaaggaagccaactctcaagagcattactgaattataa

SEQ ID NO: 18375 - DNA, 123 bp, Zea mays
  Peptide Sequence Number=SeqID_60154
atggagaaaggcgagaagctgtccctcgccagcaagaactggggacaaaattctggtgttgtagatgaggtaatacttgatccttttgaactccaagcccaaaattcacttgggaagatatag

SEQ ID NO: 18376 - DNA, 432 bp, Zea mays
  Peptide Sequence Number=SeqID_60155
atggagtttttggaccagattttaccctccttaggatttttggttcttaggttgggacaacaggattggggaaaagatggagtttttagagccgggagcttacctgaacattatgatggcgctaatgaaggtgggccagagggcggtgttctagaaggtggcaaaggaaaggacatgagccagcttggcggagattggggcaagaggatgggggtagaaagatgtgaggttttagagccgggagctttcttgaacatcacgatggcccattgcggagctaacctatggaaggctcagggcaggggacgccatcggcgaccgcaaaccgcgagggggaagcggaaggcggtggcgtgggagggagaaagggaccagaaggagaggaggcaagacaatgtgggagagtgttcggtggcagacggatgcggctag

SEQ ID NO: 18377 - DNA, 324 bp, Zea mays
  Peptide Sequence Number=SeqID_60156
atggcggctggggctgggcggcggacggccggaccgggcgggcagggaggcggccgaaaccggccatgggggaaaggggagaggggatgggggagggaggagagggggaggggggagctcaccggggaggggcgcgacggcgaggggcggccggcggcaggggcggccgagggcggcgccttcgaccaggcggatgaagattttgatcgagatatctataaggtcgaagaccccgtggtgaaggaatccgccggggccctctatgaccggatgtgggttctgtacggtcgtgaggtggtcagggagcgggcgacaccgtctcag

SEQ ID NO: 18378 - DNA, 195 bp, Zea mays
  Peptide Sequence Number=SeqID_60157
atggttttcagcaacggagcctatgaagaagccctattttctgctgctgtttgccaactccaagcagatcgcccacttaagaagcccaccctcctcgctatagaagatcttactagccaatttcaactattctactatgtgtttgcttttaatataacagtgaaaattgacaggagaacaaaggatcaagtttga

SEQ ID NO: 18379 - DNA, 189 bp, Zea mays
  Peptide Sequence Number=SeqID_60158
atggaggagcaaggtctcttgataaagagggatatgctgaagaagatgatggtgatgctaatgcagccatttttgtcaagtatgatagaatgctccatgtcatacagagcaatacaaagttgtggaggtattagtgtttatggaagagctacaggtctgagatccatgcagaatttagagtttttatga

SEQ ID NO: 18380 - DNA, 282 bp, Zea mays
  Peptide Sequence Number=SeqID_60159
atgatggtccgccatgtgcgcggggcggcgccgcctcagacagacactggggtggtcagcggttcggcaccgtcgatcacggagtgggcgattgagattagaaagcgcgcgtacctcgggcagacactagggtggtcagcggtttggcatgatgttaatttcctctatatactgtgcttgtttgtatcgtggcgagtagaagagcctgtgactgaggaccctggtgcccagcagatagaagttgctgagcaggagctcattgaaggcaagttgtgcccttga

SEQ ID NO: 18381 - DNA, 471 bp, Zea mays
  Peptide Sequence Number=SeqID_60160
atggccgccgtgagggaagaagctagaatgcgggccgccgcgagcttgctcgggtcgggtcaccagggtcctgcgctgtgtaggggaggtggtctgttgggcctcgccgcagcctcaggcgcaataggaagctccgcctcgcccgaccttgggccttggcctcagaaggaagtctccgcctcgcccgaccctagggctcggcctcaacctcgacctcggaaggtggtctccgcctcgcccgaccccagggcccagcctcgacctcgacctcgggaggaatcgcatcctcgcccaaccccggcctcggccttaggaggagtctccgcctcgcccgaccttgggctcggaccgaccacgccgcaggggggacccctcggggtcgaaacaccgacaaatttcgtcttgggttccctatctcttaagaatatcataaatgtagggttccaaggtgtgaaacccatcttgtcttag

SEQ ID NO: 18382 - DNA, 2286 bp, Zea mays
  Peptide Sequence Number=SeqID_60161
atggagtctgaatcactcgattttgaagacaatggagaccaccaaccttcatcagaagcttctcttgcttcagatgtggtatatgatgactcgcttgtatgtccatgcattggaagtgagcaccaggcagaaatccccaatcttgctacagaggatgagtgccgtaagctcatggccagttcacataatgattccatattccatggctatggttaccctgttgtggttgggttagctttaccaattacgtgggcatcaccaagcgaagttgataagacggaagaggtactacaaacgcaaaaatgttcagaatttggaacaaaaggcagcactggagatgtgcacagtcagcagagagaaaccaaacaattaagtcctctaccttattcacccgttgctctttggagtgatcttgaggcagaggtatttctccttgggctctacatttttggcaagaatctcaacctgctgagcaggtttctgggtacaaagactgttggtgatgtgcttgcatactactatgggaagttctacagaagagatacatacaaaagatggtcggactgtagaaaggcaaaaactaggaaatgcattcttggggaacgcatttttcaaggatggcgacagcaggagctaatttcacgtctgaaatctaaaatccctaaagaagctcatgattcgttaattgaggttttcaaatctttcagtgatagccaaacatctttgaatgaatttgtcttcagtctgaaatccactgtcggagcagaaacttttgtggaggtggttggggttgaagatataatcaagttcttaaatggcgatttcagaagaagtaagactagatcaaatgatattttctgggaagctgtatggccccgtttgcttgcaaaagggtggcactcagagcagcccaaggatgttagcacaactaagagttgccttgtatttcttgtgccgggtataaagaagttctcgagaagtaaactcaccaaaggtactcattattttgattctgtcagtgatgtccttaaaagagtggcagcagatcctgttcttcttgagttaaaggtagatgcgataaacaatggtttaactgctgaggaaaatggcagtatcacagatgtgaaactgaaccaggatagtccgttagatggatatcaggagcttcctaagttcacaataatcgatactagcttagtcgaaggggaagagccattcaatatacgggaactgagaaacttacctgcagatgcaaatattacttttctcctttcacaacattcatctaatatggtgagttacagctcctctgaagaggaagctgccaatgatagattatcagatgaccaggaagattgtggacgagttaaagctgaggccaaggaaattgaaatggtttcagctggttcattgcaaaacatggttactgctaatggccactcttctaatgtcaatgataaaattgatctgacaggcatctatggcatcaaaacaaaacctgaaaggcgcaagtatttgtccccagtgtcaaagcgcagaagattaaatagctgtagtaatgaacaggccagccggcgcagtttttctttctcaaaaggtggtggttttgagaaacagaaaagcaagccaccgttgatttcatccaaaccagctgctgttgaagttggcgacacttttcagagtaaaacaatttcaagctgttctacaaaggagaagccatctgagcacacagcagatgcattgaactcccttatcgatgatgagcaaaatgcgagaatggttatggaggttgaagcagtggctgaagttcactcaaaggtcattgccgttcagccaaaatttgtcaaagaaagagctgagtttattggtccagttgatttgaataagctggaaacgctacatgatgataaggcaagtcgaagcattgacaccacatcattgggaaatcttggtagcatgaaggttgatgaagctccctccagttcagacaagaacatggcctgtgatccttcaggggcagcaggaagacctgttagcgaggcacctgatcctgctttgcaggtgaatgctcggaggcacggaaccagaaacaggcctcccaccgcaaaagctttagaagctgtcgcttttggacttcttggaagcgggaagcggaagggtgacctgaaaaacagggcgacaagccggccttctcagcgagctcgcaaatctgccaaagacttggttcccgtggcttctagtggtgacgcaaaggcgtcctgcatagatgcagaagaacagcgatga

SEQ ID NO: 18383 - DNA, 450 bp, Zea mays
  Peptide Sequence Number=SeqID_60162
atggacaaatttaccaagtttggtacaccggaccttttacacaggaaaggttcaaaatttgttcacaggtggctcgctatccgaaccggtctggtgtgccaccaggccgtttatgcagagaggatgcaaaatggacaattgagtggcagtgacccagaccagtccggtggtgcatcggacctccaaagttcaacagctagttccagattcaactgtcatctgatgatgtggcgggtccgatgcaccaccgaaccatgcactattcacctgacatgtcagaacggctacctgctaaagttgattgtcaggggttcggtgctccaccagaccgatactattcatggtccgtccttctccacctacaatggtaaggaggaccccaaaactggctcaactattgcaagcagttcctccttgggtagcattcactcaccagagcacttgttctga

SEQ ID NO: 18384 - DNA, 330 bp, Zea mays
  Peptide Sequence Number=SeqID_60163
atgaccctgccaaggtggcccaccgtcagcggcatcacggctgagttcgcgtggacggaagccgagcatcccgacgaggttggcgcaattcctagtgcgcgcgcgattactacgcggattcccggcggcgcactcggcgttccagtgaaggggataaatccgaccagttggccccatgcgacagtcacacaggcgaacagaatgcgcgaccaggcgtctgccatcgtggtcccacgcgccagtgcagcaaacgcggagcgcgagatcttcctggccagtgggacgagggcgcggggatttggcccatgcaggtcttacatcgtagattga

SEQ ID NO: 18385 - DNA, 565 bp, Zea mays
  Peptide Sequence Number=SeqID_60164
ttacagctcgcctgaggccaaccccggtgggatacaaagttacaactcgcccgaggccaaggcaagacagaacaggcagtcacgactcgccagaagccaacccccgacgggagacacaatcacgactcacccgagaccaaaccctggctggacagttagccacgactcacctgaggccatcctcgggtgggataggcagtcacgacttgcccgaggacaacccggggtgggagaagtagccacgtctcgcccgtggccatcatcaggcgggacaggtagtcaccactcgcccgaggccaaccccggcgggatacgtagtcacgactcgctcgaggccattctcgagcgggagaggctgtcaagaatcgcccaaggccaagcccggatgggagatgcagtcacgacttgcccgaggccaacctcgggcgggagacacaatcatgactcgtccgaggccaagcccgggcaggagacgcagtcacgactcgcccgaggccacctttgggcacgcgtgagggctgccgcaactactgattgtgacaacgtgttctgtgtcgaatcctga

SEQ ID NO: 18386 - DNA, 558 bp, Zea mays
  Peptide Sequence Number=SeqID_60165
atggcggccgtgcacgaggaacggaagcccattcggacgccgaccgaccttgcggccgccatccacgcggcagcggatgccgacatcgacgcggtggccgccctggccctgtccgcggcctcggacgtgccgctaccgacgcactccctcgcgctcttgctccgccgcctgttcaccactcgctccatcgccgccacgcggggcctcctcgacaagctccacccctccggcgaggacggatgcccgcgccccaacccggccctgcgcggggcgctgctggcgctcgcggacgccgtgtgccgccgcggtcccccagcatcgcaactaccgtgtgatggccgcccatcccgccgagcccgccccctacacccaccaattgtcagggcctgcctctccgggcctctcaagcggggaatccatctgttgggcatcttcctcacctgcggcatacggtggcgtggcggcactgagagcgagaagcctggatccaggagtgggcaggagggggccgaggacctgcacctctgcatcgacagcagcctttctctcgtgctgtga

SEQ ID NO: 18387 - DNA, 486 bp, Zea mays
  Peptide Sequence Number=SeqID_60166
atggcccgatgctcgcccgcgaggaaccacgccttctggtgcacgacgacgtacgtgtacacctgggacagcgtgttcgcgacgcctcagaacaccagacaagtacatgggtgtcggcataaggatggcggcgccagtgaacgtgcagtcgcgcacttcgtcggcctccccagccaaagtcgtcagatcgagtgccacgcacgcgacgcggggtgggtgcgaggaggtgcgtggggagggggcatgggcgagcatcgcgacgatgatgctgctgcgtcacgggggcagaggcagggcaggcgaggctggttgtcgcggctgggagagagggtggggcatgtcgtggacgccgactatggaagtggggtgtcgaagatggaaactccacctatggatcgtcgacgatgtgcgaggatcgaaggaccttcggcgacgaagcatggtcccaacagtagccccttcgcggtgctagatcgtttttcgtaa

SEQ ID NO: 18388 - DNA, 168 bp, Zea mays
  Peptide Sequence Number=SeqID_60167
atggcggcgtccatggcgtcgtcgtgggggcgatcgatccgggagacggtgttggagaccgtggcgtcgtggtggtacaaactccccaatataatatttgtagacatcatgaacatggtatgtggttgcgtcgataaaacattctctgacaggttacaaattggttaa

SEQ ID NO: 18389 - DNA, 423 bp, Zea mays
  Peptide Sequence Number=SeqID_60168
atggcgcaacagacttgcgccgttcgctgtgcttatcctactcggcgggggtataaatccatgccagtcgtctgctctcaggcccgattgcccctcgccatagctataaatcccatcggcaacacacccctagagttccctgagccgtccattgccagctccaattccgccgccattggtgaattcacaccgagctccatcgaagagagagaaagaatcgagctcgccggtgaccttcgggttcgttgctggtgcgttcggtcggagtttggggaaaccgagggcgggagtccggcaagggcgctccacggcggccccatttcttcggtagtggtctgggcatcattgtgtcgggagctgacgcaccgcctgggcaatccatcgcgcagaccactccgtgggcggctcggcctacactactga

SEQ ID NO: 18390 - DNA, 375 bp, Zea mays
  Peptide Sequence Number=SeqID_60169
atggcgcctcctgttgacgtggccggtccgcgccctaggttgggcgatgtggaggtttctctgaggtcgtggtcgagtccgtgttccgtggccgaggccgagtccgagcctctgggtcgagcgaggcggaggccgttggctgaggccagggcggaatttgagtcccggggtcgggcgaagcggagttcgtcgtcttctggggctgagcccaagtccgagccctgggtcgggcggagcagagttcgccgtcttccggggctttgcccgagtccgagccctgggtcgggcggagcggagttcgccgtcttccggggcttagcccgagtccgagccctgggtcgggcagagcggagttcgctgtcttccggggcttag

SEQ ID NO: 18391 - DNA, 1524 bp, Zea mays
  Peptide Sequence Number=SeqID_60170
atgagcggccgtgtgttcgtcctggccgctgccttcggcgtgctgctcgccgcagccgccgtgtcctcgaggcccgtcctgactccgctgggtactagccgccctgctgccggcgacctgtccgtgtacttccacgcggactcgtgcccgcagctggagacgatcgtgcggtccagcgtggacgcggcgctccagcagaacgtccgtctgacggcgggtctcctccgcctcttgttccacgactgcttcccgcagggctgcgacgcgtccatcctcctggacaacggcgagcgcggcctcccgcccaacgtggggctgcagcaggaggccgtgcagctggtggaggacatccgcgggaaggtgcacgcggcgtgcgggcccaccgtgtcgtgcgccgacatcacggtgctggccacccgcgacgccgtgagcctgtccggcgggccttccttcacggtgccgctggggcggctggacagcgcggcgccggcgtccagcaacgacgtgttcacgctgccgccgccgacggcgacggtggacgagctgctgacggcgttcgggagcaagaacctgtcggacccggcggacctggtggcgctgtcgggcgcgcacacggtgggggaaggcgcggtgcagctcgtttggcgacgtggcgggcccggccaccgacgacgtgacgcggtgcgtgacggcgacgtgctcggcccccgggagcggcgacacgctgcgggacctggacttcctgacgcccgccgtgttcgacaacctctacttcgtggagctgacgctgaggaaaaaacaagggggacctccatgatcaagatgagccagctcaggggaccccagggggaacgtcggcgagatccgccggaatacaagctgatcaaaagagggaaggatcccaagtctctagggttgattgaggcaggtgtcaatatcgtgatggagccaataaaaagaccaagttttggattcaaccaaggagcaaagtggcaaccgaaggccctctggtctgggagcaccggactgtccggtgcaccagaggactccaactccaactcgccaccttcgggaatttccagaggcactcgcgctataattcaccggactgtccggtgtacaccggacagtgtccggtgcgccaagaaggagcggcctcaggaactcgccagctttgggaaactccaacggctagtccgctataattcaccggactgtccggtgtgcaccggactgtccggtgcaactccggagcaacggctagtcggcgccaacggctacctgcggcgcattaaatgcgcgcgcagcgcgcgcagaagtcaggcgcgcccatactggcacaccggacaaggaacagtacgtgtccgtgacgtcgggcgccctttcattgataatatcgaggccaaagccgagctcaggcgaggtagaagtctgcccgagaccaggaccgagcccgctccaggattcactgacgtgtgcgacacagttgaaggaatggcctctcgcgggattcgcggggagtag

SEQ ID NO: 18392 - DNA, 423 bp, Zea mays
  Peptide Sequence Number=SeqID_60171
atggcgcaacagacttgcgccgttcgctgtgcttatcctactcggcgggggtataaatccatgccagtcgtctgctctcaggcccgattgcccctcgccatagctataaatcccatcggcgacacacccctagagttccctgagccgtccattgccagctccaattccgccgccattggtgaattcacaccgagctccatcgaagagagagaaagaatcgagctcgccggtgaccttcgggttcgttgctggtgcgttcggtcggagttcggggaaaccgagggcgggagtccggcaagggcgctccacggcgaccccatttcttcggtagtggtctgggcatcattgtgtcgggagctgacgcaccgcctgggcaatccatcgcgcagaccactccgtgggcggctcggcctacactactga

SEQ ID NO: 18393 - DNA, 480 bp, Zea mays
  Peptide Sequence Number=SeqID_60172
atggtggcgaaaatccaggagaggacagtcaggggcctcggcgaccccgccgacctcgtcgcgctctccggcggccacaccgtggggaaggccagctgcggcttcatcaggagggggaacgacgacttcgcccggaggatcgccgccatctgctccgggaagcagagcctggacgtgatcacgcccgacgccttcgacaacaggtacttcgtggcgctgaggagcacccagggggtgctcctctccgaccagggcctcaacggagaccagcgcacgagccgcttcgtcgccgccttcgccagcaaccagggcgccttcttcgaccagttcgccaagtccatggtcaagctgggcagcatcagggcagccgcacccggcgagatacgccgcaactgcttcaggcccaacggcggccgcgccgccgccgacatcagcgctctcgtcggcggtgacgacgagggctatgcagcatccgcttga

SEQ ID NO: 18394 - DNA, 618 bp, Zea mays
  Peptide Sequence Number=SeqID_60173
atggcgagcaccctccggtggctgggctcctccgtcgggcccctgccactccactcctccctccgcttctccagttgtgcctctatgcccggacatggcgccatggtggtcgcggcatgcccttgttccccagccatgccggtgggccctggatcctccgtgtgccgcctctactctgcgccgactgcggtggtgcgctcgccatggcgcacccgcgcctccagtcgcctctgctcttacgcgtccctgccatgctcgcgatttccagtgattgaaaccgtgcgtggtaacgagttctgcagcatggacctcggaaatacctcatcgacggcgggcttcgccgtggatcaatctccaccgcggttagggcagaccatcgccaaactcacggtatggactatcccatatagattcgccatcgtctccttcgcatgtaacaccgatactctgagagtttacgagctagaatcgtgtcctgaccttcaccggcgatggcgccaccgcgctggtcgtcggcggcaccggactcagggcgatgggaggttggttcgacctcggccgttggatgctcaacgggcgcaccagatttggagtcgtgtatacctcctgctgcgttaa

SEQ ID NO: 18395 - DNA, 618 bp, Zea mays
  Peptide Sequence Number=SeqID_60174
atggcgagcaccctccggtggctgggctcctccgtcgggcccctgccactccactcctccctccgcttctccagttgtgcctctatgcccggacatggcgccatggtggtcgcggcgtgcccttgttccccagccatgccggtgggccctggatcctccgtgtgccgcctctgctctgcgccgactgcggtggtgcgctcgccatggcgcacccgcgcctccagtcgcctctgctcttacgcgtccctgccatgctcgcgatttccagtgattgaaaccgtgcgtggtaacgagttctgcagcatggacctcggaaatacctcatcgacggcgggcttcgccgtggatcaatctccaccgcggttagggcagaccatcgccaaactcacggtatggactatcccatatagattcgccatcgtctccttcgcatgtaacaccgatactctgagagtttacgagctagaatcgtgtcctgaccttcaccggcgatggcgccaccgcgctggtcgtcggcggcaccggactcagggcgatgggaggttggttcgacctcggccgttggatgctcaacgggcgcaccagatttggagtcgtgtatacctcctgctgcgttaa

SEQ ID NO: 18396 - DNA, 618 bp, Zea mays
  Peptide Sequence Number=SeqID_60175
atggcgagcaccctccggtggctgggctcctccgtcgggcccctgccactccactcctccctccgcttctccagttgtgcctctatgcccggacatggcgccatggtggtcgcggcgtgcccctgttccccagccatgccggtgggccctggatcctctgtgtgccgcctctgctctgcgccgactgaggtggtgcgctcgccatggcgcacccgcgcctccagccgcctctgctcttacgcgtccctgccatgctcgcgatttccagtgattgaaaccgtgcgtggtaacgagttctgcagcatggacctcggaaatacctcatcgacggcgggcttcgccgtggatcaatctccaccgcggttagggcagaccatcgccaaactcacggtatggactatcccatatagattcgccatcgtctccttcgcatgtaacaccgatactctgagagtttacgagctagaatcgtgtcctgaccttcaccggcgatggcgccaccgcgctggtcgtcggcggcaccggactcagggcgatgggaggttggttcgacctcggccgttggatgctcaacgggcgcaccagatttggagtcgtgtatacctcctgctgcgttaa

SEQ ID NO: 18397 - DNA, 564 bp, Zea mays
  Peptide Sequence Number=SeqID_60176
atgtgtgcaacccgtcaatctcgctggaactgtggctatgatcccatccggttgatttgttggctcgatgaggcgcatctctgcttggcccgcctcggggactgcttccacgccatctacggtgcccctccctatgtcaattcgtctccatccctggcctgcgcgtgtgcgtttgagctaagactgaggctgactgtagtgatgcgcaggctggttgttgctgcagggagggtgaatctgatcagggagcacatcgactatgagggctactcggtgctgcccatggccatcggccaagacatgatcatcgccatccggagggccaatgaccgctatgtgtgggccaccgacgtcgacgacaagtacctcctctgcatctaccccgctgactcgaacaaggtgctccatgctctacccctatccatatacatagattggtattacaacatggtctaccacgacacgctcttcaaatatggctgcaccgttgccatcaagtgcttcggtcgcttcgcctgtccaaactcacgccagttcctggtccgtttaccttgctccatgtga

SEQ ID NO: 18398 - DNA, 357 bp, Zea mays
  Peptide Sequence Number=SeqID_60177
atgatggtgccaaggctccgcgccgaccacatcgtccttcataacgagaacgagaagagacgaccaggtgaccatgacgcgcatacagacaacatgacttcaccacgcactacaagaaaactaggaaaaaacatcggggctgacgttcttaaacaggagaacaatggggttatgcttccgaaatcacgagcggaagctttgaaaatgggtgatgaccgaagaagggatatgtatgatggtttcaatagtgacaccttgggacactctgatgcattggttaaggttgttgacgaattcgtggcgcgcgcatttgctggtgagccacgtgtgacgaaatgcccgtgtactaggtgttga

SEQ ID NO: 18399 - DNA, 534 bp, Zea mays
  Peptide Sequence Number=SeqID_60178
atgtccggtgccgcaccggactgtccggagtctcgagagagctatgacatttctcatgtggcgcaagaggttgtcgaggctaaggccgagctgcttcggactcagctcaccgagtccaacgatcgcataatcgataagttcttggactacgtaggggctcgtggttcctctctggtggagcatttggacaatgtcttgtgtcatattcgggatattgttgacttcggcattcaccggggaaccgtagtggcattgctcgtcggggagctttggtccggttacggccttcgggacgtcgtcagccctcctttgtccctttcggatgaaggggtggacaacatgctagagggcttcgacgaggcgttggaactcgaagctttgagcctttacttgtgcccagataagaccacaaggttcgtttgcgctcatgggaggaattgtgatttgcgcctccttgacatctcagactgtgtttgtgaggtcgtggagttcgaggttcaccggggcgtggtagtggctcttaccattacgtag

SEQ ID NO: 18400 - DNA, 1245 bp, Zea mays
  Peptide Sequence Number=SeqID_60179
atggtgtcatcctcgagttcactgttaaatgcaagggatttaaatcgtcctagcaaggaatatggattgacctacaatattccattccaagcaaacatcttggagacagacaacaaagctaatggcgccattatctcgtcacacctcatcttgaaacatccatttgaagagcctcaggtttttttggcaactgatattgatgggatgccgataattagttttttactgcatgagcaaaaaatattgcttgctgtaaggattcaagttgatgatgctactgaagaagcttttggtgatattaagcctcacatgagctggaacattcctgcatttgctgctgcgccagttgttgtgactcgtccaagagtacgagttggagttcttccctttacagacatccttgttttgagttcagacaatgatctacttctctattctgggaagcagtgcctctgcagatatactctccctaatgaattgggaaaggggttcttttcaaatcatgagctaaattcagatatttcagatacttactctgatctgaagatcacaagcatagctgatgctgttgaagggcgtataaatgtgacatgcagtaatggcttgccttcggttgatcttattgcaattttgtccatttactcctttccagatgctcagatgttcgttgcgcaaaaatccttcctcttctttgttgccagtggttcagcgagaaacactgaagaacttactgttctggctatggttgctgaaaagtttggtcatcggcagttggatttgttaccagttggtgtatctcttgtgcttcgtcatgcactggacaaatgccgtgactccccacctgatgattggcctgcaactgcttatgttcttgttggcagggaagacctagctacggcaaagatggggacagttaggaaagaaaacctgttgtggaacaatgataatttgacatcaatgtcagtcccttatatgctacatctgcaacctgtaatcataccgacaactgcacctgacatccctgcatcagaagttttgaattctgatgattcagattctgtctataaatctgttgaggatggcatggaacatatctttacttcaacaacacaactccgatttggtcatgatttgcgcttgaatgaggttagacgcctcttatgctcagcaaggcctgtgcctatacaaacacctactaatcctagcgtgtcggatcaagacctacatcagatattaagctattag

SEQ ID NO: 18401 - DNA, 1296 bp, Zea mays
  Peptide Sequence Number=SeqID_60180
atgctggagcaggaaataatggactgccgcttcgaggaccaggagatgaggttggcacccaggaacacgtgtagccagaggtggaccggcgcgtgcggggcagccgacccaatcggtgtagacgaccggctcagaagtcagagaggactgaagaagaagatcgtaatcgaaggtcgtcacgttgttgaccggggcactatcgttgtcggagaccttcgcttgagtgtcaacaggcgtggagcatggtttgcagttagacatgctagcccgcttcacaatgtcgacgatgtactggcgctggtgaaggaagaggccctgtggcgacgctccacggtgacctcgaggaagtggtggagaaggtcgaggtccttcatcacgaattcgcgagcagggtggcgatcgtgcgctggaggagggcgtgagcacgatgtcgtcgacgtagagaaggaggcaggcagagtcgacctattgtcgacaatgatggaagaaggaaggtggggttgtggagacgtgattccacgcttatataatgtgtacaaggaaatgggtatcgttacatcattccaaaatcttcttgacaacattttcgttcctctttttgaggttactattgatccagcttcacacccacagctccatgtcttcctgaagcaggttgtagggttggacctggttgatgatgaaagtaaaccagaaaggcgtccaacaaagcacatgcccacacctgaacagtggaccaatgtgttcaaccctgcattttcatattatgcgtactactgctatgctaacttattcaccctaaacaagctgcgtgagtcaaagggaatgaccactatcaaattccgtccacatgctggagagattggtctggcgatgtccccattgagcaacaactccttatttcttgactatcatcgcaacccttttccaacgttcttccaacgaggtctgaatgtctcattatctacggatgaccctttgcaaattcacctgacaaaagaaccattggtggaagaatacagcattgctgcttcgctgtggaagctcagttcttgtgatttatgcgaaattgcgaggaactctgtttaccaatctgggttttcacatgctctcaagggcttgtttggggagaaaggccatctgagtggtcaaggcctgccccatagcaagttcctgctcccaagcgagggacgcagcacgttgacgctcgtgagatgcatccacagcggcctggatggtggcgatggcggcgaaccagcgcggggtccgcagcggacgccatgggagaccaagtga

SEQ ID NO: 18402 - DNA, 1110 bp, Zea mays
  Peptide Sequence Number=SeqID_60181
atgtcagcagagagctggtaccatcttattcagaagaaaggtaacacagggaactggggaagaaattcccaacaacactcacactcaaacacccacaacattctagatcccttctctccatttcaaattgaaggagaacacaaaggaaatgcaattgtggaaaatggggctgccaagccattagctgcagcaaacttgatacggtcacgcagtaaatccaataatcttcatgcagttcaacctgacccagttgctgcagatattctacgaaaagaacctcagcaagaatcatttgtcaagctgctaactactccaaaggagattccgactgctgatgaaattgaggtgttcaaaatccttcagaagtgcctcgagttaagagactcttatctctttagagaggaggttgctccatgggagaaggaggtcataaatgacccctgtactccaaaacctaaccccaacccgttcacttatgtgcctgaaccaaagtcagagcatgttttccaaactgttgatggcgttatccatgtttatgcggataaagattgtacggagagcatttatcctgtggctgatgctacaaccttcttcactgacttgcattatattctccgagtaacggctgcagggaacacaagaactgtctgccataatcggttaaatcttcttgagcataagtttaaattccatctgatgttaaatgcggatagggaatttcttgcccagaagactgccccacatcgtgatttttacaatgtcaggaaggttgacactcatgttcatcattcagcatgcatgaatcaaaaacatctgttgaggttcataaaatccaaactaagaaaagaacctgatgaggtggtcattttcagagatggtacttatatgactttaaaagaggtttttgagagcttggacttaactggggttctttatgtggctactcttgaggcatacgaggttgagatggacgtctacatgtttgatctttctgccctggttgtgaacaaggcttgtgctaaggctatcttgcttatgtgggctcaactttgcaacagttacaaaatccataacgaggcgatgtatcttgatgttgttgaggaggcttaa

SEQ ID NO: 18403 - DNA, 309 bp, Zea mays
  Peptide Sequence Number=SeqID_60182
atggtatcaagcctcctctcttctccctgtcctagctgccagccttctcccctcccgtcggccagcccctcctgccggtcatgggccgtcgcccccctgtcctggcactgggctgccgtcgctgccgcgggagccgacgtcgatactaggcccactcgcggcctccccgacggcgcacagatcggtgcagctgcctcccaggccggtgcagccacttccctcccctccaacgccggcaccctccacttcccctctgttgacggcgcgaccgcctacaagctcgcccgtggcctccccgacggcgcatag

SEQ ID NO: 18404 - DNA, 366 bp, Zea mays
  Peptide Sequence Number=SeqID_60183
atggcgtccaggctcgcaacgctgccgtgccgtgccgtgcgggcggtaccgatcgagctcgccgcgccggcgccggcaccggcaccgaccggggatgcggacaacggcgccactctttcgtcttcgaccagagaagcccagcagccgtgctgtatccgttccattccaattccatccggtggcagtggcatagcaagcaacgacgaacgagggaggaagaggagggccgacatgtccagctacgtgagcctgtcatacagggacagcccgccggaccgtcagattctcctcggcaaccaccgcaccatcgtctctcatctctctctctccagtctacaccctgtcttgacacggtttgcgttataa

SEQ ID NO: 18405 - DNA, 3411 bp, Zea mays
  Peptide Sequence Number=SeqID_60184
atgaagcagtccccggccagctctggtgtcacggccgcgcccgtcgtccctgcccccgcgcccgcggccgcctccaccggcgcggcgccgccatgcgaaggggagcggaaggcgccggcgatcaacgccgacctgtggtacgcctgcgcgggcccgctcgtgtctctgccgccggtgggcagcctcgtcgtctacttcccgcagggccacagcgagcaggttgcagcttctatgcaaaaggacatcgatgcacatgtgccaagctacccaaatcttccctcaaagctgatatgtcttcttcacagtgttactttgcacgctgacccggatactgacgaggtgtacgcgcagatgactcttcagccagtgaacacgtatgggaaagaggctttacagctatcggagcttgcactgaaacatgcaaggccacagatggagttcttctgcaagacgcttactgcaagtgatacgagtacacatggaggcttctctgtgcctcgtcgtgctgcggagaagatattacctccactggacttcggtatgcagcctccggctcaagaacttcaagccagggacatacatgacaatgtgtggacatttcgccatatatttcgaggtcagccgaaaagacacttactaaccactgggtggagtctttttgtgggcggcaagagactatttgctggtgattctgtcatttttgttagggctagccctactgagtttgttatcccatttgccaaattccagaaggcactgtatagtaaccaaatatctttaggaatgcgattccggatgatgtttgagaccgaggaattagggatgagaaggtacatgggtacaataactgggataactgatctagatcctgtaagatggaaaaactcccagtggcgcaacttacaggttggttgggatgaatctgccgcaggggaaaggagaaacagagtttcaatgtgggagattgaaccaattgctgctcctttcttcatatgcccccagcctttctttggcgtaaagcgccctaggcaaatagatgacgagtcatcagagatggaaaaccttttcaagagggcaatgccttggcttggtgaggagatatgcataaaggacgctcagacccataacaccacaatgcctggtttgagcttggttcaatggatgaacatgaacaggccgcagagctccacattaaatacaggcatacagtcagagtatctgcgatctctaagtaaccctgccatgcaaaaccttggtgcggctgagctcgcaaggcagctatatgtccagaaccatctcctgcaacaaaacagtgtacagcttaatgcttccaagctccctcagcaagtgcaacctataaatgagcttgctaagggatcattgtcttgtaatcaacttgacgtcatcatcaatcaacaagaactgaagcaagaagttggcaatcagcagaggcaacagcagcccgttaaccaagcaattcctttaagtcaggctcaaaccaatcttgtccaggcccaggtaattatccagaatcagatgcaacagcagcagcaacaacagcagcagtctccaactaggtgccagaagggaaccagtgtgcaacagctgcttctttcacagcaacagcaggaccagaattttcagctgcagcaacaacagcagcttttacttcagcaactgcagcagcagaatcagcagcagcagcaacaacagcagaatcagcagcagctaaacaagttgccagctcaacttgtgaatctggctggtcaacaggctcagttgtctgaccaggaacttcagctgcagctattacagaaactacagcagcagtcacttgtatcacagccaacagttacactctcgccgttacaggtaatacaggaacaacagaagttacttttggacatgcagcagctatcaagctctcattcacttgcccagcagcggatcctgcctcaacaagatagcgatgtttcgctgcaagcatcacaggcgccaccaccaatgaagcaagaacagcagaagccttcacagaaacaatttgtgcttgcagatgtgtcagatgttgtctatccacagatttcatcaaccaacgttttgtccaaagctggaacccaactgatgactccaggtgctacacaatctgtactaacggaggaaattccttcttgctcaacatcaccttctacagccaccggaaatcatttggcatacccaatcattggcaggaacgagcattgcaaggtcaccattgagaaagttcctcaatcgtcttctctgatgtcaattccaacagctggtgaagctgtaacaactccaataatggcgaaggaattgtcaaagttgaaccataatctgaaggagaatgtaaccacatcaaagtcacccattgttgggactggacatgagaatcttttgaacattgtaccgtcaacagacaacctggaaacagcttcatcagcaacttctttatggcctacccaaacagatggacttttgcatcaaggttttcctactaacttcaatcaacaacaaatgttcaaagatgcacttccagatgtggaaattcaagaagtggatccgactaacaatgccttctttgggatcaacagtgatggtccattgggctttcctatggaaaccgaaggcttgttggtaagtgcaattaatcctgtgaagtgtcagcctaatttgtcaactgacgttgagatcaattaccgaatacaaaaggatgcccaacaagagatctcaacctccatggtttcacagtcattcggtcagtctgatatagcttttaactcaattgattctgcaatcaacgatggtgtcatgttgaatagaaattcttgcccccctgcacctccgcagagaatgcggacattcacaaaggtctacaagcgtggagctgtaggccgatccattgacataggcaggttctccggatatgaagaattgaagcatgctgtggcccgcatgtttggtatagagggccaacttgaggaccgacagagaataggatggaagttagtctacacggatcatgaggatgacgtcctacttcttggtgacgacccatgggaggagtttgtgaattgtgtgaagtgcattaggatcctatccccccaagaagtgcagcagatgagcttagatggtgatttggggaacaatgtcctctccaaccaggcttgcagcagctcagatggtgggaatgcctggaagcctcgccgcgaccagaaccctgaaattcgagatgagaattatagctgcaaaaagcaaccagtgtccagccatctacagaattatcgccacggaaagggtaagcagatgcaggatgccgtagacgtcttggcttttatagttgggagaggaaatgctcctcagattagggcaagaagaatgaaacttacctag

SEQ ID NO: 18406 - DNA, 198 bp, Zea mays
  Peptide Sequence Number=SeqID_60185
atggcgacacaccctaacccactaacgacggtggcgccccccgacgtgcgagcagcgacagcgccgcacgaggcgcgaggatcaagcggcgtccatgacactcggcacagcgaagcactcggcaaagaacgctttgccgagcgtcaaacactgggcgaagacgactctcggcaaagggtcgttagcggccgactatag

SEQ ID NO: 18407 - DNA, 282 bp, Zea mays
  Peptide Sequence Number=SeqID_60186
atggccttggctgccctctccaccaacgagctcctccagcaggtgaaggggacggtgggggaggcaaactacaccaccgccgtccctatgcgccctgaccaaggctacgtgtccctggatgcggggttaccgaaccacccggccccggtcctagaggacgctactagccggacaatgtgtcggttggctactaagaagaagaagaagaaagatgcagacgagaagcgggcccatcaaaagagggtggcctgcgacacattggagaagcgccgtagggcgtag

SEQ ID NO: 18408 - DNA, 312 bp, Zea mays
  Peptide Sequence Number=SeqID_60187
atggataagaaaatgtcatggatatcgggcttgaccaaggggactaaccacgtcggtgcagcgctggtcgaccggcaagagcagagcgccggctgcctattcgcgctcgagcctgcagagggggggcaagcgtcgccggaactggagagggcaccagacgtccatgggaaaggctctgcgctggggatctcggtcgactggggtgaaggctaccggcagcgggctaggcgacggcggctcctgctcgccagaagagagcacgcggggctgctggccgtgaaggccaaacgctgcgcagaggctgaccggtga

SEQ ID NO: 18409 - DNA, 579 bp, Zea mays
  Peptide Sequence Number=SeqID_60188
atggcaagagatttggaagacttgggcgctccatgcaagttcttcatttggctggctgtcctgaatcactgctggacagcggacagattagctcgccgagattggttatacttaatgccatgtactggttacatggtttcttctgtcttgatccttgttattaaccagggaaagaagcacaagaaaaatttggagaaattacaagactcaatcacccgtaaaccaattataaagcccccaagcaatgtcatcggtccaagtatgccacctgttgctgtatccaactgtgtggtgccctctgtacagccgaagaagaagagcagctcagcagcaacccgggaagatctggaggtgaagaagaggcgagtccttgaggctggagcagcgcagggcgaagtaaaaatctgccaagtgtgcaatgttgtagtgaacagccaaaaagtgtacgagttccatattgcggggcagaagcaccaggccttgagccattttgctcgtcgtctttcgtctggcctcatgcttgtccggaagttcctctggaacgagaactcacaacattcgtatcttcaactttgttag

SEQ ID NO: 18410 - DNA, 315 bp, Zea mays
  Peptide Sequence Number=SeqID_60189
atgaccatcgacccatcatctcggtgcgcaaaagagagaggcccagaagcccatggcaggcatgtcagcgtgtccatggaaaagatagcggaggtgtcaatcatccaatcggtgcagaagccgacacataagcagcagccatcagtgttgcttccaggtcagttcaccgtcgacgggacaaaggagcgagaaagtttctcatttctatacccctcggcaaaggctgttgcagctcacatccttacagtggccttactaaacaggtccaaccaactgaagctaaaccagccatgggagttgaaccacccgaagtag

SEQ ID NO: 18411 - DNA, 1047 bp, Zea mays
  Peptide Sequence Number=SeqID_60190
atggcagagcatctcatctctacggctgaccacgacaggctgccggacagctacgtccggccggagacgcagcggccgcgcctgcgcgaggtcgtccccgacgcggagatccccgtggtggacctcgccgaccccgaccgcgaagccgtcgtcgccagggtcgccgaggcgtgccgcacccacggcttcttccagctgacggcggcgatgatgtcggtggcgtacgaattcttccggctccccgcggaggagaaggccaagctgtactccgacgacccggccaagaagatgcggctgtccaccagcttcaacgtgcgcaaaggagacggtgcacaactggcggggactacctcccgcctgcactgccacccgctggagcagaggaccgtgagcgcgtactgcagtgcggtccgggagctggggttcaggctgtacgtcgccatctccgagggcctgggcctggacggagcgtacatcaaggaggcgctgggcgagcaggagcagcacatggcggtgaacttctacccgaggtgcccggcgccggagctcacgtacgggctgcccgcgcacacggaccccaacgcgctcaccatcctgctcatggaccagcaggtggccggcctgcaggtgctcaaggacggccgctggatcgccgtgaacccgcggcccggcgcgctcgtcgtcaacatcggggaccagctgcaggtgacgtgctcttgtctcgctctcccattattcccaccctctcacctcctctctgcccctggcctccactactgcactgcacctgcacaggcgctgagcaacggcaggtacaggagcgtgtggcaccgcgccgtcgtcaacgccgacaggccgaggatgtcggtggcgtcgttcctctgcccctgcaacgacgcgcgcatcggccccgccgccaggctcctcaccgacggcacgcccgccgtctacagggactacacctacgccgagtactacgccaagttctggagcaggaacctggaccaggagcactgcctcgagctcttcaggaccccgacctcctag

SEQ ID NO: 18412 - DNA, 376 bp, Zea mays
  Peptide Sequence Number=SeqID_60191
atgggaaagggttttttaatgggcatagatatttttcacgggtacgagtttgggacgacaaaacccagcgggtttatacccattgccatctctactatgaaggttgagagtgagacggtaccatcgcagccactaccacaaccacaaccacaatcacagacagggctgccatggcatctgtacgaacaggccaccctcaaaaaattccgtacgaacagtccaaacgcgcagggacagggccagggcctcagtgtcagggagtcaggggccacagccgcagcgggcacggtcctcggcgaaactggtacggcttcgttgtctcgtgtcgtctccatcttgcagcagcgcctcgtcacggcctctctgggcggcgcgg

SEQ ID NO: 18413 - DNA, 2010 bp, Zea mays
  Peptide Sequence Number=SeqID_60192
atggtgtctctctgcgcatccaccaccaccatctatgccttcctagtcatactcttcatccactctggccactctccaaccgctgcattctacctcccgggcagttatcctcagcggtaccggcccggcgacacctttgccgcaaaggtgaactccctgacctcgccgtcctccaagctcccctacccctactactcccttcccttctgcgccccgcaacacggcgtccggcacgccgccgagagccttggcgagctcctcctcggcgaccgcatcgagacgtcgccataccgcttttccatgctcaacaacaccgcatcgcccttgttcctctgccgcaccgaccccctgtcccccggcaccgccgagctcatcaagtcccgcatcgatgacgcctatcaggttaacatcctcctcgacaccctccctgtgatgcgctacgtgaagaaccctgtcgcgcccgacgtgctcctccggtccaccggcttcccggtcggcgttcgcgccgacgacggcgagtactacgtgtacaaccacataaagctcaccgtgctggtgaacaagcagaacaccaccaccagggtggagaccttgatggcgaccgccgacggggccgatctgatcagcttcaccggcggcaaggagggctgcggctacacggtcgtcgggttcgaggtcgtcccgtgcagcgtggagtacgacgcggcggctgtcaagaacaagaccatgtacgacgagatcacgtcgaaggcggccaccggctgcgacccgtcggtggtgagcatgcgtgtgcaggacaacagtccgctggtctactcctacgaggtggccttcattgagagcagcgtcgagtggccgtcgcgctgggacgcgtacctcgagatgggcggtgccaaggtgcactggttctccatcctcaactccatggtggtggtctcgttcctggccgcgatcgtgctcgtcatcctgctgcgcaccgtgcggcgcgacctcgcgcagtacgaggagctcggcggcagcgagtcgggggcgcacgcggacgagctagccgggtggaagctcgtggccggcgacgtgttccgggagcccagccacccggtgctcctctgcgttctcgtcggcgatggcgtgcgcatcctgggtatgggcgtggtcaccatcgtcttcgccgcgctcgggttcatgtcgcccgcgtgccgcggcgcgctggtcaccggcatgctgtgcttgtacctcgtcctgggcgtggccgccgggtacacgtccgtgggcgtctggaagacggtccggcagggcgaagccgccgggtggaagtccgtggcgtggcgcgcgtcgttcgccttcccgggcgtcgggttcaccgtgttcaccgtgctaaactgcgtgctatggtacaacggaagcaccggagccgtgccgctcctcttgttcgtcgtcatcctcctcctgtggtttttcgtctccgtgcccctcacccttgccggcggcctcctcgcctcccgcggtcgccacatcgagtttcctgtcagggccaacaagatcgcccgccaggtgccggcggcacagtgctcgccgtgggtgttcgtggcggtggccgggaccctgccgttcgggacgctgttcatcgagctcttcttcatcatgtcgagcctgtggctgggccgcgtctactacgtgttcgggttcctgctggtggtgctggcgctgctggtgacggtttgcgccgaggtgtcggtggtgctcacgtacatgggcctgtgcgtggaggactggcggtggtggtggcgcgccttcttcgcatccggctccgtcgcgctctacaccctgggctacgccgtctactacctggtgttcgagctgcacagcctcgccggccccgtttctgccgcgctctacgtaggctactctttgctcatggctctcgccgtcatgctcgccaccggcgctgtgggactcggcgcgtccttctgcttcgtgcactacctcttctccaccgtcaagctggactga

SEQ ID NO: 18414 - DNA, 522 bp, Zea mays
  Peptide Sequence Number=SeqID_60193
atggacgacgcctccaggtcgggcgccctcctcgacgcggaccagaacgggacccgcgacgacaacgtccgggtgatgaacgacggccaccggtcccgacctcccgagctgcgtgctccgggcgccgtcgcgctcgcgcaggcccgtgcggcgcaggctctcctcgccggccgcggcgaccatctccctgcgcacgagttccggcagccggagcgtgaactctgctctagttctgcgtcgtcgctcagctcatccgctcggagctctgcgcgcccagccgagcggcttcttccacgcgagcttgcccctgctcgcagttctatcgtctccagccaggccacactcctctctccactcgcctctctctctctgctcggctccctggccggagctccagcgccgccccctccctgctctagcttctcccatggccgagcgcccctgcctgctctcagctgcctgctctgctcgccgcgcgcgctcctcgctgttgccgcatctctggcccagctcggactctag

SEQ ID NO: 18415 - DNA, 558 bp, Zea mays
  Peptide Sequence Number=SeqID_60194
atggaaaagaatcatcaagagtcgtggaaaaagtggaaggccccactacggctggtggatccccgaagcgacgcgaaggcgttgggctgggtctgggcaatcagtggtaatgtcgcaaagccggttgaagagagagcctcgacgaaggccacagcggcgacttcgctagacacgtgggcgctgagcgaagagaaggatgccgccgatcaggcgaagacaaaggcccaagctgcccaggcaaaggctaagccgcctagaagcgaactaccaaattggagctggaaacagccccctttcgacgagtcaggaggggaggtggggacccgcttcctcgggcacttcgaagcctttgaccagagcaacgatgaattcaaccaaggagtattccaggtcgaagacgatgtgctaaagtgctcagccgggacgctatatgatcggatgtggggtccccacggtcgcggagtcatccgggagagggccggtcgggcgctggcgcaggcaatgagggacgaagaggttgaggatctcgttgacatggagacctcgatggctacataa

SEQ ID NO: 18416 - DNA, 615 bp, Zea mays
  Peptide Sequence Number=SeqID_60195
atggcgttgatcttaatggaggatgaaacgtggggagggagtaacggtcgcagtgaaagctccattacacgcgacggaagaaacggctctgcgcgggtcggttcgattgctcggatcgcggcagacgggcgcgtgctgcgggtcggctctgtgtgcactgtcgcggcacgggggcagggcggcttggccgcttggcgtgcaggggcccgtcgcgcggtgcaggtggcgcgcacggcgcggcatcggggaagaaggggcggggcgcgcttggctgcttggcgcacggctctgctggcgtctaggcgggcgtcgaggcggggtcctgggcggtcggcctggagtcgtgtcctggcgctgcaggggagggagcagggcgtcggggcgctggcggctcggccgtctggaggctgcgtcgcgcaagagagagagaagcaaggggagagagaggaacggaagggagagaggaagcggcggtggtcagagagggagagatggaaaggtggggcccacgcgcagaaaggggagaagggggattttcccctggcggcggcggcggcggctagagactggggcgcgcgcggcttagagggcggccggctggcttcatgggcctaa

SEQ ID NO: 18417 - DNA, 258 bp, Zea mays
  Peptide Sequence Number=SeqID_60196
atggcggggcactacgcgtcgagccgagagcacggtgaactggcccaagacaccgggcgcaccacgcgagcacgcgcgcgcaaggtcgcgctgacgggtcgcaaacgaggcagcggggccgcgccgccgcggacgtgcgcgccgcgcgaggggaggggcgggccggccggggccgctgcgccgcgccgggcgagcaggccggggctgccgcgtctgtacggggcgggcgtgctgggtggggtgccggggtcggggcag

SEQ ID NO: 18418 - DNA, 201 bp, Zea mays
  Peptide Sequence Number=SeqID_60197
atggggattggttgtctacgagacggaaattggaataaggattacagtgtgataccgtgtgtcaagcgtttgaacgtactaagcacataccgagaaatatggttctttggaggacatggttgctggagtgacttggttgtccatcttgccaccgggttggacagtcgagtgggaccctacctcgggagaggaggagcatga

SEQ ID NO: 18419 - DNA, 642 bp, Zea mays
  Peptide Sequence Number=SeqID_60198
atgggcacgggcatggatataaatttctacccgcgggtacggtcgcgagcggatataggtagcaaccgcggatatggttgcggacggatatttgcaatatccgatccgaatccgatccgttgccatccctattctcgtgtcgacgcgtgcccactacgagccgtgaggattagtgtggatatcttcgtcccttgcatttcgctggctcctccatggattcttttggccgtggactccgaccccgacgcctacattggtgaatctgttggcatggaatctggtggcacgactgcagctttcatggattcttcttttggcaccgagactctcatgttgactgccatggactctcatgtggggcgaaatgatgcgagtaagatgtattctcaacttggacttgctgaagaggacaatgctgaggaaagtagaagagaggaagcctttagaggtgttacaagggattttgaacaatctgagcatgttatgtttttggaagagagccttatagaccaagcatgcgaagactacctaccagatgagaagagtgttatgtatgataaaacaaatccatcaatgcaacctggtattttgtttcctaacatgaaggaacttcgaattgctatgaaagaggtcctaacatga

SEQ ID NO: 18420 - DNA, 467 bp, Zea mays
  Peptide Sequence Number=SeqID_60199
atgtccaccgccgccgtgctcccgtcgccggcgtcgaccagacacccggccggcggtggcgccctgacggcggaccgcgcagcggcgctactggcgggctgcgcgtccgcaagccgcgccgccgagatccacgccgcggcggtgcgcgccagcgtggaccaggacaaagcagtggccttccggctccagcgcgcgtacgcggcgtccggccgcctggacctagccgtggcgctcctccggcgcacgcccgacccgaccgccgtcttctacacgtccgccatccacgcgcactcctcccggggcctccaccgcgcggcgctggcgctcctctccgagatgctgctgtcccaccacggcctcctccccaccgcgcacaccctctcggcctccctcccggcgtgcggcggcctcgcggtcgggcgcgcgctgcacgggtacgccgtgaagctggcgctctccggcgagcc

SEQ ID NO: 18421 - DNA, 585 bp, Zea mays
  Peptide Sequence Number=SeqID_60200
atgggcacaccaagcagcaggcagctgctgctcgtcgcagccgtgtgcctcgtcgtcgtcgccgtggacacggcggcggcggcagcggcagcggcagcggcagcagcgatgcgcggccggcgtcgcgtccacctgcgggtgtacatgcacgacgtgatccgggggccggggcagacggcgatccagctggtctggggcgtgggcccgccgcacgcgaccatgccggggcggtccttcggcgacacggcggccatcgacgacaggcacctacatgctcagctcgcagcgggaggggcggtgctcgtcgtggacgtcacgctcgcgctcaccgcggggccatacaacggcagcacgatcgtggtggccggccgcgaccgcgtacaggacgagacgagggagctcgcggtggtcggcggcaccggggacctccgcggcgcctccgggtacgtgctgtggaggacggccaaggtgtggtcggaggtgcacatggcgctggagatcgacgtgcacgcgtccgtgccactgccactgccggacgacgacgacgacgacaacgaccttgttcttggcagcagggatgagtag

SEQ ID NO: 18422 - DNA, 717 bp, Zea mays
  Peptide Sequence Number=SeqID_60201
atggtggctactcttggatctggagaatctcgtgcctctttatatattatggatctttctgaagctgttgacttggcaatcggaccatggactacctacagagttcattcacttgatcgaacaatgtggacagctgattgtagttctgatggcacacatgcagctttcgttttggttattgtgatggccgttttgcaatttaaaggttcggaccttggtgctggtctgatcgatttggaaacaaggggatcatcatggttatgtcgttctaaaagcgacattctttccctgaaatttgtgcactcgggaaaagttgtgctatgtggtctacggaatgggagtatagcccctgttgatgtacggcaaaaacagcataatcagcctactggagtagcttcatctagcaatgctaggaggacagttcccatgctgcccacaagacatggtgggaagcaaagaaaccaggctagcaaggataaattttcaagagttatttctatgtcgtcagcagtttgtagcttggtttcactctcatcagatgagaactacttcttaggaagctccatggatggatctatcaaactcttcgatcttcgcctcattcagaagggaggtatacagtcgtacgaggggcatgtgaactcacacacacttttaccacttgctgttgatccatctgagaccttacttatgtcagcgctaggggatgctctttga

SEQ ID NO: 18423 - DNA, 4092 bp, Zea mays
  Peptide Sequence Number=SeqID_60202
gctctccctcgccggcaaccgcttcaccggcagccttcacccctagcatcgccgggctcaaagacctcaccttactggatttgtccgggaactgcttctccggcgacctcccccgacgcgttcggtggcctcacgtcgctccagaatatggccgcgcactccaacgccttctcggggcagctgccgccgtcgctgtcgcggctctcgtctctccgtgctcttgatctccggaacaactccctctccggcccaatcgctctcttcaacttctccgggatgacgtcgcttgcttccgtcgaccttgccacgaaccagctgaacggcacgctccctgtcagcctcgctggctgcagggagctcaagtcgctcagcctcgccaggaacaggctgacaggccagctgccccaggattacagccgcctcgcctcgctgtcgatgctctcgctgtccaacaacagcctgcacaacatctcgggggcgctcggggtgctcggtgcctgcaagaacctcaccacgctgatcctcaccaagaattttgtcggcgaggagctgccggacgacggcattggtgggttcggtggattggaggtgctggcccttggtgattgtgctctcaggggaagggttcccaagtggctcgctcagtgcaagaagctggaggtgcttgatctgtcctggaaccaattggttggcgtcatcccctcgtggattggcaagtttgagtacctgagctacttggatctctccaacaatactttggtcggcgaggttccaaagagtttgacgcagctcaagagccttgtcgctgtcacgcggtcaccgggtatggcgttcactagcatgccattgtatgtgaagcataacagaagcactagcggccgccagtacaaccagctctcaaacttcccgccgtcgctgatcctgaacaacaacggcctgaatgggactatctggcctgagtttggaagcctgagggagctgcatgtcctggacttgagcaacaatttcatatctgggagcattcctgattcgctgtcgagaatggagaatctggaggttcttgacctttcatccaataacctcagcggtgtgattccgtcgtccctcacggagctcaccttcctgtccaagttcagcgtggctcacaatcacttggtggggcagatcccaagcggagggcagttcctgacgttctccaactcgagctttgagggtaatcctgctctatgcagatcaagttcctgcaaccacctgattttgtccagtggaactcctaatgacacggacataaagcccgcgccaagtatgaggaacaagaaaaacaaaatactcggggtggccatctgcatcggcctggcccttgcggtgtttttagctgttattctggtgaacatgtcaaagagggaggtctccgctattgagcatgaagaagataccgagggctcctgtcatgaattgtatggctcttactcaaagccagtgctgttctttcagaattctgcagtgaaggagctaactgtcagtgacttagtcagatcgacaaataactttgatcaagccaacataatagggtgcggtggattcggtctggtgtacaaggcctacctccccgatggaacgaaggcggcagtgaagagactctccggtgactgcgggcagatggagagggagttccgtgccgaggtggaagcactgtcacaggctcaacacaaaaaccttgtgaccctcaagggctattgccgctacggagacgacaggctgctgatctactcttacatggagaacggcagcctggactactggctgcacgagaggtcagatggtggctatgtgctgacatgggagtcgaggctcaggatcgcccagggctcagccagggggctagcttacttgcacaaggtctgcgagcccaacatcatccatcgggacgtgaagtccagcaacattcttctgaacgaaaacttcgaggcgtgtctggctgatttcgggcttgcaaggctaatacagccgtatgacactcatgtgaccacggatctagttggcaccttgggctacattccaccagagtacagccaagctgtgatcgccactcccaaaggggacgtcttcagctttggcgtagtcttgctcgaactgctcacgggtaggcgccccgtggatgtgtccaggtccaaagggtccagggacttgatctcctgggttcttcagatgaagtctgagaggaaggaagagcagattttcgacagcctgatatggagcaaggcgcatgagaagcagctgctgtctgtcctcgagacggcgtgcaagtgcatcagcgctgatcctcggcagcgcccgtcgattgagcaagttacaaatgctagcctaggaggtattgacatgagagaagaacagagtagagaaaaaggcaatctgagcaaattcagacaatgcaggctccaggtgccctaccgccggaccggcgcccgcctcatgaaggccaaggcatccgccgccgccgccgaggatgacgccgaacccaagaagatccggtcctcacgcagtaagcaccgccgacgccgtcacagccgctcctcctctaggtccgaatctccgccccgcaagcgctccaagaagaacagcaagaggattcctgacaagaagagcaagaggagcaagggcagccgcggcggcagccttagacgtcggcaccatagtcttagccatagccgtagccttagtagcagcccttcctcagtagcccgacgcagcagctcctcatgtagcagcagcagcgcctctgagaggtcggtgagcccgccacccaggagcaggtccagagatgtaaggaggaaaaagggcagagggaggggcagggagagggatcgtaaggggagaaagttgcggagatcggcaagttcatctagcatctcagcaagcagtggcagtagcaggagcaagagcaggaagcggatgactgttggtggcactaaggatcgcgctacaactacaagggataagatggaaaagggctacactgatcgccgttcttgtcggtctgtcatgaacgtggacgagcacgttgatggggatgaagacaggctcgccattgccaaggtggtggacaatgatattgacaggcacaagaagaatttggaatcggagagctcaccttccaagaatgccaatacaacagaagagaaagtacctgcaagtggtggaaattcagatgcccaggatctggagctgattcttaggcagaaagctcttgaaaacttcagaaagttcagggcagcagcgaccatgggaggcaaaacagacagtggagctgcagggaaggaagcatcaatagacgatagcgtacacaatgctggcatggaggttgctgatgccacacattctcagagtcaggaaaccagtcttggagcgaggtattctgctggatcacctagatcacagaattttgggaatggtgcgaatcgttcttggaagcaggacaacggtgctggcatgagttgtggtggatcacccggattacttgagcctgctgagactggtggcccgactcaactgaagggaagagcagaagaatcaactcgtttggcttctcagtttttgtcaccacgggatgccaggaatggccgcagtgtaatgcaaaggctggcgccccctccaggtagttctgctagtgtaaaccaaatgttaggaagcagtgcagggctgaatcatgtcgatggagctccaagggttagatcagttgtgagcatacccgctagggaaaggcttgatggtagcacacatactacaccccttagccccagtgaggattcttcccctgttgaaagcggcggcaaagttggactccctctgaatgacactaacaaggctgaaggaaccaatggagagaacagaaaaacaagtgaagcttcggcctctgacggttccgtattgtcacctaccgaagacaagagccaggctagtattgagggtaaagatagttttcagaagaagactttctctagaatgcatgatggagagacggtggaggtgagctacaaagtctacatacccaagaggaccccagcccttgcaaggaggaaactgcagcgctga

SEQ ID NO: 18424 - DNA, 1023 bp, Zea mays
  Peptide Sequence Number=SeqID_60203
atgacaagtccacctagggtgagcatggagatcactgatgaggtggtcaagagcatgaagatagggttggtctttcaaggctataatggcagaatttgttctatggactttcacagcaaggctaccaactatctcgtgacagctagcgatgatgaatcaatccgtttatacgatacccaagatgcagtgtgtttgaatactattaatagcaaaaaatatggggttggacttgtgtgcttcactgataacccatctattgtcttatattcatcgaacaatggctgggatgggttgtctgcatcgcactttgctctggaaaagaaaactttctctcatgttcgcttgatcgtaccattctcttatgggaccatcgggctgaaaaaccgcagattgagcacacaaggcagatgttactggatttgtaatggaaatttgttgaccagttttcacagtattttcaagtcaaaaggcttactgcgcgcgcaaaggaggcctacagtttcgtacgacgcccagggcatggtatttgctgtcgcctatggtggccgcataaagatgtttgatattcggaaattcggaatggggccttttgcgaccttctctgtcggcactgatgattcggaagcccatgtcgtacagttcagcggtgatggcaggcggattctgttaaccactaaagctgggcgtgttcatgtgctagattcttttgaaggcaacagcattgcatcgtttcgcgcgaagccaatattaaccaattcgacactggaggcatcgttctgtcccgagggaaaccatatcgtatctggctccggtgatggtagtgtctatgcttggaacgttgagagcggaaaggttgcatgctgggaaagcacagatgtgaaaccgccgcgggtaaggtggtctccaggatccttgatgttcgtgacaggaacgtcggagctgtcctgctgggtgccggatttgtccaagctggagtccttcaccatcagccacaccaacaccaggtccagctcgtccctgtag

SEQ ID NO: 18425 - DNA, 1367 bp, Zea mays
  Peptide Sequence Number=SeqID_60204
gtggagcactaccttttgcatggtggaccttctgggacaaaaaaaacatcaaggatgtgttcgacaaggtgcggagcatgaaggcgaagcccgacgcggcgatgtgggcgtcgctcctcggctcctgccggctgcacaagaacctggcgctggggcagcgcgtcgtcgactacctcgtggccaacgggctggccaactccggcacgtacgtgctgctgtcgaacatgtacgcggcggcggggaagtggcgggaggtggggcgggtgcggtcgatgaagagggcgagcggcgtgcagaaggagcccgggtgcagcgccgtggaggtcgggcggcgggtggtggagttcgttgccggggaccggagccacccgcggtcggcggagatctacgccaagctagaggaggtgaacagcatcgcgagggcgcgcgggcacgtgccgcacaccgagctggtgctgcacgacctcgacgacgcggccaaggagagggcgctggcggtgcacagcgagaagctcgcgctggcgttcgggctcattagcacgcctccccggacgggcatcaagatcgtgaagaacctccgcgcgtgcgccgactgccacgccgtgctgaagctggtgtcggaggcgacggggaggaagatcgtgttcagggacaggaacaggttccaccatttcgtcgacgggtcgtgcagctgtggggattactgggatccctatttattaggccgatggaagcagaagctccagtcagtgagggacgaaagaagtcgcctaattctttcgatcgaattaggcgcctttttcgtcccacgctccgtctttatttgtaatctgaagcttacaggaacatttgagtggatcatggacggattggtaggcctcttgaaagtccgggtggtgaggggcatcaaccttgcctaccgcgacgcaagaggcagcgatccgtatgtcgtcctacgacttggcaagaaggttaaacttaagacgagcgtgaagaagagatctgtgaaccccatctggcacgaggagctaactctgaccgtcacagatcccagcctagctctgaagctggaggtgttcgacaaggacacgttcagcagggacgacccgatgggggacgcggagatcgacgtggcgccgctggtggaggcggcgaacgcgagcccggaggcgagcctgaggaacggcgccatcatcctgtcggtgcggccgagcgccacgaactgcctcgccgacgagagccacgtgtgctggaggaacggcaagttcgcgcaggacatgatcctccgcctcaggaacgtggagagcggggagattcagctgcagctgcagtgggtcagcatccctcctgctgcagccagcaggtga

SEQ ID NO: 18426 - DNA, 669 bp, Zea mays
  Peptide Sequence Number=SeqID_60205
atggcgaggaaacctctcgactacgaggagctgaacgagaacgtcaagagggtgcagtacgcggtgcgcggggagctgtacctccgcgcctccgagctgcagaaggagggcaagaagatcatcttcaccaacgtcggcaacccgcacgccctcggccagaaaccgctcaccttcccgcgccaggtggtggcgctgtgccaggctccgttcctcctcgacgatccccacgtcggcctcatgttcccggcggacgccatcgctagggccaagcactatctcgccatggcgcccggcggtctaggtgcgtacagtgactcccgcggcatcccgggaatcaggaaggaagttgccgacttcatccacaagcgtgatggatatcccagtgatccggaactcatctacctcacagacggtgccagcaaaggtgtgatgcagatcctgaacaccatcattagaaacgagatggacgggatcttggtccctgttcctcagtacccactttattccgccaccatttccctctatggtggttctctggtcccgtactacttggaagaagaggctaactggagcctcgactttgtgaatatccggcaaacagtggcggaggcacggtccaagggaatctctaaagtgataccgattaaaatggcggccgtgtatcattga

SEQ ID NO: 18427 - DNA, 141 bp, Zea mays
  Peptide Sequence Number=SeqID_60206
atggaggcaccattagagcagttgttcctctatagtacactgaatatgggtgggggaggaagcttcagctttgagataaaggcgtgtgatatgaggatacaacccgaaggcaacatggatggacgccgaagctacggctaa

SEQ ID NO: 18428 - DNA, 1332 bp, Zea mays
  Peptide Sequence Number=SeqID_60207
atgaacgaaggccagcgcaatctatctggcgggcggccggtgaaaactgcatcagcatgcaatgtccaaacgctcccctcttcgtctggtacctcctacgctcaggtgttcctcatcttcattggccgacgggtttatgaatcaaaggttggtgatgtacgcttacggtacatcaaccattatccacaacggaagccagatagagcaacgaaagcaaactcagcagtgaacacaaaggaagctgaccatgccggggctcatgacgatgatggcgttggtgccatcgccgcccatgtcggtgaagcaatgcttctggagcagcagcaagaagacgagcggttgtacggtgttgctggtcaagaagagctgatgatgatgcaccgcctggcggacgacgggtgggtggacgagcatatgctgccgttgctcacccccgtggaggaggcctggcagccagccgacctgctgccctccttctccgtctctgccgacgagcagcggagccaggtggcagacctccaggcccgcgcggccgccgtacccgacgacctcctcgtctgcctcgtgggcaacatggtcacggaggagggcctgcccacctacatgaccatgggcaaccgcgtgaccggcgccagcgacgccaccggctgcgacgaccatggctgggcgcgctggctgcgcggctggaccgctgaggagaaccgccacggcgacctgctcaaccgctacctctacctgtgcggccgcgtggacatgcggcgggtggagacgacggtgcaccacctcctccgccgcggcatgcgcaccatgctgcggccctccagcgcgtaccacagcctcatctacggctccttccaggagcgcgccaccttcgtctcccacgcccgcaccgccaggctggccggcctccacggcgacgcctgcctcgccaagctctgcggcgtcatcgcggccgacgagaggcgccacgaggccgcctacacgagggcgtccgacagggccttcgaggaagacccggacggcatggtgcgggcgctcgccgccgtcatgcgcgccaaggtcaccatgcccggcgagctcatggccgacggccgcgacgatcgcctcttcgatcacttctccgcggttgcgcagcgctcaggggtgtacacggcggcagactacgccgacatggtggagcatttcgtgcgcaggtggaaggtggcggagctcgacgctggcctgtccggcgaggggcggcgcgcgcaggactacgtgtgtggcctgccgcgcaagatacgcaggatggaggagctggctcaagaccgtgcggctcaaatggaggcccagtcg

SEQ ID NO: 18429 - DNA, 1509 bp, Zea mays
  Peptide Sequence Number=SeqID_60208
atggccttgccggcgtcgaggagagagagccctagcggctgggccagctatgtcctttgtggcggctgggaccgctctcgtggtgagacgagagctgatggcagagacggatgcagtacacaggcaccacaggccacggcctgggctgcctcgcgcgtctgtatggagcatgatcctgtcattaaacctctacgagatttagattctgaaaccctgcaggcaacaataccacatattccattatgggtgaagagcccagactacgagcggattgactggatgaacaagtttatttttgacatgtggccttttctggataaggcaatatgcaagcatataaatcgtgctacaaggccaatatttgatcaatatgttggacaatatggtatagaatcaattgaatttggagagttgacacttgggactcttccacctacatttcaaggcattaaagtttacgaaatgttagaaaaagagttggtaattgagcctgtgattcggtgggctagtacatcaaatgtaacagtgaacgtaaaggtgcaatctttcgaagtgacggttcagcttgaagatttgcatataatgctgacaccacgtgtgattttgaagtcacttgtgccaagctttccctgttttgctaacttgtgtgtttcactaatggaaaaggatcaattatcaaagcaaatctcaaatttgtatcactggcctaaggttatacagattcctatcttagatggagcaagtggcgctacaaagaagccagttggaatcttgcatgtaaaggtaattagagccctgaatcttctcaagatggactttctcggcaaatctgatccctatgtgaagatgcgcctgagtggtgagagactgccctcgaagaaaacatctgtcaagatgagcaacctgaatcctgagtggaatgaacacttcaggttcatagtcaaggatcctgatacccaagtccttgagcttcacatgtttgattgggaaaaggttaagatgcatgataaattgggcatgcaagtaattcccctccgcttgcttacaccttacgagagcaaattattcacgctcgaccttgttcgaagcatgaacccaaacgatccgcagaacaagaagaacagagggaagctcatcgttgagttgacatttgatcccttaagagaagacaatatgtcttcagatgctgaaggtaatgctagcgtgagaagggatgcggacggtggtggtgggggggtgctgttggtttcggtagaaaatgcggaagacgtcgaagggaagcggcatactaatccatacgctgaggtccttttcaggggagagcggaagaaaacaaaggtgataaggaaaacaagagagccaagatggagcgaggagttccagttcatggtagacgagcctccggtggaagataagatccacatccaagtcaaaagcaaacgccgcgggcttcccttccgcaacaaggcaagtcacgcagctctaatctttgctgtctgccataactaa

SEQ ID NO: 18430 - DNA, 849 bp, Zea mays
  Peptide Sequence Number=SeqID_60209
atggcaagccgttgtctgcagccgctggcgcaatttgctgcactggacgccgcgccaggaagccacgtgcagctgctgctaatcagcggtagaagaatcactcaggagcataggcggaggctgtctattgcaaaacagaatgcagagtcgatagccatgattactaaagaccttgaaaaagagttttgtgcgatgcccactaccttagaagagctcgaaactgcaatacaagatactgaatcagaggcaaattctatgctatttcttaaccaaaatgttttgcaggagtatcaaaaccggcaacatgagatagaatcaatctcaaataaacttaaggatgataagggtgaacatgagatctgctgttctgaaatcgaaacagtaaagggtaaatggcttccgactctgcggattcttgtttcaaaaataaacgacacattcagtcgtaactttcaagaaatggcagtcgctggagaagtttcactggatgagcacggtattgattttgatcactatggtattcttataaaggagcgatctgtatcgaccatcttgtatcttgtgtcacttcaagatcttaccaactgcccttttcgggttgttgatgagataaatcaaggaatggaccccataaacgagaggaaaatgtttcagcagcttgtcagagctgccagccaaattaacacgccgcagtgcttccttctgacgcccaagctcctacctgatctggagtacagcgatgcctgcagcattctcaacattatgaacggcccatggattgaggagccagcaaaagcttggagctccggtgattgttggaggacagtggtcagcgcagctggacactga

SEQ ID NO: 18431 - DNA, 174 bp, Zea mays
  Peptide Sequence Number=SeqID_60210
atggacaaggttctagcactgccagaaatctataagaaggattacatacttcagatgctcagtggtaggccatgtgatcctctgaccctttatacaatgcatctcacttcgtttaaggctgtaaaggtggacaatgtatccaatattcagccggttagtttgtattcagcatga

SEQ ID NO: 18432 - DNA, 396 bp, Zea mays
  Peptide Sequence Number=SeqID_60211
atggttgatgagcacccacgccgacacgaactaggagatgacggtcacccagggatcgaccacatagcaggcaacggtcatcacggtgaagccgccaaggaggccactgcagacgtcaatcatgttccagtgccctgtctggagcctcttcttgaagagcgtcttttagcgccattgtgctgccagcgagggatgacagaagcaccatttctgccgcgtgagaggctcttcaagcagcaacattacttccagaacttgaccaagcacacctacctgaaagggcgctacgacgtgatcacatctgtcgccatcccccttgcactcgctgcctccagcatgttcatgattgggcgtggagtttataacatgtctcatggggttgggaagaaagagtga

SEQ ID NO: 18433 - DNA, 492 bp, Zea mays
  Peptide Sequence Number=SeqID_60212
atgagcgtggaggacgcctacgagagggcgctgaacacgctgcagaaatgggtccaaaaggaagtgaacacaacaaaaacgctggtcgtcctacgaacatactcgccggcacatgtaagggcgtcaaacggtggtggaggtgggtgtgtcagggagacggcgccggagctgaacacgtcgaggatcgcgctgcaccggtggccgggcctgctcaacccgagcccggctttaattgaagcggcgaagaagcggcagctggcgacgatgcacgtcctgaacgtgaccctgatgacggcgcagcggcgggacggccacccgtcggtgtacaacgtccgcctcccgtcgccggcggcggcgcaggagcaggtgacgacgagggcggccgactgcagccactggtgcctgccaggcgtgccggacgcgtggaacgagctcctctacgctttgattctacataggactaggactacgtcattaggaggttcagactga

SEQ ID NO: 18434 - DNA, 942 bp, Zea mays
  Peptide Sequence Number=SeqID_60213
atggagatggcgagcgcgcggaggagggcgaagccgccgcaggcggtcggcggaggcggagaccagctcgcgctgtgggccgcctgcgtgctgctctcctcgctctcgctgctcgtcgccgccgccttctccacgggcttcggcggggccgcgaggctcacgctcgaggccggcccggaccgggaccgggaggccgcgggtgcgctcgtgacgagggcaactggcgccggcagcgggaggtactgcgacgaggacgacgacctgatcgacagcatgtccgtggacggggagtgggtgctgctgcgcggcgccgccgagcggctctacgggcccgggcagtgcccgttcgtcgacgaggggttccggtgcagggagaacggcaggccggacggcgactacgccgagtgggcatggcggccgaggcgctgcgcgctgccgaggttcctaactgccaagtggtcgtggtcaagtcccaagcatatgcatgcatcatatatatttgatgtgtgtatgcgtatcagattcgacgcgaggaggctgctggagatgctccggaaccggcggctggtgttcgtgggcgactccatcgggcggaaccagtgggagtccatgctgtgcatgctggcctcggccgtcgccgacgacagggacaagcaggcgagcccgggcggcgccagcatatacgaggagaacgggagccccatcaccaagcgcaagggcttcctctccttccggttccgcgactacaactgcaccgtggagcactaccggtcgccgtacctggtccgccgcggccgcccgccgcgccactcgccgaagcgcgtcgccacggcgctccggctgggctccatggacgccatggcgccccggtggaaggacgcggacgtcctggtgttcaacacgggacactggtggaaccacgagaggctgcagcagttgtaa

SEQ ID NO: 18435 - DNA, 975 bp, Zea mays
  Peptide Sequence Number=SeqID_60214
atgctgggcgccaacgccgagatgcacgcggctcccgaggtcgacgactccatgagcgggaccaccgccgtggccgccctcgtctccggcggcgctctccacgtcgccaacgtcggcgactcgcgcgccgtcgccggggtctggcgcgccggccgcgtcgtcgccgaggacctctcctgggaccagactccgttccgcgccgacgagcgcgagcgcgtcagggcctgcggtgcccgggtcatgtccgtcgaacaggtggagggcatgcgcgatccggaggccgagcgctgggcgcccgacgagggggacccgccccgcgtctgggcgcgcgacggcctctaccccggcacagccttcacgcgcagcctcggtgacctcgccgccgaggccatcggggtcatcgccgagccggaggtcaagagcgtcgagatcactccatcgcacctcttcttcgttgtcgccagcgatggcgtgttcgagttcctctccagccaggaagttgttgacagggttgccacgtatcaagatcctcgagatgcctgctcagcaatcgctgcagagtcatacaaactatggctggagcacgaaaataggacagatgatataacgataatcattgtgcatatccgagacatggaaagtgtaggccctgcagggagtgacaaagcggactacggtagcgtgggagcgtcaatagctgtgcacgcaatacagtcagagaatatcagatgcttccaagcccgtgcaaagcgagcagcgagctgcatcacaaccggtgcaaacttggcatcaaatggacgggggtactggattggtctatgcagcaaagcatcccacctccaacctcctgatgaaagtggagaatggaagttgaatgacaaaaggaggcctcgcaataacccaccgccatcctccatttttggaggaaccattattgttattgagaggccgttgtcttttgcagagagctactaa

SEQ ID NO: 18436 - DNA, 1056 bp, Zea mays
  Peptide Sequence Number=SeqID_60215
atgacgacggcgtggtgttggccgtggccgtggcaagcgaccttgctcgcggccgcggcgtggctgtgcctgcacgcggccgtggcgcggctcatggaggcgctgtggtggcggccgcgccggctggagcgccacttcgcgcgccacggcgtgcgtgggccgggctaccgcttgtacctgggcagctccatcgagctcagccgcctcatggaggacgcctcctcccgccccgcgccgcgcgatgagccgcaccgagttctgccccgggtgctcgccttccaccaccattgggacaaactctacggtccaatgcatctgatctggttcgggacgacgccgcggctggtcgtgagctcgccggagctgatccgggaggtgctgctgtcgcggtcgcagcattttgaccggtacgaggcacacccgctgatccgccagttcgagggcctcggcctcagcaacatccacggcgacgagtgggcgcgccgccgcaagatcctggcgcccgccttccacgccgagaacctcaagctgctcgcgcccttcgtcgccggcaccgtgcagcggatgctggaggagcgcgtgctgctgccgggcgggcccggcgaggtggagctggacgtcgcggactggtaccggcggctgccgcaggaggtcatcaccgtcgccacgttcggccgcaacaacagcgacgagggcagcgccgtgttccggctgcaggccgagcacgccagctacgccaccgaggcgcacagcaaggtcttcttcccgggctacaggttcctgcccaccaggaggaacaggcgcgtgtggcagctggacagggagatcaggagactgctggccaagctcgtcgccggactgcagagcggcggcagcggtgatcaccgacaccagggccgggaccacgggcgcgccggcggcggcatgagggacttcatgagcttcatgggccccggccatggcggcggacgagatcatcgaggaatccaagaacttcttcttcgccggggcaggagacgctcaccagtttgctcacctgggccaccgtcgcgctag

SEQ ID NO: 18437 - DNA, 936 bp, Zea mays
  Peptide Sequence Number=SeqID_60216
atggcgagggcctgctgcaggatggctgcagcaccagcagccgccctcctgctcctgctcgtggccgccgcgtcgggcatccgggtggacgtggtccggatatcatcatcgtcgtccgcgccgccgcagccgccgtcgcccccggcgttccgcgaggcgcccgcgttccgcaacggggacgagtgcccgccccgtggctcccccgacggccacgtcgacgtcgccatgacgctggacgccaactacctgcgcggcaccatggcggccgtcttctccatcctgcagcacacggcgtgcccggagaacgtggcgttccacttcctagccgccgcagcggacccggactcggactcggacccggacccgctggcggcgatccgcgccacgttcccgtaccttgacccgagcgtgcaccggttcgacccctcccgggtgcgcggccgcatctcccgctccgtgcgccacgcgctggaccagccactcaactacgcgcgcatctacctggccgacacgctcccggccgtcgtgcgccgggtcatctacctggactccgacgtggtggtggtggacgacgtgcgcaagctctggtccgtggacctgggcgagcgccacgtggtggcggcgcccgagtactgccacgccaacttcaccaaaagcggaagcggatctacccacctggggtcgctgcctccgttcctgctggtgctcgccggcgacatcaggcccgtggaccaccgctggaaccagcacggcctgggcggcgacaacgtcgagggcaggtgccggagcctgcacccgggccccatcagcctgctgcactggagcggcaagggcaagccctggctgcggctcgactcccggaagccctgcaccgtcgactacctctgggcgccctacgacctctacaaggccgcggccaccgcgctggaggagtag

SEQ ID NO: 18438 - DNA, 240 bp, Zea mays
  Peptide Sequence Number=SeqID_60217
atggccgagcgccctcattgtgtccttgcgctaccgtggaaactacctcagcgcccacagagccataattgtcggccgactgacacacgctcgacacaaatgccaatcgaggtcatcgttaggccaaaaaatggcccaaccatggatgtggaacaagtcctcatgcttcgccaaaccattggtgttcgtgtaggcatgaagcacccagtgttggagaagcaaaggccttgtcagtattaa

SEQ ID NO: 18439 - DNA, 123 bp, Zea mays
  Peptide Sequence Number=SeqID_60218
atggcgttatatatttgtgaacggaggttgccacgtatcaagatcctcgagatgcctgctcagcaatcgctgcagagtcatacaaactatggctggagcacgaaaataggacagatgatataa

SEQ ID NO: 18440 - DNA, 270 bp, Zea mays
  Peptide Sequence Number=SeqID_60219
atggggctgtccgttgtgatacagacatactggcgatctattgagcgcgccgggcttgatttgtcagacgactcggaggaggcctcctcggaggaggtggaagactcccctgactccgaggagtggagcggcggcgtggacgacggcagcagtggtgacgacgacggcaagggcagtagcgacggtgacgacgaaggtggcgagggctacggcgacggcaaggacgacaacaacgacgacaaggatggtagcataatgctgatggcgtaa

SEQ ID NO: 18441 - DNA, 318 bp, Zea mays
  Peptide Sequence Number=SeqID_60220
atgcaaggcaatacttggtactcgagcatcagagatcataaagcttgctcctttttgtctccatttatcagtcgagggggagtcaccgatgaacgacccacaattggcattgatggttgtcttgaagaagatggtgatgggctcttcccaccaccagcagctacagaggaggggaagtctgtggctgacaagggcccgctgccgcaactgtggtggcagagaaggtggtggtcgcggttagggcagccacaagacgcccatcatctaggtgttgagtgcaagaaatcacatgcaagctggattgtgttagacaagtaa

SEQ ID NO: 18442 - DNA, 261 bp, Zea mays
  Peptide Sequence Number=SeqID_60221
atggcgagactgttgcgccggggttgtgcaggtgagctagccgggacgccgcaccggctgcgccaggcgagccatgctggccatgggctgaccgcgggcataggcgaggcgagcatgaggcgagggcacgcggcgcagcagcgctccggggagcgatttatacacaagaaagaggtacaaattaaatggatacatataagacaatacatcaagctgaaaatacatgcattcaacatgatgcaacaaccattattcccttag

SEQ ID NO: 18443 - DNA, 507 bp, Zea mays
  Peptide Sequence Number=SeqID_60222
atggccgatggctgcgagcagcaaccgagagcgtcacgagaaggcgtcacggcaacgacacaacaacaacacaggatgcggataatggcggtcagcagaacggcaggcgcgagtagcaataagcaggcagttagtctcggcactggcgaagcagcgaggaaggactgcgacgaagggagcaccatatctgatgacgagcagatatggcgagtagcgaccaaggtgattagcaaggtgacgacgcgaacaggggctcagcgcggaggtttcaagcgagcgaggtggtggcgtgacacgctgctcgctgcaagcgcagcagcaggcgagcatgtgctaaagaagagcggaggagatcgacaacgcttggcgctgcgtgcaggggtgagggaagctgggcgtcggcatgaaggcatgactgtgtggacagggaggcacgatggagaagaggggaggctggaaatcaaacacgatggctgcgacggtggctttttatggatcaaggaataa

SEQ ID NO: 18444 - DNA, 339 bp, Zea mays
  Peptide Sequence Number=SeqID_60223
atggaggcaagaagagcttcgaggtaccgagtgcacgggagaaggtcaaggagaccgaggaacccaaagccaggggtgaagaagaagacttgcaaaatcaaggttgatcaagttaagaagagttatggtgacctttgcaagggatcatcccaaaagaagacaaattggagtaaagaagttgcaccagtatgggagcaccggactgtccgtgtgcaccggactgtgtctgctgcccagctggcccttggtgaacagaccgttctcgggaagcagttggggggcgctgcgactataaatcaccggaatgtccgctgtgcaccggaatgtacggtgcgctag

SEQ ID NO: 18445 - DNA, 120 bp, Zea mays
  Peptide Sequence Number=SeqID_60224
atgccggaccgctgtagaggaagcatcgacgtcggcgccgatgtgggcgacggccaccatagtgcaactggtgctcgtgaactgagaagagaagggcgggatcagccaataacagtttaa

SEQ ID NO: 18446 - DNA, 441 bp, Zea mays
  Peptide Sequence Number=SeqID_60225
atggccgcggctacctggtacgctcacctcaaccatcatctgtaccagcgcatgctccctgctcgccatggctggccttaccggatctgttctctgctactcgcttcgtcggctggtttgctcgccgaacctccagctttctcgcgctcggctctctggtattccagctcgccgagcccctcccccagtccaacctctcttcttgctcattgtcactgcggcgcactcgctcctcggatcctcatcgccggtcttcagttctcgtcaatcactgatgtgcagcacgcctcggtctcgtgctcaccgtcgcttggtcgtgagctgttcgcccctgcgcgtgctcactctaccgtcgctcggcccttgcgccttgccgagctcatctgccagctccatcaccggacgttcctagtatttttctccaacaccgagtccctctga

SEQ ID NO: 18447 - DNA, 243 bp, Zea mays
  Peptide Sequence Number=SeqID_60226
atgccaagttcggggactgcgtgtaataggtggcatacaatacacgtggggaggcttcaatgtgacacgccacgtcgccaccaggttttggacgattttgcacggcaattagacggtgcttttcaacgagtcaggtacatgcatatgcaagaagctcccgtggtgtttgatcatgaagtgtttccaagtcgtttagcacctaatagagatagtagcataggtatagtgaacaaactacagtaa

SEQ ID NO: 18448 - DNA, 1762 bp, Zea mays
  Peptide Sequence Number=SeqID_60227
atggcggccggcggcagcggaggcgaggccgcgcagaaggcgctgcagtcggtggcgcagagcacggggtggacgtacagcctcctctggcgcctctgcccgcgccaagggtacgccttcttcctgcctgctgctccatcgccgtcccaactctcgtccttgctaaagcgctgtctgactaaccgatctgatcacgcatgcatgcatggccctgctcatcagcgcgctggtctgggcggagggctactacaacggcgccatcaagacgcgcaagacgacgatgacgacagtgcgtcagccggcgggcgcggaggacgcctgggacgaggagacggcgctgcgccgcagccgcagctcaaggagctctacgactcgctggcggcgggggaggccgcttacgacggtggtggaggagtcggcgacccacagcagcagcaccagcagcaggtggcggtggtgccgccgcctcgccggcccgtcgccgcgctggcgcccgaggacctgacggagacggagtggttctacctcatgtgcgcctcctactgcttccctcctgccgtcgggttgcccggggaggcgtttgtaaggagagctcatgtgtggctatgtggtgcaaacaaagctgacagcaaggtgttctcaagagcaattctcgctaggacagtagcatgcattccagtcgacgatggtgtcctggaaattggaactacagaaaagacaaaaacaggaatcagtctcaatctaggagacgagcataatagtgaaatggaagatgatgacgacggcaggattgatttagagaacaatactgaaaatgattcaacaaggcggcatttgccacaggacgccagtgcctcctcaaacatcgccaaaacctacctggcactctccaagaactcgccattctcaaaatggaactggaagcgcaaaggaataagcagcatgttgatccctgagggcacccagcagaggatgctcaagagcgtcctgctcggtgctcctagcagcagcagtcaccggacgtcgtcctcagcacctgagacgaggggtgacgatggcgaaggcacgagccggtctcggagaggtccggtgccgtcccagacagagctgagcgccagccatgtcctcaaggagcggcggcggagggagaagctcaacgaagggttcgccatgctccggtccttggtgccgttcgtcacaaagatggacagggcgtcgatcctgggcgacacgatcgagtacgtgaagcagctacggaggcgtatccaggagctggagtcacgagctcggctggttggcagcaaccagaagacgacgatggcgcagccgccgccgcctgcagcctcaacggaggagagaggtcgtcgtcaaaccagcggcggttacctcgctcgcgcaggtacatgcagcagagcagcggaggcgagcggcaacagcaacctcggggaggagcctccggcggcggcggcgagcgacaccgacacggaggtgcaggtgtccatcatcgggagcgacgcgctgctggagctccggtgcccgcacagggaagggctcctgctccgggtcatgcaggcgttgcaccaggagctccggctggagatcacctacgtccaggcctcctcagctggcgacgtgctacttgcaaagctgcgtgcaaaggtgaaggaggtgcatggcaggagaagcagcaccactgaagtgaagagagcaattcacctcatcgtttcatcagactggaactggatatgcgagaagaatccat

SEQ ID NO: 18449 - DNA, 357 bp, Zea mays
  Peptide Sequence Number=SeqID_60228
atgggtatttataggcccatcaggggtaggtggtccaaggtgggcctccgggcacgtctcctggtggacctatgtcgaactgatcagcgtgtagccttcgccgacatccttgaagccttcgcgccagctacccttcgtttgacttggccaagcgagggctccgtgtccgaggcacaacgaagggcgattatgtgtcatgccttcactgttgacctcggggaccgctcctgggacacatttgtggcggagacagagaagggggcggaggagctcgttggttctgttaatgagcaggagattgagaagggggccaaacttcatggaggctctgtatgtataaacagtgtgttcagctag

SEQ ID NO: 18450 - DNA, 1131 bp, Zea mays
  Peptide Sequence Number=SeqID_60229
atggccgtccctcctctgctgctcgtcgccgttgccgtagccgcgctctccatcctcgtcctcgtcgtcttcgccttccggcgatgcaggcggcggcggcaacgccacccgctgcaggccgcggcggtggccccgaccccggtcgctgtccaggttgtcgatgctgcttatgttgctatcaatcgatatgaattggccatcagagctttggttatcgtgaagaactcatttgttcacacaagcagagcgatcactctagacagaatattagttttcttggaagtttctgtaggagaaccttcgaagattcaaacaaataggagtaacacttcgcctagaagtcatgcaattgctgatacagggaggatttatcctgctgaatgttgtgttacacaaggagaaactcatgtaatcaatgttgaaaatgatacttctgaagagttccaattaggaagcacactaagacgtacaccgccaccaaaatggccaacacctgaccagaagcacagaagaagggtttctggagatgacaatcataatggaagtgttcctttgaaggataatacatatcgctggcatttgtatgcccatttcatccaatcttttgttagaagtgcagatagccgcctggatttagaggttatagctggtccatctcatggaataagctgttctcggcagtcaagtagaccttctatgctcccaataactcttggaagggttcccccaagtgatttagtgttgaaggactctgaagtatcagggaaacatgctcagataaactggaatggaaagacattaaaatgggaacttgtggacatgggcagcttgaatggaactttcttgaactcccaggcggttcaccatccaagtgctgggtctaggcattggggtgaacctgctgaacttgcacatggtgatattataactctagggacttcatctaaactgtctgttggtctcagtgagagcgagaagaggaagttctgggaagacttagatagcatggttagagcagtacccaccaatgagaagcttttcatagaagatctcaatggtcatataggttcaacacatgaaggttatgagatggctcatagaggtttcgggtatggtagtagaaatcaatga

SEQ ID NO: 18451 - DNA, 522 bp, Zea mays
  Peptide Sequence Number=SeqID_60230
atgtcggtggacgaatctcataatctcaaggggaaggagttggagaaagaagtggagaagccaaaagacaacgatggagatctcaccaagtcaagctccaaatcccacaagaagaaggatggcgagaagaaaaagttgaataatgtgattgccaaggatcacaagccacgtagcacgagggcatgcctcaaatatggtaagactagttattttatttcaaattgtacatataatgatgaagacagggaagaggacaagaaaggggaaaataaaagggagaagaagaaattccataaaaagggaggcaaatttcacatcgtcaaggagtgggattccaatgaaagctcctccaactccgatgatgaaggcataaccaccctcgccatcaagtcctctctcttcccaaaggccgaccacaagtgtcccatggacaaggagagcaaaaagaaggtcatcaatgagaaggatgaactcttggggaagcaaggggatctactcattgatgaaactttaaacaaatga

SEQ ID NO: 18452 - DNA, 735 bp, Zea mays
  Peptide Sequence Number=SeqID_60231
atgcgatcctacgcatcctcgtcatcgctggactcggagtcagtgtcgccatcgtcgccgcacgcacgaccacctagcaccagctccacggccttagagtcgctcgttcccgcccgcgtgcagccggtgtgcacgagcctccggtggtgcgggccagaaagatctagacctgcgaggcgcgcacgggacctcaaaaagcgaggatcaggtcacaccgctgctcgcagccacaacgtcgaacaggccgtggacagggagcagtgcagcgccatcgtgctgcctaccacacactcgtgcagggcgtatcactcacctctttgctcgagccaagctgtgagcttggaagtggcagccacggccacgggcgcgggcgccaagcctagccgcgtgggcgtgagggcgccggccgcgggcgctcagcagagtggggagtggtgggcaccgcacgttgcacttgatcatctagctcagaggaaggacattgacacaaccaagatagttatctttggaagatctttaggaggtgttgttggagcagttcttgctaaaaacataagacgtcgatgtaaatcacccccgtgtcgccacaagtgctcccaagaagaggacgttctgcaagttctagaggggtttgaagaggaagcccatggagatcataaagaagctatgcaatgcagtcagtttccaaccgctcaattttcattacctccttacctctgtttgttagtgttttag

SEQ ID NO: 18453 - DNA, 486 bp, Zea mays
  Peptide Sequence Number=SeqID_60232
atggagttgacggacccggaggagcgaagggccaagatgcgggagctgctgaccaagtacaagctggtgaccatggaagccgatctccacgcccgccagtgcaactcggtccgccagagccaatatccacatctgccagtcgggaggagggtgagaaggggcggggatctgggccgttgcgcgaggggtgaagaaggggacgaggggtgcgggcgggagaggagggttgcatcacggggccggagagggaggcgtccgtcgcggagaggatggaacagggcatggctagggtggagacgtcttggggtggatccgatgatggcggtgccgatggcgtggggaggagagtggggcggaggagagggaggcgtgcgtcgcggagaggatgagacggtggcagaaccgtgcaccatagtatttgtggacacctacactaccatcttaaggagtagtatagatacacacagttgtgattattacacgtga

SEQ ID NO: 18454 - DNA, 849 bp, Zea mays
  Peptide Sequence Number=SeqID_60233
atggtggcacgtagaagtggaaagaaacttccaatggaagacataagcttttgccagtgtcctctgcagggtgttgaacattttgggctctttggaatttttgatggacacggtggggatggagctgctaaagctgtcagcaagattcttccagaacatctgggatacattttatctcatcctgaaacaaaagaacgagtgcaatcatattctgatgcttctgatgttcttagatatgcttttactttgacagaagacacaattgatcatcagtacgagggatgtacaggcacagcacttcttatttggtttgaccagaataaagattgttttgcccagtgcgctaatcttggtgactctgcatgcgtcatgagtgtcaacggcaagacgatcgatatgactgaagatcaccgggtaactagcgcgaccgaaagagctaggatagcaagaactgggcagcccctgagagacggtgaagctcgtcttagcggactaaatcttgctaggatgtttggtgacaagtttctcaaggagcaggacccgcgcttcagctcagaaccatacgtgagccaagccgttcgcatcaccaaagcgtgcacagccttcgccgtcattgctagcgacgggctctgggacgtcatcagcacgaaaagggcggtacagcttgtcgtcgagtggccttcactgtcgtcccttggttgccttccccttccacaatctgcagggaaaggagaggaggagctccggcgacgccacctcagcggcggccagagtagccagccgtgtgctggacgaagctcggagtctgcgaaccaaggacaacacatccgtaatattcgtagattttga

SEQ ID NO: 18455 - DNA, 1233 bp, Zea mays
  Peptide Sequence Number=SeqID_60234
atggcgtcgtcctccgacgagcagtccaagccgccggagccgcccgccgccgccgccgtggtcaccgccgcagcaccgccacagacgcacgccgagtgggtcgcttcgcttcaggcctactacgctgccgcggggcacccctacgcctggccggcgcagcacctcatgggggcggctgcggcgggggcgcacttcggcacgccggtgccgttccccgtctaccacccaggcgccgccgcggcgtactacgcgcacgcatccatggccgcggcaagtacctgtgctctcccttccgaattgggcttcgatttggaagcgtttttgggcgtcccttacccgacgtgcgaagctgtccccgcggtggcgctgcccactgtgccggaagggaaagggaagggtaagggcggaggcgcgtcgcctgagaaaggcagctccggggcgccctccggcgaggacgcttctaggagcgatgacagcggcagcgatgagtcatcggagactagagatgatgacactgaccataaggattcatctgcgcccaagaagaggaaatctggtaacacatcggctgaaggtgagccgtctcaagctactgttgtgcgatatgctgcggttgagtcaccatatcccgcaaaaggaaggtctgcctcaaagcttccagtgtctgcacctgggcgtgcagcgcttcctagtgccaccccgaatctaaacattgggatggacatttggaatgcttctcctgccttggctgtgcctgcagtgcagggggaagacgaacgtgaaataaagagggagaggcgaaaacaatctaacagggagtctgcaaggagatctagattacgcaagcagttggttgctatgatgccccaaaaccttgaaaaaacaaaaaccaaagattgtgaatggtgctttcctcaagagtgcgaggagttagcccggaaggtagctgacctaacgaccgagaacagcgctctcagagcagaacttgacaacctcaagaaggcttgtcaagacatggaagcagaaaattcacgtctgttgggtggggtggctgacgcccaggtaccaagtgtcacgaccacactgggaatgagcatcgagccgccgaagttgcagctgcagctgcagcagcatcatgatgaggagggccagctccacaagaaatctagtaataacagcaatgggaactgtgctggaggcagccacaaaccggaggctaacactactaggtga

SEQ ID NO: 18456 - DNA, 192 bp, Zea mays
  Peptide Sequence Number=SeqID_60235
atggcgggcggcagtgttctcgtcctcggtggaattccagtgaaggtgcagaacagcaagggtttcgtgtcaggaacactgcgttatctttggccaaagttgggtctgtcagaaggggcagaaccgaggcatttcttgtgttttgtcttgtccaagtgtggagtcccaatgccatcttctgatatgggttag

SEQ ID NO: 18457 - DNA, 753 bp, Zea mays
  Peptide Sequence Number=SeqID_60236
atgggcaacggctcggggactggcgatccaggcccgcgagacagagagagagggagcgcacgggtgaagaaatctggcgctgataggttggccccagcgggcagagagcgagatagagaacgcgcgcgggagaggggaactgccgctgacaggcgagatggcttcacctacccagccgatggtgcaaacacctgcttcagctttgactaccttccccgagagggttttccctctattctgtgggaggtactgagcacacctaggtaccctgcaccacctctgtacacgcccgggtggcgttcgctgcattctgagaccgtcaaattcaaggcggatgacaccactgaggttgcagcattgaaggccctgacgaccttctgcggataccatccactggagatgatgatgcacccgctcagactcttccccgccaagaagagggatgatccgatgtggtgcgaccgagtgtgccatgccaaggatgtgtggcctatgcatcccaaccaggttgggaggatcactgtccagtgcatgagtgcgttgtaccacctgcaagccctgcaaagcgatgccatgacacattttactgggctagctcagactgccaagactacccttgatagtagggaggtcttcgtggtcaatctgtcctctgagttggaggagaaggatctccaaattgagcagatgggcaatcgcacccaagattggagcaacgggtggaaatctagaacaagaccattgaagtcctag

SEQ ID NO: 18458 - DNA, 567 bp, Zea mays
  Peptide Sequence Number=SeqID_60237
atgggagaaggaggcgagagaagagggcgatgccgtgaggctcaagagccacgacttttaacccccgagcgcggacgagggcgacccggtcttcccggtgtcatggcgcgggtcgttgcaacagctcgtccgcaagttggggatgattctgacaaaaagggcccagcgtcagcgataggcggtccacgcagattgcattttatcgtattacaatgtttgtatcctttgcctgacaatgtcaactaccatctcctgcatcttggatgtgctaatttcctccgcataccacgggctgcaatgtgtgggttcaaggaccgggttggcgtgatcccaaccatttccaagcgcagggcaggagctcgggccctggttggcgcgcgcggagtggccaatggcgcgcacatcggctcaaaactgcggccggacgaacccaagggtttcgtgtcaggaacaccgagttatctttggccaaagatgggtctatcagagggggcagaaccaaggcatttcttgtgttttgtcttgtccaagtgtggagtcccgatgccatcttctgatatgggttag

SEQ ID NO: 18459 - DNA, 303 bp, Zea mays
  Peptide Sequence Number=SeqID_60238
atgacaaaggactttgccaaaactgctaaatttccaccatatgaggatatggaaatccttaaaattgagcttttcctgacgaaagttgttatgttcttggttcttgttgtactgggttttgtgctctttgatgttgcacatctcttcggctgcttcatcgatcttcttctagagcttagagtgactaaccattttctccttgtgcttcttgatttattaatgggtcacttcaaggttgttgatttcctcatcaagctcatcttctcacggatctgggctattggacctctgaaagtagcctag

SEQ ID NO: 18460 - DNA, 336 bp, Zea mays
  Peptide Sequence Number=SeqID_60239
atgggaggctcggcggcgatgtgggcggtgtggggcacggcggagacgagcgagggcgggcacgatgggcgggcgcgtggcggggaggggcgtccggacacgcgcgcggcggctacaggcgaccgggcgagcggcgccgaggacgggcgacgacggtgctgcgcgtggcgtggacgggcgggtgcggccgggatggctcaccggcggggaggggcggcggcgcggcggcggttagaggcggcggcggctaggggagacagagaagcgacggcgcagccaggaagaaaggcaaaaatgagccagcgcgggttcgcccgcgtgctcataaaaggctaa

SEQ ID NO: 18461 - DNA, 333 bp, Zea mays
  Peptide Sequence Number=SeqID_60240
atgtggatggataaatactgcctcactagcaagaaatcaatctcttacaaattctcaccacacaatacaggaggtgccgacaaacagcaacaacaacaacaacggtggcagctagcacacaggtggtgttgtagaaaaaattgtggatttatagcatttgagaacaagtccccaacattggcgcccacctccggtgaactcacttccactgttgagctgatggcttcgttcaacaatcaagctgaagtagctttggctacgaagccggtgctcccaataacaggtggtttatgttcagaaccggccaacaagaaggagaagaaggaggcttag

SEQ ID NO: 18462 - DNA, 276 bp, Zea mays
  Peptide Sequence Number=SeqID_60241
atgaagatgatgtataatgatgatgctgaccgaaggacgaccaaggacgagggcctcaacatagagagctttgtcaagaaaccccagtcaatgatgatggatggtatgatgatctgtaccatgggccaatcatactcagagcagccagcaaagctcatagtctacgggaatgcagcagaagggcatcgccaggctcagcaacagtgtgacattcgggaggagtctgaagctcgcacaatcaacagcactatgcccgagtcaaggcatatctactga

SEQ ID NO: 18463 - DNA, 303 bp, Zea mays
  Peptide Sequence Number=SeqID_60242
atggaggggagtaacggcggcattgaagttcctttacgtgggagaagaacggacgtcgcgatgctccggtcggctcggtgttggacgcaggggctcggcgttggttcttggcgcttggtcgcagggcacctgggcgcgacggcttcctggcggctgcgcgcagggtacagggcgcggtgctcgattgagccgagaggggaggcagagggacgagcgcgatggtggctgggtcggtcgggtgcgctcggcgcggtgcagagcgcggccgggctaggcgctggtcgcgcggggattttcatttaa

SEQ ID NO: 18464 - DNA, 609 bp, Zea mays
  Peptide Sequence Number=SeqID_60243
atggcgcctcctgttgacgtggtcggtccgtgccctaggttgggcgatgtggaggctcctccgaggtcaaggtcgagtctgtcttccgtggccgaggtcgagtccgagcccctgggtcgggcgaggcggagaccgtcggctgaagccagggctgagtccgagccttggggtcgggcgaagcggagttcgtcgtcttccggggctgagcccgagtccgagccctgggtcgggcggagcggagttcgccgtcttccggggcttagcccgagtcggagccctgggtcgggcggagcggagttcgccgtcttccggggcttagcccgagtccgagccctggggtcgggcggagcggagttcgccgtcttccggggcttagcccgagtccgagccctgggtcgggcgaagcggagtttcctatggtgcctgaggccgggcctagctgcctgtcagcatcactctgtcgagtggcacagcagtcggagtggcacaggcggcgctgtccttctgtcaggccggtcagtggagtggcgaagtgactgcggtcacttcggctctgtcgactggaggacgcgcagtcaggataaaggtgtcaggccacctctgcattaa

SEQ ID NO: 18465 - DNA, 483 bp, Zea mays
  Peptide Sequence Number=SeqID_60244
atggctgccattgaccgggacagaccgtggaccgctgtggccacagattccagcgtgagtattggcgtaggtgtggtggaaactggtggagagatggtggtggacggccctggaacagtggaaggcgatggtggcggtgggtggctggtgaatggaggatcgctggacatagctgataccaggttgataagattcctattcctaccagggacctccctcaagctgtactggtgtactgctggaggttggcgggggactgggcgagagggacgccgggacgccgtgttcacggcgtgggaaaacaggctagctcaggttccggcttccacagggaagacagctagaatagctcacaataacctgcttgatgaacttattattggatgtcttatggggatgaaggacaacttcacattttcctgtcacaagaagattttgtgtcactttatccttaatgaggcagtggtgaatctaggattttag

SEQ ID NO: 18466 - DNA, 787 bp, Zea mays
  Peptide Sequence Number=SeqID_60245
ggtgaagatggggctccctattgacgtggctggcctgcgccctaggtcgggcgacgtggaggcccctccgaagccgaggtcgagtctgagcccctgggttgggcgaggcggaggtcgttcggtagaggccagggcggagtccgagccctggggtcgggcgaagcggagttcgtcgtcttccggggctgagcccgagtccgagcccctgggtcgggcgaagcggagttcgtcgtcttctggggctgagcccgagtccgagccctgggtcgggcggagcggagttcgtcgtcttctggggctgagcccgagcccgagccctgggtcgggcagagcggacccgagtccgagccctgggtcgggcggagcggagttcgccgtcttctgggacttagcccgagttctgagccctaggtcaggcagagcggagttcgccgtcttccgggacttagcccgagtccgagccctggggtcgggcagagcggagcttcctatggtgcctttggcagggcctgactggcctgtcagtctcactctgtcaagcggcactgcagtcggagtggcgcaggtggcgctgtccttttgtcaggccggtcagtggagcggcgaagtgacggcgctttatgctgatgggggttaccagctgagaattaggagtcttgaggagtacgtgctcatccctgagcaaggagttgtccacgaggaagaccaggagcaagcttccgagactgccatcgaggatctccccgcagccccagcaattgaaggcaagccccggttttatgcataa

SEQ ID NO: 18467 - DNA, 162 bp, Zea mays
  Peptide Sequence Number=SeqID_60246
atgccagtctggccatgtgttggccgtcggctccctggaaccagcgccccagccaccaacctccgctcacttcgacgacggaccgtgccgctggtccatccatggccgttcattccctacggggcatcacagtttgcgctaagcacgattgattccatctag

SEQ ID NO: 18468 - DNA, 216 bp, Zea mays
  Peptide Sequence Number=SeqID_60247
atgggtgattgtgggcgttcactgggcgtcctcgtgggggagtcgagcgaactggccggggggatggccgaggaactccaccgagccgccgcaaccgcgatctgcgccgtcagccttgggaatagggtagcgtcgggtttggcgtgggcattggcctgggtcgcggtgctgtcaccgaccgaatcgggaggtagaagatgggccgattgccggtga

SEQ ID NO: 18469 - DNA, 411 bp, Zea mays
  Peptide Sequence Number=SeqID_60248
atggcgcggacttctctggtccgagctcgagcaggtggcccaccgtcgcccatggccaacctcgccactccccctcagctccgatggttggtgctcgcagagctcttccagggcgttgccctccctgctccatggctcaagcctgagctcaccccatgggcgcgccccttctccacggcgttctgcagtagggagctcttctccccagcgcacagaagcttctccatgggcatgccatccctgctcgcatccaagccccaacaacagcggagccgtccccctgctgttccctgcgccctactttttccatggaaatcagcaggagcaatgtcgcccagctctaggctcctgctcctcctctcttccccacaaaacagcaaccgcaacgagctcgccgtcaacctcgcgtag

SEQ ID NO: 18470 - DNA, 513 bp, Zea mays
  Peptide Sequence Number=SeqID_60249
atggcctattgtgcactagagatgaaagaattcatggtagagatgttaacatggagggtgacacatggggtagatgaagccaaaccgaaagcagaggatgtgatggtgatgctccagaatttcaaggtgcgcatgaggcgcacagagttcattcaaggcacctccaacccaatgcagatgatcatagacgagctattaggcaaggaggtctggctgcatgtggcagtggtcatcaatggcaacaagcaaggcatcatggtgtcgcctccttcgcccctcacgaaggagacacctgccaacatgcgacttgatgtcatctatggtcttgatcgagtttcctctgggtcaggtggcatcaagggtgaccttagggagacactgcttgatagaaatgaggttgacagacacaaccgccttcatggtagactcgcagttgtcctgcttgtagttgaacgtcacctagaagcatgtgcctatggtgatgacaatgttttcctgacatcttatctttag

SEQ ID NO: 18471 - DNA, 5424 bp, Zea mays
  Peptide Sequence Number=SeqID_60250
atggcctccgacgacggcgacaaggacatcctcctcctcgtccaccaggtcccactcgacatggaggatgtgccagcgccccgcctggcgcacctcctcgccccgctccaccgcgcgcctccaccgcccccgcctccccccttccgctcgccgcccccgccccaggccgccgcttccgccgagcaccgcctctcattccgcggctggctcggcatcccccgccactgggacgactgggtcgccaagctccggcccctccacgcccgcctctggcgccgcctcggcatccacgacgccgtccttgcctccaccctccgcttcaagcgcgacgcctccgccatcctccatctcgcctccttctggtcccctgccaccgccaccttcgccttcccctggggggaggccactgtcaccctccaggacgtcgccctcctcgccggcttccccgccctcggcgccccggccacggccccgctcccgccccagtggcgccccgacgaggccgccctcaatggcgtgcgcctcggcttcaaccgcagcgcctgcaagaaggcgcaccactccgcctgggtaaaacacttcctcaccgacgataacgcggacacagtcttcgagcacgccgccttcctcgcgctctggctcacgcgcttcgtcctcccgggtcatccggagtccaccatgcgccaggccgtcttccccatcgccgtccgcctcgcgcgcggggaccgcgttgccctcgcgcccgccgtccttgcctcgatctaccgggacctccgcgagatcaaggccttcctcatcgccacggggcgccgccgccaccaccggcaacgccgatatgatctcctccttatccgtctactcgccactctacattcttcagctctggatgtgggagcgcttccctgccctcaggccagcaaaggatgcaactttgtgtggcagccttatgtcagctccatggagcacactgggtgggttcacagcagtgatctagccgaggatgatgaactggcatcgctcgcacaatttttgcacccctgtgagctcgtagggatggattgcattgagcagtacctcccgcaccgtgttgccagacagtttggactggaccaagatgtgcctgcagatgttcaccgtgccaaccaggattgggcgattgcttggcagacctaccagctggaagcaagtgctccagtagagtggaagacttccaagcgcaaggtgaaaaagacaccagcggccatggaagctgaagctgagaaggagcgtaagatgaagaaggcccgggtctctcctacttatactgataaaaagcgcaaacttgaagagttgtatgatgctaagttgtcggattggcttccaactgcaaggaatgagattagtgacaccactagtgatatggaatcggaggaggccttattgcctaatgttggaactacaaatgatgatattgtgctactcatgccaaggaagcagacaacgactgcacctgtaagggcattgatggataatgacatgatcctggctctaggagagagaggaaactttatggttgatgagcctccagacatccaaagtgaacctgaagctgttgtccctgcaacgctggatgaggaaatagttaaaattcctgaggttatttctcttgatattccagataagccagaagaaggagccactgcagtaatggaggagcagaaggaagctactagtgtatctgatagatctgaagaagctagtgctctggtcataggagaggtagaagaaaaggttgccatagagggagctatttgtgttacagggatgaatccatcgggaaacaactcagcaactgtaatggaggcagatgaaagaaatgcagttccaaaagaatttggaagggctgccaaggaagtaattgaagctgtgccccagagccaacatgaagttaatgcaggtgttataaacaattctcatgatgtggtggctttacctgaggaggcccatccagttcagcccacaaataattctggtggatgtcccgtggtatcttgcataatggaagacagtaaagttgctggagattcgggcaaaattgattatgaatatttttgtgattttgttgaggaacagagggagattccttgtgtacaagagatttctggagaaaacagtcgaatgggtgagaaagagagagaagaaacctcccatgaatctcctcaactagagattgtagaatgtgtgcaagacatcgttcttagggaaacagactatgatgttaatcaaaagatagtttatccagcagtggaggatgtagcaacttccgatagtatgagtacatctcttctgggtgttcctgaaccagaaaatgcagaactcaataaacatccttatctagcaattaaagatgaggaagatatacccatggaagctgcacgaggagaagtagcagaaatggaacaaattagtacttctgcaaagggaggtgccgaggagcatggggacttttctgaacttgatcacatgggccgagcagatgctaaattgcatttacacttaaattctgaagtgcctgagaaaattgatgaaatagagtgtaaagaagtcgctggcactatgagactaactgggagatattctgatcagaagcttggagatgtgcctgaagttgggtacacagaagatgaaaacattagggggctggtagtgaacacaagtgataggaaaccttcagaagtctctcaagtcgagcctgcaaaactggaacattctaaggatctggtgaaagaggaaacagacaaatccgaaaatattcctggattagaatgtataggattggaggaaactcgtggagatttgatggaagagtgtgcaaataccaagtctgataatgttcccgaattagaaaatacaggattaggaggaactcatgggccaatagaggatactgatggtagactgaaggaaattcatgatgtcaatgcagaactggataaacacaatgtgcatgagagcgatattgatagatccgaggacatcatgcaaatcgatccactaacacaggataaagctacgtggctggcgaaggaagaaactgaagataaaactacaaaagttcaagaagtaaagtatgaacaattaagaaatgagccaccgattcaagaggattccaaggaaaagccctgtgctgatagcaaggatctatcagagaatgttgtagttcagtccaaagaggtagataaattgaaacaagcaggagagggttgccaggcgttaatggagaaagacatggagaatgctagtggtgcttttgtactagaacagacagaagatggacacagaaaatcattgatagagacaagtataaataacgatagtgaaattactctagtcgagcagttggatggacaaagtgagagtcttacgaggacaggtactgtggaaattcatggagaaaccattaaagcacaagacaatgagttctataaggatgtggtagaagattcaaatgactcaaccaatgaaaaggatgtggtagaagattcaaacgaatcaatcaatgctaagatgccatgtagttcagctactgtacagttaaaagaagataagatggaagtttttcatgaaggcaagatggaggagccatgtgctcaggatgctgaactgagtaatcagagggaaccatcatctgatgcaactgctatggagattgaggcagtggctctggaacaggacagcagaatcatatgcaaaaacatggaggcaacaacagtggaaggcagccacacactggatagtggactaagttccgatctagccaaggttaatgaaactcatgctgcacgggaaattaaaaaccaggaagttttggatgtggacatgaaagtagcaatgagtgtttgtggtgaatatcaaattaactcaattggtatggaggatgtcaaatctaccaaaggatcacagaaccaagaatgtttggaccagaaagaagaccatataatggaggaaagagtggagtgtgaagtaagagaaggaagtggagtatcctatgaagaggcatgtgagctcggtggtggtagagtgaaagcctctggagttgcagtggatgttagtggtccagtgctaaacaaggaggcctgcaacacagaggaggcaactcctgctgcagtgccatttccaggaggagacggagctggcatagaacttgccaaagggggcctaactatgattcattgtgatgaacttgttctacagttgcaggcaagggaggataagaagcgtcatggagttgggcatgtgaatgagaagagggttttggaagaaactagtatgattgatactggtgaattgaaatctgattcgactgttatggagattagcatggctgggttaagacaaggaacactcaaccaatgtgcttcaagttcggagaaggaagaagcagtgcaggagaagcatgatcagggattggtagatgaaaacacaaacagaggttcagctgacaatgatgcacttgaatgtggtggagtgaatcctgatgtggccataacaatgtttcatgaaactattcttacaacagaagctgtcaatatagctgggtctaaaatttcgtctgagaaccagcaaaaggaagcaccctttgaagtacactctataacagaagtcgaaggttctgaatcaaatgaatcatcaagaaaggagcctgaaggagctcttgctcttccacaagagcctggcaacctggtaaaagttaaacaagaaagtttggagaatgaaaccgagatgtccatttttagggagaatgacaaagtttctggaaaagatcaggcatcagcagagtttataattgatccttcaaatacggatgaacggagggagaatgatattgggcggcccgatgaatcagcaaaaggctgtgaaaggttaacttctgattctataaacacagttcactccaaatttggcaagtctagtaatgaagaggataagagaacacagaacaccaggtctacggatccaaaagatataaaggaatcattgggtagaattcgtgccgaaccatcaaacagggtacacacaaccagtgttgggtattactctcagcatgcagctcatgatccgatttcatcttgtaaggagatcaaagtgcctttgcgagacggtgcaagggattctggaagggaccgtgcactggagttagtggttacaagtccacgagaagagactcctcgatggaggcaagaacagtacgcacttcagattttagaagacgttcaaaattcccgaattgctgagagatctaggatggagatggagatcagagtactgaaggcacaagtcagtagcatggagagacaagtgatgaacctggatcacttctctgaggtcaagtccagatctagtttgaaccaacaaatggtacatttgcacaaaccatacttctga

SEQ ID NO: 18472 - DNA, 654 bp, Zea mays
  Peptide Sequence Number=SeqID_60251
atgtcgtacatgcggggtgacctgctgacgaggatgcgtaagctggtgaagggcctcgccaggcccgagccccggtggctcaaggccttggaacgggctccgccagtgacatttcctcgcccagaggggaagatcaagactctggtgcttcctgaggatgtgtatgtcacgaagttcaacagaatacatccagattcgctttaccatgatgcaatcaagataagtggatttgatccaccgccagctcgagtgtttgcttggcgtgtcctggagttgaaagagcaaggagtcgatgaagatgttgcgatggctgtagcagataacgagtaccggacagagaagaaggcaaagaagaaagcgtacaaggagctgaaagaaatcgcccgcagcgaagggaggaagccacctccgaatccatacccgagtgccataaaggaaatacaagcggaggaaaagaagtatgtcatggaccgtttgcataacccgaaggtaatcgagattgcgaacaagatgaaggaggagcgagacaggatgttgagggatagagcagcagatggcctctggaatgcaatgttgattgggatgtgtttttgccagcaagctggtaaattgagacgtgttttgcttgctccagaaagttctgcttatagctga

SEQ ID NO: 18473 - DNA, 2982 bp, Zea mays
  Peptide Sequence Number=SeqID_60252
atgtccaatcctcttcccatgctcacccttaccatcatatgcgccactttgtggctaactagtggtgctggtggcactggcaccgacaccggcggcgacaacagcagcggcggcggctgcatcccatctgagagggctgctttgctgtccttcaagaagggcatcacgagcgacaacaccagtcgcctgggctcatggcacggccaagattgctgccggtggagaggtgtcacctgcagcaacctcaccggcaacgtcctcatgctccatcttgcctacccgatgaatccagatgatgacttgtactacacagatgtatgcgacgattacacaactttgtttggtgagataagtcgctctctactctttctgagacatctagagcacatggacctaagctggaactgcttgataggcccaaaggggcgtatgccttcattcctgggctccatgaagaacttgagatacctcaatctctctggagtaccattcaaaggtagcgtgcctcctcagttaggcaacctatctaggttgcagtaccttgatcttggcagttcatatttaggatatggcatatactcaaaggacattacttggttaacaaacctacctctgctgcagtaccttggcatgggttctgtcaatctctcagggatagctggtcattggcctcatatactgaatatgctaccatctttaagggagctccatctggagtacaatagtttcacagggaccctgacaagttcgataggtcacttcaggagcttaagcatccttgagctcaacaataacaatctcagaggaagtgttcctactgaaattggtacccttacaaatttgacctctttggatctaagcaataacaacttcggtggagtaatcacggaggagcactttgtaggtctgatgaacctaaagaaaattcacctgtctttcaataatttgagtgttgtactggatgcagattggatccaaccattcaggctggagtctgcagggtttgcatcttgccatttgggccccatgtttccagtttggcttcgccagcagctcgtttatatcactacgctagacatttcaagcacagggttggtgggaaacattcctgattggttttggtcattttcaagggctggttctcttgacatgtcttacaatcaattaaatggtaacttgccgacagatatgagtggcatggcctttctagagctaaacctcggttcaaacaacctcacaggacaaatgccaccatttccaagaaacatcgtattgttagacatctctaacaattcattttcaggcatcatgccacacaagattgaagccccactgctccaaacactagtcatgtcctcaaatcaaattggtggcaccattccgaagtcgatttgcaaattgaagaacctgtcatttctagatttgtcgaacaatcttttggaaggtgaaattcctcagtgttctgacattgaacgcttagaatattgtctcctaggcaacaacagtttatcaggaacgtttccagcatttctgcgcaactgtacgagtatggtggtcttggaccttgcatggaataatttatctggaaggttaccttcttggatatgggagctgaaggatttgcagtttctacgtctaagccacaattcattttctgggaatattccgtctggaataaccaacctttcttttcttcaatacttggatctatcaggaaactacttttttggtgttatacctcgtcatctttcaaatctaacaggtatgaccatgaagggatactacccatttgatattttcgacaagacggtatctaaattcgatgatatatggttagtaatgacaaaagggcaacaactcaaatatagtcgggaaattgcatattttgtaagcattgatttatcaggcaactacttaacaggtgaaattccattgggtatcacatcccttgatgccttaatgaatttgaatttgtcatcaaaccaactgggtggaaaaattcccaacaatattggtgccatgaggttgctggcatccctggacctctccatcaacaagctttctggtgaaatcccatggagcttatcaaacctgacatctttaagctacatgaacttgtcctacaacaatctgtcaggaaggataccctcaggccgccaactggataccttaaacgtggacaacccgtcacttatgtacataggcaacagtggactttgtggacctcttcaaaataattgttcaggaaatggtagcttcacgcctggttatcacagaggcaataggcaaaagttcgagcctgcatcattttatttcagtcttgtattggggcttgtggtagggctgtggacggtgttttgtgctctattgttcataaacacatggagagttgcttatcttgggctcctcgacaaggtgtatgacaagatctatgtgtttgtagctgtaaaatgggcaacggctggatcgacgaactacccaatgctgatgaagtccaactgcaacgactggtcgcttctgctgatgaagattaatctcgagaccaggtacctctggaacgccattaatcccggtgatgttgagcttcatgtcgcgtgcctctggaacgccatcctcggtgacccggaggaccgtgcgaaggtcgttgagaacgcgggccttgcgggctggccatgcaggaacatgctgccgctgctggtcccgtccgcacgcgcccgatctcccgggggcaccatggggttgcagcggttgtgcgacgacagaaccaacgcacgtgggtgggctgatccgacacagtcggaccacgacggcgatgtcgacatgcgagcgcgtgggtctggcgggatccggtgtggacggggcacggctctggcagacacgcggccgagcggttccggcgtggacataaggggtctgcggcgggcagacgacaagttcgcggttggtggacggacgtggcgccgtcacaggcaacacatctga

SEQ ID NO: 18474 - DNA, 3402 bp, Zea mays
  Peptide Sequence Number=SeqID_60253
atggatccatctccccgccaatgtcatgcacacacactcctcctcctcctgtgcaccagcgtcctcgttttcctctcaaacaactcagcgttctcgtcggcacagcccggcaacaggtcagaggctgaccgccaagccctgctctgcttcaaatccggcatctccgacgaccctcgccgcgtcctcacgtcatggagcgccgactcgctcagcttctgcggctggcgaggggtcagctgcagctccagcctcccactccgagtgctgtccctagaactaaggtctgtgcggctccacggaacactgctacacaattgcatggcgaacctcacttcgctggtgaggttggatctttcaggcaaccatatttccggaaccatacctgaggaggtggccacgcttccaggcctccagactctgatgcttgccggcaacatcctttcaggtagcatccctccgtcactgggtgtagcatcaccttctcttaggtatgttaatcttgcaggaaataatcttagcggagttattcctgattccttacccaaagctccatcgcttcgtgtgctgaacctgtccatgaatatcctagcgggaatgatcccagttaccatattcaacagtaattcatccaaacttgtcacagtggacctccagctgaatcatcttactggacccattccttccctccaaaaccccacgtctctgcaatttcttggccttactggaaacgttctttctggaagggttccaccatccttaggaaatgtttcatccttaaacaccatcctgctggcagagaacaacttgtcaggaccgattccagaagccttaggccatatcctgaacttgaacattctagatctaagtgaaaacatgttatcagggaatgtccctcgtttccagaaagccacctctctgcaacttcttggccttaatggaaatattctttctggaaggattccagcatccttaggaaatgtttcatccttaaacaccatccggctggcatacaacaccttgtcaggaccgattccagaagccttaggtcatatcctgaacttgaacattctagatctaagtgaaaacatgttatcagggaatgtcccagcggcgatatacaatgtctcatcattcagatatcttcacttgggcaacaatttgcttgatgggcagatacttcctaacactggccactcactcccaaacctcatgtcactgatcatgagaggcaacagattcactggagtggtcccgtcttcactggccaacatgtcaaagctccaagaaatagatctctcaagaaatttactaaacggctcggttccatctctaggatccctgagcaacttgagtcgactgattcttggaagcaacatgctgcaggccgaagactgggtgtttctgacctctctgacaaattgcagccaactatcaatgttatccatagacgggaattctctggaaggaagccttccagaatcagtcggcaatctttcgagaaacctggaacggcttaactttagaggtaactggatttcaggaacgataccagctgcgataggcaaccttgtgaatctcactctgcttgccatggaccacaacatgctttcaggaagcattccctcaactattggtaatctaaaaaacttggttgtcctagcactgtccacgaatagattgtcaggtgaaatgccatcgacaattggcgatctccctcagctgaaccagctttacatggacgataacttgttgtccggaaacataccggcaagtctaggacagtgcaaaaggttgaatatgttaaacttatcagtcaataaccttgatggatccataccaagtgaaatcctgaacatttcttcgctttctttagggttggacttgtcaaacaacaaccttaatggaacaataccgccacagatcggaaacctgatcaatctcggcctgctgaatgtttccagcaacagattatctggtgagataccaactgaacttggacagtgtgttttattgtcataccttcagatggaaagcaacatgtttagtgggattattcctcagtctctcagtgaactaaagggcatagagcagatggatctctctgaaaacaacttgtcaggtcaaattccagaattcttcgagagcttcaggaccttatatcaccttgatctgtcacacaacaaactggtaggaccaattccaaccagtggtatcttcacaaatccaaatgctgtcatgttggacgataacttaggattatgtcaacaaagtaccatatttgcattgccgatctgccccaccacatcatcagtaacaaaaaggaaaaacgatgcacgcctgctgctcatagtagccccaccggctactatcgctttgttgtcatttttatgtgttcttgccactgttacgaaaggaatagcaacccaaccacctgaaagcttcagagagacaatgaagaaggtgtcatatggggacattcttaaagccacaaattggttctctccagtcaacaagattagctcaagtcatacggcatcagtatacgttggccgctttgagtttgatacagaccttgttgccatcaaggtatttcatctcgacgagcaaggttcccttaatggctttttcaatgagtgtgaagtcttaaagcagacccgccatcgcaatctaattcaagcaatcaccttgtgctcgacagtagattttgagaacaacgaattcaaagctctagtatatgagttcatggcaaatggtagcctagacatgtggatacacccaagtctgcaccaaggtagacgaaggagggtgctaagtttaggtcaacgaattagtatcgccgcagatgtggcttctgctcttgactatctgcacaaccagttgatacctccattgatccactgtgatttaaagcctagcaatgttcttttggattatgacatgacctcacgccttggtgactttgggtcagcaaagtttctctcttcaagtcttactagcagcagtccagaaggctttgttggcgcctcaggaacaattgggtatattgcacctgagtatggaatgggatgcaaaatctcaaccgatgctgatgtttatggttttggagtgctcctgctagaattgctcacagcaaagcgaccaactgacgaaatatttggcaacgacctcagccttcacaagtatgtggatatagcattccctgataaaatcgatgagattttagacccgcagatgcaaaatgagggcgaagttgtttgtaatctacgcatgcaaaactatctcataccactggttgaaattggcctgatgtgctccatggaatcaccaaaagatagaccaggaatgcaagctgtttgtgccaaaattattgccatccaggaagcgtttattcaaaccttttga

SEQ ID NO: 18475 - DNA, 1311 bp, Zea mays
  Peptide Sequence Number=SeqID_60254
atgaccaatcctctgatcatgctcctccttaccatcatctgcgccactttggggctaaccgctggtgcgccgcaacccctaggcggcatcgtctgcatcccatctgagagggctgctttgctgtccttcaagaagggtatcacaagggacaagaccaatcgcctcggctcatggcacggccaagattgctgccggtggagaggtgtcacctgcagcaaccgaaccggcaacgtcctcatgctcaatcttgcctacccgagctatccatatgatgactcgtacgacagagatgtatgcggcgattccagaactttgtttggcgagataagtccctctctactcttgctgagacaactagagcacatagacctaagctggaactgcttgttaggcccaaatgggcgtatgccttcattcctgggctccatgaagaacttgagatacctcaatctctctggagtaccattcaaaggtagcgtgcctcctcagttaggcaacctatctaggttgcagtaccttgatcttggcaattcatatttagcatatggcatatactcaaaggacattacttggttaacaaacctacctctgctgcagtaccttggcatgcgttatgtaaatctctcagggatagctggtgattggcctcatatactgaatatgataccatctttaaggttcgataaatatagacatagcagagttgatggacagattaccactgtgcacaagggaaaacaaaaacttacagttacaggagctccatctgggccaagttcgatagggtacttcaggagcttacgcatccttgatctcagctataacaatctcagaggaagtgtacctactgaaattggtacccttacaaatttgacctatttggatctaagcaataacaacctcggtggagtaatcacggaggagcactttgtaggtctgatgaacctaaaggaaattgacctgtctttcaataatttgagtgttgtagtggatgcagattggatccaaccattcaggctggagtctgcagggtttgcatcttgccatttgggtcccctgtttccagtttggcttcgccagcagctccttcatatcactaagctagacatttcaagcacagggttggtgggaaacattcctgattggttttggtcattttcaaaggctgcttctcttgacatgtcttacaatcaattaaatggtaacttgccgacagatatgagtggcatgggcctttctagagctaaacctcggttcaaacaacctcacaggacaaatgccaccatttccaagaaaacatcaggaagttag

SEQ ID NO: 18476 - DNA, 549 bp, Zea mays
  Peptide Sequence Number=SeqID_60255
atggagtggtatgggagatgctactttgaagaaccacttacatgcgaagaaggcccagagggttctagagggtgtgtgtggtgggcgcaagatttatactggttcaggcataatgtccctacttccagtcatcggtggcttgcgctatcgacaccattgatgatcaaaactcgtagtaggggttacaagcagccgagagaggaaggagatgctcccaagtctcttttttggggtggaagtggagctttagaagctataagactgtccggtgagccaacagcgtccgcgccaaagctcggcagcgtgatcagcgcgcaatcaacgggcgacgtgtggccagagccaacgatcactaggccacaccggtctgtctggtgtgcaccggacagtgttcggtgggccaaggggaccgcgggtgcaacgactggctttgccaaacaaggaaagaaatcacacactgtttatgtccggtggtgcaccggaatgtccgatgcgccaacggacataaggcaagaattgcctttcaaatggagctccaacggctcctag

SEQ ID NO: 18477 - DNA, 156 bp, Zea mays
  Peptide Sequence Number=SeqID_60256
atggcttccagcttcctcttgattgtgcaagccagtcttctgcatcgcggggattgctgcacccccgcgaacctgtgcggatcagtccccaggaattctcccctcctgacctggaccctccaccctctgggcgctgtttctccttacttcaaggag

SEQ ID NO: 18478 - DNA, 579 bp, Zea mays
  Peptide Sequence Number=SeqID_60257
atggcggcggagaacgaggagaaggagacggcctgcgcgggcgcattgtaccagctgcatttggtgaaggcgtcgacggcgcgggccttcgtgccgcgggacctccgcctggttgaggccttcggctacacgctcggcggcatgttcctggcgcgctaccacgacagccctgccggcgaattcgacgagctcgtggtgatcgccggcattgtgtggaacccgccgacctcctgcgcgtgggctgccagggtgctggtgaacagcgtcgaagcctgccggcacggccgcaaggaggtaggactgccaagccatgtcgccacattctcgtcaaagaacgaggctgcttcgcttggggatagaccgttggctagaccaaacagcttcctcaacatgctggggatcgggtcgacagccttcgagcaagggaatggccgcgagattgaggtttcagagtccaagggcggctcgtctactcggcatctgtgcaacatcagcctgccatttaccggtaacagtcttcttatccatttaggtactgtttgtttaccctctatatcatatataatcgagcttaaataa

SEQ ID NO: 18479 - DNA, 426 bp, Zea mays
  Peptide Sequence Number=SeqID_60258
atgcagatactaatataccttgagaacgccggaatgcaatatcagacgcaggctgctcagatgcaaatattggcttccggccaggtccatgccatacgcccacgtttcacatgtttactttttgtgggtacgcgtgacccgatgggtgacccatacccacatgggtatggtatgggggtaaatccatacccgtcagtttatatgggtgatccgatggggttatttttgtatcgtgggtttgggtatgagaataagaagttgtgccgtggtcctcttattctaaacacagttctcaacctacctactggaccacaaaggcggccaccatgtcctcaggatcaatgggccactcgtctagtgggcttcaggcaacaccaaattccccagcgaatctactcaaacatgcgaaaaaatcggttcttttga

SEQ ID NO: 18480 - DNA, 267 bp, Zea mays
  Peptide Sequence Number=SeqID_60259
atggcgtcgtggtcgtccgaggtggaccggcagtggggcgggggcggctggccggcggccgcgctgcgctggctcctcgcatcccctggcagcctaagccaggagactggcggcgccgtagccgccggtagtcgattaaccctcggagattgcgattgcaccggcggattgggcgtcgggaacctcctcctggacccggaagccaacttcggcttctccgacatcgacttaccttcgctctcccagccacagcagctgctacagtag

SEQ ID NO: 18481 - DNA, 732 bp, Zea mays
  Peptide Sequence Number=SeqID_60260
atggcgcctcctgttgatgtggccggtccgcgccctgggttgggcgatatggaggctcctccgaggtcgaggtcgagtccgtcttccgtggccgaggccgggtccgagcccccgggtcgggcgaggcggagttcgtcgtcttttggggctgagcccaactccgagccctgggtcgggcggagcggagtacatcgtcttctggggctgagcccgagtccgagccctgggtcgggcggagcggagttcgccgtcttccggggggcgcgcgtcaggataaaggtgtcaggccacctttgcattaaatgctcctgcgatttggtcggggttgcttcttggcgaagacagggcctcgggcgagccgggaacgcattcgccgctggaggggggcctcagctttatgctgatgggggttaccagctgagaattaggagccttgagggcccagacttccgctcgctcgcgctcgtgaagaagctaagccccgacctccgcccgctacagccgctgaagcggccggcgtccacgccgccgatgacgaccacgagggactcctccgatgagaaggaccaggccacgtactacaccatgtctaagaccgccaagtcctcattcaaccggagcacgagacaacgtagcgccctagagccaacaatggctcaaccacctgcgccagctcccacgtccacacccacgccgctgccgcctcaagctagcgccccctgtgggggatag

SEQ ID NO: 18482 - DNA, 816 bp, Zea mays
  Peptide Sequence Number=SeqID_60261
atgggatcagaagggccttcagttgtcactgtccatgttactggatttaagaagttccatggggttgctgagaacccaaccgagaaaattgtgaccaatcttaaatctttcttggaaaagcgagggttgccaaaaaatcttgtcctcggaagctgcacagttctcgaaacagcaggggaaggggcacttgccacattatataaggttttagagtctgctgttgcagacagaggaactgggtcctcggcacagggacaagtaatttggatccactttggggtcaacagtggcgcaataaggtttgcccttgagaaccaagctgttaatgaggctaccttccggtgtccagatgagctaggatggaaaccacagagggtccctattgtgccctctgatggaagcatctcacggacgagagagactaccctgccagtcaatgaattaaccaagtcactccggaagataggctacgacgtggtgccctccggcgacgccggtcggtttgtatgcaactacgtgtactaccactctcttcggttcgcggagcaacacggcatcaaatccctgttcgtgcatgttcccctcttcttgacgatcgacgaggaggttgtgtttgggaatcgggagggaaaaaaagagaggtcattggcgatagatgatgatcttgctccagagggtgtgtttgggaattgggagggggggaaaagaggaaattgctgcatagagtcagacggtgtatcagcttgtacgccatcaatcaagtgctgtaaacatgcctgggaaataattggggacctggatttgaataagatttga

SEQ ID NO: 18483 - DNA, 186 bp, Zea mays
  Peptide Sequence Number=SeqID_60262
atggacatcatggtcgatcagttcgagcactgtgcatctgccaaaatattccaggatgcgagaactacttggactaaggaattgaggaaagcaacacctcaaaagaagacattaagaagatcaagaaagtccaagaaaggaggcgtggcacccggagtctgcggcgccaatggtcacctgctctga

SEQ ID NO: 18484 - DNA, 540 bp, Zea mays
  Peptide Sequence Number=SeqID_60263
atggcggagctcggcagtagacctcaccgtggactcaggagaccggcatccccaatcgtagcgagagggacgaccagcgggacacagtccaagcggcaaggcttccccatgcgtgatcctgcccgaggagatttcaaaggtcttggaaatccagccatcgccgtcgggtatcccacccccgagcctgcgcccccaccaaccccgcccccgagttcacccgccaccaagctcgtcgccggctttattggcaactacaatcaggtttacatcaggtttcgtagatataattccaagatgagaatacatctcaatttcacatgggctatatataaggtcaaaattcataagcaaagcgtgggtgctagctttcaggaggtggttggtggagttggaggggtcgattggggaagagggggagaggatgaagacaactgcactggtgcactggagctcgacaacctcgagagggtcagttttgttatggcagtacaaaacactcatctaattagcagtgcacgagaaaaaggacatcctatatga

SEQ ID NO: 18485 - DNA, 552 bp, Zea mays
  Peptide Sequence Number=SeqID_60264
gtcactttcagagggacaaattggacaaggttctggacactgttacagaaggaggacagacctcaaattaagtgccagatgaactgcacaaagtgccagaaactagtgaactgcacaaactggcagaaaacagtgatgtgcacaaaactggccatttgggttaacttccagggtggcggcgtcgtgcacagcatgtacgccatctcctgccttgtccttgtccacagcaagtgtggcaagctcagcggcggctatggccttcttctccgcagccctcgcttcgctacatgcttcctcagccgcagcagcagcggcgcgagcggcatcgcgcgcatcggagaccgatgctcctgggggaagacgaaagctactggacagatacgacacgggggaacgatccatggcggcggcggcggcgggctagggttctcagaaacagggggagctcgaggtgaatgggggtggatgagggtggacgggacggcgtctgctatacgaggaaacaacaagaagagtttaatagctagcggagaccaatgggttgcagcctag

SEQ ID NO: 18486 - DNA, 195 bp, Zea mays
  Peptide Sequence Number=SeqID_60265
atggctctccaagagagcatactattagcttatgttgctcaccattcttttaagctctatcaaatcgacgtgaagagcgccttcctcaacgagccaatcaaggaggaggtcgggaaagctgatcctacttgtcgatgtctcaagattggggtacccactactgctgggccaagtcagaaccccaagaccccttag

SEQ ID NO: 18487 - DNA, 447 bp, Zea mays
  Peptide Sequence Number=SeqID_60266
atgacaaacagagaaacaagtggaacaacccatccaaacaagaatgtgatgacaacgtcaagatcattggaacctcttcatatggatctcttcgggcccattgcttatcttagaattaggggtagtaagtatggtcttgttattgttaataactattcccgctttactttggtattctttttgcatgataaatctgaaacccaagaaaccctaaagcgtttcttaaggcgggcacaaaatgagtttgagctaaaggtggagaagataagcagcgataacggatcagaaatcaagaatcttcaagtggatgaatatcttgaggaggaaggcatcaagcatgagttctttgctccctacactccatggcaaaatggtgtagtggagaggaaggaccggacgctcatcgacatctcaagaacgcagctgggagaatacaagacgccataa

SEQ ID NO: 18488 - DNA, 1098 bp, Zea mays
  Peptide Sequence Number=SeqID_60267
atggcgccggatctggtgaacggcgtgctcaactgggtggggacgccggccatggtggccagcctgctgctcttctacccgccctactatctcttcaagacatgctactccttcctttcctggctcttccccgaggacctcgccggcaaggtcgtcctcatcactggcgcttcctccggcatcggcgaggtactgtttgtcgtctcctgctctgcgcctactactgtcactgaccatatacagattattagactcagctcgtctctgactgacctttccttgcagcaactggcctaccagtacgcgctgaatcgggcgtccctcgccctcgtcgcgagaagggagtcgagcctccggcacgtcgccgaccgagcactcgagctcggcgcgcgcgacgtcgtcgtcctcccaggcgacgtctccacccccgacgactgcgacaggttcgttcggaccgcgatcagtcactacgaccgattggaccatctcgtgtgcaatgctggcgtcgcgagcgtcggcgcgttcgaggagatcccggacgtcaccagctacagctcccagcttgtaacgtcaccgaaatcccctgaaaccgtttgcttcttatctcgtctcatctacatggtgctgatctgtgctttcgttcgttcggctgccaacgctgcgctcatcaacttcttcgagacgctgcggaccgagctagggaaccaggtcgggatcacggtggtgacgcccgggtgggtggagtccgagatgtccagagggaagttcctcaaggagcacggccaagtggaggtcgatcaagagatgcgcgacgctcagatcggcctgttcccggtggagtacgccaagaactgcgccaaggccatggtgcaggcggcgcggcaaggcgagcggtacctcaccgtgccggcgtggttcggggcgatgtacctgtggcggctgttcgcgccggaggtggtggaggcctgctaccgcctcctgtacatgcacggccatggcgccaggcaggccgacgcgcccagcaggaccatggccgaggcgggtggcaagcagctgctgtacccgacctcgctgcgctctgacgagattaaggagtga

SEQ ID NO: 18489 - DNA, 503 bp, Zea mays
  Peptide Sequence Number=SeqID_60268
atggcggggaagaggccacgaatccacgggcagagaggggagaacggcggtgggaagacctcgggcgggccggagcaactccgaggcagatgcatcttagggactaacctcgaggaactagaccaggctaaatcggccggccaccgcgcgagcacggtggaccaccgcggtcgagcaccggcgaaggcgaaattggacgaacacaggggcactggcggggctctaaaaagggagttgggcgcgtgggtgggcgtcgtggccgagaaatccagcgacgtgcgcgagtgcgcacgcgccggtccacgggaaaatgagaccaaggacgtggaaatagaggagattcgtcagctttacacccatctcagcaaagaagacaaggtgctcttgatgaagataccaagtaggaataaggaagaaggtgagacgcttctcaggctagaggagactctcatcaaaaccaacaacagcctagagaagatgaccaaagatcatgaggagctaag

SEQ ID NO: 18490 - DNA, 2001 bp, Zea mays
  Peptide Sequence Number=SeqID_60269
atgaaggagtccgaccagctcgcgacttctttcatcacgcccttcgacatgtactgctatgtcaccatgccgttcggcttgaggaatgcgggtgcgacgtaccagcggtgcatgaaccatgtgttcggcgaacacattggccggacggtcgaggcctacgtcgatgacatcgtagtcaagacgaggaaagcctccgacctcctttccgaccttgaagtgacattccgatgtctcaaggtgaaaggcgtgaagcttaatcccgagaagtgtgtctttggggttccccgaggcatgctcttggggttcatcgtctccgagcggggcatcgaagccaacccggagaagattgcggccatcaccagcatggggcccatcaaggacttgaaaggcgtacagagagtcatgggatgtcttgcggctctgagccgcttcatctcacgcctcggcgaaagaggtctgcctctgtaccgcctcttaaggaaggccgagtgcttcacttggacccctgaggccgaggaagccctcgggaacctgaaggcgctcctcacgaacgcgcccatcttggtgccccccgctgccggagaagccctcttgatctacgtcgccgcgaccactcaggtggttagcgccgcgatcctggttgagagacgagaagaagggcatgcattgcccgtccagaggccagtctacttcatcagcgaggtactgtccgagaccaagatctgctacccacaagttcagaagctgttgtacgcggtgatcctgacgcggcggaagttgcgacactacttcgagtctcatccggtaactgtggtgtcatccttccccctgggggagatcatccagtgccgagaggcctcgggtagaatcgcaaagtgggcggtggaaatcatgggcgaagcgatctcattcgcccctcggaaggccatcaagtcccaggtcttggcagacttcgtggctgaatgggtcgacacccagctcccaacagttccaatccaaccggaactctggaccatgttcttcgacgggtcgctgatgaagacaggagccggcgtaggcctactcttcgtttcgcccctcgggaagcacctacgctacgtgctacgcctccatttcccgacgtccaacaatgtggctgagtacgaggctctggtcaacgggttgcgcatcgccatcgagctaggggtccgacgcctcgacgctcgcggtgactcgcaactcgtcatcgaccaagtcatgaagaactcccactgtcgcgacccgaagatggaagcctactgcgatgaggtttggcgcctggaagacaagttctacgggctcgagctcaaccacatcgcttggcgctacaacgagactgcggacgagctggctaaaatagcctcggggcgaacaacggttcccccggacgtcttctcccgagacctgcatcaaccctccgtcaagatcgacgacacgtccgagcccgaggcaccctcggcccagcccgaggcaccctcggctcagtccgaggcaccctcggctcggcccgaggcaccctcagcttggcccgaggcaccctcggttcagcccgagataccctcggcccctgagggtgaggcactgcgcgtcgaggaggagcgaagcggggtcacgcctaatcaaaactggcagaccccgtacctgcaatatctccaccgaggagagctacccctcgaccgagccgaagctcggcggttggcgtggcgcgccaagtcgtttgtgttggtgggggacggaaaagagctctaccaccgcagtccctcaggcatcctccagcgatgcatttccatcgccgaaggccaggagctcctacaagagatacactcgggggcttgcggccatcacgcagcacctcgggcccttgttggaaaggccttccgacaaggtttctactggccaacggcggtggccgacgccactagaattgtccgcacctgcgaagggtgtcagttctacgcaaggcagacccgcctgcctgcttag

SEQ ID NO: 18491 - DNA, 216 bp, Zea mays
  Peptide Sequence Number=SeqID_60270
atgtcagacggcaaggtcagcattccacatgcgatctctatggttattaagagccttgggaaagtaatagggaaccctatgctcatggaggacaacacccagcattatatctacactcttaagcagcaagacatagatctgttgcaggagtgtaagggcgagaggctccaagttgtggagattcctcgcaaacgggataagaaaagaaaagcataa

SEQ ID NO: 18492 - DNA, 591 bp, Zea mays
  Peptide Sequence Number=SeqID_60271
atggatttccgctcctctcgaccggtccaggggcggcaccgcggcgcgtgggccaaggagctagtgtcttcctcggtgaggtcgatctcgacgacctcggccttggtagcgaggccacggagggaggtagatgtggtcgagggggaggaggcaggaggcggtgaggaggagagagggggtgtgatcgagggggggcatggcctccccgaatcgctggtgaagcaagcacgggcgaggagtttctacaaatcgacggtggtcggggggaggggcgatgatgtcgaacgggggcagggtcacggtgtcgccccctgtggacgcctccagcgcctgcgccaccgtgaatccaggcatcgccgagggggtgagggcaggggaagggagggggaggccttgaatcctggacgcgtccgcagggtgttctcggatcctgtcaccgcggcgcgagacagagggagcaggggcagcgggtgcgaacagggggaacaggggcggtgggtgcgaacaggggagcaggggtggcggctcacgcggggtgggagagggggaggcggggggacgaacgtgggtgtgggtgggcggacggtgtag

SEQ ID NO: 18493 - DNA, 276 bp, Zea mays
  Peptide Sequence Number=SeqID_60272
atggcggttcagcgtcggagtggaagaagaagagaggcgagtgagagtgtgagtgagcgcgatatgaaagtagagggaggcaagagtggctgggcgctcaatgaaatggagtgggcgctgctgccaacttgcccaagtgcgcggacaaagagtgaaccggagcagggcacgacgaccacgtgtccaggcacgtgccacttggcgattgccgtctgcctaggctacagatgcgctagggacaaaatgggagcacgaagcgtcgcccactttggctag

SEQ ID NO: 18494 - DNA, 558 bp, Zea mays
  Peptide Sequence Number=SeqID_60273
atgggttcaggcaacttgatcgtgaagaaggtggtaaagcacagctcttttgatctggacattcagctcgataagagttggatggaggacaccagacccgttccatctgtcttgagagatttaaatctgcatatgaactgccttccaatgggtgatgttattggatggattgttattggtgaggctcggcagcatcttaatcagaagaaaaggtgctgtgaagaggattgctgctcgtctgtcgatgtcctgagcacaatacatgcacaagttcccaatgggatagttctgggagactatgtgattgagtatggagatgatgacaatggtgaggactatgaagttttccgcggtgtcaggacgaactggtggtcatgcaagtctgatgttgaaaggatcttcaaggaagtcttcgaggacctgtcagacaagaacacggggatcctggacatcaactcccgccacgtcgctaccctcatggtttacaattcaatcatcaggcagttggttggacctcacaaggaccctccttacatgaacaccatcaccgagaaatag

SEQ ID NO: 18495 - DNA, 294 bp, Zea mays
  Peptide Sequence Number=SeqID_60274
atgatgagggcccacctgctggcggcggcgcagcggcggccgacggtggcgctgcttctgggcctagcgctcgccttctgcctcgccgtcctctccatccagtcctccttctacgccgccccaggggcgccaggcaggaggctggatctggacgccgacgacgtgcgcgacctcgtggggttccagtcccgcgtccagcagtgcgtggtccatatggatagtccgactgatctcggtatctctgataggctgtcgttcattgctcaaaacttttgtgcccattgttatctctga

SEQ ID NO: 18496 - DNA, 1596 bp, Zea mays
  Peptide Sequence Number=SeqID_60275
atggcgccgccgcccgcgccgcctgctgactggacccctgatctaaggcccgtagccagcgtgcccgtgcccatcaccgttccgagcccgcgggaccacactcaccaccaccaccacctagtcgatcgtcgggacacgccgcggggccgcgcgtgggagccggagcggaaccggcgcggagaggcgatggacggtgctgcagtggtcaagctgatgtccggcgaggctgggtatgtcttagaagacgtgccgcacgtgtcagactacctccccgatctcccgacctacccaaatccattacaagataacccggcatactccgttgtgaagcaatactttgtaaacccagacgacactgtctgccagaaggtatattttgaaccggatgaggtccatgcatgcattgtcacttgtggaggattgtgcccgggacttaatactgtgattagggaaattgtatgtggattatctgacatgtatggtgtcaccaagatacttgggattcagggtgggtatagaggcttctatgctcgcaacaccatcaccttgactccaaagattgtaaatgacattcacaaaaggggtggaactgttctcggatcatctcgaggaggccatgacaccgtgaagatagttgacagtatccaagatcgtggcataaatcaggtctatgtaattggtggtgacggtactcagaggggtgctggagtgatattcgaagaagttagaagacgcggcctcaaagtttctgttgctggcattccaaagactattgataatgacatccctgtaattgacaagtcatttggtttcgacacagcagttgaggaggctcaacgtgcaataaatgctgctcatgtggaagctgtaagtgctgagaatggtataggtctcgtcaagctaatgggccggcacagtggttttatcgcacattatgctaccctcgctagcagggacgtggattgctgcttgatcccagaatcaccattctatctggaaggtgaaggcggactttttagatatatagaaagacgtttgaaggacaatggtcatatggttatcgttgtcgcggagggtgctggacagaaacttatcgctgaaaccatgcagtcaattgggaaagatgcttcaggcaatcagctgcttcttgatgttggtctttggttatctcagaagataaatgaatatttcaagaaaaacaagatgaccattaatctgaagtacatagatccaacgtacatgatacgtgccattcctagcaacgcctctgataatgtctactgcacactgctagctcacagtgtggtccatggagccatggctggatacactggtttcaccatcggtcaagtgaatggtcggcattgctatatccccttctacaggataacagagaagcagaacagggtctcgataaccgacaggatgtgggcaaggcttctgtcgtcgaccaaccagccgagcttcctctgcaacaaagtcatcgaagaggcaaagaaggagcaggaaagagcggcgcagcttttagatggctcgccttcccatcggaaggttgacgacgaggttgcagcttccaacttgggtcgtaccaagtga

SEQ ID NO: 18497 - DNA, 462 bp, Zea mays
  Peptide Sequence Number=SeqID_60276
atggcgtcgtggctctacaccatcgtcaaaggcgatgaacgtctctataatgatgatgatggtcgtcgaccggtggttgacgatgatggtccagaggatgcagtgacggtaatgacgaataagaaagaaaaggttccaccaatgacgacgatggaagggacgacgatgatgatggacaaggcaaagcgccgagcactcgtcaaagagccggttatggtagtgatggcgtcttggctctacaccatcatcaaaggtgatgaacgtgtctataatgatgatgatggtcgccgatcagtggctaatgatgatggtccagaggatgtagtgccggtgatggggatgtcgacggtgatgacagataagaaagaaaaggttccaccaatgacgacgatggaagggacaacgacgatgatggacaagacttgcaattcaaatctaaattatccaaagaaattcaattaa

SEQ ID NO: 18498 - DNA, 666 bp, Zea mays
  Peptide Sequence Number=SeqID_60277
atggcgtcgaagaggatccagaaggagctcaaggatcttcagaaggaccctcccacctcgtgcagtgcaggtcctgttggtgaagatatattccactggcaggcaacaataatgggtccatctgatagcccatattctggtggagttttcctagttacaatccattttcctcccgattatcctttcaaaccaccaaaggtggcattccgcaccaaggtgttccatccaaacatcaacagcaacgggagcatctgccttgacatcctgaaggaccagtggagcccggcgctaaccatctccaaggtttgggagctacctacctaccagcaccctcaatctggtcgatttcaggtgctgctgtccatctgctccctgctgaccgatccgaaccccgacgatcctctggtccccgagatagcgcacatgtacaagacggaccggaacaagtacgagaacaccgcgaggacctggacccagagacgaggccatgtttgcgtccgtcgtattggaagaaagggcgatccggagcaggtaaaatggaactatctcccctgtgggcaggccacaaagttcggcccatctggtagccccatatgccggtggagtgttggactccaatatcgacttccggtgatcattcttgtaaccgccgaagtccaaaggtag

SEQ ID NO: 18499 - DNA, 294 bp, Zea mays
  Peptide Sequence Number=SeqID_60278
gtgattgagcatgtcgccaatcctttggagttctgtgaatccctctcggctttgacaattcctaatggtgccactgtgatttccacaatcaaccgatcaatgcgagcatatgccactgcaatagttgctactgagtatatcctcagatgggtcgaagagatggcagggttcgtttacaatccgttgagcggagaatggtccctgtcagatgatatcagtgtgaactacattgcttttggcgtcaagaagggcgaggcatcatcgacaaatgacagagaagcaaatttatcatag

SEQ ID NO: 18500 - DNA, 153 bp, Zea mays
  Peptide Sequence Number=SeqID_60279
atggcgcactaccagcaggggaggcggcagcaagtggacgagtacggcaacctggtccctgggggccacggtgtccagggccagcagctgggtgaatccgcccgcgggtacggcgtcgcagcactggcagctacgcagtcagcatcaagtcgg

SEQ ID NO: 18501 - DNA, 966 bp, Zea mays
  Peptide Sequence Number=SeqID_60280
atgaagctggtcgattacgacggtgctacagcgaagcgaataaggctagacaacggcgcagcaaggaatttctacggcttcgaacaacagggaggagagaggtctgaggaattctggcgtcgagaactcggcacggacacggcggccaagcagacccgacccagcagcgagaacaaacagagggggcgagctggagtatggacagagccgagctggagctgcgacgacaacttgggtgagcacagtaaagaggcacggcacgggcagaaactccagggagatgggcgaccgacgcaggggcagggagaatcgcgcggatgggtggaactccggccatggaaccaagcaaggcgcggcgttgggaggagcaggggtacggcgaccacagatccggcgataggagggatagcctgggcaagcctgaggcagaacgccggccagagaggagggaaaaactcgaccggtaccatggggatgacctgggactgggaaacaccatggtgcggagcagggaaagagcttcggctgggcacggcgcgcgccatgggaggccgagagacgagcggccgagctggagagggccacagagaggttgaagagaagggatgcctggtggagaaatcgagtgccagggagcagcagccagtcatggagagacctcggctggggcgagcaccagggagggcggccatggcaggatttctgcagaagggaaggtggaggctggagcttgcggctgctgaaaggatgaagacgaggcctgatttttcttggttgcacaaacagatgaggacgacggctgatgatcggcaagaaaaaacagagggagagattgagcggttgctgcaggggctattggcccaaaaatctgagcagggtcggcgacgggataaggccaggcgcaggaaaaaaaatcaacaacgcgcgtacagaaaaatcagccccatgagcagcgcctgcgcctag

SEQ ID NO: 18502 - DNA, 369 bp, Zea mays
  Peptide Sequence Number=SeqID_60281
atgccccgcgacccacgtcccctccggccctccctctatctttcgctcgctctcggcgacagctgggtgaccgtcgtcgccgccgcccttctccaggtgcccaggtcttcgcaggtccctttgccgcctcttcgccgccgacgagcaccagccagtgacatgaagaatctgattggcgaagcatcttgtagaatctgtcaggaaaacttcagcacaactattaatgaatgtgtcaaaaacttcatcacatcaaaattaaaactggatagaacactatacatagcactcactgagcctattgatatatatagtgaatggattgatgagtgtgaacgtgttaacactgttgaaggcgacgatgatgcgtga

SEQ ID NO: 18503 - DNA, 150 bp, Zea mays
  Peptide Sequence Number=SeqID_60282
atgaggagggaaggcagggtgaacgtcgtctccatcgacaccaccgagcagctggcggacattttgacgaaggcgcttgcacgggaacgtttctgcgaactgcgcgacaagctcaggctcgtcaagattaagcagagatgcaaggcttag

SEQ ID NO: 18504 - DNA, 972 bp, Zea mays
  Peptide Sequence Number=SeqID_60283
atggcgcaatacacatgggtacgactgccggtactggcgcgcacatgtgccaccggaatgcttgacacgggggtcttaggcggcggagggcacgcggccaccggcatgcccgccggtcacggcacgcgtcccggcgccacaggcgtagctggaaccggcggcgcgttcccccatgcagctgagcacaagacgggcggcggcatcctttcgccgctccggcagcagctccagctccagcagctcggtgcgtttcgttgctccatcgcaatattctcgtccgcctatatccactcccacaccatgcattcatctgaagacgatggcatgggtgggcgccgaaagaagggcctgaaggagaagatcaaggagaaaatgctaggaggccacagggaaggccagggccaggcgacggccaccggcgcgtacggcgggacagggtacgtggctgggctgacgaccggaggcccccacgagaagaagggtgtggtggagaagatcaaggagaagatcccaggcggccacaaggactacgaccagcatcagcacaccaccgcggcaaccggtggcggcggtggctatggcggaaccaccgacacgacgtatgggacgacgactgagggtacgcacgagaagaagggcttcatggagaagatcaaggagaaactccccgggctcggacacagcctcggctccggaagacgacgaactccgcctcgcccgaccctagggctcggactcagcctcgggctccggacgacgacgaactccgccccgcccgaccccagggctcggacacagcctcggctccgtacgacgatggactccgcctcgcccgaccctagggctcggactcaacctcgacctcggaagacgggctccgcctcgcccgacctcaggggtcggactcagcctcgacctcggaagacggattcgacctcgacctcagaggagcctccgcctcgcccgacctag

SEQ ID NO: 18505 - DNA, 618 bp, Zea mays
  Peptide Sequence Number=SeqID_60284
atgattaagggctgtgccatgcatgatctgctcgaacaaggtgcccagctgcatgctcaattatttaatgagattggataccgtactgagattgcctggaatgcggttataaatgtttatgcgcagcacggtcatgggtggggagcaatccaagcttttgataggatgacctcaagtggtatcaggccaaatcacattacatttgtctgcctgctgactgcatgcagtcatgctggattagtggacgaaggactgggatatttccactccatgaaggatgcacatggtattgagcctaaagcagaacattattcatgtatcattgatatgtatggtcgagctgggagactagatgaagcagaaaaattcataagtgagatgccagtcaaacccagtgcttatgcttggtgctccttgcttggagcatgccgtatgcaaggaaacaaggagttgggagaggttgctgctcagaatcttatgaaacttgatccaaataacaccggtattcacatatccctttctgggatatacacatcattgggccaatgggaggatgtgaaggcagtcaagaagtcaatgaaggatatcagtattaaaaagctgcctggttttagctag

SEQ ID NO: 18506 - DNA, 225 bp, Zea mays
  Peptide Sequence Number=SeqID_60285
atgtgggggcccgtcttctactgcctatgcgggggcacatcttccactgtcagcagcatggccatgtgcggtcacgttttcgttgtcagcactcagcagcatgaaggtcacaacagcatgctgctggaacagcagtgtcatcagcagcacagggcctgtcgtgtccaagtggaggatagggaacggtcggagaaacctccaaaccaatttaaaatgtatccgtaa

SEQ ID NO: 18507 - DNA, 1744 bp, Zea mays
  Peptide Sequence Number=SeqID_60286
atgcccccgcgtgccgagactgttggagctaccccttccctcgcagccacactgacgccggacaccaagaatccgtcaacagaaacattatctgagatgaacagcacccggacgcttatcgccccgccctccgaccccactgcaccggcggatcgcgtcgggacacgtcggcgatatctcccccccggggggccgtgcgtagggcgccgctactgccaccacccacgaatcaagctcggatctgccgcgctcgacccaaatcaaaaggcccggccgagggggataaaaagttcagaaacacgcgcgatgcagaaatacagacaaagaaagcccggggacgcctcctccttccccggcgtgccggccgtcgacctctccagccccggcgccgccctggccgtggtggacgcgtgcgagcgcttcggcttcttcaaggtcgtcaaccacggcgtgccagcgggcgtcgtggaccggctggaggccgaggccgtcaggttcttcgcgtcgccgcaggcggccaaggacgcgtgcgggtgcggccccgccagcccgctcgggtacgggaacaggcgcatcgggcgcaatggcgacatggggtggctcgagtacctcctcctcgccctcgacggcaacgcctcggtgtccaaaggcctcccctgtcccgtcatcctcgctgcggtacggcaaccaatcaatcaaagcatgcatgcagtggacgcggtgaaccagtacgtggcctccgtgaggggcctggcgacgtcggtgctggaggcggtggcggaggggctcggcgtggcgccgagggacgcgctgagcggcatggtggcggacgcggcgagcgaccaggtgttccggatcaaccactaccctgcgtgcccgctgctgcagcgcctgccggactcgtgcggcgtcaccggcttcggcgagcacacggacccgcagctggtgtccgtgctgcgctccaacggcacgcccggcctgcagctggcgctccacggcgacgacgggcgctgggtgcccgtgcctcccgaccgcgacgccttcttcgtcatcgtcggcgactcgctgcaggtcctgacgaatgggaggctgaaaagtgtgcggcaccgggtggtggccaacagcctgaagccgcgggtgtccatgatctacttcgcgggaccggcgccggcgcagcggatcgcgccattgccgcagctgctggggcacggcaagcagagcctgtacagggacttcacatggggcgactacaagaaggctgcctaccgctcgcggctcggagacaaccgcctggaccccttccgcatctacggtctggtcgaccgctccacctcgcgggtgttaggggcctgcttcgtcgccgaaggttctttaagaagaagcaccttcgaaagatcagagtataatcaaacacagcgcgaagcatttgagaataagtccccaacattggcgcccacctccggtgaactcacttccacttttgagctgatggatttgttcaacaaccaagtcgtagcaccttcgactacgaagctggtgctcccgataataggcggttcaagcttagagccagccaacaagaagcagaagaaggaagcgtggagaagggtgcaacatgttggggtgcagggacccttcatcaagtccaaatggtcccacatcccaatcaccttctcccaggaggatcttcagctcaaggattacccccacaatgatgttatggtcatatcttgtgtcatcaagg

SEQ ID NO: 18508 - DNA, 447 bp, Zea mays
  Peptide Sequence Number=SeqID_60287
atggtcgttggagggagaaaactgaaagggaccatgctcgtgaaaagagcagtagaggagttctacatcaagtcaagggtcctcctaagagatccagaaaaaggcattggacactatttgggcaagcaggatgagagtgtactgcagggagttacacatgtgatatgttgtactggaactacagcatttccatctaaacgttgggatggagagaatactccagaacgtgtagattggaatggcatcagaaatcttgtaagtgccttgccacagacaatcaagagactggttcttgtgtcatctattggtgttacaaaatacaatgagataccatggagcatcatgaatctgtttggtgtgctcaagtacaagaagatgggagaagactttgttcgcaattcaggaataccattcacgattatcatgtattcaggcctggaagattaa

SEQ ID NO: 18509 - DNA, 276 bp, Zea mays
  Peptide Sequence Number=SeqID_60288
atgacaccaagattactagaagaggcgggtggtggtgatacccttaggctagttgatatgtttggctctttattgtacataaaaatgtttatgggttggattcaggtgcttgaaagtaaggataagcgatcaacgaacctgagcaagtctgccagaagctacaaaattgaagttcatataaacttcccactcggcaaggtgataaatgataagccaataaccatactctatactctaccgctagaggacgagaaagcacacatagaaaataactga

SEQ ID NO: 18510 - DNA, 957 bp, Zea mays
  Peptide Sequence Number=SeqID_60289
atggggggcggcggcggatcctccgggccggagctgtcgacggacaacatgaaggggatagtcctggcgctgctctccagcggcttcatcggcgccagcttcatcatcaagaagaagggtctccgccgggccgctgtcgcctccggcgtccgtgcaggtcgccccccctcctgtccctctcgtactgttgaccgtggtagctggggcaggccggttttctggtcaaaagagatgtcgactttggtcggtttggagcgttttctgaattctggtgatggcatgcgcaggtgtaggcgggtactcatacctcatggagcccctgtggtgtttctgagcgaaggttttcctctttcagtgattgtaggtgagattgccaatttcgtggcatatgctttcgcccccgctgttctggttactccccttggagcactcagcataattgttagtgcagtgctggctcatttcattctgaacgagaggctgcatgccctcggggtgctcggctgcgtgatgtgcattgcagggtctgtggtcattgttatccacgctccacaggagcaggagattacttcagttaaggaaatatggaacatggcgacacaacctgctttcttgttatatgttgcgtcagttattgtgattgtttttgtcctggtgttctatttctcccctctctatgggcagtccaatgtgttgatctacactgccatttgctctttgatgggctctctttcggttatgagtgttaaagctcttggtacatcactaaagcttacttttgagggaacaaaccaattaatatatccagagacttggttctttatgcttgttgtggctacttgtgtgttgactcagatgaattatctgaacaagctgcaaaaatggtatgttgatagagaagaactaactgaatgcaatttgagagttgaacctttgcaaatttatcagcaaaaataa

SEQ ID NO: 18511 - DNA, 696 bp, Zea mays
  Peptide Sequence Number=SeqID_60290
atgctgccgcctcacgtcgagatgccgaccaccagggcggcgggcatcaagctgttcggcaaggtcatcaccacgcattatcagcagcagcagcagccgccgcagcccgtgcgccacgcgggcgccgcgccggcgtcgtcggggcgcgggagcggcggcggccccggccccgacttgctggaggaggtggcgcgggcgcgcgcggcggcggccgaggcgcggctgccgtgcccgcgctgcttgagccgggacaccaagttctgctacttcaacaactacaacgtgaaccagccgcgccacttctgccgggcctgccaccgctactggacggccggcggcgccatccgcaacgtgccggtcggctccggccgccgcaagaaccgcccggtgctgctcccgccgccgccgccgccgccgcacgctgccaccgccactactaccggcagtagtgctactatcagcgccgacgatagtaacgaccgccgccgctcggcctcggggtctcctcctccggtgtttacctctgcgttcaccgcgccctactacctcggctcgcccgcccagttcgccacgtcgtcgccggcttacgccgctggcgctgccggcccgccggggacggcggggcagtgcttgtggctggtggcggcgaccacgaccacggatcgttctgctgcaacggagaccgcgcttttctga

SEQ ID NO: 18512 - DNA, 1542 bp, Zea mays
  Peptide Sequence Number=SeqID_60291
atgggcatgcccgacgccaacaggcgcatcaatctcgccgcgccgctcctctccgtccggcgccacggtggtgccgagacagcgcccacggggacgcggttgccagcctacaagcaggcgggagccgccacgtcgtcggagcccccgggccgcaccactaccagcgccgtggccgtggccgtgccattcgggtgggagcgccgccccggtcaccccaagagcgtccgcacccgccgccagccgccgccgccgcccctcacgacgatcgtcgacgacccctctcccgcgacgcgcccctcggacgacacgctctcccgcgacgacgctgccagctgcgtcaccgccaactgcagcgccaccacgggcctcagcgacgccgcgtccgcgggggccgggacggggtcgtcggagccgcgcgcccgcgcccgcggcggcgccatgatggaccggttcctgccggccgcgcacgccgtggccgccgccgggtccccgcagaacgccttccgccgcaaggccgcccggacggcgccggccgccgccgacaggaggttgtacttgttgccagcgcagccgcagaggcgggtgcccctccaccacattgcggcgtgccacctgccgccgcccgtccctcccgctcccatgagcagcccccgtggcaagaacgacgactacgacggcgccagttctgacgcgcgcagcacgccgggcttcgtgtccaggactaggaggtgcggcctgctctccgtccggtgcgtcaggagcgccttgcggcgacgtgcgggcagaccgttccggtccaacggcggcgccagaagccgaagagaaaagaagccactgctgccgcataccggagacgatcacggcatgcaatgctgggaggaagtgtacatcaagtcgctgctccggtcaggccgcggcagcctgatgggaccggcggccgccgtggcctcggagctggacagaaccgtgtgcgaactgtacagcagacgccgacacgggcaggccgccgtccgccccaaggcgagccatctgggtctgctcctggtcctcgacaggtcaaacgaggcttgcggccacgccgcctcaccgccggcgcggaagttctctataaccggcggcggcgacaccgcgttgcttctgaggggcggcgctgctaccaagggcagcttgcgcttgcccaacggcggcgagaagcggctgggacgtgacgacgacgcggccgccgccgatgctgccgccggcggcggggggtacggtttcccgctgcttctggacgacaaggagggcggtagtgccggacgagagatggcgctgtcatcgccgcagccgctgctcccgttgccgttgcccaagtcgcctacggagtcgtggctcgcgcgcgcgctgccgtccgtgtccactcgacccccgaccacgtcttttctgggcctccatgtgcagcccaggaagcatgctccgttgccgtgctgctccattgattccagcagggacgtccatcatgacaggcaacggcaaattcgcgtgcacgatctacacaaatga

SEQ ID NO: 18513 - DNA, 879 bp, Zea mays
  Peptide Sequence Number=SeqID_60292
atgatccagtcacttctttcttgccataatgtagtgcagtgtgagcattgtctattaaacaataatggaggcaagagtgattgtagggatgtcaacggggctgctccccgtacccgtacccgccaaactaaatattccccgttccccgtccacgcccgcggagagaaattttccctgtacctgtccctgtcgggtatacggggatccgatggggaaaaatccccgccaacagcccacttagaatttagaaacaatattggttctgccagtaacccacttaaaaatcctgcccagcacaataaatcaacagcatattacaatagtgaacatacaacagtgaacatacaaccagactctagaatcagcacttcagcaggaaccaggttaccaggaagccgagcagccgaggtcgagcagatctgcagcaggtgccgacgcgaccgagcagcactgcagcaggggccgagcactggagcagccgagcaccaggaagacgagcaggggacggtcgtacggggatcagatggagggctggaggaagagtggatgacgagcgcccgacccgaggaagaggagcaggggacggctggacggggatccaccggtcgctcgccttcttcctcaacccgccgctggactgcgtcgcctgcccgccgggcgcgctcctccaggagaacaagcaggtcggcggcccgcgcgcgttcggaggaagacgagcgcccgaggaaagacgacgagcaggggccaggggacggccttccggtcgacggacggacggagcgcactgcgcagcgcaccaaagcagccgccacccgcaaggcaacagccaaacagaagctagggttagccggtgtcggtccgattgattggaatggatga

SEQ ID NO: 18514 - DNA, 768 bp, Zea mays
  Peptide Sequence Number=SeqID_60293
cccgagggtggagtctgcctttctgtttccgtggccgagcccgagccaaggggtcgggcgaaggcggaagtcgttcggccgaggccagggcggagtccgagcccttggggtcgggcgaggcggagttttgtcgtcttcccgggtcttagcccgagtctcgagccctggggtcgggcggagcggagttcgccgtcttcccgggtcttagcccgagtccgagccctggggtcgggcggagcggagttcgccgtcttccgggtcttagcccgagtccgagccctggggtcgggcggagcggagttcgccgtcttccgggtcttagcccgagtccgagccctggggtcgggcggagcggagttcgccgtcttcccgggtcttagcccgagtccgagccctggggtcgggcggagcggagttcgccgtcttccgggtcttagcccgagtccgagccctggggtcgggcggagcggagttcgccgtcttccgggtcttagcccgagtccgagccctggggtcgggcggagcggagttcgccgtcttccgggtcttagcccgagtccgagccctggggtcgggcggagcggagcggcgctgtccttctgtcagactggccagtggagcggtggagtgacggcggtcacttcggctctgccgggggcgcgtgtcaggatagagctttatgctgatgggggttaccagctgagaattaggcgtcttgaggagtctcttgttggagggataaaggatctgacaaacctctatatttag

SEQ ID NO: 18515 - DNA, 1965 bp, Zea mays
  Peptide Sequence Number=SeqID_60294
atgctctgcctctcctccccgccctcccgcgcgcgccagcatggtggcagccgcgggatcgtgcccgccggcggcagtggagcgacaccgagggtcacgatcttctccgcgccgcggccgccgccggagggctcgcccgcgcggcaggagctggcggcgcgctcctggctggcgctcccgtggaacgtcagcgtcgtgctcctaggcgccggccccgagtccgtcgcgctcgccgcgcggctcgggcaccgcgtcaccgccgatgccgccatcgattttgcgttcacggggacaccgttcttccactcaatggtcgcgagagcacaggctgccgccgacaccgacgtttgcgtcctcgtcgacgccgagatcgtccttcttcccgaaattgtcaacgcgttggatcgtttcagcaaggttgatggcgactggttcctcgtttctctgtcacgtaacgtcaccgatccccgttaccagctcgctgacagtggaagccattgggtacaagcagacggcaaagaagtgagctttacggaggagattccagctgagtggtcatcatcggagggctctgacagagggctgattatggcgtggaacaatccaagcagtgctttacacgcaggagttctgccttcttttctgtatggaagaggagcacagaattggtggctggctcacgaggttctgtcctctgagatgaggcttttctttgatgcaagcagtctggttcttggactgtatcctgagagcattagcgccatgcagcatgtcatggcctcgagtaagaatggcaggttaccttctgtatcctgggagtacggcgtcaatcaccatcttgctgcggtttatggctcgtattgctgtcgatcaccagcgagacgctttcctatgctgcatagagtggtaaagcaatctgaagattatatgctcagcaaagttgacacactcgtatcatcagatttcttcatcagtaaacaaggaaatgcccatggagtagatagcctacggaagaaacaaaacgtttctctatctggatatctacacggttgttcttccgagacctcagcgcctgaccttccatattctttgagcatgctactcgatcttgtcgctgatgagaatggttccgttgtccttggcgtggctggaaaaagctacagggacatgctcatgagttgggcatgccgcctgcgtcgtcttagagttaccaatttcttagtatgtgccttagaccatgagacatatgagttctcaatcttacaggggttgccagttttcagagacccattgtcaccaacaaatgtcagctttgacgactgccactttggaacgaagtgttttcaacaagtgacaaaagtgaagtcgcggattgtccttgagatactaagactgggatacaatgtgctgctgagtgacgttgatgtttattggtttggcaatccgatgccactcctgtactctcttggtcttgctacattcggagcacaatctgatgaatacaatgagacaggaccaataaacttgccacgccgactgaactcaggattctactttgctcgctcagacaacgccaccatcattgcaatggagatgatagtaaaacacgcagccagttcaggcctatctgagcagccgagtttctacgatgtcttgtgtggggagaacggaacaaaccggatcggtgaagacagatgcttggagcccaacacgaacctgaccgttgtgttcttggatcgggacttgttccccaatggtgcctacaagggtctatgggagaagcgtgatgtacgagcaacctgcaaagagcttggctgtttcatcattcacaacaactggataaacaagaggagaaaaaaggtccaccggcaaatggtatctgggctgtgggactacgatcctacctctaggcagtgcttgcaggaatggagtgctcagaatgatggggcaattccatttgtttga

SEQ ID NO: 18516 - DNA, 552 bp, Zea mays
  Peptide Sequence Number=SeqID_60295
atgaactgtaaagaatacgctaaaattacggacgatgctcacgcactctgttgcttgtgttgcacagtgcgttcgctatccaattgcttcgcgccaaatcgagctagtggaagacgtggttcgtggattcgcgggacgacagcggggacggtgaggcaagctcgggtagccactggtgacggcattgacggaggggccagggctagggaagagaggagatggagcgcagtccagcgaggcaagctcgattcggcggcgccagcgacggcatcgacggaggggccggggctggggaaaagaggagatggagatggagcgcagtccgacgtggtgaggcaagctcggtttggcgtcgacaacggcatcgatggagggggcagagctggggaagagaggagatggagcgcagtcgagacttggagacgacgaacaatcggtacctcaccgacatacgcttcttcgtctccacgagtgatatctgggatcggtggtagccatgcgcggagcgaggaggcaatgcgctgcggtgtgtgcgcaggagaaagtgggtaa

SEQ ID NO: 18517 - DNA, 894 bp, Zea mays
  Peptide Sequence Number=SeqID_60296
atggatccgtcgtcggagcccctgtacgcgcaggtcgagccgtacgactccgggttcctcaaggtctccgatgtccacaccatctactacgagcagtccgggaacccgcagggccatgcggcggtgtttctccacggcggtcccggagccggcacgtcgcccggcaacaggaggttctttgacccgcagttctacaggatcgttctgtttgaccagaggggtgcaggcagaagcactccccatgcttgtttagagcagaacactacttgggacttggtagctgacattgagaagctcagggagcatcttggcatccctgaatggcaggcaattatcttctttttcaacaacactgattactcactcttcagtgctggaactcaatgctgccagacaatccaggagcaccctgataaggtcactggccttgttctgagaggaattttcttgcttaggaaaaaggagtttgattggttctatgagggtggtgcagcagccattttcccagatgcatgggaaccatttagagattttattcctgaggatgaaaggaattgtttcgtagatgcttataacaaaaggttaacttcctctgatcctattgttcaggcatttgcaaggattgaaaaccactactttgtgaataagggatttttaccctcggactcattcctattggacaatgttgataagatccgacatattaaaggttttattgtacagggacgttatgatgtttgttgccctatgatgtctgcttgggatcttcataaggcttggcctgaagcagaattcaaggtggtagcagatgcagggcactcggccaatgaagttggcatcgctgccgaactgaggtcagccaccgataaactgagagacttgctgcgcaaatga

SEQ ID NO: 18518 - DNA, 213 bp, Zea mays
  Peptide Sequence Number=SeqID_60297
atggcggtgacggcggcgaaggcgacggtgacagcggcggcaagggtggcagcagcgacggcggcaagagcagcagcagggcgctttggtggtagcggccgagttattattggcgatgtcggcgcctttagaagtgatagccaagctataacgggccgtgtcggtgttttagagataacgaccgagcggttactggtgatgtcggcgttttag

SEQ ID NO: 18519 - DNA, 195 bp, Zea mays
  Peptide Sequence Number=SeqID_60298
atgaatgccgtggtaacttcacacctacctgtctgtttatatagtgctgcagcatttgagaacaagtccccaacagtccctaagtccctgatcctcccccaggccaccccagtgctctgcgacgacccaggcttgaggatggcgattttggccacgctgcccaccctcgacgagagcagcgtggtagttcgctag

SEQ ID NO: 18520 - DNA, 207 bp, Zea mays
  Peptide Sequence Number=SeqID_60299
atggagaaacctcctctgtgcttgcgccccgcctccgatttgtggtcaagtagcgtcgccgggacccagggaagtcgtttgtgcatcggtcgggcaggaccgaacatcggggcagcttcaattgctcaccggagcaaatggttcgcggcggtgccgccatgcgtcgtggccagggcatacgactgcgcgattcgcgataattcatag

SEQ ID NO: 18521 - DNA, 198 bp, Zea mays
  Peptide Sequence Number=SeqID_60300
atggctgatttcatgttgactttcagtagcattcagaaacttgatgggatgaagaaggcgttcttgcaggaagaattcaagggtcaagggtttcatgttaccgtatataataactacgttgacaacccggggttgagagtactagctaggtggaaaccaggaatcgaaggtggcaaggtcacaatgaaacataaatga

SEQ ID NO: 18522 - DNA, 396 bp, Zea mays
  Peptide Sequence Number=SeqID_60301
atgttcaagccagtgagaagggaagcgaagtcggtggcccttatgttccttgaatgcacgaaggtggtctcccgcatccacatcctggagcgagggaaggaggttgctgaagcccaagttgtgtcctttgatgagttaatgagcggttggatgaagaaagaagagaaactcttggcctctctgaaaggatggagatttcaagggtcaggcgcccttcgttctccttatcgctgggaggttcgccctcgtcgctcattggggagccagggcccaaacccaagtctgagtaaagggcatcaaattgaggtctccgctgccttcgaccatcctgaggaactccaagtcatcggtagttgggaggtggccctaggccttaaggactacgatcacccctag

SEQ ID NO: 18523 - DNA, 393 bp, Zea mays
  Peptide Sequence Number=SeqID_60302
atgcatgtgggttcttctgctagccccggttcgacgtgtggaccattggagcgtccgaaatttctctctgatgatccaaccacgccacggtcgcgctatcccacactgaggccgggcgctgccaccaccttagggcttgttcggttctaccccaatccatatggattgagggggattgatggggtttcaatccccacatctggtttcactcaaaacaaggcacccaattgcacagaattgctcaccggagctgcttgtgcgccgaggagccacacactcggcatgggcagcatcaccattgccaccggttcctttaaggtaaccatagatcggcttgccatgtccctctggccgagttctagtccctggtctgagtacgagtctacgatctaa

SEQ ID NO: 18524 - DNA, 678 bp, Zea mays
  Peptide Sequence Number=SeqID_60303
atgggatgttgcaatggcgaaggcctaacagatcccttagcagaaggattctgcttcaagctcttgggtccgacctgtgaggctctcgaggcgagaggagagctacttaggcacatgcgaagaaggtgccccaaatcgtttgtgtacgacatccaccgcgttcgacaggatgtggatgcgggagaccaccttcgtgcattcaaggaacataagggccaccgacttcgcttcccttctcactggcttgaacatgccatccgacaaatggagaggatgggggttgaatcattagtagatggagcgctgccctcaccaaccacctgtgcacggcttaccaccagcttttggcgcatgaccgagaactatgaaggtcggtctgcagtgatgttgggggtctgcttcgtcgccaaaggtcctgtgcttattcttacaggaccttcggcgacaaagcagacccccaacaagcgacttctcggtcttgtcgctcacctcattcagctcgcggcaaagttcctaaagatcgacaacctcagcgagagcgtccaaaatgaatcgggcgccccatctactattaaggcgcagcgactctcctcggggcccccactacaggggatggaggctggttcccctagaatgatgattgtcgcaaaagcgggacccccactccctttggtgtaa

SEQ ID NO: 18525 - DNA, 444 bp, Zea mays
  Peptide Sequence Number=SeqID_60304
atggtgatgctgcccatgccgagtgtgtggctcctcggcgcacaagcagctccgggtggctccatggaacgagaggggggcgtctgggctatatactccgagctgtgcgcccccgtcctcaaccgaattctgttggcgagcggggccgacggttacgagggctcgctgggtgaacggcagcgcatgacgctgaaaaatggtctcggccatcagggccagtccatgcatgcgcgggtgcacttttgggctgagtggggttttggcccaggagagcgcactcatgacctatcgagactaggcctgagtgcggaggccatatacatggcctacaacgtgacgagccacattgagacccaggctttggaggccagggctcggtgtggcatagcggtagtaatgacggcgccagggctccatgccgcccacggcgcccatcataaatga

SEQ ID NO: 18526 - DNA, 1161 bp, Zea mays
  Peptide Sequence Number=SeqID_60305
atgtcttcgtggctgcgcagcgcggtgagccgggcagtggaggccggcggccgcagcggcgtcgcccgcgcggtcaaggggtacgccgataccgtcgcgcaccacgccggtcaggccgtcgcggacatcctccacgaccgcatgggcgttcagaactataaaagtttcaagaagacagtagcacgattggaagaggctgctgtatcatgccgtgggggtgaaagagttgaattgttgaaacgttggttaggagcattgcaagatgttgatgctgaaaatggaagttcagatttaaaggtgtctgaagctaatgacccttctggtgaaatggacactttgaaagcacaaactgttttgttctatgatgctgatattgatggtgcacctatgaatttttgtgatgtattcttgtacagccaagcacttgaaggttattgccaattactaattatcttttcatataataagattctcgaacctccttctgaggaggaagtttcactgcttttggaaatattcagcatatgccttactggagggaaagaagtgaacaaagaaatcatgagtaatgtacaagacttggccaaggcattttcagaatacaaagatgaagtcctggtgaaacgtgaagagctgcttgagtatgcccaaagtatcatttcaggactgaagagaaatgctgacattgtgaggatagatgctgaaaccctagaattgcagagaaaactagacgagaagcagaaatcacgaggtcaatcacctgaatatcaagataaaacgtcagataagattgctgctgcaaatcttgaggtcttcaaagaagcacttggtgaactccgcttatgctctagagttgaagaacttctgctgaagaagaaatcaatcactcttggtgactccctggagattcattctcagaaggcatcactcacaaattaccaggtagataaactaaaggttttagcagattccctggcatgttcatcctccaaagcagaacagcgtattttggagcacaggcgccagaaagaagatgctctcaactttcgtgtgaaaaaagagaatgaagtcagtgtttctgaaaaggaattgcttgatgagattactgaattggaaaagcaaagagatgagcttgaggcacagctgaagaaggagtattga

SEQ ID NO: 18527 - DNA, 324 bp, Zea mays
  Peptide Sequence Number=SeqID_60306
atgacgattttttcactccccgtttctacagaaaaaaatcgacactgcaaggaggccaaagcctacgccgatgaccccctcgagcaccctgctacggtgctacaagcgcaaccgcctcacaagttgacgttccggcggggcaaagtactgaaccctgaagagatcagtggtagcaccccaaaacggctccggttcatgccttccatagccgtggcagacgcgacatccaggagcaaatgcgacaggatcacaagtaggaggagcggcgacgatgctgtagcgagagacgtgggtgtcgaggtcatcgtgctgcgttggtggtag

SEQ ID NO: 18528 - DNA, 327 bp, Zea mays
  Peptide Sequence Number=SeqID_60307
atgtctaatatatgccttggtatgttgcttgggctcccacaccttggaatgactggttcgggtgatatttataggtcccaacacaaatctagtcgttggagaaaagttgatgctctctgcggcacactggacagtccggtgcgcctagccgttggactgacgccgcaggtgaccgttggtgctgcacgcttttacaccagacagtctggtggcttctctccaccagtgccacctagaactagccgccctagtgcaccagatagtacgacgtgtgacaccagacagtccattgtggcaacacatgtcttcgttttggactttgcttga

SEQ ID NO: 18529 - DNA, 220 bp, Zea mays
  Peptide Sequence Number=SeqID_60308
taaactgaagaagatccctggtgcagtgcaccttgccgccggtgacccccgcgcctggattcgtgtcggcgaggtgattcgtgctcactggtgcccggataacacttcagggctcgccggagccactgctccgccgtccatggtcggggacctcaccttgcaaagaaatagaaaagggaggggccttaatggagatgtcagtgagacagagaaacagtag

SEQ ID NO: 18530 - DNA, 201 bp, Zea mays
  Peptide Sequence Number=SeqID_60309
atggaggtggtttatctttgcagtgtgtccaataatttcactagccatcaggtcctcggactttccagcactatatccatgcttcaagccaccactggcaaaacccatgattggaaagatattttccccgatcttatatacatgcaaactacaaccatggacaggaaggcacaaatctcacagcctttcttgaaatattag

SEQ ID NO: 18531 - DNA, 462 bp, Zea mays
  Peptide Sequence Number=SeqID_60310
atggggcacgcgagtctttacaacttgatggccagcgttgcctcctccgcgtcggcaaggtcaccggagacgaggcagacgcgatcaccgggcaggctggggtcagcggggagggctagaatgggtccagatgaccagagaaggaagaacgatgaagggaagaacgtgcagacgtgggcgcgtccacggcaggggcgagggcgagaggttatggaagcggagggggctgacgggtcgggtccatgggatagcaagaggggattcgcaaacgggtggtcaacactgacggaaagggcccaccgagcagcgagagagaatgggcgcgagagcgagggaatcggcgccgacagatcggccccactgagcagcgagagggagagagggagagaaggggcgcgcgggctggcgctgacagacggggtccgcctgtcaggggctgagggcgtgcgggtgcggggctag

SEQ ID NO: 18532 - DNA, 321 bp, Zea mays
  Peptide Sequence Number=SeqID_60311
atggctgcctctcctccatctccctccctccctgtgtggtgtccagccgatgctctctcccatggacgccctccccctcttgcagcaagtcagcaaccccatctcctctgccctccatccccagctcgcccctcaaccatggatactgccagccctggcactcgccctctgcacgccattgctctccttcctgcagcaagccccatctctactggcgctctaattttcagtcatcccgcatggccggcgtcctccccattttctacagacaattctattagctttctaaaaagtctaggatcacctgatttgggtgcatga

SEQ ID NO: 18533 - DNA, 213 bp, Zea mays
  Peptide Sequence Number=SeqID_60312
atggctcaccggagttttcccggcctgcctgaggccacctcacagctgttctactctctctgcccgtggattcatggcctcttccccgccatcgagttcgccgtggcgccctcttcccctctacccaactccggcgaccccggagccaccctaactcacgcctgcctcaactccgacccctgtgatcttacagatttagccctggacttttaa

SEQ ID NO: 18534 - DNA, 108 bp, Zea mays
  Peptide Sequence Number=SeqID_60313
atgacgagctcatctcacactctcgatcttgtggacggtggcgtagccctcagcggcgatagtcaacgagaacggtttggaaggagaggtagctacgatgtggcttag

SEQ ID NO: 18535 - DNA, 1986 bp, Zea mays
  Peptide Sequence Number=SeqID_60314
atgaaagagtccgaccagctcgcgacttctttcgtcacacccttcggcatgtactgctatgtcaccatgccgttcggcttgagtaatgcgggtgcgacgtaccagcggtgcatgaaccatgtgttcggcgaacacattggccggacggtcgaggcctacgtcgatgacattgtagtcaagacgaggaaagcctccgacctcctttccgaccttgaagtggttagcgccgcgatcgtggttgagagacgagaagaagggcatgcattgcccgtccagaggccagtctacttcatcagcgaggtactgtccgagaccaagatccgctacccacaagttcagaagctgctgtacgcggtgatcctgacgcgacggaagttgcgacactacttcgagtctcatccggtaactgtggtgtcatccttccccctgggggagatcatccagtgccgagaggcctcgggtagaatcgcaaagtgggtggtggaaattatgggcgaaacgatctcgttcgcccctcggaaggccatcaagtcccaagtcttggcggacttcgtggctgagtgggtcgacacccagctcccaacagttccgattcaactggaactctggaccatgttcttcaacgggccgctgatgaagacaggagccgacgcaggcctactcttcatctcgcccctcgggaagcacctacgctacgtgctacgcctccacttcccggcgtccaacaatgtggctaagtacgaggctctggtcaacgggttgcgcatcgccatcgagctagggattcgacgcctcgacgctcgcggtgactcgcagctcgtcatcgaccaagtcatgaagaactcccactgccgcgacccgaagatggaggcctactgtgatgaggtttggcgcctggaagacaagttctatgggctcgagctcaaccacatcgcccggcgttacaacgagactgcggacgagctggctaaaatagcctcggggcgaacaacggttcccccggacgtcttctcccgagacctgcatcaaccctccgtcaagatcgacgacacgcccgagcccgaggcaccctcgacccagcccgaggtgccctcggctcagtccgaggcaccctcggctcagtccgaggcaccctcggctcggcccgaggcaccctcggttcagcccgagaaggcacccgggggctacacgcacctgttggtcgccatcgacaaattctccaagtggatcgaggtccgacccttaaacagcatcaggtccgaacaggcggtggcgttcttcacctacatcatccatcattttggggtcccgaactccatcatcaccgacaacggcacccagttcaccggcagaaagttcctagacttctgcgaggatcaccacatccgggtggactgggccgccgtggctcaccccatgacgaatgggcaagtagagcgtgccaacgacatgattctacaaggactcaagcctcggatctacaacgacctcaacaagttcggcaagcgatggatgaaggaactcccctcggtggtctggagtctgaggacaacgccgagccgagccacgggcttcacgccgttctttctagtctatggggccgaggccatcttgcccacagacttagaatacggttccccgaggacgagggcctacgccgaccaaagcaaccaaactagtcgagaagactcgttggaccagctggaagaggctcgggacatggccttactacactcggcgcggtaccagcagtccctgcgacgctaccacgcccgaggggtctggtcccgagacctccaggtgggcgacctggtgcttcggctgcgacaggacgcccgagggcggcacaagctcacgcctccctgggaagggccgtttgtcatcgccaaagttctgaagcccggaatgtacaagctgaccaacagtcaaggcgaggtctacagcaacgcttggaacatccaacagctacgtcgcttctacccttaa

SEQ ID NO: 18536 - DNA, 291 bp, Zea mays
  Peptide Sequence Number=SeqID_60315
atggtgggatccgtcgcggaggaggtggcagctgcagagtgggtgatcatgcagtgggattccactgtgtcggcgacgtcctcagtcgacggggatgaccagatgttgttgaacggtgcagccgaccacgccaagcagagtagtttctccgggcggtggacgacctccgccacctggcgctgccatcgtgggacttcgttggcagcccgtgtagtgactcgacgacctctagatcgaggcactcgctggcctcaactcgctctggatggccagccttgggggaggttatga

SEQ ID NO: 18537 - DNA, 171 bp, Zea mays
  Peptide Sequence Number=SeqID_60316
atgggcgcaagcggcggtatcttttctttctactccagggcgagcttggatcacggtggcatttttggtggcgtgtgctgtttcggcctgcgcaacctggatgagggaaggagggactggggacttatatctgcagaggcgggcggaagggtattttactcaaatcaatag

SEQ ID NO: 18538 - DNA, 468 bp, Zea mays
  Peptide Sequence Number=SeqID_60317
atggccaagcgaagtcatggcatctgcggcggcgcgggtgtagagcagaagagcgtgaatgcaaaggggcgcagaggaacacaaaggcgaaagggcgcagtcgattggaagagaatgcgaaagggtggcgtgcatagtccacgatacgcggaccgtgctattattttccattactcgaaaattatcaggcaacaacaaacaaaaaagaatcctccagatcctccaccggttggaatcgatcaagtggttgccgcccaaatgatggtactacaacaaatggcagaagtggttaacgaaatgcaaaatcagataagagaagaacgccaggaaatacgtcaagaccggctggagatgcaacaagcaataagacaagcacggttggaaagacaacaacaacaacgcccactacctccaccaccagctccaccaaactacatatatatattactatttataagacctaaatga

SEQ ID NO: 18539 - DNA, 222 bp, Zea mays
  Peptide Sequence Number=SeqID_60318
atggaggtcttcttcaaccttacagcagtgcgacgaacagggggcgttgttgaatgctcgaccacggcctcgacgacggagatgaaggcacgaaggagaggttcgacgaaggaggagcaggggaactccaaggtgtgctcgctagtggctggaatgtcctggaaagctcctacgacggcaacatcaatggtcgacgcggctatgctacggattttcctataa

SEQ ID NO: 18540 - DNA, 231 bp, Zea mays
  Peptide Sequence Number=SeqID_60319
atgaggctggggaacaggatccggcgcagctcgtatcccgggacgaagcttcagaagtgggagaaactctcgacgagcgagtacaccaagaaagacggaactctcgccaacgtgatcgctgacaagctcaagaccgagagcaggagcaagtcgagcaagagagcagggacagagctcacgcggggggctgggctgacctatttgcacacgaggagggagaaggagaggtag

SEQ ID NO: 18541 - DNA, 624 bp, Zea mays
  Peptide Sequence Number=SeqID_60320
atggggtgttacaggaagtcatccaagacagatggcaaggcggctagaacccttgccaagctcacgctcttccaccagttctatgtggtcatggttgggtacttgtatttcacccggatcattgtgtctgctctcaggacaatcactagctacaagtacagatgggtgagcattgcagccgaggagatgtcaaccatggcattctacatgttcacgttctacatgttctggctccgcattggcactggcactagactcggtctcgttggttcagggaagggctctggcttagttagctctgatctgggtgctgtcagtagtgaccaaggcattttttcagtctttgtttgggatcctggtggtcacgcgaagaacagcttggggacaagctatatttcaaggagtggggaatgtcagcaacgtccagagattcggacgccaaccatactaccatcggtgaagatggagaatgggccattgaaggggctgtcactacgaagaagcagcaagaaagaagagttgtcctacgcggccacgtcacagaagcgagacaacattacagtatatggtcccgaatggggttgtgtaattagggctgttgggccgagtatgtggagcttataa

SEQ ID NO: 18542 - DNA, 318 bp, Zea mays
  Peptide Sequence Number=SeqID_60321
atggagactcgtctatcacaacctacaacttattccgtggctgattctatttttgcttttccatctaatgatgagcttatgcttggtgacatggatgttttgatgattaggaaccttaaagatgaccatccaggtcttagtaaaggccaatatgtcaaggaggagaagctaggacattcacaacaagagaaagtcaagtctaatttaacttcgtctccacctcggagtctaggaccagtctgcactaaaacagatgcccaggatgcatccgaactccgattaggttgggattttacagatggaaagctaagaagataa

SEQ ID NO: 18543 - DNA, 366 bp, Zea mays
  Peptide Sequence Number=SeqID_60322
atgtcgcagagctccagaagggatgttcctgtcattgttattacaaaacagaaacaaaggcaagaagcaaaaggtgtgaaccctacaactactctcaagggtggtggtggaacacaagttgtgaagcgtcttacaccgctcttacaaggttcttaccagcactgcagctgtcaaacagtggccgatttgatagcccaaaaagtggatgtgattgtgaaggagtacctgttctattcaagagaaaggtggagctttgataaaaaggatcaaactgaaccaaaaacaaatataaaccagcaacaataccttgaccaaggacacaaactcaatacgacaggatctgaaaccaaattgtgcaaaggctaa

SEQ ID NO: 18544 - DNA, 282 bp, Zea mays
  Peptide Sequence Number=SeqID_60323
atggactccaaaggcaagaggaaggtgtccgatgagaaggagaggatccccattgacgtcaagcccaagggagaaaagatcgtcgactcaggatcaggaaaaagaaaggagagcaataagaagaagcacaaaaagaagatcatctactacaagagagcgatgattcttcttcctcaccaaaggtcgatgacacatctccttgccaaccttaaattgaaaaggacaaaagtctctagtcatgtcgttccttctaaaaccccgtgcgactcagagtgggtctaa

SEQ ID NO: 18545 - DNA, 1428 bp, Zea mays
  Peptide Sequence Number=SeqID_60324
atgtctatgaagaggcattttgcgatattcaccaccgcaagcctcccatggatgacaggaacatccatcaaccctttgttccgggctgcttatctggcaaaggatggtgataaggatgtcacactggtgatcccttggctttgtctaagggaccaagagttggtttaccctaacaatattgtatttgactcgccttccgagcaagagagctatgttcgccactggatcgaggagaggattgactttaggccatccttcagcatcaaattctacccaggaaagttttctaaagaaatgagaagcatcctccctgttggggatattacagaatgcattccagatgaagttgctgacgttgctgtattggaagagcccgagcatctaaattggtaccaccatgggcgaagatggaaaaataagttccgtcgagttataggaattgtccatacaaattatctagcatatgtaaggagagaaaagaatggtcaagttattgcttgtttcctaaagtatgctaacacttgggtaactcgaatctattgccacaagattatcagattgtcaggtgccacccaaaatctgcccaggtctgttatatgcaatgtccatggtgttaatccaaaatttcttgaggtaggcaagctaaagttgaggcagctgcagaatggggagaaagccttcacaaagggggcatactacatcgggaagatggtatggagtaagggatacagggagcttcttgatctgctgtccaaatatcagagcaagttggttggtcttgaagtggatttatatggcagcggagaagattctgatgaggtctgtgaatctgccaaacgtttaagtttgtctgtcaatgttcatcctggtcgtgatcatgcagatcccttgttccacgagtataaagtattcatcaatcccagcaccacagatgtggtctgtacgaccaccgctgaagccctggcaatgggaaagatagttatatgtgccaatcacccgtcaaatgagttcttcaagcagttccccaactgccgtgtctatgacaatgaagacgagtttgtacaactaaccctgaatgctctatcagagcagcctgctccattgacagacacgcagaggtacgagttgtcatgggacgctgcgactgaaagattcatcgaggcctctgatataaatcctcatgtgccggagtccagggcccatcaaaactctagggctttgttgcctgcttttctaagaactcgtaaactgaaacagaacttagaggatgcgtcagtttacctgcaccaagccctgtcaggtctggaagtcactcgctgtgcgtttggtgctgttcctaagacgctgcagcctgacgaacacctctgtaaagaccttggtttggctcctccggcaaagaagagaaggctgaaaattaagaagacgtaa

SEQ ID NO: 18546 - DNA, 213 bp, Zea mays
  Peptide Sequence Number=SeqID_60325
atggggctgtccatcgtggcccgagcatactgctggtccatcgagcgcgccgggcttggtgggtcgaacgactcagaggagacctcctcggaggaggtggaggactcatatgattccgaggagtggagtggcggcgagggcgacgaggacgacgatagtagcggtgacgacgacggtaatggcggtgttgacggtgacgacaaaggtggatga

SEQ ID NO: 18547 - DNA, 595 bp, Zea mays
  Peptide Sequence Number=SeqID_60326
cttgattcgtgaactgatggcggggctggggcttcctagtgccgaggagaaagggacgagcagagcagagcggcagagcagagcgggagggagtagaggcagcaggcagagcagagcgggagcgagcagagcagagaggcagagcgagcgggagggagcagagctgagctgcctgtgctattggacgcggcacttgctccaggactcacaggattcgcgtgctccaggactcaccattccactcgcgtgctccaggaaggtggagaaggggacgccgcagttgaacgtcgtacaccgccggcggccgcagcaagagggcagccacgacagggacgaacgcggcaaggaacaggtgcgcgggtcgcgcctcacggagccggccggccagttcctccagtggcccgaaccgcgccgcagcgaccagagctgcctgtgctattttgaggcgagtgcgagcaggagagagcgtcaccagcaccagcgtcggcttgagggatggagcggattggatctggcgacgcagagaggattggagctggcggcggctagggcttgcgggatggggctcgaccgctcgattgggaaagggagctaa

SEQ ID NO: 18548 - DNA, 363 bp, Zea mays
  Peptide Sequence Number=SeqID_60327
atggctaggttgtttatttgtcagactctgattgatgaattcttgtttcagagtgagctgctggctgccgagatcaattacatggccaaaagggagaatgagcttcagaatgaccacatgaacctcaggaccaaggacccaagaacatgccctataggccaccgaccagaagatcaacctgcaggacaccaagaacatgccctacaggccgttcaagtgccagtcctgctgcccaggattcttttgcccaggaccactaaattcttggcaattttaaatcgcctaatctatcgcacagcggcatccaagaacaataaagaacagggaatgagctactgggcttcagatctgatgatccattag

SEQ ID NO: 18549 - DNA, 309 bp, Zea mays
  Peptide Sequence Number=SeqID_60328
atgaagctccccgagcgaggaattggactctacctcaccggagacgccggatcaaggtcaccagacttcacccgagcgccggcgtacgtggaccgagttccacagaagggattgccatttaaactcattcttggctcaaagttaaggaaaatagaaaaggaaaaatattgtaatctcgctgacggggagtacatcctcgtgccggagcaaggagttgctcaggaggtagcaccagatccagaaccagagcctgccattgaggatctgcctgccccagctttggaaggcaagccccggttttatgcataa

SEQ ID NO: 18550 - DNA, 225 bp, Zea mays
  Peptide Sequence Number=SeqID_60329
atggggaagcccgtcccatcactcctcatgctccttctcagccgagtgaccgcacttgtaaccaccataaccggaatgggagaccacgtctcaggtcgcttgaggggtaaagtccgcgggcaggttcactcagacaacgcatccccatggatcgttgtccacagaccatcatcattccgatataaaaatggatacaatcaattcctgacctcgcgcgagtgctag

SEQ ID NO: 18551 - DNA, 192 bp, Zea mays
  Peptide Sequence Number=SeqID_60330
atggggaagcctgtcccatcactcctcatgctcctcctcagccgagtgaccgtacttgtacccaccataaccagaatgggagaccacgtatcaggtcacgtgaggggtaaagtctgcgggcaggttcactcagaaatgtttaaaggttttctggaaaaaccagtttacaccgaggaccctggcttttcctaa

SEQ ID NO: 18552 - DNA, 249 bp, Zea mays
  Peptide Sequence Number=SeqID_60331
atggctgttggaagactgctgtcgcatggcgcaccggacagtccggtgcgccaccggacactgtccgacgaccgttgcgcgcgaagtagccgttgctccactgtcgcaccggacagtccggtgaattatagcggagcgccctctgattttcccgaaggtgaggagttcagcgtcgagtaccctggtgcactggacactgtccggtggtgcactggacagtccggtgcgccagaccagggtgccttatag

SEQ ID NO: 18553 - DNA, 143 bp, Zea mays
  Peptide Sequence Number=SeqID_60332
atgaagaagagcctggccttttacttgcgtacctggagcagagagcacggatattgccccatccccaggccttacggcaagcacagaacggagggcggaaatcttgcccgggagcacagcatgatatatggattgccactcac

SEQ ID NO: 18554 - DNA, 2769 bp, Zea mays
  Peptide Sequence Number=SeqID_60333
atggagcgtcaaacagctcgcaggacccagactaatgtgacacagatgatggaatctatttttgccagtgtcagtcttgctaaagatctttctgctaggtgcaaaagcagagcattgcaagtcacggatgatgagatacaaagcacagcacaagacctggagaatgtcttgcagaatatatatgatgatctttgcaggataccagcttcagcatttggcagtagtgcttacatggatgtgcctattaaatcacagccaatgagggattgctgtaaggctgatatacccataaatgtaatgggcaacagacctaggacaaggtctctccgagataatgatactccgaggctggtggactttctcaagggaatgtaccatgaatcgcatgaatttagtgggcagatgttcaacactctcctagaggttacagaatacattgagccactgtatgatgcgttcatctgtgcactaacaaatgagataatgactgatcctgtgatgattgagagtggtgtgacatgtgacaggagagccatagaggagtatattgagaggtttgcagacagttctgaacctgtctattgtcctgtcacaaagatgacaatgcaaagtaagacaatggtgagcaatgcttccctgaagtgtgtaattgaagaatggacaatgagaaatgagatcatgcgtgtcaggattgctcgtactgccctttccctgtcaactacagacacaatggtgcttgaagctatacatgagctaaagttgctggccaagttgagggtgaagaacagggagctgatgcacaagatcggagtcaccaagttcttagcacggttgttggacaaccacaatgaccagattcagtttgaagctctcaagcttttgtgcttgttagctcaagatgaagaaggaaaggatatcatcggaaaaactaaggccattgccaggacaataaaattactgtcaagtaattctactgatgaaaggcatgcagccatctctttcttgctggagctttcggagtcacagttactgttggataatattggatcaacacctggaagcattctgatcctcactacaatgaagcttaacagttcagatgatccaattgctgctgcaagagctggagcagtccttaagaacctggagaagtgtccgaagaacatcaagtacatggctgaaagtggctacttagaacctcttcagagtcatctagtggaaggttacaaaacaggctcagaagagatacagatggagatggtcggctatctatgtgaactagtccaagagcaggagctcaccattgatatcaatagaagcacctcggaaatcctcgtcaagatggtgcgtggctgcaaccccatggtccgcaaggcagcgttgaatgtccttgcccagctttctttgcaccgccccaacaacaagatgcttgtcgacacaggcgctgtccctgtcatgattgaggaactgttcatcagaaaggtcgatgacgagcctgtgaactccatggccaatgccgccactgtccttgctaacattgtcgagtcaggcattgacccagacaccacggtggtgaacaaggaaggccatgtcctcacctcgaagtactccatctacaactttgtgcacatgctcaagtgcttcatgccggacgacctcaacctcagcgtcctccgcatccttctagcgctcaccgcgctcgccaagccactagacactgtggtctcggtcatcagggagaactaccgcggccattctatcatcgagctcatgggctcaccaacggaggtgctcagcctcgccgcgacaaggctgctcatcaccctgtctccacacattggacacaccatcgtagagaggctctgcaagacacaaggacagccacacaagctggtcaaaagcatcagccatgctgggcgcatcacagaacggcaagctacgttggccacgctcctcgcgaagctaccttaccggaacacctccctcaacatcgcgcttgtgaaggatggtgccgtgccagccatgctgagggcgataaaagaggtggagaacggcgctggtagatcaagcaggcaggctgtgccatacatggagggtctcgttggcacgctcgtgcggctcactgcgactctgttcagcccagaagtgttgaaggcggccatggaccacaatctggcctcggtgctcactgagctactcgatggagcagccggaagcgacgagttcaagaagaagaataccctactgaagctcctgaaggactcaaaggcgcacagcaacaagaagacctcactccaccaggtttgcgtttgcccggtgcaccgaggagtctgttctccagcggcgacattctgcctcctcgaggctggcgccttggagggcctcttgggatgcctcgagaacgacaacatccgggtggtggaggctgccctccgagcgctgtgcactctcctcgacgagagggtggacgtggagaagagcgtagcggcccttgctgagctcgacgttgctcggcgcgtgcttgctgcgctgaggcagcaccggcaaaacgtgctgtggcagaagtgcttctgcgtggtggagaagctcctggaccacggcgacgaccgatgcgtgagggaggtgacaggcgatcggatgctgcccacggcgttagtgagcgccttccacagaggggacgagagcactaagcagacggccgagagcatcctccggagactacacaagatgcctgattactctgcaacctatgtatccatggagttctag

SEQ ID NO: 18555 - DNA, 297 bp, Zea mays
  Peptide Sequence Number=SeqID_60334
atggccaactctggtgtcaccgcgttgggccacgtcctggtttgttgggcgctggtgttcgaggtcggcatggggagcaaaggcgcggtgctgagcagtgccatctcctacttcgtcaacctgaccatgctaatgctagctctctatggcaggctgtccagtgtccagcgtgtacgagaggacatggactggattctccatggaggccttcagagaccttctccggttcaccaggctctccatcccgatcccgtcgacgatgatggtctggtgagacaactagcacctacatcttga

SEQ ID NO: 18556 - DNA, 1113 bp, Zea mays
  Peptide Sequence Number=SeqID_60335
atggctgttggagatgtagtattttcccctactttcattcttcaaggatttctcaagagatatgtatttagcttcctggctaagcttcatctgtggatgaaggagcaatttcccttctttttctctttatggctaatgcaagatgatatgatgcatgatgatgcttggattgatatgatgatagaaaaatattataataagactctgcatcccctcaggaacgtcttgggagtctcttcacctttactaggtggtattttatctctgcatccccttaggaacgacttaggagcttcttcacctttactagatgatattttagctctgcattcccttaggaacgactttggagaatcttcacctttactaggtggtattttgagctctgcatctattagtgttttatgtctgaccgcacacctggggttaccctcgtggtgcttttgggtggtgtctactgagctatgggatgctaatgagatgataatggcagggtcccccttggccttatatacacgaccgtggggggctttccgcacacatgttgatcacactcttcctacttatctcctaattagtagcaaacaacttctactatttcgtggaaaatccggcgcctccatgctgagctatccccggcaatttaggatgtcgggcacgagaacgaacaggtctcaccgcttcagaaaatctcagagaatccaggcgaggaaaaagaggcaagaaggggcactgcccggtcgacgagaagcgcaagcgcccccaagccctccctcggaggactttggggactcagagtactcagaggaagaattctcctccgagaatgattgcacccacgctccggcgtccccagtggtgttgtctgatgacttggatgactccatgggactgtcagccgtggagcgggcgtacattcggtccgtcgagcgtgtagggctcggcgggtcggatgactcggaggaggaggcggaggactcctcggactccaaggagggtagcgacggcggcagcagcgacgacagcagcgggggcggcgagggccgcggtcttgcgttcattagagattctgaggttggtccgcggtcggggctttgttcgaagggattgtaa

SEQ ID NO: 18557 - DNA, 180 bp, Zea mays
  Peptide Sequence Number=SeqID_60336
atgaagagtttgagtccgaagaagaagagtttgatgaagatgaggatgaggatgagatggatgaaaccggcgtgtgttgctgcctgctgtcccttcatgtttgtgatttctaaaggctcctatggtgctgatcagtacttaatggatgggagaagggtcagacctcagataagtacctaa

SEQ ID NO: 18558 - DNA, 372 bp, Zea mays
  Peptide Sequence Number=SeqID_60337
atgggcatagtatcaagcccatatcctctacccgcgggtagaggatacccgcgggcatgcccgattacccgccataaagacattttcaacaattcacttgccgctggatctagaggtcctggagccgggagcacgagctccgggagtagggacggccgccagccactgaccgcagagagcaggtccgcggccgccgggatgtcgcaggccgacgggatctggtatgctggctgctggaagtcacagatcaccgggagccgggagtcgcagatcgccgggagccgagagcaagagctccgggagcagggacggtcgccgggaggtctgcgggccaggaccgggagtcgctgctcgctggccgtcgacacttga

SEQ ID NO: 18559 - DNA, 531 bp, Zea mays
  Peptide Sequence Number=SeqID_60338
atggcgagcggcagggcggctacatccagttccatcctcgtcaacgccgccggcaccagcaagaccctgtccgcatcgctatggtgggactccttcgtcgtcctctccgacgacctcgaccgagccactgctggcccctctgtcccggatgccctcgctaagcggatcaaaagccaccacgcgtggctccgagggtcggtctctatgttcgggaagccgaacgacgcgtccaggagcgcactggaagttggcgaggttgccgtcggggagcgtcgcctcactgtcaagccagagctcaaggaggccgcgcttcgtgcaagcaaatgcctgaacctggatgaagtgcaatcatacattctggtcaagagatcttcagaagtctctccaacaatccgtgatgctgatgctgaggagtttcttcatctgtacagagcatgggtcattgttctgttagccgtgaggacacctagagatatcagacacactggagccgcatctacgggaacatgggagaagcgtcggagacaatga

SEQ ID NO: 18560 - DNA, 300 bp, Zea mays
  Peptide Sequence Number=SeqID_60339
atggtggttgtcgcagtatcacttaacatattgttggagctggagaagacactcacgaatctccgtgaggaaggcatcgcaccacctccatttgagttgcccctgcgacgggcagaagaatcgacatcgaggtcggtcgtacaccacctagaagggtgtggtgtgaagcgccatgtggaacaaaggtggaacctcgtgctcaagcgaagctcgacgtcggccatcttgaaggtcacgccacatgtgactggtgaagactgggccatggtcgctaccgatggaggtggggaagacgtgtag

SEQ ID NO: 18561 - DNA, 201 bp, Zea mays
  Peptide Sequence Number=SeqID_60340
atgggatcccacgccgttctagaggatgtggcagtcacccctccagaatgccatgcagatgacctcaaagtcgcacaagaagggcgcaaggttcgaaggagggtggcattgggcatgacaagcagggtgacagagggtgtcacaacggtggtggtggagatggacgagaacgtcatcgccttgtacctcgacatcatgtag

SEQ ID NO: 18562 - DNA, 351 bp, Zea mays
  Peptide Sequence Number=SeqID_60341
atggctgggaagggggaatggcgagctggagacgaccgagaaggaggaatccgagcagggccagggcgcgcgcagggaggagctgaggagatgggcgcgcgagatccggcaagtcagggaacagggatgaccgacgagctgaagccgggcgcgagggacggtgcggcatggaagcagtcgcgccatgggagcagcgatcgagctaggtatcagagagagagagagagagagcactggcagaggaagagggaggagctggaggcgcggcgtgctgggagatggagagaaggagatgagctcggctggagagggcaccgcaaggaagataaggatggcgtgcgtagaagataa

SEQ ID NO: 18563 - DNA, 246 bp, Zea mays
  Peptide Sequence Number=SeqID_60342
atgtccggagtgtcagtccctgtgttctaccgcaccaatacgaatgtatcccggcccaaagtacaaaaggggcaatactcgacggtggagtactcaccaattgagaagaagatagatgtagtaggccacgacaggatgcgaccagatgaagtaaaggtatccgacgagttggtcccacggtcagcgacccagcgcatcgggccaaggtggcagtggcgagacacagcgcgcgcggtgttgggctga

SEQ ID NO: 18564 - DNA, 246 bp, Zea mays
  Peptide Sequence Number=SeqID_60343
atggcgcaccggacagtgtccggtgcaccagtgcggtacagagttaaactagccactctcgggaaaatggaggcacgctccgctataattcaccagactgtcgagtgtgccaccggactgtccgatcacgccaaaagggagatcatgaccggcgaaaaggctgcaagctcggggaggactctctcaagggagttcggcaacaaacacaaggaggactccctccataaagtcgcatcggagaggtga

SEQ ID NO: 18565 - DNA, 198 bp, Zea mays
  Peptide Sequence Number=SeqID_60344
atgatgttgcaaagtgggagggatgtttttgaaaatagaaccggatggtggatccatcatggccatgatgggttcaacatcagaaaagatgtacctctgcaggtgaagaagcagcaaacttttgttgcttctgttcgaaggtggtaccgaatgaagaacaccaagactagagctgcgggtgggaaggccctccgttaa

SEQ ID NO: 18566 - DNA, 666 bp, Zea mays
  Peptide Sequence Number=SeqID_60345
atgtcaacaccacacattgattgcttgctggatggactaaagccaatacaggttgctgctttgagaaataaccgtgaatttctggaacttcttttagcattaactatcccatttctaagtgtgtcaaattggagttttgatggaatcacaaaatacatgttgtctaaagctgctgtgggagagtcacaagtaaaagaagctacatctctgaattcagccagtttagccggaccgcaatctgctgggtcacaagtaaaagaagctacatctctgaattcagccagtttagccggaccgcaatctgctggggtgtcatctagcgcaaaaggggattcgatggaagctaatttgagaggttatgatgcctataaaaatgaaaattacattggagcggtggatgcttacacacaggccattgacttggatcctagcaatgccacactctggtcaaacaagagcctttgctggttgttgcttgggatggctgaaactgccttggaggatgcaaagcaatctcgaacattgagaccagattcggggatagcttgctacagggaaggtgcggcattgcacgagctacagaggttttttgaagctgcaattgccttttatgaaggggctaatcttaaaccagagaaccaagaatatctcagcgccttcatgtag

SEQ ID NO: 18567 - DNA, 267 bp, Zea mays
  Peptide Sequence Number=SeqID_60346
atggggacggaaagcctactgataatgcatcaagattctacaaatgggggaagagaaggaagtttgctaaaggatcttaaatattgcgtctttggacttgggaacacgcagtatgagcattttaataaggttgcaaagatggtgcatgagctgctacaagaacagggtgggaaacgccttgttcctgttggccttgccttggagacgatgatgagtgcatcgaggatttcaccgcatggtcagatggtgatgagctcgcagatataa

SEQ ID NO: 18568 - DNA, 377 bp, Zea mays
  Peptide Sequence Number=SeqID_60347
atgatccactacgcgagggcgatcacgaatgcctcccttagccaggtttcccagtactgggaccctttgctcggcgccatagcctgtggcgccgaggtacctgtcgcgctggcgagtggcgctgacgtggcacctagctcggcgccacagatcttggcgccgagccaggatataggtggaaacccgccttctctctgctcactcgatcacgcacgccgccgccgcgccctccgcgcccgccccacgcccgccccaccctcgccgccggccgcacccgccgcgcccacgccggccgcgccctccgtgccccacgctccgacgccggccgcgcccgccgacccgcccatgctcgccgccaaccgtcgctcccccgccac

SEQ ID NO: 18569 - DNA, 354 bp, Zea mays
  Peptide Sequence Number=SeqID_60348
atggtctgctgcaaggagcaccagaggatctacactgagtggttcgccctcgccgactcaaaaaactcagatagtgagcctgacttcgaagagaccgaacaaaaaacaataaatgagccacatgtcaatgttagaagtgaacctcttacaacacgtcgttgtgcccttcaaccgtggatggatggtagcagtagcagcaacagtactgttgacctcccagatggtgtacctccagctccttcgagaagcaagaatgacaggctttctaaagaggaaatgattgcaacgatggatgaagttgttcagggacgcaagatgcaagtggaaaaagccactaaagagagtgaagattga

SEQ ID NO: 18570 - DNA, 1536 bp, Zea mays
  Peptide Sequence Number=SeqID_60349
atggcggccgccgccatctctcacctccgccggggcgcgcagcaccacgcagtgctatgcatctcgctgtcgcgccgccgcttctcctcctccgccgtggccgcggcctccccgctcgccgcggccgcgcgccgcctcctctccacgacggcagactccgccaccgcgtccacgtcgggggagcactacaagccgccgcccttcgaccccttccgcgccgccaccctatcgccctctgctccgccgctagagtcggcccggctcgaggatgagcccccgagcagtccgccgccgcaggatgaggcggccgcgtccgtggcggcgcacgagcaggcgacgctggcctgccaggagctggaattggagggcctcaaggcgggggtggaggcggtgaagagcagggaggagtcgccggaggagaaggaggcgtggtggctgctcagccgagcggtcgtcaactactgcggtagcgccgtcgggacggtggccgcgaacgatccgtccaccagccagatgctcaattatgaccaggtgttcattagggacttcgtgccatcggccatcgcgttcctcctcaagggtgagagcgatattgtgaagaacttcctgctccacacgttgcagctccaggctctgttctattctgctttacgctgtgcccgagaaatgattggggtaaccgatggatccaagaacttgatccgtgctattaacaacaggctcagtgctctgtcatttcacatcagggagtattattgggttgatatgaagaagataaatgagatttatcgctataagactgaggagtattcccatgatgctattaacaaattcaacatctacccagagcaaattccatcttggcttgcagactggattcctgtgaaaggcggttaccttataggcaatctgcagccagctcacatggatttcaggtttttctccctagggaatctgtgggcgattgtctcatctcttgctactcaaaggcaagcagagggtattctgaaccttattgaagccaaatgggatgacatagtagccaacatgcctcttaaaatatgttaccctgcactagagtatgaggaatggcgtatcatcactggcagtgatcccaaaaacacgccctggtcgtatcataatggtggatcttggcctacattgttatggcagttcaccttggcttgtatcaagatgggtaggcgtgacttggcacggagggcagttgaggtggcagaaaagaggctctcagatgacaagtggccagagtattatgacaccaggacaggaaggttcattgggaagcaatcacggctatatcaaacttggagcattgctggatatcttagctctaagatgttattggactgtccggagatggcatccatactagtatgcgatgaagacttcgagctgctggaaggttgtgcttgcagcttgaataagaatgctcgcaccaaatgctcacgtcgtgcggccaagtcgcagacagcatgttcagttcagaggactggacctcggtacgtcgcagaatga

SEQ ID NO: 18571 - DNA, 183 bp, Zea mays
  Peptide Sequence Number=SeqID_60350
atgggaatgcggcggggtgagtggaggaggactggggctgtggagtcgtcgcgccgtcgcggcttcaccgttcgtgggagaagctcatttacattacaacaggtgttgggggttttcttctccgccaaaggtcctctaagtaaaaacaccttcggcaagataacaactttagagaacaagtga

SEQ ID NO: 18572 - DNA, 379 bp, Zea mays
  Peptide Sequence Number=SeqID_60351
tgtatgggcgaaggctctgatagatcttctctccgtcgactcgcagcgctgctcggagcccgagattggtcctagaagcttcggagtgccgcgtggagggtgtccgcctcacaccccgggtgccctgcgtggtgggggcctgggaattgctcaccggagctgcactgctgcaggatgggtttctcctgtgatggcggcgcccgccctgcccccggcgctgcggtgcgcccccgacacgcgcagcgcgtttccgcgcgcgcagccccacgcgcgcggtggtggtgacgaggatgatggttatgattatgcttatggtaatggagaagatgaagctgtggaaggagacttccaggagttccaagactacgacgagttctag

SEQ ID NO: 18573 - DNA, 2268 bp, Zea mays
  Peptide Sequence Number=SeqID_60352
atggcgaggctgatgatttgcctccaccaccccctttggctgctggtcaatttgaagtatgaagatgatacaccggttgatcggaaagggtcgggaagaaaagtgatcgaaaaactgcagcaaacttatgctgctgaacttgcaaataaagattttgcatatgatggtgagaagagcctgtttacaattggtgcccttcctcaagttaaaatggaattcactgttgtggatgaagacgtttcaactggaaagactcctgcaaatggcagtccaggcaatgatagtcctcctggaagtgacaggaaaagggtccgaaggccttacaatacaaagacatataaggttgaactatcttttgcggcaaaaatccctatgagtgcaatctcacaggctttgaggggtcaggagtcagagcacactcaggaagcaattcgagtgattgacattattctgaggcagcactcagctaagcagggttgcctattagtaaggcaatcgttcttccacaataatccttccaattttgttgacctgggtggtggtgtagtgggatgtagagggttccattctagttttcgtgcaacccagagtggactttcactcaatatcgatgtgtccaccacaatgatagtgaaacctggtcctgtcattgactttctgattgccaatcagaaagttaatgatccaagcatgattgattgggcaaaggccaagcgctcactgaagaacttaaggataaaaacaagtccggcgaaccaagaacagaagattgttggtctcagcgacaggcccttgccattcacactgaaacataaaaatggtgaatctgaagagatcactgtttttgattactttgtaaagaaccgtggcataaagctggaatattctggtgatcttccttgtatcaatgtgggaaaaccaaagcgtccaacttattttccagttgagttatgcagtcttcttcctttgcaacggtacactaaagcattgagcacacttcaaagatcatcactcgttgagaaatctaggcagaaaccacaagaaaggatgtctgttttgtctgatgtgctgcaaagaagcaactatgatgcagaacccatgctgaaggcttgtgggattacaattgctagaaatttcatagaagttgatggtagggtactgcagccccctaagcttaaagctgggaacggagaagacatttttacgcgcaatggcagatggaatttcaataataagaagctcattagagctagcagtgtcgagaaatgggcagtagtaaacttttctgcacgatgcaatgtccgggatcttgtccgtgatctcatcaagtgtggaggcatgaagggcattatggttgatgcaccatttgctgtatttgatgagaatccttcaatgagacggtcacctgctgtaagaagggttgaagacatgtttgaacaagtgaaaactaagcttcctggagcacccaagtttcttttcattatgccattgacctttacagggccttggaagaagaaatgccttgctgaatttgggatcgttacacagtgtgtggcaccaactagagtcaatgatcagtatcttacaaatgtcttgttaaagattaacgcaaagttgggtggcttgaattcgttgctccaaattgaaacatccccagcaattcctctcgtatccaaggtcccaactataatcttgggtatggacgtatcacacggatctcctggacattctgatataccgtctgttgctgctgttgttagttctcgtgaatggcctcttatctcaaaatacagagcatctgtccgcacccaatcaccaaaaatggaaatgattgactcgttgtttaagccacgggaaactgatgacgatggtctgattcgggagtgtctgattgacttctacaccagttcagggaagagaaagcccgaccaagtcatcatcttcaggtgttgtggttcctcttatccaagtatccagtactgcgtgcttgtccacattaacatgaaatggaatcccaagttcacattgatcattgcccagaagaatcaccacactaaatttttcattcctggaaagccagataatgttccagctggcactgttgttgacaacaaagtctgtcatccaaggaacttcgatttctacatgtgttcacatgctggaatgattggaactaccaggccaactcactatcacatcctgcatgacgagataggcttcaatcctgatgacctgcaggagctggtgcactcgctctcttatgtgtaa

SEQ ID NO: 18574 - DNA, 411 bp, Zea mays
  Peptide Sequence Number=SeqID_60353
atgttcaacgtgaaataccttttacatccgctgcttgattgctgtcggttacctacttcccgcctttttgcgctgccgacatacaggggaaccgtaacggcaattcgacctttaggacgtgctgggttgatggataatctctctccagccactctgctcaacagtatctcctgtcttggcgccctaacatctgatgtctctactgcgagacccaagcctattcacaagtattgcaaaaatgtatatgatatctcaagcatcgtgaccccccttcttgaagatctttgcaagtctcccgaagagcaactcgatgaggtcttaagagaccttgacaccgctgtcaatgaagcttcaggccttattggaaactggcaccagacaaccagcaaaatgtatttcgtaagtgcatag

SEQ ID NO: 18575 - DNA, 756 bp, Zea mays
  Peptide Sequence Number=SeqID_60354
atggcgggcccgtgggacacgcacgcgtcgacgagccgggcgcccgcgggccccgacggggaggcggagggcgcgtcgccggactcgctgcggaacacgccctccaacatcgcgcggctggaggacgcgatcggggcactgcgcggcgcgccgcaaagggaggaagagctgcttgcgtactggtggagggagtacgctgaatgcagtgcaggaccaagaggatccttggttgaaagtgatgattctgcatatctttataaggttgaggaagagcgggttggggttcctgtgaaaggtggactatatgagcctgctgttcttcaggttgatttgatgaggcggcattgcttccctgtgtactggaatggggaaaaccggcgtgtcttgagaggccactggtttgctcgcaaaggtggcgtcgactggattcccgtgcgcgaggatgtctctgaacaacttgagttagcgtataattgtcagcaaacaactgaacaccctgttgttgtcaaaactaggtctggcatcgtcggaaatttcaaccttcaggcctatttgcagcaagggttgaccttcaaggaagtacaccggatttgcatgctctttttactggagaggatgatacttgggaagcttgggcttgtctttgatacaggtcctaagtttggtagcaacacaatcaaattaagacgcggatatttctgttctgaatctgcaagtacaaagccttcacaggaaagccacatatcatttcattaa

SEQ ID NO: 18576 - DNA, 1953 bp, Zea mays
  Peptide Sequence Number=SeqID_60355
atggtggatgaattgcgtcagaaaaaagaagaggaaatggatgattactgctctcaggttccagttggtcatctggtattcatggttcatggcattggacagaggctggagaaagctaatcttgttgatgatgttgttgatttccgtcgtgtaactgctaacctagctgaaagatacttaacttcgtatcaaagaagtacccagagggttctatttataccctgtcagtggaggaagggcttgaagctcagtggtgaaagtactgttgagaaactcactttggatggagttaagggccttcgagtcgcattaggtgccacagttcatgatgttttatattatatgagtcctatctactgtcagcatattattgactcggtctcgaaccagttgaacaaactgtacatgaaatttctaaagagaaatcctggttacagtggaaaggtttcattgtatggccactcgttaggaagtgttttgtcgtatgatatactttgtcatcaagaatccctttgggccccatttccaacagagtatctgaacatggaaacatctgatcgaaatcaaggagcaaaatcagccaatgaagctgatctgcatgattcaggcgcaaaggatcatgatacttctagtctagggtattcttgtgctgataatgaaaacagtgtcattgatgaagatagcaccagaactgacgtgtcatgtatggacagcatcctcccatcatgtgtgcttgaggattcaccaaataaccatgacactgtcgtgcctcgtggtgcggttgttgctgatcaaaatggagaagaaaagaaggttgagaattatcagtcggtgtatgctgaggaaggaacaacttcaggtgtaatcacaaaaaaggctgaaggatcaagcatttcaagatctgctaaggaagtccatgaagaggtcctcgacaaagaaaaattgatggtccttgccaaagacaaattgatcctttcactagaagaagaggtgaaatgtcttaaagctaaactagatcagcttgaacaacataatcatctagtgactgaaaacaccagtggtgttgagtatcatgaagggcaaaattataatcatgccttgaactctggcaaacttttcgtggcacaagaaagtacaaaccagtcctactcaccgcaaatcaaatacacgaaactaaactttaaggttgatacattctttgctgttggatctcccttgggtgtcttcctttccctgcgtaatgtccgtattggtattggcaaaggacaagactattggcaagataagaacgtaattgaagagatgccatgctgccggcagatgttcaatatttttcatccttttgaccctgtagcatacagaattgaaccacttgtatgtgaagattatctaaagaagcgtcctgtaattgttccctaccatagaggcggaaagaggatacatgttggagtgcaggagttcagagaagatatttctgcacgttctcaagcaattgcccgtcaattgaagtcactgaaggtaagttgttcacttctgcaggtatgtgttatgcttgtgaatgatctagaagtgaacgctgttaacgtcaaagcagtagctgctatactagcattgagcagaaatgacacagaaggagaaaacatttcagcatccatatctatctgctttgggagctcatacattttcactggcctgtggatgtcctgtagcaactattggcgagatcatgatactgctctcttcattctcaaacatttgtatcgtgatatacccgaggatcctccaagcgatgtcattgaaaggatgcctattaaactattttatgagagagatccagttgaggaagaaacgcctgtgacgttttcagatcatgcagcaattaaggaattctgcagaaaggtgaaagcttactcaagaaaaatggaggatgatgccaactgccaagcctcgtga

SEQ ID NO: 18577 - DNA, 912 bp, Zea mays
  Peptide Sequence Number=SeqID_60356
atgccgctggggaccctctcgccgggcaactcggcgacgtggacgtcgcccaacagcaccttctcgctcggcttcacggcgtccgcgccctccccgtcgctcttcgtcgccgccatcacctacgccagcggcgtgcccgtctggtccgcgggcaacggcgccgccgttgactcggggagctcgctctgcttctcgtccaacggcgacctccagcccgtcaacggatccggggccgtgctctggtcctccaacacggggggccagaacgtgtccgccgcggccgtccaggagagcggcaacctcgtgctcaaggacaaccccggggcagcaacgccgccacggaggagtggtcggccgtggcggaccagtgctagctacaacggcacgtcgccggtctgcgggtgcccgtcgcttaacttccagctctccgacccttccaagccgcgcgccggctgcacgcgcaaggtcgagctcgccagctgccccggcaactccaccacgctcgagctcgacaacacgcagttcctcacctacccgccggagatcaccacagagcagttcttcgtcggcatcaccgcctgccgcctcaactgcctctccggcggctgctttttcgcgaatccggctcccaactttttcaataactgcgagcctattgtggacatcaactgcctctccggcggctcctgcgttgcgtccaccgcgctctctgacggctctggcctctgcttcctcaaggtgtccagcttcgtcagcggctaccagtcggccgcgctgcccagcacgtctttcgtcaaggtcttccgtgggggaacgacggcgggggacaacttccgtggggaacgacggcgggggtgtttggagatctctggcagcgaggagaataaacagagctctctggtgcgtttctga

SEQ ID NO: 18578 - DNA, 276 bp, Zea mays
  Peptide Sequence Number=SeqID_60357
atgtcgccgacgaggatgcttgcggaggggcacctgcgggtggccaccggcgggggcgcgccggcggacggcgggatcgccgtcagacacctcccgcaccatcaccccactaagaaagtggcagggttgtatggttcacttcttaaatatcatgttcaggtcatccgcacatttcttcatgacatgtttgtgacattggaagtgcttttgcattatgaatttgtcaacatgacaatgttgggtgggaaactggaaaagacaatcatgaaggtgtaa

SEQ ID NO: 18579 - DNA, 159 bp, Zea mays
  Peptide Sequence Number=SeqID_60358
atggatggaagcaagaagagctttgaggtatcgagtgcatgggagaaggttaaggaggccaaggaacccaaagctagggggtgttggagctcaagaatggcaatcgagatcaattcatggagacttggagttttggagtccaatatcgacctcaaatag

SEQ ID NO: 18580 - DNA, 2829 bp, Zea mays
  Peptide Sequence Number=SeqID_60359
atgaggcgccactctgtgtctgtggatgccccactgtcaagaaccttggtgcagctcaagcgagtgaggtcgctgcgggatccagcgacaaactcgatgagcaagtacgcgtctccttccgatcacatgatctgggagactgcttctagcaatggggtgactccggagcttggcaggtcagcacaccatcacctggttggggaagacgaagatgtgggagctgagcctactacaatggggtcagagcggagtttccggggaccaagcgcaaggactgcatcgtataggaaatcttctgctgtcaggatcagaggactgaacccaccaagaagcaagcaggttcaccgtgtccgccaagacggccaccgcaagtcattggattctaaccactcaaaccatagctctatccgtcaattggcagacaatatggtcagcaatgtggatgcagataaggaagagggggaagtgaattcctatgaaagaccaaaacttgcaatgccagataagtctgacgaagaggtgaaaatgccaggctgctccaaatccaggagcaagtcttctgctgcaatgagccgtgttgggagcccctgcatgtcagccagtgaggcacgctcagttgggtcaagaagaagcactttggggcatggaaccgaggatacacgactgaggtcaaatgatgtcgtgggatccaatttcagtggctgtggtataagctactgctggtcaggagcgtcaaagtaccgggagctttattctgacagcgatggtccagaccaacctctcttatccacagatgggattgaggcagcattccaaggcaatgtaccatacactgagacactgaggtgtctaagccagaagttccgccctcgttccttcagtgaactgattggcctaaatgtcgttgcccagtccctcctatattccacttgcaaaggaaaagttgctccaatgtacttgttccatggcccccggggtacaggcaagacatccacggcaaggatttttgccgcggcactgaactgtgtatctcttgaggagcaaaggccgtgtgggttctgtaaagagtgtgtcattcttttctctgggaagagcagagatgtgaaagagcttgacgctgcgaaaatggatcgtctaggccgagtgaaggcacttctcaagagcgcatcgctcgtgccatactcctcgcgcttcaaggtcttcatagtagatgagtgccacctcttgcgagaagatgcatggtcagcaatactgaagagccttgacgagccataccggcacacggtgtacattatgatcacttctgacatagaaagcctgcctcgcgcttccatcacacattgtcagaagttccattttccaaagataaaggtggcggatattgtctacaggttggagaggatctgtatagaagaaggattggaatttgaccatgatgggttgtacttcattgctgcaaagtctaatggttctcttagagattcagaaataatgcttgatcaactcagtttgcttgggaagaaggtcacaatttctcttgtgcatgaacttgtaggatctgtgtctgatgatgagttgattgaattgcttgatctagcgttgtcatccgacacaaccaatacctttagcaccaatgaacctaaccctgttgctgaaacaaatgatatgcatgcacattcagtaactggatatacagatgactgggtttccaaggtgcactcaagtgccaatttttgccaggcatgtaacagcagcaagtccaactgttctgagagacactgtaggcggcttaagctcgagaacatatggaggagagccattggaaagtgtcgatctaggtcagctaaaagtttcctcaggaaagaaggcttcttatcgtcggttcacgtcaccgaagagctggccatagcagaagttggttttgaacacccagatcacctgtcaagagcggagaaaatgcaaagcctaatagaatcctctttgcaacacgttcttgggtgcaatgtggagatcagattcaaactcgtgccatgcccagtgagcaaagatgctaggttgaagagacagccgttcagctttctcaactgctctggccggaagcaagagctgtcagattcagtcgtgactgatgaagacgaagctgcgagggggcctggagcaagagagacaccgcttaaaggctacacctctagccagcaggaatcaccatacaccatgcgacgtgtcgattcgaaaccaacaacggtccacggttgcgaggatgacgcccggagtaccttgacgtcaagcagatccacggcagatgacctgacaaggacgtgcaggtcggagactggctacccaaagggtgtgcgtgagcagggccgctctgatggcacgcagcaggagcctgacctacagccgaactgcttctcgcgaacgctcaagcttcagaagaagctgctgtcttctggcgcagcgcacaccatctgtctgagggtccagccacataacaagatggatttcctgcctaagaaagagttcgatacgtacttctgcgcgtatgagccctacgagcagtgtccaagatcagattcaagagctacttacagttcaagagacgatgacttgcagccgtttagccacacgatctcatacagccataccgtggagcaagaattcacgctttggctcgaatctactctgctggagagccccaaaacagtccatgtaatggaggaaagaacgagtgaactgggtggaacaaatcgattctgctacgagattttaccaattttgcccgaagctggagacatggacaccacccgcagctgcggggacaaattttga

SEQ ID NO: 18581 - DNA, 714 bp, Zea mays
  Peptide Sequence Number=SeqID_60360
atgtggtcacatttggctaatctgagagcttctggcggcagcttccatgagcactataatccattctatgacccagtaaatcataatggtgcactattgccccctgctgcagcacttgccccaacactctggccccagttttttttgaggtggacatgccccattgagtcacaaggtggtgatcttgaatcccagtggcatgctatgaataaaaaatatgcagatacaatgaaggcaaaggatattgctgagtggagggcaaaggatatcaaattgaaattggaatctatgaaacaagacctgcagagggagaaacgtattaatagtacagctctagccgcagcccgaagtgctcaaagggagaatgctgcaattaagaaggcaatagaatctatagggtgcacaattaaattttcgacaagcgaaaacgaggacagaactgaagtgctgtcatgttcattaggaagaggcacagatggtagagctcagcaagatgaaaacggtgacttctctgtagcaattgaggacagcctggtctcggatgcaccggcggaccatttttgcgaatcactctgccccttccgcacaagagaagggtgcagatggccagatgctccgtgtgcacagcttggaagtcagtttgttggtttgaaggcaaattttgatgcttttgaccggctgtcaatacatgactgctattttggaccggagtag

SEQ ID NO: 18582 - DNA, 1014 bp, Zea mays
  Peptide Sequence Number=SeqID_60361
atgcaccatggcgttgttgcccctgagctagaacgcgccatacgttctcgtctggctcacggggtgctccaggttcttgtccagtggaagggcgagttggcaacatctactactcgggaagacattgagctgttccgcgtcaagaaattgtacataattgatgcccggccaagagcaaatgctatagcaaatggggcaaagggagggggctcagaatcatcttctaactaccataaatctgaggttctgtttttaggaatacaaaacatccacaccatgagagagagtctttctcgccttagggactatgtggatgctcatggctcaatttcatcaaatgggagcccttcagctgtatctgttgttggagatcggaggaaccgtggatcaacctggggtggaggcaatctaaatagcatgacatcattttcttcaacactgggggaatggctaaaccatatccagaatattctggttggtgcttcatggattgctgcacaaatttcagaagaagcagcgtcagttcttgtacattgcagtgatggatgggaccgcacaacccagttggtttcacttgcttgtttattgcttgatccctattatcgaactttcagtggattccaggctcttgttgaaaaggattggttagcatttggtcatccatttgcagagagaatgggagttccaacagtagctgagaatggggggtcacagtatgagctactaaggcaaccttcgctcggaaatttaagcagttccccgagtaggaacactttagggccgccagggccatcctctaattctccagtgcaatcccagacatcaaacaacacttcaccaatattgttacagtggcttgattgtatctcacagttgttacgtctgtacccatctgcatttcagttttcatctggaaaactgataagcagcatgttgtcctcaattcctcatggcctcaccaccacaaattctctctcccctgtatacacacactaccgtatagccccatgctaa

SEQ ID NO: 18583 - DNA, 831 bp, Zea mays
  Peptide Sequence Number=SeqID_60362
atggccgacaccgcgctcccgccctcccacaagctcctccctacggtttccctgccgctcctcccctcgtccacccgcgccgcgccgctcctcctctgcgccagccgccgcctgccgcccgcgcccctcgttgcctcatccgacgccgtcgagacgaacattgaatgggtcgacgacgacgaggaggaggctggagaagccttcgacgaggagggtggggatgttgaggaggaggtgctggcctcaggcgacgagggtgagggggagtacgccgcggtggagccgcccgaggaggcaaaggtctacgttgggaacctcccctacgacatcgaaagcgagggactcgcgcagctcttcgaccaggccggcgtcgtcgaggtcgccgaggttactgttgctgttaagaaatattcctttagtgacatttgttctattgaggtcgttatttacaacaaagagactggccagagccgtgggtttggctttgttaccatgagcactattgaggaagctgataaagccattgagatgttcaaccgctatgacattagtgggaggcttctgaatgtaaacagggcatctcctaggggcactcgcatggaaaggcctccgagacaatttgcgcctgctttcagagcttatgttggcaacttgccatggcaagctgatgactctaggctggtgcaattgttcagcgagtacggagaagtcgttaatgctgcggttgtctatgatagagaaaccgggcgctcacgaggattcggttttgtaacgatggtgtcgaaggaggaactcgacgacgctatctctgccctggatggacagtactga

SEQ ID NO: 18584 - DNA, 375 bp, Zea mays
  Peptide Sequence Number=SeqID_60363
atggccacaccgggcatggccttagtaggcgtcgccggtgggatgcgtggcaacttgggagggggaaccccccacctaatatattgcagccaacacactgatgaaccccaagggggagtacagatgagaacaaaggttttacatgcgggagatgacgagggtgagggaatcacaccaagccatagctatgctcctattgcgaggcctgagtcggtggtagcaggatggggcaatgaaggtggagaacacgttgtcgtcgatggagtcggggcacgagaacagatggagcctggagctgttggcggaggcgtcgacgttgacaccaacgacggcccagaaggcgccgacaaactcacaccgaagaagaatgtgtga

SEQ ID NO: 18585 - DNA, 600 bp, Zea mays
  Peptide Sequence Number=SeqID_60364
atggaaggaatcaacccaattccctcgtcgccatccagcgcacaagaccaccatcggcccacatcccatcgcaagtgcatgacccccgccatctcattcttcccattctacgcgtcagccccacccatatcttgtgatgctcgagaaaacagcaccgcctgccccgctccgactgttgtgccacccgccagggcaaggctaacaacagctaagtccagcctcaggcgcaacaggaagctccgcctcgcccgatctttgggccttcggcctcagaagggaggtctccgcctcgcccgaccttgggcctcggtctcagaaggaggtctccgcctcgcccgacctacggggctcggcccccgcctcggccacagaaggtggtctccgcctcgcccgaccccagggctcggcctcaacctcgacctcggaggatggtctccgcctcgcccgaccctagggctcgacctcggccccgacctcagaaggaatcgcgtcctcacccaaccccggcctcggcctcaggaggagtctccgcctcgcccgatcttaggctcggaccgaccacgccacaggggggatcatcattaccctacccctagctag

SEQ ID NO: 18586 - DNA, 1227 bp, Zea mays
  Peptide Sequence Number=SeqID_60365
atgacgatgggagagcagagcggggcggcgtgctcgctccgcctcctcgacgccgcctacgacgccggcgtcaacttcttcgactccgcagagatgtacccagtcccacagcgcagtgagacgcgcgggcgtagcgaggagctcctcggccgctggttgcgggcccgccgggccccacgggacagcgtcgtcgtcgcaaccaaagtgagcaagagccctcagatcctgcccctacttcggttgcttgtcgcggggccttcagggcagatgacgtggattcgcggcgggccgacatctctcgattcacagaacatcgcagaggcaatcgatggctggtatgttccaatgtttggggagacagagtatgatccgaactgccagtacacgtctgttccaatggaagagcaactggaggctctcggaagagcaatagatgctggcaagttgagtaaggattctcagttgcttccaaagctactgacactgcagaactcgtataatttgttgtgccgaaattttgattctggattggcagaatgctgccatcatgagagaattagcttgctggcttatagcccaatggcaatgggtatactttcaggaaagtatcacttatctgataattgtggtccgccagacgcaagaatgaatcttttcaaagggagatactctgaaggtgaatcccggtacaaactgcagagccccaaagtgaaagcagctgtgaaggaatacacacagatttctgcaaagtatggcatttctccagtgaccttagcgattgcatttgtcttgagacatccacttgtggcatcggctgttttcggtgcgactaaattgtggcagcttgatgaagttcttcaggcaactacagtccatctttgtgaggaaattgttgctgagatcaatgatgatcacgccgcctgccactccgacgcgtcccgcgcgccgtgccgcagaagcctccgcgccgtgtcgtcccgcacgcagcaaattcccgcccggcacacgatcctgccgccagaagcctccgcgcggtcgacggggacgcgtcccgcgcccggcacaggatcccgccgcgtcgtcgtcgcccggcacaggatcccgccgccagaagcctccgcgcagtcgacgaacacgcgtcccgcgcccggcacaggatcccgccgcgccgtcgtcgcacggcacaggattccgccgccagaagcctccgtgccgtcgtcgtggtga

SEQ ID NO: 18587 - DNA, 210 bp, Zea mays
  Peptide Sequence Number=SeqID_60366
atgggagaccacgtctcaggtcgcgtgaggggatatgtctgctggcaggttcaatcaggtcgtccaccaactgcatcttgtggttggcaccacatcagttgctcgatcatcatctttcggtcctatatgaggtgcaagatgcatatgtatgaatacaatgaaagtagcacaaaagtagcacagatatacaaagacatagtggcgaactaa

SEQ ID NO: 18588 - DNA, 1329 bp, Zea mays
  Peptide Sequence Number=SeqID_60367
atgtggtatctatgcgtcttctaccacaggctcctggactaccggcgaccggaggtggagtccctcgccgagctctttgccggcccaggcgcccgtgaatccgtcgagtggcgcatgccggagaaccaccacgtagactcccccttccacctcgttcgcctccctggagacgagcgcctcgccgctcaggtcgccaaccgcagcttgttggtgaagggggtctacgagctctggggctatggcactacctacgaggagctggagaagtcggtcagggatcgcctaaccaggcttcacctttttgtttcctttcagggacgtgttaatttgaagaagcctgatcacagattctttgtcatggagaccgatgactatgggtcgaacaatggtctcccaccggttgtcaagaggtcgatattctttggccgggaggttggagcagctgataggcatctcctgccaacataccagctcaagagtaggaagtacattggccccactgcaatggatgctgaaatggctttcctcatggccaatcagggtctggcctcgcctgggaagcttgtctatgacccttttgttgggaccgggagcattttggttgcagctgcacattttggagctatgacgatggcttttcagggtgcagatattgatataagggttgtacgggatggtcgtggccccaattgcaatgtttggagcaactttgagcagtataagttaccagagcctttgtgtttgctaagggcagacaacaatctcccaccctggcgtcctggattgaaggagatgttcgatgcaataatttgtgacccaccatatggagtccgggccggtggccggaagtctggtggtcggaagctcataaaaggcgtcaaaggcccttacacagtgcctgatgagaaacgggacaatcacatcccatcaaccgccccatatagcctcgcagagtgcgtccatgacctcctccaccttgccgcaaggatggtagtcatgggtggcaggctcgtcttcttctaccctgtactgcgaggtgaagatggcactgcgaacccgcagttccctgagcacccctgcttcaagttaatcacctcctctgagcagatcctgagctttcggtacagccgggttctgctgaccatggtgaaggttgcaccttacaccgaggagatcgagaagttggccgcagagcggcaccgggagttcagggagaaccaccagaagtggatggaggagggcaacctccattccgccgtgttcgagccagcccaggatgggaagcctgatagagactccaagcccaaatacagaggcaagtatgtgtag

SEQ ID NO: 18589 - DNA, 261 bp, Zea mays
  Peptide Sequence Number=SeqID_60368
atggcgtcgctgcactggctggcggcgccgccgtgttgggcgtcgtggggagtatggctcctatgccgtccatatcgggatgaaatgcctagattagttgaagagctagtggccgaggatcccgatgttcagcaggtagaagttgctgatcaggagctcattgaagaggtgtatgggacccgtacaaccccgtggcagataggtaacatgacttgtgggtacagggtacaacctctgcagagtgtaaaactggtatactag

SEQ ID NO: 18590 - DNA, 1311 bp, Zea mays
  Peptide Sequence Number=SeqID_60369
atgtccggatacttcaacgaagtatccacagttgctttccagcttgggaatcgaatcaaagagagaggtggccgactgattgatgttgatgctttacatgaaaaacttctccaggttatcaaattatatttgatgcactatgcactggcatctgtttatgagaatcaggttgctgaaacagaggctgtaccaaaagggagggtgtcaagctcagagagtcaggattcattctatcaggttgctgaacatgcttgtagaaaagatgctgagaaagctgatcattctatcagcaggcatcctgaatttcgctacaaaactgagtttcaaagccacgaaccagagtttgattatcttaagagcttggaaattgaagagaagattaaccaaataaaatggtgtcaagcagcaaatgttccttgtgtgcacataagaatgcaagatgcaccagacattgaaatattgttgtccaagaaggggacaaagctatctgagatgaatttggaccgttcagccgcacctgcaaatggtagtcctggtggcgtgggatatctgagcccatctctctcaaatggcaatgctctaaaacctggcaggcttcctttgcttcgcctgcctgtggaaaatggtgcattgtatcttctatccacaaatgacaaaacgataaagttttggaaggtccaagaaaagaaggtaaaaaagctatctgagatgaatttggaccgttcagctgctcctgcaaatggtagtcctggtggcgtgggatatctgagcccatctctctcaaatggcaatgctctaaaacctggcaggcttcctttgcttcgcctgcctgtgagaaaattaaatcccatgctgaagaggctgcccaaaaggatcgggaagaaaaacttgcagagacacggaaaaaccggctacacatcactgtgcaaggaaataaggcagaattcatccagcatgctgaagcgaagcagaggtgcacttcaggctattcttatcatctgttcttttccagagaaaattaaatcccatgctgaagaggctgcccaaaaggatcgggaagaaaaacttgcagagacacgaaaaaaccggctacacatcactgtgcaaggaaataaggcagaattcatccagcatgctgaagcgaagcagaggtgcacttcaggctattcttatcatctgttcttttccagttggcatatggtattgaataagctacataactggatatctgtttttttacaacaacttattgagttgctgcgcctaaatgccagaaaatacaagcacaagaagcacattcgagtttgttaa

SEQ ID NO: 18591 - DNA, 288 bp, Zea mays
  Peptide Sequence Number=SeqID_60370
atggagaagagccgggtgctggtggtgggcggcactgggtacatcgggcggctgtttttgtcatgctcgcctcggctctgggattcggataggtggtctgcagactaccatcagaaacttgggcttggtaaacgtcacagtctgagcagtgaaagcggacaaacagaaatcgttgcttccgcagcggaaggatgcatggtaattaaactggagcataatgatgctactctgccagcagactaccatcaaaaaacaaaaacttgggcctggaaatttagacccccttag

SEQ ID NO: 18592 - DNA, 297 bp, Zea mays
  Peptide Sequence Number=SeqID_60371
atggggcggcgacaagtttgcatagcgcgcacgcaaggaccaggaaggcagtgcgtctcctccccgatctacggacggtcaaacgagggaaccagtgaaccaccaagcacgatgctggggccggagcagagagatccagtaggcctgcgcgaccgctccgggacgccggagccacacgccagcgacggaaaaggggggaaacccgctcaccttggcgtccgcggggccgtgtgcggccgcagcggggagcggcttgtccacctgcatctggtccgatggatgggctggaggcgctag

SEQ ID NO: 18593 - DNA, 1050 bp, Zea mays
  Peptide Sequence Number=SeqID_60372
atggcgtcttcaccggttgatgctcagctcactcaggcgctggagcaccagacccatactatcctcgctgagctcgacaagtggttcatggctatcgactccaagtgggaagcgcgagtcgaggcgctggagccggttgctatgcaattgcacgtgtaccagagatgcgcacaacgcgagcctggccgggatccggccggtgaagccgttgttgagcatgctcagcttggcgagctccttgccgtggcagatcccagtcgggacgggctcggtgaaggagttcgacgacacgtccaccacctcggggcagatctggcgacgcaccaagcagcggtgggcgcagatgtgaaggatcggctccgccgcttcgacgctgccaccgacacctgcatcgcagcactcgaatcgaccaaccaggtgtgcgagatatggcatccccacgtcgactccgagatcgagggtctccagtcccgcgtggcggattcggagcgcgcttgcctcgtggcccccatgagcatcaacgcggtttcgtcatgcccaacagcgtcagcaggggagaagatgttggacgcgtcattcgtgcgtcaggaggtgcgcatctgcttcagtgataaggtaccgatgttgtcgctcgagggcatcaatggtgtgtgccgggacgagatccgtgtgcacaagttgttgccagaccactccatcctcgccgagctcgaagaccgcgacgtcagtgaacagctcgccgaagcccgtggccgcctcgacaaccccacaaccacgctcctggggcccaacatcaaccccgttactaccccgcctcaccttcgtggattgtgtgccgagctcagcttctcctccccgacgtcctctctcctgcagttggtgtgcgtagaggaggatgaggttctcaccacctcgcacaataggtgtttgacaaattgcttcaacctcatacaaagctgtttcagctgggatgcaatgccacatcgacagacttggccaccacctcatatgcacgttgagtttgggtgtgcatctgataggatgaagtag

SEQ ID NO: 18594 - DNA, 840 bp, Zea mays
  Peptide Sequence Number=SeqID_60373
atgccggcgcccaagtggttccagaagctccgggggaggaggagcaagggcaagcagcaaggcccgtgcgccagaggcctcgccgccgaggacgcgccggcgcagggccagcgcccgtcgtcgctgccagcgccctgcgccgtgtcccccaaccgggcgtcctactacttcgccagcgcggaccgcgcgcgccaggacagggacctcccctgcgccgccgacgcggcggcggccctgctggacgtccgcgtcgacgtggtgcaccgccgcgcgggcgaccggcggctcggcggcctcgacgcgccgcccgggacgcccgagctccagctgcggcccatcgtcacgaggccccccgtcgacgacgcctcggccagcggtggcgtcagcagcgccagcgccaccacgtcggcagccaccacgccgtccaccagggcgcgcaggttccacgtgagctcgcctatggccaggcgccggcgccggcgccggtgcgaccacgacagcgtcgcgatcaagaaggggaaagcggcggccgcggaggaggaggaggaggagggggaggtgtcgccggtgccgtccctgcgcgcgcccacgcggcggcgaaggcggcggtggctgtacgagagcctggtggtggtgaagacgtcgtcggacccggagcgggagctggcggagagcatgtccgagatggtggtggccaacggcatccgctcgtccgaggacctggaggagctcctcgcgtgctacctcgcgctcaacgccgccgagcaccaccgcgccgtcgtcgccgcgttccgccgcatctggctcctcctcgacaagcacaggctgctgctcatctag

SEQ ID NO: 18595 - DNA, 213 bp, Zea mays
  Peptide Sequence Number=SeqID_60374
atggcggccggagggaggggcaagctggcgccggcggaagtggcgcccgcggcgtttccctcgcggggcttggcggtggcgggggccgcggcgggcgaggtggtgcggcgcgtgaggcccacggaggcctccgagcgccgccgcgcggaggtcgtcgactacgcgcggaggctcgtcggctcagcgctcggatgcgaggaatcagtagagtag

SEQ ID NO: 18596 - DNA, 189 bp, Zea mays
  Peptide Sequence Number=SeqID_60375
atggcgcacccgtcatggcgatcccgggagtctcatgtgacgccagagatgccgcgcgtggcgcggacaggtgtggtggtgctacctgatgcagaaatcccggaggaatcaccggcgcaggcaacgcaacagttagttagattggatgaggcagcaaacgggaagttgtcctcatcaaagaccacatga

SEQ ID NO: 18597 - DNA, 771 bp, Zea mays
  Peptide Sequence Number=SeqID_60376
atggtgctctgcgccccgagctccctgcgccggatcccctcccctgcgtgtcgcgccgttcctagctccctggcgcgcgcgcgagttcttctgccagcgctgctctctgcgtcgcgcgctccgcccggcttcctgcgctcggaccgcggcgtccctgctcggagctccctggccatcgaccatggttttgatggtcactgcgcgacggccaccaccgcaccggacttcgccacagaggagcagtccgcgcgcctcaaccgcacaccgccctgctcccctgcgtcgtcgttctctgcgcccggccggagccctgctccctttactcgcctccatggctgcgcagcagaccgtgatgccccagcccggatcttcctgctcgccgcgcgccatggaactctctacgtcgcgctcggtcctgcccttctcgcgcgctcagattctgtctccctcgcgcatccctgcgccatatttgtccccggcccttgcgctggctcgcctcgtcgccgaattcaagaacccgcgccgtcgctcagctcgcccaaatcctggccatcacgccctgtgtcggcatgctggctcgacgttgtcgtccttctttatcctcatcctcgcctcgacctcgcgtggtgcttggccgtgcacagctgctggtcgttgacgtccctccgagttgatgtgcttgagccagagatgttccaagtggatactagacattcttacaccgtggacacgtcgaagatccatagcataccgcggtgctccatttcgtag

SEQ ID NO: 18598 - DNA, 180 bp, Zea mays
  Peptide Sequence Number=SeqID_60377
atggaagacggcgacgagagcgcggccgcggcggcggcgctggggctgagcccgcagcttttcgtcaacgaggtccacggcatcatagccgacatcagcgccgaggccttcgaggcagcagccgcgccaggtgtcgtcggcgccgccacggctgcagagaaggccacggatctccagcgg

SEQ ID NO: 18599 - DNA, 2901 bp, Zea mays
  Peptide Sequence Number=SeqID_60378
atggatttgtccaggttcgcctccggcgtcgggcccagccgcgtggccccgcgggcgggcctgcagatcggcgccgccgagaatggcttccgggcctgctccctgcggcgagcacggcaccgcggcggcgggaacgggaacctcacggccgccgcgtccaccctccgcggccgcggcgggctcttctacctggctcccacgcgccggagtcatcccagtctccggctcttctacctgcttcccacgcgcgggagtcatctcagtctccgcgccagatggcggccgcgctgccagggcaacgactcattggcctacgtcgacggccccttggagaccgctaagggctccggcgaggtcgacgacaacgtgcccaccagctcggggtccgacgacgacaggggcctcgccgacgtcgacggcctcagggagatgctgcagaggtccaggaacgagctggaggtggccagggtcaacagcaccatgttcgaggagaaggcgcagcggatatccgagtcggccatcgcgttcaaggaccgcgccgacggcgcccagagggatgtgtgcgcggccgtagccaccgtgcaggagatcatcagcaaggaggcggacgccaaggaggccgtccagaaggctaccatggcgctgtccatggccgaggcgaggctgcagctggccgcggaggcgctggaggccaaccggggctcggtaggcccgacggaggttagcatcgaaggcatggagcaggaggccctcctgtctgcacaggaagagattaaggattgtcgggcagccctgtcgcggtgcgcggaggagctgagtcgtgtccaggacaagaaaatggagctgcagaaggaggttgataggctgacggatctcgctgggaaggcccagatggatgcgtccaacgccgaagaagatgttgccaatataatggtgctggctgagcaggcggtggctcttgagatggaagcctcacagcgtgtcaacgatgcggaaatggtgctgctgaaagcggagaaggccatagcctcgattgataccgtggtggagctaccgtcacctgctgaagagcagagaagcactgaagaagacagcgtttctgaagggtacgagtatagcagcgatgtcactgatgatgtttatgtaagggatgaggtgtcaagtatcgagcgcctaatggtcggtgacttgactgttcagggctttgagcagcttgaaccatcccgtgaaatatatgatgaagaaagcagtaataagatgtctgttgagcctcagaaagaagctgagtctgattcagataagtcgaaacaagggaagaagcaagaaatggaacgaaaggagcacaccaaggaaccactgagtgctccaaaagcactggtgaagagatcatcccgtttcttctcggcatctttcttctcctccaaagttgatggagagtttacacctacatctgtcttccgagggttaatgaaatcagtgcaaaaacaagctccgaagcttgttgttgggatattgcttctcggtgcaggggcattcttcttaaatagggctgagaagagtcaactatttcagcagcaaggcattgccacaagtattggaaaggtaacctccacaacaaagcccatagttcttgagatacggcgaattccacagagagtaaagaagctaatagagctcttacctcatcaagaggtaaatgaggaagaagcttcacttttcgacatactatacttgcttctggccagtgttatttttgtaccattatttcagaaaatccctggaggcagtcctgttcttggatatcttgctgctggtgtcctcattggtccatatgggctgtccatcatccgtaatgtgcatgagacaaaggcaattgcggaatttggagttgtgttcttactatttaacattggacttgagctttctgtggaaagactaagctcgatgaagaagtatgtctttggcttgggatctgctcaggtgctggctactactgctgctgttggtgtgatagctcattgttttgccgcactaccaggaccagcagcaattgttgttgggagtggcttggctctgtcatccacagctgttgtcttgcaagtattgcaagagcgtggtgaaagtacgtcacgtcatggacgtgctacattttctgtgttattgttccaggttggtttccaagcaatagcagaagccatgggaatggctgcagtcaaagcagtagctgctataactgccataattgctggaggtcgtctgttgctccggcctatttacaaacaaattgctgaaaatcagaatgctgagatattttcagcaaatacactccttgttatttttggcacaagtcttcttacagcccgggctgggttatcgatggcacttggagcttttttagctggtctgttactagcagaaacagagttctcattgcaggttgagtcagatatagctccctatcgtggtcttctgttaggacttttctttatgacggttggaatgtctattgacccaaagctgcttctgtcaaacttcccagcgatctctgtgatattgagtctcttgataattggaaagacattgttagttacatttgtcggcagggtgtttggggtttctgctatagctgccattcgtgttggcctcttgcttgcacctggtggtgagtttgcttttgttgcctttggagaagctgtcaaccaggtatctagtaccctagacctacttctcatgtacacaatagttgatcataggaacatctataattgtttcgttggcatttcaatggctctgacaccatggttagctgctggagggcagtttctggcatcaaaatttgagcagcatgatgtgaggagtttattgcccgtggaaagtgagccaagtgtgttccctgtgtga

SEQ ID NO: 18600 - DNA, 3078 bp, Zea mays
  Peptide Sequence Number=SeqID_60379
atggaggagagggggttccctaacgacgccaccaaggagggcaacgacgcttataagctggcgacttataagctgggtgtggaggttgtaagtgctcatgacctgatgcgcaaggaagggcaaggttctgcaagcgcttgcgtggagctcacctttgatgggcagcgcttccgaactgttgtcaaggagaaggacctgaacccagtctggaatgagcgcttctacttcaatatatcagatccttctaatcttcgtgcccttgcccttgaagcatatgtctatagtgtcaacaaaaccattgaaagttccaggtccttcctcgggaaggtcaggattgctggcacctcatttgtgcccttccctgacgcggtggtcatgcattatccattagagaagcgagggatgttctctcgtgtcaaaggagaaatgggtatgaaagtatacatcaccaatgaccccgctatcaaagcttcaaaccctcttcctgcaatggatcctgtttccaataatcctcctccagccccaagtacagcagagcagattgcagctgatataattggtactaatctgcacaagtctcaggagcataggtctgaggcaaagaccttacacaccattgctaaggaggtacatcataaccatggccatcttccagctagttttggtgagcagccttccaagtactctgttgaccagatgaaacctggatctcaaccacccaggattgtaagaatgtattcagcagcctcccagcagcccatggactacgcacttaaagaaactagtccatttcttggtggtgggcaggttgttggtggccgggtcatacatggcgaaaagaatgctagcacttatgaccttgtggagcgaacgcagtatttgtttgtacgtgtggttaaggcacgggacttgcctgacatggatgtcactggaagcctagatccttatgttgaagtgagagttggaaactatagggggataaccaagcactttgaaaagcaaaagaacccagagtggaacgcagtcttcgctttttcccgggatcgtatgcaggcatctgtgcttgaagttgtggtcaaagacaaagatttgattaaggatgactttgttggctttgtgcgatttgatttgaatgatgtccctatacgtgtgccccctgacagccctctggctccagaatggtacaggcttgttggtaagagcggggataggtccatgggtgagctcatgcttgcagtttgggtcggcacccaagctgatgaagcatttcctgatgcctggcattcagatgctgcaacacttgaagatccatctaccgtaacacacatgaagtccaaagtttatcatgctcccagattgtggtacctgcgagtcaatataattgaggcccaagatgttgctatattagataagacccgctgtccagatgtattcgtgagagcgcaggtggggcatcaacttgggaggacaaaacctgtgcaggctagaaatttcaaccctttctggaatgaagatattatgtttgtggcagctgaaccatttgaggaccaccttgttctgactcttgaggaccgtgtaggtcctaataaagatgaaatgcttggtcgtgtcatcatacctttggcaatggttgatagacgcgctgatgaccgtattgtccatggaaagtggttcagtctcgagaagcctgtacttgttgatgttgaccaactgaagagggataagttctctacccggcttcatattcgtctgtgtcttgatggaggttaccatgtccttgatgagtctacaaactacagcagtgacctgagaccaactgccaagcaactctggaagccctctattggtttgcttgaacttggtgtccttggtgctcaagggattgttcccatgaaaactcgagatggaaaaggttcatcagacacctattgtgttgctaagtatgggtcaaaatgggtaaggacacggaccatcatgaacaacccacatcccagattcaatgaacagtacacctgggaagtctatgatcctgcaactgttctgactgttggtgtttttgacaatggccaacttggagagaagacatctagtggcaaagatgggaagataggcaaggttcggatacgcctttccacacttgaatctggtcgtgtgtacacccactcgtaccctctcctggttctacacccatcaggggttaaaaagatgggcgaactgcacctggcgatccgattttcctcgacatctctagtaaacatgttgtacctgtactctaggcctttgcttccaaaaatgcactatgtgcgcccaataccagtgcttcaggttgatatgctgcgccatcaagctgtccagattgtggctgcccgacttagccggatggagccacccttgagaaaggaagttgttgaatacatgacagattttgattctcacttgtggagcatgaggaaaagcaaagcaaacttcttcagactcgtgacagttttctcaggcttgtttgcagctagcaggtggttcattggtatctgttcatggaagaaccccattactacagtgctagtccacattctctttataatgctggtgtgctttcctgagctcatacttccgacagtgttcttgtacatgtttcttataggaatctggaacttccgctaccgtcctcgttatcctccacacatgaataccaagatctctcatgcagaggctgttcatcctgatgaacttgatgaggagtttgatacattcccgaccagccgcaaccctgagattgtaagggtgaggtatgacaggctcaggagtgttgctggaaggatacaaatagtggttggtgacattgcaacacaaggggagagggttcaagcattgcttagctggagggaccctcgggccacatcagtctttgtcctattttgtttgatagcagcaatagtcctctatgttacaccacttcaagttcttgctgcattaggagggttctatgtgatgaggcacccaagattcagacataggttgccttcagtaccagtaaacttcttcagacggttgccagcaaggaccgactctatgctataa

SEQ ID NO: 18601 - DNA, 315 bp, Zea mays
  Peptide Sequence Number=SeqID_60380
atggcgaagcagactgagagtggagaagagagctacgagctgcggcggtcccaagtggcaaggagttcaacgccctggacgatagacctctggatgagagggagggaggacctggctgcaatcttcaaggtcctcggagccaagatcgcactgtcgctggctgcactggagctacgcagcaagcggccgcgtgggcagcaggacggcacggagactctgccggcggtgcccaggacagcaagccgccgtcggcttgacaccgcgaaggtcgtcgacaagtccactgggacaggacggaggcggccaagattgtga

SEQ ID NO: 18602 - DNA, 636 bp, Zea mays
  Peptide Sequence Number=SeqID_60381
atggtgagctcctcgtcgtcggtggttaacgtgtacccgctcgccaactacacgttcggcaccaaggagcccaagatggagaaggacacctccgtcgccgaccgcctcgctcgcatgaaggtcaactacatgaaagaaggaatgcgtacaagtgttgaagcaatcctattggtgcaagagcacaaccaccctcacatactgctcctgcaaatcggaaatacattctgcaaacttcctggtggacggttgaagcctggagaaaatgaaatcgaaggtttgaaaagaaagttgtgcagcaaacttgctgtgaactcgccttcctttccacctaactggcaggttggagagtgtgttgctgtgtggtggaggccgaattttgagactgtgatgtatccttactgccctccacatatcaccaagcccaaggagtgcaagaaacttttcatcgttcacctatccgaaagagagtattttgctgttccaaggaatttgaagctgcttgctgttccgctctttgaactctacgataatattcagcctcttcgcgtctgcgggggaaggctttcttggtttatgcctttcccagaccccactcatgtgggagccacctacactgaaactgtcctgcccatataa

SEQ ID NO: 18603 - DNA, 384 bp, Zea mays
  Peptide Sequence Number=SeqID_60382
atgaggcaggcgaggccgtactcggggatcttctgcggcggggtgtcggcgcggacgggaccgcacgcgctgccgctggcgcgcatcaagaagatcatgaagcgctccgcgggggaggcggcggccgccgcggacggcggcgccaggatgatctccggcgaggcgcccgttgtgttctccaaggcgtgcgagctcttcgtcgccgagctcacgcgccgcgcctgggccgccacgctcgacggcaagcgccgcaccgtgcacagggaggacgtcgccacggccgtgcacaacaccgacctcttcgacttcctcgtcgacgtcgtcacggcggacactgctggtggaaccggcggcggcgggcacgacggcaacggcgcgctctaa

SEQ ID NO: 18604 - DNA, 222 bp, Zea mays
  Peptide Sequence Number=SeqID_60383
atgacgtggcagggggcaccggactgttcggtgtgcaccggactgtccgataaaaaatatgccaagctagtacggacacttgctgacggccacaggaggaatgctcctgcattttccagtgggagacgtaacatatggaatacgcttcccagcaaggacgctccctggccgcctcagctcctgactcctgagcgatacgattcagtactcgtccttttctag

SEQ ID NO: 18605 - DNA, 336 bp, Zea mays
  Peptide Sequence Number=SeqID_60384
atggcgggaccgtcattgcttggtcggataccccccatgtttctggttggtgagggagcatatcaatgggcaaaatctaaaggaatggacctagttgaatctacatcggaggctaatagttggttggtgactgagaatgcaagagcgcagtgggtgaaatacacatcattgcttgttaataccaaaaaatcactatatcatagtactggttctggttcagaacatcattcagttcaattggaagcacaagatagctacggaaatgtagcatcaggtgcatctagtggtggtattgccctgaaggtcacaatctggtcctgcttctgcgtgcactaa

SEQ ID NO: 18606 - DNA, 480 bp, Zea mays
  Peptide Sequence Number=SeqID_60385
atggctgctggctcgcaatcaaaaccacatcacatgtgtgatgcagactggcagtgcatgattgatgatccagagctgccaagctggggccggcgacagcatagcacaggggaaaataacatggaccccttcgtgatccttacctgccgcacccaagagcagaaaagcagcgtcgcaaatggagcaggaagcgagcccgaatggaacgagaccttcgtcttcaccgtctccgacgacaccccgcagctgcacctcaagatcatggacagcgacctcaccaacgacgatttcgtcggcgaagcaaccatccccctggaggccgtgtttcaggaaggcagccttcccccggcggttcacccggtcgtcaaggaggagaagtactgcggagaggtcaagctcgcgctcaccttcactccagcagcggaaactcgccgccctgatgacaacgaggaggggccgccttacagcagctggagttga

SEQ ID NO: 18607 - DNA, 258 bp, Zea mays
  Peptide Sequence Number=SeqID_60386
atgaagggcatgactgatgccctaggggaccttggccaagtcgtgtccgatcgcacacttgccctcaacctcctttgcctcaacaagcggtttgagcacataaagaccttcatcaggcgcaccacgccgttgctgccatttcagactatccgcaacgaccttctactcgaggagctcaccatggctgtggaatcctctatctcagcttatattgccttccattgccacctcgatgctagcgcatcagcagcagtctga

SEQ ID NO: 18608 - DNA, 711 bp, Zea mays
  Peptide Sequence Number=SeqID_60387
atggacacgaaccatatcttgcaactcaacggtgatggtaccaaagagccaagacagtacaacattgtccatgctctaccctataggggcggaagcattatcgatgtcggagaggacacggttgttactggtgtagcactcgagggcaacctgcatgtggaggttggcgacggtggaggcctcatggatcacaatggcctcagcgttagagaaggatccgatggggggctacgccagcttgagagcggcaacaaacgcacactgcaggctagcgacatctgcttgttccttctccatgcttcagctatggtgaggacacgtgcattggcggcgacccttgtcggcgacgactttggcgaccggggagggaggtcagatgttctggacgctggcaacctgcatgtggaggttggcgacggtggaggcctcatggatcacaatggcctcagcgttagagaaggatccgatggggggctacgccagcttgagagcggcaacaaacgcacactgcaggccagcgacatctgcttgttccttctccatgcttcagctatggtgaggacacgtgcattggcggcgacccttgtcggcgacgactttggcgaccaggtcgtccctccccttctaagtggtggcaacatcttccttggcacgttgtgcagcctactcttgggcacgagcagcggcgggctcggcctcactaggggttga

SEQ ID NO: 18609 - DNA, 546 bp, Zea mays
  Peptide Sequence Number=SeqID_60388
atgctagctcttgccaatcttaagccttccaccacacctgttgcgcccattacctccaccacaccagcttccactgctcctgctcccgcttccgctccacctattcctccaccttgcttccgggagcgtgacgagactaaggtgcatcctcttgatgtggacctgcacctgctcgacctttggagagccacagcttctagggtgcgtcggttcagacacgtaccagtggactcttggttacctgctcagtgggatccggcagctgcgctactcttcagcaccaggactcaggagtccttcttcagggcacaattgtcagctcagatagctctacgggctcaccggtgtctcaatctttctgccttccgtacaacggccggtgcagagtctgagggtcatatcacatatctgctgggactgtactctcttctaacatttgggggtcgatatgttgaggagtgggtccaagtgttctatgccgtagtatggatcgaccctaaccatcagtggatgggattccggtttgagcgtgtagggaacgggtga

SEQ ID NO: 18610 - DNA, 657 bp, Zea mays
  Peptide Sequence Number=SeqID_60389
atgacgagggagcagcacggctgcgtgggacttggcgaggtggagcaccatattgacgacggccaccagaagggcaaagacgaggtcgagcaagggagacggcaaggcggagcgtgcgtcagggagaaacgccggctgcgcgcggcaaacaaaggacgggaagtgcgcgcggccatggagatggcggccaagcaggagttcgcggccaggatcatgagcagatggaggagcagggagcttgggggaaagagaaaccatggtgcgcaggagcagagcgcgagctgcagcaggggccgagcgccatgggaactccgcgagcggcgggggcgcaacgctggagaggcccagcaggacgccatgaaagctgcgcgtggtgccatgggacctgagtacctgctgggtagagaagaagcaaagctcgcaggggaagccgacatggggacgaaggccgagcagagggaggaagaagccagacgcggcaacagggaggaaaaccgcgggcctgggcgagcaggacgaaggagctccgagcaggagcaaggagaagagggggcgccatggtcggacttgggcaggacgctggccaaggaagaaggggctctggccggctggaagctggaggagatgaagactgcgcaacagagaaaggagatgcgc

SEQ ID NO: 18611 - DNA, 2265 bp, Zea mays
  Peptide Sequence Number=SeqID_60390
atggaggccaagccgtcttcagcggcacatggtgacgcgcccgcggtcgaggccccccgccgccgtggcagcggcggtaagcgcaagtcggccgggtcctcgttcacgccgtcgaagcggcaggccaaggagcggaacgctgccttccacgtgccccagcatcttcttcacagcgggccgctcacccgcgccgcgcgccactcgccgcacaagctcgcgggcactccgccggagtcggggccagcgtcatcgtcggccgcaactggagacggggtgagcggtgggcaggcggaggttgatgcgatccggcccgagacggaggagacgccggccccagagctgccgctggtggacgagatgttggaggcggtccgatcccgtggccctggcgtccatgtggtccctacctttgctggatggttttcatggaaagaaatccactcggttgagaagcagatcttgccttctttttttaatggaaaatctgtgaagcggacacctgaggtgtatttggcgattagaaattcaatcatgatgaaatttcatgccaatcctcaattgcagctggagtccaaagatctggctgagttgtcaatcggagagagcgatgctcgacaggaagtcttggaattcttggaccattggggcttgataaatttccaccctttcccaccagctggacatgaagagagtaagccagaggagagccaagacaactctaatgatgagaaagcttctttgatcgagcagctgtttaaatttgaatcagttcaatcatatatgacacctttactgaacaaagaagatgtgggagctccaccccctctgcctagcttgtttcctgaacctgtactcattgaaaatatggttgcagcagctgagccttctgttgagtaccactgcaactcctgttcagttgattgctcacggaagcgctaccattgtcgaacccaggcagattttgacctctgttgtgtttgctataatgaagggaagttcgatccaggcatggccaaaactgatttcatcctcatggattctgcagaagtttcaggtgctagtggtactagttggactgatgaagagacattacttcttttagaaggtttggaaatttttggtggaaaatgggctgagattgctgaacatgttgctactaagacaaaagcacaatgcatgttgcactttcttcaaatgcaaatcgaagaccgcttccatgatggtgacgatattaatcaaaacatcccagtaagtacagagcaagccacaactgagaaagccattgttgaaacacctgagaaaatggaagttggagataaagtggaaggaagagataatgcggatgagaaggcctcggagaaaacagagggaagctgtgaagaaacaaaaactgaagatgcaaatgttgtaaataaagatactcagaaatcaggtggcaaagattcaggtgcatctccaagcactgaagaggcaaagcaatcttctgatgatcaacctatagtaaaggaaaattctgtagatgtagatacttctggtgaaaaactatcaaatgttgctattgatatcctaaaatgtgcatttgaggctgctggtcacagcccagaatatgaaggttcatttgctgatgcaggaaatccagttatagcactagcagcgtatttagctggtcttgtggaagatggtaacgctaccacttcattccgtagttcactaaaatctatatctgaggtgcctcctgcactccaattagcaagtaggcactgttttattcttgaggatccaccaaatgaactcaaagacatttgtgttagtgtaaggatggagactgatactggcggcgggtactggcgacgacaaccgcagccaggccatgatgttgagacaagaccgaaactccgtgaacaccatagatggaagccccttggtgaagatattggtgaactgcgaagtggtaggaacgtggacatcgctgacagcaacacgcttgcggacgaagtgaaggtcgatctccacgtgcttcgtgcgctggtgttgcacaggattagtggagaggtatactacgctgatggtgtcgcattagacgaggttggcacgcgtgagagggctatgaagctcctagagcagctgacggagctaggaagcctcggccacgccgttggctatagcgcgatgccgcgatattcggccttaacgctggagtgggagacgacgagcagacgcttcgaggaccaggagatgagattgacgcccatgaacatagtgtag

SEQ ID NO: 18612 - DNA, 150 bp, Zea mays
  Peptide Sequence Number=SeqID_60391
atggggactggaaaggggagcgcgccgcgtcttcctcttcttctctctttgctctcttcttcctctgctgttcggtgtgaagttgcggggacgtggcgtcaggttttgacatacttgtggttggctaaacatttaagcttgaatgcttga

SEQ ID NO: 18613 - DNA, 2031 bp, Zea mays
  Peptide Sequence Number=SeqID_60392
atggcgagggaggcgagagggtttcaggcgggaaagttcgaggagttggaggcagaatggccctcggattgttcatctatttgcgcttctgccagacaaactgcaccggaacgggtctacgcggtttgcacagccgaactgctgaaggcatggttcagccgacctgcgttcaaattggataccattttgatggctgctgcgtcgtgcgtccacagtgcaagtggtgcacggttctgccgttccgcatcccgcccgcccaccgcgctcctttccatcgatggtgctccttccttcgacggcaaatctcatccggtcgcatcccgcccgcccgccgcacgccccagccggatcaatgttgtcttccccacgcgctgcgcccgcctgccatcgccagcgcgccccctcccgcgctccctccgcgcgaagacgaagggttgcgagaagacgaagggctgcgcgggggcggtctgcggtggggccagccactgcagcgcggaggcggcgggggaggttgagaaggtgagccggaaggaggcagtgtcgcggggcagggcgagggtcagcgccatgccgaggaccgggtcgggcgccgcggcgagggagaaggggatgggctccggcgggtctgcgtgggtggaggcggagtggacggcgagggcgcgggtgtcgagtaggaggtcaccggagtgcagcgtggagagggtgagcaccgcggaggtgtgtatggtggaggcggcgaagtcgagccactgcagcgcggaggcggcgggggaggttgagaaggtgagccggaaggaggcggtgtcgcggggcagggcgaggattagcgccgtgccgagaaccgggtcaggcgccacggcgagggagaaggggatgggctccggtgggttggcgtgggtggaggcggagtggacggcgagggcgcgggtgtcgaggaggaggtcgtcggagtgcggcgcggagagggcggtctgcggccggggcagccactgcagcgcggaggcggggggggaggttgagaaggttagccagaaggaggcggtgtcacggggcagggcgagggtcagcgccgtgccgaggaccggcgccaacgagctgctcttgcgtcggaagctggaggagcagcagcaggctgccgaacttcagcacgccattgagctccagagccgccgcctcatgggtctccagctgctcgacctcaaggctcgcgcagctgcgacagcagcagcggcatcggcactgccaacaccagttgccaatgccttcgcgtccagccatcctttgagcaccatggcagtcgagtcgccactagagtccggagagcagctcaagctgagcagtgggtttgctctggaggggaagctcaacggtggcgacaaggaagaatctgcttgcgaggcgagccctgacgccgctgatagcgaccaaagtggagatcacaacttgccggatagcccatttgcgtcccctaccaagtctgccgcgctcgtgcacgacagtttcgccgccacggagcatgagaacaccgcgtcccttgttgggagcaagatcgacgtcggcagtaaccatctccgccccctgcgctggaaatcccttcgcccagctcctacttcttccccatgcgcaggtgcgttggaaaggcctctactctacttttccgtggcgccgattatgtccgtgaacattctgtcatccacgagtgaaatgattctctccgaatgcaatgagcaggctgtcctccgatcacggagccatggggatggtgctagtgctggccctagcacctccaccgcaactccgacgcttggaccattggatctgttgctggccgtcgaccgccatcagaaggtaccaaaggttcacaataagccaataaaaagaccaagaaaagggttcaacaaaaagagcaagggaggactccaagctgaacttcgcaccttcgggaaaactcagaggcgccgcgctataattcaccggactgtccggtgtacaccggacagtgtccggtgctccaaggagaagcgactctga

SEQ ID NO: 18614 - DNA, 1584 bp, Zea mays
  Peptide Sequence Number=SeqID_60393
atggtggaagggatggtagtggccgtgccgaatggggtgaaggcggatggcgccgccgccaccgccgccgccgctaaggcagattctcctaaatccgttctggaggacgagaaaatttctgaatccaagaatgggaacgcctccttagccacggagccagttaagcaaggggacgagacctcggacgattttgtggatgcaatgatgtcccttcctgttgaccatgaaatcgacagtgccgatgtgccccctgctgttgaggcagtcaaggacgaagaccagcttctggagcctgccaaggaggagaaatttgatgatttcctggatgcaggtttatctatacctattgatcttgaggccaagaatggtgatgtatccctgatcacagaagcaatgaaaaaggaagaagaacagctcgaggaggcgcggattaaggcagaggaagaagaggaagccaggaagagggaggaagttgcaaaacttgcttttgatcctgagtcgcggtatagcaagttagatgagctactgacgaagacacaactattttcagagttcctacttgagaaaatggataaaatcgccgatgaagttgttgaacctcaaggtgaagagtcaccagtagagaagaagaaaagacgtggccgaaagaggaaagctaatgccacaccacaatacaatgataattatggtgcttgctctaaaaaggccaagacagcagtggcagccatgcttacaagatctcgtgaagatcgtcttgctgatgactctactctctcggaagaagaaaggttgaaaaaagagcaagccaatcttgtgcctttaatgactggtgggaagttgaagtcgtaccagatcaagggtgtaaagtggctaatttcattgtggcagaatgggctaaatgggatacttgctgacccaaatgggccttgggaaaacaatccagacaattggatttcttgctcacctgaagggcaaaggcatgcatggtttgttccatctgtttctagtatcatttatcatggagataaagtggcccgagctgagataagaagaaaatttatgcctaaaactgctggtcctgattttcctataatagtgacttcatatgagattgctatgttagatgcaaggtttcttgctcactataggtggacgtatgttgttgtggatgagggacatcggttgaaaaattctaagtgtaaactattgagggagatgaagcgcataccaatggctaacaagctccttttgactgggacacccctccagaacaatctggcagagctgtggtcactattgaacttcattttgcctgatatattctcatccaatgaggaatttgaatcatggtttgatttttctgcgaaaggaagtgaagaaccagaagaaagtgaagaaaaaagaagggttcatgttgtttcaaagcttcatgccattttgcgcccatttcttctgagacggatgaaggaggatgtagaacaaatgcttccacggaagaaagagataatcatttatgctaacatgactgaggttcagaagcgaatcctgtatcacttagttgagaaaacctttgatgtctactga

SEQ ID NO: 18615 - DNA, 1689 bp, Zea mays
  Peptide Sequence Number=SeqID_60394
atgggtttaccccaaccttcaacagtcgaggatgatgcgccaacagcactgcgcacctctatttcttgccctccacattctggaggagttagtgcctgtgatttggatgggcttcctgcgggaagctctagcagaagggtgctttcgtacccattgatatgtgattttgatagaaaggccacattagatgctcctaatgaatcaaatgggtattctaaagacggatgtgaatttggcgaacccgcagacctccatggactaaacattgattcaagaaatacaaattcttggtcttctcctaaattagtgccttctgtccatatgccggcaaggagggttgtgggctttgattctggttgtattggaggttctgatggggcagaaacggatatggtcgattcatctttggtcgacagaaattctcatttgccatttgatcagcatgaacttcaagcaaggaaaagactgttctctccattgaaaaatgtgctcgttaaacagttcaatggtgatatgctcaaccttccttctggtgattctagatttaggcattctgattcagccgataaactatacagtactggtttccaagataataaaaaagccaacacgggatgcatcaatttttttgaaacgcgggatactccagcctctaggtgctccagccggagcccagaatgggatgttactaggagcaattctaattcattcactgatggtcctttacttgggagcaaggattatatatcctattatgatcatctagcagctagtgcaaaattagcgcactctccgctttctctgtctcctctcagccctaaatatatgaacaaaattaaagtgacaggatctcaaagatatataatgaaagatcttgaggatgacttcctagatttaaaggaaactggaggttctggcggagctaggatgccggaggtatcaaaaggatctaacttgttacatgatgaacttgatgttatgacacctaaatggggttcattgagaagatatcaaaattggggccctgaatcttcccctacatctcccagaattggttatggtcggagtttgtctttgcatgtaaggaggtcacttgttggctcctttgaggagtctcttttatctggtcgatactcgtatggaaaagacagtcagacaattgatggtttcttagctgttctaaatgtcactggtggctgcaacggtggacagaactgcaactcaaatgatgaatcagaaaaaggagatctgaaaacaagatgtcgatcattggatagtgattctaatgaatcaaataagtctagttctccaggaaataagaaagaccagtctgattctgatggttgctgctgtcaaatggataagtttggcatgggagaaaagaaatcatgctgctcaccttctaagatcaatgatagttcaggtggagctgtgcttcgttatgctttgcacctgcgatttctgtgcccctccaagaaaaaatcctcgaaatcaatgcttcgttgcaaatctgatctatcaacggcaccatatagcagcaatacgctacctgaggaagaacggaggttctatctctacaatgatcttagagttgtatttcctcaaaggcactcagatgcagatgaaggcgagctgcgagtggagcatgatttccccgccgatcccaagtactttgacataagcaactga

SEQ ID NO: 18616 - DNA, 402 bp, Zea mays
  Peptide Sequence Number=SeqID_60395
atggagctggagtcgcaggtggtggtgctccggctgctggcgttcgcggccgccgtggtcgtggccaccaacaggcaggaccgctggggcatcgtcctcaccttaattgaagatagatattcgccgtctgggagtacgtacacggggatcaacgaactccgcctgcgccgcctacgcgctgctcacacggccgtctacgcgaagaagctcgtcagcaagcactggctgcaccacatgggaccaggtaagctacatactttctgttctggtggggatgacggcaacaacagagaaaaaaggggaaagggagggtcgtctgttacaaacaagcagtaccgtgcaatctctggagttgactgcccaacaatggccacgatcgctatagcttcaacgcaaaattaa

SEQ ID NO: 18617 - DNA, 1635 bp, Zea mays
  Peptide Sequence Number=SeqID_60396
atgaagagctgcggcgggggaggagcggacgggcagcagtgcccgtgcgactactgcggggaggcggcggcggcttctgcactgccgcgcggacgccgcgcgccttctgggtcgccgtgcgacccgccacagggtcacgccgccaaaggcgctttcgcggaagcacgtgcggggcgccgcactgcgcaggggtgcgcccgcgcgccccggcccgcccgcgcgcgtctccctcggcgccgaccccggcgttaccctctgcgcggactgctgcgaggggctgcgccgccgctttccgcggcgcgcgtgtcggttgagggcttctcggggtgcccctcggcggccgagctcgccgcgtcatgggggctcgacctccgccgcgcggccgtggccgtgggcgacgacggcgacggcggcgacgacgacgaccccttcctctcggtgctcgactactccgtgctgggggtgggggtggccgacacggacctgcgcgacctctacgtgccgtgcgacccaccgcgggtgcccgtccccgacgccggcgcgcgcccgctcaggggcgaggcgctgtgcgaccagctcgcggagatggcgcggcgcgacgaggcggacacgtcccacgcgcacccgcactcggatctgagcccgcgcacgcctcgccgcacctccgcggcttccagcggacgcctgccgtcgggcaagatggcgccccccgcggcgctgccggtgccggctcatcctcctcccgccgcgccgcaggaggtgcctctgccgtacacgtccctgctcatgatggcgtccgccaactgcagcgacctcattggcggcggcgaccgggtgggtgataccgacgaacaactgctctgggactgcgctgcgccctcggtgccgcccacccagcacttcctatacattctacatatcaaccagaccgagaaatgcagtcaagatctcgggtggtttttttcacagagagcttgtagcttcggtaaaggatttctgaaatgcatttcactttttagatacctactggatcatatttttcacatatgggacttcaatttaggacggtcaaggcatcacgatgagaaatctgctcttgaagttggatacggttctaaccatggcggctttatgattaagagttacagtgacatgcttaaggacatttcttcggggacaacgaaagatctggaagatatttatgactcaagatactgctcaaccgccgaagatatcatgtcctctaatatctgtcagttgtcatcgaaaaatgtgagcaccgggagcaacaaacggaaggtgaggtcatgtgctgcgtcgacgatggatggaccaacgacctccgggaaccacaaccacgtacccgcttcagcttcaggtccaggagcagcgctcaccagggagatctccttcggggatcagacggtgtccgcccccgcggccgagaccgagaggcctgccgccgtgaggattgacagcgagacgcttgcgcagaacagggacagcgccatgcagcggtacgagaagcacatccggtacgagtcgaggaagctgcgggcggacacgaggaagcgggtgaaagggcggttcgtcaagtcgaccgaagcactcaacgccgccagatacaacggatga

SEQ ID NO: 18618 - DNA, 159 bp, Zea mays
  Peptide Sequence Number=SeqID_60397
atgacggctccccaagcgcgtacgacagtgatggggcctccggcgacagtggccacgcgaggcacgagtggctccaacggtcacgtgaggcgcgggctgcgagggtcaacggaagtgaaggggacttcgaccgttgccgaagccgaggtctcggtctaa

SEQ ID NO: 18619 - DNA, 1425 bp, Zea mays
  Peptide Sequence Number=SeqID_60398
atgctgggcgtcgcgcggaggcggctcggatccggatgcgtcagtgctctcccgccaccgggctccccgccctcgcttcgctctcaccgtgacccgtttctctccccgcaggtgctcgcccagctggcgcaggccctccgccccgccgccgctcccgccaggacctactccgccgcggccaaggagataactgtacgggaagcattgaataccgcattagatgaagaaatgtcggcagacccttctgttttcttgatgggagaagaggttggcgagtaccaaggtgcatacaagatatccaagggtttgcttgacaagtatggccccgatagggttctcgatactccgatcactgaggcgggcttcactggcattggtgttggtgccgcttaccatggtcttcgacctattgtagagttcatgacatttaacttttcgatgcaggcaattgatcacataattaattcagctgccaagtcgaactacatgtctgctgggcagatatctgttcctattgtctttaggggtccaaatggtgctgctgctggagttggtgcccaacactcacagataggtattttgttgtactacgatggaattactaactgccttagtatgcagtgctatgcagcttggtatgcacatgttcccggattgaaagttctagctccatattctgcagaagatgctcgaggtttgctgaaagcagcaatcagggatccagatcctgttgtgttccttgaaaatgaacttctttatggtgaatcatttcctgtatctgctgaggtacttgattctagcttctgccttccgattggaaaggctaagatagagcgacaagggaaagatgtcactatcactgcattctccaaaatggtgggatatgcccttcaggccgctgatatactggccaaggaaggtatcagtgccgaggtaatcaatcttcgctcaattagaccgctggatagagctactattaatgcatctgtgaggaaaaccaatagattggtaaccgtagaagaaggcttccctcaacatgggattggtgcggaaatatgcatgtctgttgtagaggacagctttgagtatcttgatgcaccagtcgagaggattgctggagctgatgtgcccatgccgtacgctgccaaccttgagaggatggctgttccacagtactcgacatgggagatgcaaatatttctttctaggataggattttggagccttggctgggaaaaggtgaacgtggtagctgtgatattagcctgtggcattgaaagcaggctcaccgctcacgcgattgatcatttatcggtgtccccttttgactctttgctattgccacacctgcaggtcgatgacatcgtccgggcagccaagcgtgcttgctacagggcagcagtaccgatggcagcaaccgcctag

SEQ ID NO: 18620 - DNA, 405 bp, Zea mays
  Peptide Sequence Number=SeqID_60399
atggggaagaagaaaaacttagagagattggaggctttgattgtgtcttggaatggaatgctagctcttgtattgaatgttgaagcgacgagggagtccaacaaggacgacagaggcggcgtgacgcacgtgttgatcgtgtgcatgtccatcgcagggaggatccaccgcctgctagataacctgcgcatcgccaagcagacggggttcaactcggttgccgaccaggtgggcgccgactccagcatcgaggagctctacctgctcaacccgagcgctctcctcccttgcttatatcatattcttgcggctagcaccagcagtgaccccagtggtagcaccaacagattcctgaagagttatttactttctgaagagagcctaaagggaacggcacatgcctag

SEQ ID NO: 18621 - DNA, 518 bp, Zea mays
  Peptide Sequence Number=SeqID_60400
atgacagttggcgcgcagggtaggagaacattagtgttccaagtgacaccttctactccgatggctcagtcatcagtgtttaccggtggcaagacctttgcatctaggagccgcatcatgttcggttcccttgacttcctcgccaccgccaccgccaccggtgaactccaccttgccgactctgaagtttccgccgtagcaggagtgggaggaccaacacgctctgccaccaggagcaaggcagataagcgacgtctcaagaggcgtgatgtcgtccttaagcggtgccttaaccggctcgctgtcgccatcaagcaaaatgcaaagggagccttaccctcaacatttgtggggagccacgaggcccagtacttcttcaaccccgggcagaacaaggttgcatcggctatgatgcttcgatccatccccgagccagacgaactggaggcaagggtgatgtaccagaacctccgcaacctggtggagatggacgtcgcacaacaagatgagatcaatcg

SEQ ID NO: 18622 - DNA, 348 bp, Zea mays
  Peptide Sequence Number=SeqID_60401
atgggcctcgcctgggcaggacaaaaactaactgaagctatggtgtgtgggatagctgaaaatctcgaagggtactgcacgggtataccggtggcgatagaactagccattcatgaatacgtcgcccttgcccctggcacaaccgtcgaggtggtcgacggatgggtggtgactggggaggggaggggaggagaggtggcgatggggtgtaggggcgacacgcagattcgggtcgtgatgggggtaatcggtagacgacagcgcctaggacgagagcggggtgcggtgccgaggccggggagaacgggccaggcaggaggacgtcagaggcagtggcgtctgtggtga

SEQ ID NO: 18623 - DNA, 189 bp, Zea mays
  Peptide Sequence Number=SeqID_60402
atggacccaaatgactctgacatggtggacacgacaacgattccagggcatcacggcggggacgaccggctccaagagcagcgaggggaaatgacggccggctacaggaagggcgtcgtcgaaggcagcgtcgcggccgacgtcgagggcggcccgcagctagcgtcgagggagaggccaagggcttga

SEQ ID NO: 18624 - DNA, 234 bp, Zea mays
  Peptide Sequence Number=SeqID_60403
atggtgggtacaagtgcggtcactgcacgacggccagtcggggtcagtggggcattgtacaccaaggcgaactcagctagtgcttttggcaaccaaatcccacagccaaacagctgcatgtctagaggttctctggaggagatggttgctgggataacttggccgtccaccctgccaccgggttggactgttgagtgggaccctgcctcggctgaggaggagcatgaggagtga

SEQ ID NO: 18625 - DNA, 415 bp, Zea mays
  Peptide Sequence Number=SeqID_60404
atggagcgcggatttcgcggcgagccgcagacccagtgctcgattccctcccctgcggtcgcccagaccatcgttcggctggacggtgatgacggcgcagcgagctccggcccgaactcggcggtggctggagtggttgacgcggccaggggcttccagcgcgcgcggcgtagaagtcgcgttcagttgagggagaagaccgagctccacgcggatctcaacaacctgctcctaatcgcattgagccccgcagaaaccgcatgcatggacgcggcggcggttgcaagagatgacatgtggggccaaaaagcagctgcactaggccggcagtgcccggctgggcgttgcccacgcgcgcgcgggctagctcctggtccccgctaccaggggcagcgcacctccagccgcggcctgg

SEQ ID NO: 18626 - DNA, 462 bp, Zea mays
  Peptide Sequence Number=SeqID_60405
atgggcccgatcgtcagtatcttgtgcgtgtgggtcgtcactggcgtgtgggacctgtggctcagaaccttccctgccgcatcggactgcagcgagatccgcggcgagcttgcaggccgtgccctggttcctcggctgcgtgatcctcgcctgcgcggacttcgctcgcccctgggtataaatccgtggccgcggcatcccctggaccattggcgagctgcatcaccgaacagagggttagagaaaggaaggagagcgggtgccgtcgcgtggagccgagggagaagaaatcaccgccgtccaccgtgccctaggtgtagtgctggggagctccactgggcgcaaggaagatttcggcgacctcgccgggcagaacaagcgaccttgggcccgggagttcttcgccggcggaagatctccgccgcgccgtggacagggtctggcgtggcatcaccctggtaa

SEQ ID NO: 18627 - DNA, 366 bp, Zea mays
  Peptide Sequence Number=SeqID_60406
atggggaactcggctaggggcggtctggccgttcgccatgggggccgcaccctggccgactcgactgtgggctcgggctcgcgcacacacgggagaagaggaggggacgagggggccacgactagggactactcaccggagggcacacggacagggcggcttggtcgcgccaaagctgctggtcgtcgcgcccaggccaccgagctgctaggccgtcgcactggcgcacgcaagggcggggaaactcttgccgagactcaggggaaaatgagaagttcgtcgggcggcgttgcagcggcaccggcggagcacagggcagggacgggcgtgagacgaggaggggagaggagaacggggctgttctag

SEQ ID NO: 18628 - DNA, 366 bp, Zea mays
  Peptide Sequence Number=SeqID_60407
atgaggttgagaagctgctggatcctgaacaccgcagtgttcgtcagcgtgagggcctacatgcgaatggcactatcggccacaacccccatcacggaggacaacatggatcagagggaaagagcacgagggtgggcgggaggccgggaggcatggtccaggagctgggatttgaggatgaagaggagtagttccagtagtaaagcatggttgtccatggaggagatcaatgccatagccactgcttaccagagtttacctgatgaagagaagcaaactcatatcttgattcaacaacctaacaatgattctgagatagaggccattcttggcatgttggctggggagtcctctgagtctggatag

SEQ ID NO: 18629 - DNA, 414 bp, Zea mays
  Peptide Sequence Number=SeqID_60408
atgccactgacgccgatatggtcactgccttcacctacgacaccactaatgaggtgctggttcataagcttggccaccgggcgtctgagaaccaacaccgacctccttgacatcgcgaccaagttcactgatggagatcgaagacgcggtaaggacaatttccgcaaggagaagaccccacacgacaccggcgacataagcagcgcgaagaaggagcatcgagaacactctgacaagcaccagagtggcaaccacacccggcgcaaaggaaatgaagtggccacagccgcacacccgcccaatccaccaaccaataatggtggtggccacttccataagttgatggacacgtcatgccaaaatcatggttttcctaatccttcattagcccaccatctcagcgttgacgcttaa

SEQ ID NO: 18630 - DNA, 225 bp, Zea mays
  Peptide Sequence Number=SeqID_60409
atggaagaggaggaggttgaggaggggatatctgttgaagacgtggaagatccagaaatagaagctcttcctaagcagcgcgcgggggatgactatgacgacgacgaagaagaagccgatggagtccaagaccattatcagaggcttttttttcaacaaaaagagttacgtctgctgccacgccagcccacctgtgcctgcggtgaccggtgctataggtcatga

SEQ ID NO: 18631 - DNA, 1467 bp, Zea mays
  Peptide Sequence Number=SeqID_60410
atgcggcccaccacgtcctgccatcgcttccccctgctgctcgtcttgctcctcttcctcctcgccggcgagggccgctcccagcccgccgccggcggcggccccagtgaccgcgacacgctgctcgccgtcaagaaggcctggggcagccccccgcagctcaagtcctgggaccccgccgccgcccccgaccactgcaactggaccggcgtcacgtgcgccaccggcggcgttggggtcgtcaccgagcttatcctgtccaggcagaaactcacgggctccgtcccggcaccggtgtgcgcgctcgcgagcctcacccacctcgacctctcctacaacaacctcacgggcgccttccccggcgccgcgctgtacgcgtgcgcgaggctcaccttcctcgacctctccaccaaccagttctcggggccactcccgcgcgacatcgaccgcctcctctcgcggtcgatggagcacctcaacctctccaccaacggcttctccggagaggtgccgcccgcggtggcggggctcccggcgctcagttccctgcggctcgacaccaacaacttcactggcgcgtaccctgcggccgagataagcaaccgcaccggcctccagacgctcacgctggccaacaacgcgttcgcgccggcgccggtgcccaccgagttctccaagctcaccaacctgacatttctctggatggatggcatgaacctcaccggagagatcccagaggccttctctagcctcgaacagctcactctatttagcatggcttccaacaacctcaccggctcgatcccggcatgggtgtggcagcatcagaagctccagtacatctacctgttccacaatgtcctctctggcgagctgacgcgcagcgtgacggccttgaacttggttcatatcgatttgtcgtcgaatcagctaaccggagagataccgcaagacttcggcaatctcaagaacctcacaacgctgtttctatacaataaccagctcacgggcaccatcccggtgagcatcgggcttctaccacagctgagagacatccggttgttccagaacgagctgtccggagagctcccgccggagctgggcaagcactcgccgctgggcaacctcgaggtgtgccttaacaacctctccggcccgctgcgagggtcgctctgcgctaacggcaagctcttcgacatcgtcgccttcaacaacagcttctcgggcgagctccccgcggcgctcggggactgcgtcactttaaacaacttgatgctctacaacaacaacttctccggcgacttcccggagaaggtatggtcgttcccaaatctgaccttggtgatgatccagaacaacagcttcactggcacgctgccggcccagatatcccccaaactgtcacggattgagataggcaacaacatgttctccggctccttcccggcctcggcagcagggctcaag

SEQ ID NO: 18632 - DNA, 303 bp, Zea mays
  Peptide Sequence Number=SeqID_60411
atgtggaacatgggtgtagctattctaatctcgtttctggtttcagctgtattccatgagatatgtattgcggtgccgtgccacattttcaaattctgggcattttctgggatcatgtttcagataccgttggtattcttgacaagatatctccatgctacgttcaagcatgtaatgctagcagctggtcagcctgaaaatgcttctattccaggcggccgtgctgggatgcagcgtgtacattaccagcgatgcaacgtcaacggttaccaagcgcggataagcagtgctcgtggcatgtga

SEQ ID NO: 18633 - DNA, 1995 bp, Zea mays
  Peptide Sequence Number=SeqID_60412
atgctgacacgtcgccgtagcaaccacccgggctgctccttccccctcccgttcctcgtctgcggcctgctcctcgctgcggccgtcgcattttccccagctgcggccgccgaagcagctgacggcggcgctgggcacgagggccgcgcggggaaaccggaggtagaggccgaggcggaggcgcgcggggatggggttgccgtggcggaagccggcggcgaggtggtggctcagggcaatgccacggaggccaaggagggcagccttgccgacatgatcgaccgcgcgctggagaaggagttcccggagtccgagggcgagcagggcggtggagagaccgaccctggcagcttcaacaacacggtagctgagaagcagatatgcaatgcaaactgctcatcttgttccttctactcgtaccagggagttcttgaaactgtagctagaagagtaacaaagaagaatgaaaccaaagataacaagtcatttccttttaaggaggttttcttggatcgaactgagcaagaggatgttcccacgttgatagatcggaaggataatgtttttatcatctcaaacccaaagtcaaaataccctgtgctgcagctggaccttaggttgatatcagatcttgttgttgttatcgtatccgctacatgtggtggaattgcctttgcttgccttgggcaaccggttaaggtgattacaggttatctacttgcaggatctataattgggcctggaggttttagctttgtcaatgaaatggtgcaagttgaaacggtagcccagtttggtgtgatatttctcctgtttgcattgggacttgagttttctactgcaaaacttcgagttgttcgtgctgttgctgttctcggaggattgctccaaattatgttgttcatgtttctttgtggtattttggctaccctatgtggaggcaaaactaaagaaggtgtttttgttggtgttcttctctccatgtcttcaacagctgtcgttttaaagtttctgatggaaagaaatagtatcaatgctcttcatggccaggttacagtcgggatacttatattgcaggattgtgctgttggcctgctgtttgcgcttcttccaattttgagtggtacatctggccttcttcacggagttgcatcaatgatgaagtcgctggtggtattgataacattcctgaccattctctctatcctctcccgtaccggcgttccttggtttcttaaactgatgataagtctgtcatcacagacaaatgaactatatcagctggcagcagttgcattctgcttgttatttgcttgggtgagtttctactgctcttatattgattttgatttagcttatggacctatatttctttactttatcatcaaaactgtatttgttaaagacttaaagtgtagtgataagttgggcctgagtctcgagttgggttcttttgcagctggagtaatgatatcaacaacagaccttgcacaacatactcttgaacaaatcgaacccatccgcaactttttcgctgctcttttccttgccagcattgggatgctaattaatgtccatttcttgtggaaccatgtggatatactccttgcagcagtaattttggtgatcaccgtaaagacctttattgttgctattgttgtaaaagggtttgggtatagcaacaaaacatctcttcttgtcggcatgtcacttgcacaaataggagagtttgcttttgttctcttaagccgtgcttcaagtattcatctaatcgagggcaagctatacctgcttcttcttggaaccactgcacttagtttggtgacaacccctctgctattcaaaatgatccctgcaatggtccacctcggggttcttttgagatggttttctgtcgataccaatcaggtggagctgggcctgaaaaatgatgtcctccgcatcgatagcggcaagcgcataaatctgatagtccaaggctcacatgactcatga

SEQ ID NO: 18634 - DNA, 510 bp, Zea mays
  Peptide Sequence Number=SeqID_60413
atggcagcgacttgggcgagatccaaactagagcagcagcacaccgacaagcagggacgactggcaaactccggtttaggtgaatggaacgcgacacagggagctggtgcgcacgctccacggcgaaccgagaaaccggctacgcgcaggggcagaggaccgcgcatgcaaggcgagcagcaaggcgacggcgcgcaggaacgggaagcctcgacagggcgctgtacggaggagttcggctgggactcggcagggaggagacctcggctgggggcttggcgcgcggcgaagcagacagcagagggagctcgcggccatggaggaataggggtgcgacggcaaggagctggggtcaagcagagagaaaacgagagaaaggaaaaggagccggacgccatggatggagtctgcacgggattctgccgggctggcgacagcgcagtggagcagagagtgcgcgcaggcaaccagaagccgggcgagtgggagggagaagaccccggacgctga

SEQ ID NO: 18635 - DNA, 720 bp, Zea mays
  Peptide Sequence Number=SeqID_60414
atgacccagcgccttctcctcgccctctcgctcatcgcatcagcgaccgccgtgcccgctgtcatccgcacggtcccggacgaccccaccgcgggctcctctggcgcggcagacgccgcggacgcgctcttctgtgacagctggaggctgtcggtggagacggccaacgcgggcccctggagcgccgtgccctcgcgctgtggggctttcgtgcgggactacatggagggacctcgctacgcgtctgactccgccgtcgccgacgccgacgccctagccttcgcctccgaagccctggccgccgccgagtggggcggctcggcgagcgcgaggcctgcgtgggtgttcgacgtcgacgagacgctgctctctaacgcgccgtactacgcggtcaacggatggggatcacaggaattcaatgagacctcatttgatgaatgggtagatgctgcaaaggcaccaacattaccatcgagcttgaatttgtacaatcaacttcagggacttggtttccatgttatcctattgactggccggagtgaattccaacgtaatgccacagaattgaatcttttgtttgctggctacaactcatgggaaaaactcatactgaggcctaagatctcattctacacaaatttgcaccgcatcaccatggttttgcctatatcagagatgcaagtttacttttctatggcaattggtcaggggcggagctaa

SEQ ID NO: 18636 - DNA, 1422 bp, Zea mays
  Peptide Sequence Number=SeqID_60415
atgtatttcgatgggtcgctgatgaaaacaggagcaggtgttggcttgctcttcatctcacccctcaggaaacatgtgcgctacgtgctgcgcctccattttctggcgtcaaacaatgtggccgagtacgaggccttggttaatggactgcgcatcgccgtcgagcttggggatcagtgcctcgacgctcgtggtgactcggacatatatcaaccatccgtaaaacttgatgacgcgcccgaacccgacgagacctcagcccagcccgagggacaagagttgttacaagaaatatactcgggggcttgcggtcaccatgcagcacctcggaccctcgtgggaaacgctttccaacaaggtttctactggccgaccgcggtggccgatgccactaggattaaggcacccgggggcttcaagcacctgctggtcaccatcgacaaattttccaagtggattgaggtccgacccttgaccagcatcgggtccgagcaggcggtggcgttcttcacaaatatcatccatcgctttggggtcccaaactccatcatcatcgacaatggcacgcagttcactaggaagaagttcctggacttctgcgaaggcccaccacatccatggactaaatccgaggatctacaacgacctcaacaagttcggcaagtggtggataaaagaactaccctcggtggtttggagtctgaggacgacaccgagccgggccacggctggaagaggctcgggacgtggccttactacactcggcgcggtatcagtagtctctgcgacgctaccacgcccgaagggttcggccccgaggcttccaagtgggagacttgggactccaactccgaattgctcaccttcgggaattctggagggcgctccgctataattcaccggactgtccggtggcacaccggactatccggtgtgccagcggagcaacggctacttcgagccaacggtcatctgcagaacgcattgaatgcgctacagtgcacgccagtgtcagagcagagactgatggcgcaccagacagtgaacagtgcctatccgatgcaccaccagactgtccggtgccccagaagacagaagctccaacggtcagaatccaatggccaggtgacgtggcaggcgcaccggatagtgtccggtggcgcaccggactgtccggtaccatccgtaggggatgaagattatgatgaggacgaggtggcccaaatcgtgcacttcaactcccaagccaccactatactcctcacctctctaagtcgagaggagtataacaaggtgcaaggattgaagagcgccaaggaaatttgggacgtactcaagaccgcgcacgaaggagacgaggtgacaaaaatcaccaagcgggagacgatcgagggggagctcggtcgcttccgccttcgctaa

SEQ ID NO: 18637 - DNA, 255 bp, Zea mays
  Peptide Sequence Number=SeqID_60416
atgaagctgtggaaggagacttccaggagttccaagactacgacgagttctaggtgtgggttagcggcaacccccagtcggctgcctgtgaaggccgcggttatctacgtttcgttttcgcactttgatttatttctcaaattaaaaacggaactttcaggcaaagacaatcgcttccactacaaaattttgatgggtatcaaaagattctttgctccaataaatgtatcttctatgcatttcataagagaatga

SEQ ID NO: 18638 - DNA, 237 bp, Zea mays
  Peptide Sequence Number=SeqID_60417
atgaaggtgatgccgtcagcaacgacaactctacaccactgcacaggacgcgtcaacaacaataataaagtctgccaaggtggagttgtgtctcgacaacttcttgcttgccccacaaaatttgcacacctgcgacctgcaagtaaggcacttagggcctgtttggacattgatccgctggtatacaacacttgcaaagctatagtcatagacattgatccatttggctacaaataa

SEQ ID NO: 18639 - DNA, 789 bp, Zea mays
  Peptide Sequence Number=SeqID_60418
atggctgaatatgaagccttggtcaatggcttgcgtatcgccatcgagctaggagtcagacacctcgatgttcgaggggactcccagctcgtcattaaccaggttatgaagaacttaagctgccacgacgcaagaatggaagtgtactgtgaagaagttcggtgcctggaagacaagttctttggcctagaacttaatcgcatcgcgcgacgggcagggccactccagcctcagactggtggaccccgtaccaagagtatctcctctgaggagaactccctcttggtaaggtcgagacccggcgcctggcccggcaccacgcgacacaccggaccctcgttggaaacgcctttagacatgggttgtactagccaactacgattgccgatgctaccaggattgtgcgatcctatcgaggataaggcgcccgggagctttacgcacctgccggtcgccatcgacaaattctccaaatggatcgaggtccgacccctcgccaacatcagatccgagcaggtagtggcattcttcacagacatcatccatcgcttcggggtccccatctccatcatcagggacaatggcacccggttcacagggaagaagttcctgagcttctacgacaaccaccacatctgtgtggactggttggtcatggctcatccaaggacaaacggacaggtagaacgtgccaacggcatgatcctacaaggcctgaaatcgagaatcttcaacaaactaaataagttcagcaaaagatggctcaccgagctctccttggtggtctag

SEQ ID NO: 18640 - DNA, 126 bp, Zea mays
  Peptide Sequence Number=SeqID_60419
atggccgaagacgacgagtgtcttgacgccatcaaagcaaccagtgatgagttcttaggggcctataccaaggcaaaggacgaagctatgaatgctacattggttctcgacgaagaagaagattaa

SEQ ID NO: 18641 - DNA, 864 bp, Zea mays
  Peptide Sequence Number=SeqID_60420
atgacttcgcccatcctacgggaagcatctagccagattctagaagttactaggggtgagtgcttggatgctggaagatcaccaggagtcttcgaaaaagaagaggaagactctactgtagctggtggaccctcatcgcgagatgaaggctcttcgcactggcacgactggggggtcaaagtcaagagctacaaagactacggggatgagacgggtgcagctggcgaggtggtcctcaatctttctgtcgaagactacctgcttgaaggtgtcagcgagttggacacccacactaggttggcggtcggtggcaaggtctgggctgggggcaccggtggacccgtgggcatagttcaacgttgccatcgatggaggcaggggataaccgaggcgtttgctccaatggaatcgtgcgctcttgtggacctcgcaacccacaactatgctctaagaaaaagcgactggaagctaaggtcgaacgccttcagaccaagaatattgaggctatttgggacaagtctgctgccaaaaattaaagctggtgactcttggaggagacatgaagagacgaggaggtcgaagatcttggaggactcgttgactacttttgatggcggcgacgttgaggaggagtcatcggatagcgaagagggtttgaacttcttcgtgaggatggacgaggagtcctgtgaagaggacttagacttttttattgcactagacattgcgtccgtagcagaggctagcgtggtcgaggggcctttgaatggggccctgttagcctcgataaaggggaaaaggaggcgcattggtgtctcaaagcgaagggtggatagcgccaacacattcatacgtggtcgctaa

SEQ ID NO: 18642 - DNA, 1980 bp, Zea mays
  Peptide Sequence Number=SeqID_60421
atggacgacgccgcgggagaggaagaagcttcgatgttcgagaccagccatgtccttggcgccctgctggcctcctcgccgctgctggcgtccgcctgggaccgctgtacgaccgccacagccgcggcgcccgggttcgtgcacggagaggacggcggcaaggtgtacgtggggttctccggggtgcaggccgcgctgtctgcggcaggcgcggcggtggccggtggtggcgccgacgtcttcgcgccggtggggctcggcggggacgcggcggggcggatgttcgcgccgctgctcgcggccgagcccgactcgtccgctgctggggagccggttgccgtgcaggcgctggcgctgcagtgcttcttgaaactctgcggtaaccctgatttccagatgcttctgaatgagatcaggggtaaggcagtcatgttcacgggccactccctcggtggcgccattgccaccctcgcggcgctacactacctctgcatctcatcttcaagctcaccatggtcacctgctgctcctgtcctgtgcgtcacctttggaagcccgctactaggcaatgaggcactgtccagggcaatcctgcgtgagcgctggggtggtaacttctgccacgttgtctcacagcacgacgtcgtcccaaggctcctcttctgccccccggacgccgtccctgcgcatatcattgtcggaatgcaactggatcaatggccggcccggactcgccacacaggtgcggtgaacacggtcaccacacgcatggcggacactgacaagaacgcgctccagcagctgatacagacacacatggccgctgtggccatggagcagaagcttgctactcctgagacgacaggtgggagtccttaccggccgtttgggacgtacgtgctgtgctccccagaaggtgcggcgtgcgtggacaacgcgaccgcggcggcacagatgctgtacgccaccttcgcatctcggagttcgcccggtgcagagtccccggaggccgcgcactcctgctacggcgagctcgtgctgaaaatgccacagcacctgctcctcaagagatgcctgcgtgtggacgacacgcgtgccacgcccaactacgacgacggcgtctccctcgcactggaggcctccggcatcgacgccacggtgagggcacacgccatggaggcatcgacagcgcggcagtggctgaagacatcgaagcgggcagggcggcggccgagcctgaactgcgcttgcctagcgacgcagcttggccggatcacgcctctccgtgcgcagatcgaatggtacaaggcggtgttcgacgcggagatggggtactacgacgcgtttaagcagcgcaggtcgcccaggaagtactccaaggtgaacttaaaccgcatgaagctgggccagttctgggacggcgtgctcactaagctcgacgccggtcagctcccccacgatttccaccgccgcgccaagtgggtcaatgctgcccgtttctaccagctcctggtcgagcctctcgacattgccgactaccaccaccaaggcctccatcggacgagcgggagctacatgacccacggccgggagaggaggtatgagctgttcgacaggtggtggcaggagaaggcatgtacgggcgctggcggcgacatcacgtcctccatgttggcagcgtcggcgagcagccggagacgcagcaaatacgccgggctcacgcaggacccgtgcttctgggcgagagtggaggaagcgagggaggagacggagagcgctcggggcgagcgcgacgtggcggagctggcgatgaagctggaggagctgcaagagttcgagcgctactcccgtgagctggtggcgaacaaggaggtgtctgttgacgtgctcgcgccgcagtcgagctacacgctctgggtggaggagtggaaccagctcaagctcagggatgaggtgaggacactgttgctccagttttga

SEQ ID NO: 18643 - DNA, 849 bp, Zea mays
  Peptide Sequence Number=SeqID_60422
atggctgcggcctccgaccgtggtgaggtcgacactgcacggcccttccggtccgtcaaggaggccgtagccgtgttcggacaccgcatacttgtcggcaacaaccattccagtcacagcagcactgcggccgccgccattgccagcccaagcgctagtgccaatgccactggcgttgctgccaccccgagtgccaagcatgaagcaagcagtagcagcagcaccatgaccttctctcccacaccaatggccgagagcgaggcggagattatacctgccactgtgcccttgtactcggcgccatcctcgccgccatctctcgcgtcgtcaccttcgccggtcaagccgtgcagcggtcaccgcggcgacgagtcagccggtggtctggtgatcgtgcgctcaatccagaagctggaggccgacgtggccgcgacgaggaaggagctggcgcagctcgggaagcgggggaacgagatggagaaggcgctcgtcagcctcagcgcgcagctccaccggggcctctcgaagctcgcggagatggaggccgacagggcggcgggacgcggccgcagcatcgcgtgcgacaccgacgtggcgtcgttctcgctccggagcgagcagtggggcgacaggctcgccgcgagcgagtacctgccgtccttctcccacgcgctgagcctcggcgagatggacgacgtggagctcatgggcggccagaggaggaaggcgcagaaggtcaagcccatcgtgccgcttatcggcgacatcctcttctccaggaggaagagcaccaaggagaagggtgatgacggctcctacagtggtgatctctacggcgtgctaggctag

SEQ ID NO: 18644 - DNA, 1218 bp, Zea mays
  Peptide Sequence Number=SeqID_60423
atggcgatcttcgaggggatgatgaagcaggtcacggataagcaggacgccatgcagcgcgtgttcctggagacgctcgagcggtgggaggcggaacgcacagcgcgcgaggaagcgtggcggcgccaggaggtcgcccgcatgaaccgcgagcgcgagcggctcgccagggagcgcgccgccgcggcctcccgcgacgccgcgctgatcgcgttcctccagtgcgtcggcggtggtcaggggcagcccgtgcggctccctccacacagcgccggcgccagtgtcgtgcccgcgccgccaaagccggactgcgcccctccgtcgccccggctcgacgcggctgccacctcgcttcagcagctggtgcccgcgcagctcaaggcggtggaggccttggcgtgggcgggaggcgagggcggcgggtccacgtcgtcgcggtggcccaaggaggaagtggaggcgctgatccaggtgcggaacgagaaggacgagcagtaccatgatgcggggggcaaggggccgctttgggaggacatcgccgccgggatgcgcaggatcgggtacaaccgcagcgccaagcggtgcaaggagaagtgggagaacatcaacaagtactacaagaaggtgaaggagagcaacaagaggcgccccgaggactccaagacctgcccttacttccaccagctcgacgccatgtaccgcaagaaacaccgtggcgacagaggcagaataaccgcagctggaccgaacatgcaggacagcccgagccagcgcgagctcgagggaaagagcagcaacgatgttgacattgacaaccggaagagtgatgaacagggaaacgtgcatacttctcccgtcagcggcaaccgtgatacagcaccaacgaccacccggccgccaggtgacggcgccaaaaacaagacggcggaggacaacttgaaacgaacgaatgtgcagctcaagcaacaacagcatgagtttggaacggacgagacggacagcgacgacgacatggcaagaaaccacacagcctacactgaagaagacgacgacgaagccaaaataaaatacaagatggatttccagaatcctaatatgatagggagcagcagcaatatgtctgcaccaccaccacccgcagcagcagcagcgacgacggctgcggcaccgacgacttcagctgccccaacgagcaacaccttccttgccgttcagtag

SEQ ID NO: 18645 - DNA, 378 bp, Zea mays
  Peptide Sequence Number=SeqID_60424
atgcctggactctgcgaccgcacacccatcatcactcagccaacattcatgtcgtcgtcgtcggtctcccgctccgcctggcgtccccgtccttctaccgccacgctctcgtgggaggcaacccactcgcgggccgcaccccatgccctcctcctaaaacccctcgcgtccaagccccgcgtatcgtaccaccaactcatgcccctccaccaactgcgccagcatgacccaccccttgtcgtcgcagtcactgcctccaagccggttctccagggaatgctcactgggctgctaggcaacctctcgcccttctcctatttcgccaaaaagagtgagacggaggttgtcatctccacctatgcggtcctagtttgctaa

SEQ ID NO: 18646 - DNA, 1425 bp, Zea mays
  Peptide Sequence Number=SeqID_60425
atggggagtgtaccggaggagaaggccaagctgggcttcggcggcctggtgggcgacctgagggaggtgtacgagagcggcaggacgcagggcctggagtggcggcagtcgcagctcaggggcctcgtcaggctcctggaggagaaggaggaggagatcttcgacgtgctccacgaggacctggggaagcaccgcggcgaggccttcagagacgaggctcacacgccgctcgttgccttcccggcgaccgcgctggtggtgccagagccgctcggggtcgtgctcgtcttctcatgctggaacctcccaataggcctagctctggaaccgctctcgggagccctggcggccggcaacgccgtggtggtgaagccgtcggagctcgcgccggccacctcggcgttcctcgcggccaacatacccaagtacctggactccaaggccgtgaaggtggtggagggcgggccggaggtgggggagaagctcatggagcaccgatgggacaaggttctcttcactggcagcagccgcgttgggcgccttatcatggcccaggccgccaagcacctcaccccggtggcgctggagctcggctccaagtgcccctgcatcgtcgactggcttgacagcgacagggacagccaggtagctgtgaatcgcatcatcggagcgaaatggtccacctgttccggccaagcctgcatcgccatcgactacctgctggtggaggaggagtttgctccgattctgatcgagatgctcaagtcgacgctggagaggttcttcaccaagccagagtacatggcgcgcatcctgaacgagaagcagttccagaggctgagcggcttcctggccgaccgcagggtggcgtcttccgtggtccacggcggccacttcaaccccaagacgctgagcatggagcccacgcttctgctcaaccctccgctcgactccgacatcatgacggaggagatattcggcccgctgctcccgatcatcacggtgaagaagatcgaagacagcatcaagttcctcaggtccaagcccaagccgctggcgatctacgccttcaccaggaacgagaagctgaagcaacgcatcatagacgagacgtcgtcggggagcatcacgttcaacgacgccatcgtgcagagcacaccgatcgatcacccagacattttgttccagtatggcctggacagcatcccgttcggtggcgtggggcacagcgggttcggccagtaccacggcaagtactcgtttgacatgttcagccacaagaaggcggtgctcaagaggagcttcctcgtcgagttcatgttccgctacccgccgtgggacgagaccaagatcggaatgctcaggcgcgtctaccgcttcgactacgtctcgctcttcctcgcgctcatcggcctcaggagatga

SEQ ID NO: 18647 - DNA, 204 bp, Zea mays
  Peptide Sequence Number=SeqID_60426
atggctctggtcagattggcgtttcccgtgttcttcttcctcgcagcggcggagttcgcggcggggacgcggtcgccgtcggctttcgtacaaaacgccatctactccaaccgcatcaccatcttctccaagacttactgcccagtatgctgctctagtttatggcataagatgctggtctacattctattgcgagtaaattag

SEQ ID NO: 18648 - DNA, 606 bp, Zea mays
  Peptide Sequence Number=SeqID_60427
gaccaagaccccctgatctacacggcagacgaggccgcgctgtgcgaggcgtgcgaccgccgcgtgcaccgcgccaacaagctcgccggcaagcaccgccggctctcgctgctcagcccggcggcgccgtcctcgtcggcgcagcagacaccgccgcctccgctctgcgacatctgccaggagaagcgcgggctcctgttctgcaaggaggaccgggcgatcctgtgccccgactgcgacgtgccggtgcacacggccagcgagctggccatgcgccacacccggttcctgctcacgggcgaggacgagaacgacagcagcagcagcagcatctccgagtacctgaccaagacgctgcccgggtggcatgtcgaggacttcctggtggacgagaccgccgccgcaactgccattggcgtctccgcagacgtgtcgtatcaggcgggagggctagctcggacaggcggcccgcaggacggctactactccgcgtggatggcgccggagcagatcttctgcgagggcaagggcagcaggatgccgcagatggcgatgtgcagcagcagcaagagacccagagccacgtcctcctattcttactggtga

SEQ ID NO: 18649 - DNA, 276 bp, Zea mays
  Peptide Sequence Number=SeqID_60428
atggggatatcctacacatccaatggggccttggggacgcctcccatagccacaatcactttcatcaccagcggtgcctttgtcatattgagctacttctcaattctcaaatctcacctacctcttctgttggctgttgctttgaccacgagcgcgaacgcggcaggggctcggttcctggctccctctcctgccctaccacgttacaccgcgtacgtggacgctgtggcatggggcatggctggctgcgttcccacgcgcggcccgtgcgggtga

SEQ ID NO: 18650 - DNA, 1215 bp, Zea mays
  Peptide Sequence Number=SeqID_60429
atgggccccatcaaggacttaaaaggagtacagagggtcatgggatgccttgcggctctgagccgtttcatctcgcgcctcggcgaaagaggcctacctctgtaccgcctcttaaggaaaatcgagcgcttcacctggacccccgaggccgaggaagccctcgggaacctaaaggcgctccttacaagcgcgcccatcttggtgccccctgctgccggagaagccctcttggtctacgtcgccgctaccactcaggtgaagctactgtacgcggtaatcctgacgcggcaaaagttgcgacactacttcgagtctcatctggtgactatggtgtcatccttccccctgggggagatcatccagtgccgagaggccttgggtaggattgcaaagtgggcggtggagatcatgggtgagacaatctcgttcgcccctcggaaggccatcaagttccaggagcgggcgcgagcctgctcttcatctcaccccctcgggaagcaccttcgctacgtgctgcgcctccatttcctggcgtccaacaacgtggccgagtacgaggctctggttaacgggttgcacatcgccatcgagctaggggtccagcgcctcgacgctcgtggcgactcgcagcttgtcatcgaccaagtcatgaagaactcccactgccgcgatccgaagatggaagcctactgcgatgagcccgaggcaccctcggctcagcccaaggcaccctcggcccccgagggtgaggcactacgcgtcgaggaagagcggaatggggtcacacctaatcgaaactggcagaacccgtacctgcagtatctccaccgaggagagctacccctcgacagaaccgaagctcggcgactggcgcggcgtgccaagtcattcgtcttgctggtgcctcgagcccttgttggaaacgccttccgacagggtttctactggccaaccgcggtggccgacgccactaggattaaggcacccgggggctacacgcacctgctggttgccatcgacaaattctccaagtggatcgaggtcagacccctaaacagcatcaagtccgaacaggcggtggcgttcttcaccaacatcatccatcgctttggggtcccgaactccatcatcaccgacaacggcacccagttcactggcagaaagttcctggacttctgcgaggaccaccacattcgggtggactggctgccgtag

SEQ ID NO: 18651 - DNA, 252 bp, Zea mays
  Peptide Sequence Number=SeqID_60430
atggggcggcacgtgtacctggtcgaatatggcagctgtggctccggcggcttgcaagggaaaacgaaagcggcacctctccgaggacgacgtctggctcctcctccacaggacgatgacagtgacctagaactggagcttgaacccgatcccaacttgaccaaggaaactttatgtgaggcctctgcattagccaaggtatcacttgtttggaaagcatatgtgagagcacctagaggggggggtgaatag

SEQ ID NO: 18652 - DNA, 204 bp, Zea mays
  Peptide Sequence Number=SeqID_60431
atggagattgctaggatgcaggaagcgatgaggcaacaaatagattatcaaaggctgcaagtaagtgacacgacaaatgggtatcctaatactaacctttggaaccgccgcctccaccgcctccacaatttacttggcctcctccacaacagtctatcaatgtacccaaaaactctagatgaacatagcaaatttagtccatag

SEQ ID NO: 18653 - DNA, 889 bp, Zea mays
  Peptide Sequence Number=SeqID_60432
cacctattgttttgtgaggatgcccaaaggcctcaaaaacaccgggtccactttctcccgcctcacgcagtctataatactcaaggaccaggttgacagaaacatcttcacctacgtcaacgacattgtcgtcgcaatcaaaagaaaagctgatcagctgtcagacttggtagagactttctctaacatgagagaggccagactctggctcaacccaaaaaatcagttggtcccgtcgtttaccaccagtccaccgcaacatgccgccccacttctcagtgactccccactggaccgtagtccgcagcagaggcagagcgaggccaaagcgtgcacggtacaccactacaccgtgcactacaccgcctcatcgacgctgccgcccgcccgcacctcccgctgctccacctccccgccgccgcgctcccgcctcctggcaccggcgcgggcggggatccgctccctccgcctcgcaccctcgctccgcgcgctcgcgtcgcgcctcgacccgctcgcgctcgcgctctcctcgctcgccgcgctcccagcctccgcctcctcctccccgcacgacaacgttctcttcctcgcgcccactccaaccgccgcgctgctcggcctccatgcgcagctctgcgagctgctgcggaaggacgctggcgtcgaggtccccgacgcgttccggcccgaccactggctaccgcggtgcgccgtcgccgtcgacgtgccccgcggccgcatggcggaggccttctgcgtgctccgagagctcaagctgcttcccgtctccgggtacgggatggacatcgcgctcgtcgaggtcggggccaccgttagggagctcgtgtcctacccgctcggcggtggcagcagcgctggagcggactga

SEQ ID NO: 18654 - DNA, 3996 bp, Zea mays
  Peptide Sequence Number=SeqID_60433
atggctctctccactctccagattgtgttctcatttgaccgtttaagtgttatcatttccttgaactcagaatttattgtccagtacgtgtgcgatgatatcacctcattaaagaaggaaaggcacgtggacaaagttcaagactcagagccaccaactcctatgtcagtcatgaaaatgggcaagaaccgagttaatgtggaggatgaggagacactttcaagcgttgctcaatgtattgagcatctacgacagagttcttcatcctcacaggacaaagagagctctttgaagcagttattagatcttgttcaaactcgtgatactgcattcggagctgttggatcgcattcacaggctgttccaatacttgtatctcttcttagatctgggccatctggagttaagatgctggctgctactgttcttgggtctctttgcaaggaagaggagttaagggtgaaagtcttacttggtggttgcatccctccattgcttgctcttctcagatcgaagtcagctgaaagccaaactgcagctgccaaaaccatctatgcagtttcacaaggtgggataagggatcatgttggatcaaagattttctttacggaaaatgttgttcctgtactgtgggagcaacttaaaattagtctcaagaatgagagtttggtggatggccttctaactggagcactgaagaatttatcaaagaatacagaggggttttggtcagcaactgtgcaatgtggtggagttgatatacttataaagctggttagttctggacaaacaaatacccttgcaaatgcttgctatctccttgggtctttgatgatggaagactcttctgtttgttctaaagttttatctggagaaacaactaagcagctcttaaagttacttggtcctggcaatgaaacttctattagagctgaggctgctggggctctcaagttcctttctgcacagagtaaagaggccagacgtcagatagctaattctaatggtattcctgctcttataaatgcgactattgctccatcaaaagaattcatgcaaggtgaatctgctcaatcattgcaagagaatgcaatgtgtgcattagcaaatatatctggcggtttgtcctatgtaatctcaagccttggtgagagtctcgagtcatgttcttcgcctgcacagattgcagatactcttggtgcattggcctcagccttgatgatatatgacacaaatgcggaatctatcagtgcttctgatcctgttgacattgagaagacactgttgaagcagtttaagcctaaggttcctttccttgtgcaggagcgcataattgaagctttggctagcttgtatagtaacccggttctctgcaagacactagcagattctgatgcaaaacgcttgcttgttggtttaataaccatggcagctactgaggtgcaagatgacctcacaaaatcactgtttgctctctgcaaaaaggattgtgacctatggcaagctctgcaaggccgtgaaggtgtccagctattgatttctttacttggtctttcatcagaacagcagcaggaatgtgctgttgctctgcttgcgcttctttcaaaggagaatgatgagagcaaatgggctatcactgctgctggtggcatacccccacttgttcaaattttggaaactggatctcccaaagccaaagaagattcagcaaccatccttggcaatttatgcaatcacagtgaagacataagagcatgtgttgaaagtgctgatgctgttcctgctttactatggcttctgaaaaatggaagtgataatgggaaggagatagcttctaaaacactgaatcatctcatccacaaatcagatacaggaactattagtcagctgtctgctctcttaacaagtgaacagcctgagtcaaaagtttatgttctggatgctttgaaaagcttgctttctgttgcaccacttgatgatattctacatgagggaagtgcagcaaatgatgcggttgagacaatgattaaaattctaagctcacccaaggaagagactcaggctacatcagcaactgctcttgctggtctatttcattgccgcaaggacctgcgagaaactcatattgcagtgaagacactctggtcgctcatgaagctgcttcatatgcagtctaacaaaatactaatgggggcctcatgttgccttgctgccatttttctttcaattaagcaaaataaggaggttgctgcaattgcccgggatgccttaaccccacttgtctcacttgcaaattcttcagttattgaagtggcagaacaagcgactagagctttggcaaatcttttccttgatcaggaattatccctccaggtgtcttttgaagaaaatctcttccgtgtaacacgtgtgctaagagagggaactattgatggaagaactcatgcagctgcagcaatagctcgtcttttacagtgccgaactgttaatcagccactttcagatactattaaccgctctgggtctgtccttgctctagctgagctcttggaagttgccaacggtgaagctgctgcaacatcagaagttcttgatgcactggtgctgttatcgcgatcaaaggcatcaagtgggcacaccaaggctccctgggcaattcttgcagaaaaccctcacacgatacttccccttgtttcatgtattgctgatgctgcagcctccttacaagataaagccatagaagttgtgtcaaggctctgttccgaccaacatgatgttattggtggtctggtttctgaaactccaggttgcatatcatccattgcatggcgcatcattggctccaacacgcttaaagttaaagttggtggatgtgctcttctcgtctgtgctgcaaaagagcattgtcagaagcaaatagaggttctgaatgatgcaagtctgtatattcaactaatccattctctaattgatatgatccatatggcaaacacgcctgctgaaaatgtcagcagtgaaagcatatcagatattagaatttccagacactccaaagaaaactacagtgatggtgaaactgtgtgccgtactgctgtaatctcaggcaacatgattccactatggctacttgctgtcttttctcgtcatgacagcaaaacaagagcagaactcctagaagctggagcagttgaaatgctcactgagaagatttcacaaaatgcattccaatatgtcaatcatcaagttgctagaaccaagggtgaagaagatagcacctcatgggtgtgttccttgcttcttgctttgctatttccaagaaagagagataattcgatcaaactctgcatcaccattccatttcctgtgctctcaaacttgttaaggtcagacgagccagcatacaggtactttgctgcacaagctttgtcaagtctggtttgtaatggtagcagaggaacacttctggctgtcgctaattctggggcagccattggacttgtatctttgcttggatgcgctgatgtcgatatagccgatcttttggaattatcagaggaattcatgttggtgcctaatcctgatcaaattgcattagagaggctatttagagttgatgacatcaggattggtgcaacttctagaaaatctattcctcttcttgttgatctacttaaacccattcctgaaagacctggtgctcctttcttggctttgggtcttctgacccagttagctgttgattgccccccaaacatgctgctaatggctgaagctggaatactagaagcacttaccaaatacttatctcttagtccacaagatgcaacagaagaagctacaactgaattgctgggcattcttttcagtagtccagaaataaggcatcatgaatcagcacttggtgttgttaaccaacttgttgcagtcctttcgtctaggaggaaggaattcacgttacagtgctgcaaaggcattagagagtttgttttttgctga

SEQ ID NO: 18655 - DNA, 444 bp, Zea mays
  Peptide Sequence Number=SeqID_60434
atggcttcctccatccacggcaggcggagcggaaccccggccccccgggggacagacagggtcgtggggacgaaagccacgcagcaccagaccccaccaccacgagctgccgatgatgcatgcaaagatgctcttaggctattggcgtgcggcagcacgattataacacgctcttcagctcgctcctcggcctatagtagaaataacactgtggcctgggctgcttcgcccgccagaagaaaagcatggaagatagaagcaagcgagcagctagtgtgtgctaggactatctccagcatcatacccatgcatatacctatatattcaaactccactattgcgagcactgcggaagaatgcaaatctgctggagtcggcctaatagatcgtgtaaagagaaaaaagacatctattgtccaagtctccaaacataccatggcataa

SEQ ID NO: 18656 - DNA, 336 bp, Zea mays
  Peptide Sequence Number=SeqID_60435
atgtcgcgcgtcggaaagatggtcgatgacgggaagatacaaggtgttggcgccgatctggcaccaaacaccaggaagaacaactcggcggtgctctctgcggggcgtggacgatccgtagccctggaccggaccgcccgcgacctcgctgcaggagcagtttctccctgtacgcttgtcgtacggtccgtgctcggggctcagacggtctgcgcgtgcgcagaaggtgttcttctccacaacgaacttgaatctcgcctcccgggagggaccccgtcagggaggagagatcttggatgtgtcttaggattggcagactgtccaagacgcctctag

SEQ ID NO: 18657 - DNA, 969 bp, Zea mays
  Peptide Sequence Number=SeqID_60436
atggcgggatctagcttgagcggcggaggcagtaccggaggggaggattgggcagcattggaggaggcggacgcggtcgcggccgcggctgtggaggagcagggcgattcggtggtgcaggaggagccgaacatggtggaggaggcggactctgtgttggggcaggaggaggacacggcggtggaggtggtggaggtggacgcggcggcgactactggaagtgtggatcaacgtctgctcgatctgcgactcctactgttccggcaaactccattggcggtgggttcccccaaatgcatgtcacctgcggagaagaaatcgacctcgacggtggacataccgtgccaggcacattccatggtggacctttccggccagctgtgcctgcacgttgcacagtcatgtgcattatacaagtccgaagatgaacatgaaaaaggatttcaattcatgcactgctggaataagctcagattacaacccaaatggcttggtaaagtagatgatttggctgttgctaaaccttcaaacaagaaacagaagaccactcgtgaaggggatgccaatggaacattaccatatgaaaccaaagaatctcaagttcaagtcgtagagaattaccaattgacccggcctcccgggaagaaaatagctaaagcaacactagtacaagagaagaggaaaagtgtgactgtagcaatagaaaatttgtgggctgcaaagaaagaaagtgatgctgagaaagagcagaagaaagaggagagattcaataaagcatttgcacttgaagttgatcgagttaacacagaaaaggcacttatggaggtgaggaaacaggagattgaattacagaagcgaagagacgaagagaggataataaatatggatcttagtgggttgacagaagagcaacagagttactacacgaagttgcgagctaagattttggaccaactttctgatgcttag

SEQ ID NO: 18658 - DNA, 969 bp, Zea mays
  Peptide Sequence Number=SeqID_60437
atggaggcgggcctccctccgcgtcctccgccgccgccgcaggccttggtggcgcattgcgtcttccagatcaacaccaaggtgtccgagctccgccgcctcgagcgcgagctcgccgccgtcgccgtcgggggcgatgcccgcgtggtccgcgagcgcatccacagagcgcgcgccgatgtcacgcgcctggctcggaacgcggcgcggaggctggccgaccccgccgctgccgccgccgtcatgtccaagctggccacagacttccaggccgcgctccgggtgttcctgttggtgcacggccggatcatcgaggacgatcgccacgaagccaccgccgctgcccgtcgtgcgccgacgatgtttcgttttcgtccacggtcgccgccgagctacggttctcgcatcggatcacaactgaccaatgccaataccaatgccaatgctactgccggcgccgatcagcagtgcgacatccagatacagcagcagcacctggttgaatcacggaggatgcaggagctagcccttctggacaacgacatcgccttcagcgaggccctcatcgaggagaggaagctggagatacgcaagattcagcgggacatggacatcgctgagatcaacgagattttcgtgcacctcgcaaaactagtccatgaccagcaaggcgccatcgatatcgtcgagtccaacatggagaaggctaccatggacacaagcaaggcgaaagagcagctatccagggtcgcactgacgcatgagacggactcggcgatgaagtgctcgctgaccactgtttttgggctcgtcaagttgatctttgcgtgcgtgttggaactgcaaagcagcccaggccaccgcctgtggtgcctgggtgggaagaagataaagccagcagaagaagtagaaatcaaagatgttgacggcaatctcatcaggactgcaaattcagaatatgaagactag

SEQ ID NO: 18659 - DNA, 393 bp, Zea mays
  Peptide Sequence Number=SeqID_60438
atggaagctgccggcggcggcagctaccgtgtgtgcgacacggtggtgctcgtctgcctcgcctgcgcctccgccctcatcgtctctacgatggccgtctgcttccgccgcgccttcgccaacgggtacacggccagcgcgggggccaccgctgcgaacggcagaagccagtgtgggctggcgccgtccgcgctgtcggcgatccccaagctcgcctaccggaggggcgctggcgctggcgctgggtgggcgcagtgcgcgatctgcctcgccttggtgcgggacggcgagacgtctgcaatcatggaggtaagaatattaaacgtgtctatgtcaggaaaaaagttagtgagttcatccttcttgcgttataatatgtatgaaacaatataa

SEQ ID NO: 18660 - DNA, 543 bp, Zea mays
  Peptide Sequence Number=SeqID_60439
atgtccgcggtggatgggtcgccggggactccgccgccaccgggccaccgtgggtgctgcgcctccggcgcgacgctggagctggtgggcgcgttcacggcggtgtgcctggtgctgtacggcgtgatcctgtacatgaactacctctacgtgcggtggagcggccgcgacggcgtgcaccggacggactccggcgcaggcgggctgcccgcacggaagcgggccggcggcgggatcgacaaggcggcgctggctgccatgccggtggtcaggttcaaggcggacgctcactgcggcggcgactctcctgtggagtgcgcggtgtgcctgagcgccatgcaggacggggacgcggtgcgcgcgctgcccggatgccggcacgcgttccacgtcacctgcgtcgacgcctggctctgcgcacgcgccacctgccccgtctgccgcgcgcgccccgcgctcccgccgccgcagcaggcgcccaaggccggcgccatggtggcggggtcctccggccggcacccggacctggagagccaagtgtag

SEQ ID NO: 18661 - DNA, 261 bp, Zea mays
  Peptide Sequence Number=SeqID_60440
atggcaccggacccccgcctggccttaagcaaggcctgggtattctctttcgtgggatcccgggaccccactgagagcagcctggaccccacaccgagaggtccgggacccgtcccgggggctcttgctgacgtagtcaccgccaacctgccttcggtcataccgccttccacgtctgcccccgtagctggtgggcacgtggcccccacgcccggcggttttgtcgggtcgcgcacggggcgtctcattcccgccacctaa

SEQ ID NO: 18662 - DNA, 210 bp, Zea mays
  Peptide Sequence Number=SeqID_60441
atggcgccgccgtataacaacaactacaccggagaggcatggaataacagcggcggcggcgtgcatgacagcggctcgccgcagatcgtcgccgcagccgctcaccactcgccgttcccatcgttgctctccttggctccacgtccgcatcagctggcgttctactcctcggaagctgatcagcagtttcaggtgtactgtagtatttaa

SEQ ID NO: 18663 - DNA, 498 bp, Zea mays
  Peptide Sequence Number=SeqID_60442
atgtcgaagcggcagggaccgccgaaacaccagaaccgctacgcgtggaagccgaaccttggtcagaagatcaacgaaaccgagcccgggggcaggttccgacctctgtcagaaatcaccggcgtctgtcagcgctgccgggatcaaatcgactggaaacgcagatacggaaaatacaagcccattgttgagccagcaaaatgccagaagtgtaataagcgaaacgtccggcaagcataccataacgtatgcagagattgctccaaggacctcggcatatgtgctaagtgctgcacatgtgttaatgagcttgtcggaagggatgcgaatgaggaggaaagtgaacgcaagtcactagaagaggctgtcagaggtgctagggagagggaacgacgtacacttcttcgtattagctacactgtggaatttgagctagggtcctgttttggcaaggttccagttccatccagtgaaaccttacgatacaatgaaaactga

SEQ ID NO: 18664 - DNA, 258 bp, Zea mays
  Peptide Sequence Number=SeqID_60443
atggggctcaatgcaatacaatataattctatgacaatacctcctctaacagttctggttgcaaagaaacatcttgctggaaggattgatcgtgtagattgtagtttagatgaatgccaagaaattacagaagccacaagggaagaggttacaatcatccatggagatctaagtgctttcctgtcagcagcccgccatctgaaccatgagccactgtcactgtctcaacaaggaagctggaccaagacgagcaagtag

SEQ ID NO: 18665 - DNA, 576 bp, Zea mays
  Peptide Sequence Number=SeqID_60444
atggccacggcggcaccattcctcgcagcaaggatttgcgccggcgatcgctgccccgactataccgagcatctaacgtctatgtctctagcgcaaaacaatgggtgcaatcgcacgaacatggaggtcagatgctcatcgacgattagggtacgtaggttcccggcgacggtgaggtgcggtaccacggcgaggattgactccggtgacaaattgccatcgttgatcaatagcccagctccccggaacacccccgtgcagacccccgatgattctaggaacgccacgaccccgcccgacagctgttacggttgtggccagaaaacgcaacggcggcagctctccctcacgctctggtggcgacgacaactggtggcggcggtggagttgcacgcagggttacaggatggagccaagaacggtggctctgccttccaactatataggatcgacggattcgattttcttacaaagtgggtattacaccattggcaagaaattccccatcaagcacttctctctaaggcataccttagagataagctggctcaagaaacctcaagggcatacccttga

SEQ ID NO: 18666 - DNA, 174 bp, Zea mays
  Peptide Sequence Number=SeqID_60445
atgccgccgctgttccgctatctgtcgcgggcagagctctccgttccaccagagctggtcggagttgtcctcgctggagtacagtttggcaccacggcgcggttccccgtcattcgttgcggaggtaggaaggaagacgggctctgtgccgttggattagtggcagaggtctga

SEQ ID NO: 18667 - DNA, 345 bp, Zea mays
  Peptide Sequence Number=SeqID_60446
atggccggcaaatcgcgcgcatcagcgaagcctagcagcagcggccagcttccacgacagggaaggggggcggcaagctggagcgagttgggcaccgagctggagcaagcgcacggtcggctaggagcaagcagggagcagggcgcggctgggtgcagaggcgagggtggccagtgccatggaagaagcagagggactcggcaagctggagcaccgcggctgacgacgcggacgagccgcacggccgggagggcacgcatcagggagccggcatgggctgaggcaagcaccggggcaagccagggagctctgcgagctggagacagatgctcgcagctgggataa

SEQ ID NO: 18668 - DNA, 204 bp, Zea mays
  Peptide Sequence Number=SeqID_60447
atggctattgatagcaaggaggcggatccattcgagactatcaatgttgtgttagagtttccagatgtgttccctaaagatttaccagagaagatgtctcaagacaaaaaagctgttgctaagacgaagctgagcgaagaggagaagctccttgaggagaagactgctggatttattgaatcaatagcaaagacaaatacataa

SEQ ID NO: 18669 - DNA, 132 bp, Zea mays
  Peptide Sequence Number=SeqID_60448
atggggaagggcaagaagagcaaggtccgcggcagcggggacaacctgatcgacagcagcgacgccgacagcgtcggctcgtcgtccaccgcgctatcggatcaactattgggtctgaatctgcttcagtaa

SEQ ID NO: 18670 - DNA, 192 bp, Zea mays
  Peptide Sequence Number=SeqID_60449
atgcccgtcgatctcgatgatctatctgccagttgcgtgccacttgtgttgagcttcaaagccccctgtcaagctcttcccctagaagccgccttcgagcataacccctaccaagtgttcgatgggaattctgaaccaatactcatcgtcgatctgcgtttatcaaatcattttggtcatggtgctcaataa

SEQ ID NO: 18671 - DNA, 285 bp, Zea mays
  Peptide Sequence Number=SeqID_60450
atgggaagggaagagagagctctgctgggcgccatgggagctgagggagaaaatacggagttccagttggacgccaggaagaagaccgagctaggaaccgcggaggaagtccagggcgcgctgagggcgggggccgagcagggccgaacgccatgggaagggagaaacgccggctggagaaggggctggatgcggctagaaaacatcagaggaggcgcgcgcggaagagaagataaggagagggagacgtcgtgtaaaaaaatctgcaggggagacgacggctaa

SEQ ID NO: 18672 - DNA, 207 bp, Zea mays
  Peptide Sequence Number=SeqID_60451
atggcccgcgcccgcgcctataaagcacccagggacttcgaccgtacccctccgcacgcgctcgacctcaccggagcccaaagccaccggcgtttgcccgtgcacggcgtgcccgcggccgcccgatcccccgccaccgtagaccggcaaaccgagcccttcccagccacgcccgacccttggaagagactgtgcacgccttggtga

SEQ ID NO: 18673 - DNA, 183 bp, Zea mays
  Peptide Sequence Number=SeqID_60452
atggcgccgccgtccgcggcgggtgcgccgccgctcggctggcgtgcggtagtcggggtatacgcgtcgttggatacaagaggagcggccctgattagaagcgagcaagccactgtggattctgaggttcaacgagtagaagtagatgagcaggagctcattgaaggcaagttgtgcccttga

SEQ ID NO: 18674 - DNA, 1485 bp, Zea mays
  Peptide Sequence Number=SeqID_60453
atgccagaagatgagacaattgacgggtttcagaatcttcaggttctttccatgtctaactgctcgttgtctgggaaaatacctctttggttatcgaagctcaaaaatttgcaggtgctgcttttgcacacgaatcaactcagtgggacaatacctgcctggatcaaaagcttagagtcactattccatctagacatatcaagtaacaagcttacaggggaaataccaacagccttaatggagatgccaatgctaacgacagaaaagactgcaacccatttggatccaagggtatttgagctacctgtttataaaaacccatcgctccagtttcggattaccagtgctcttccaaaactgctgaaacttggttacaataacttaactggtgcgattccccaagaaattgagagtgcaatcccatcagcatggaaacaacctacacttcctctccgcactgaatattttcttacaataacctggaagggcctattcctactggagggccaattcagtacattctcgaataatagctttgaagaacagtcattagtgatagtgccaagaggagaagggggagaaaacaagctcaaattcgctgacattgtgaaggccacaaataacttccaccagggaaacatcataggttgtgggggctatggtctggtctacaaggctatattacctgatgggaccaagctggccatcaagaagcttaatggtgaaatgttgaccatggaaagggaattcaaggcagaggttgaagcactctccatggcccagcatgagaatcttgtgccactgtggggttactacatacagggagattcaaggctcctcgtatattcctacatggagaatggcagccttgatgattggcttcacaccatggatgatgatgccagcacatttctcagttggccgatgcggctgaaaattgcgcaaggggcaagccaaggcctttcttatatccatgatgtctgcaagcctcacattgtccaccgtgacataaagtccagtaatatcctacttgacaaagatttcaaggcttacgttgccgattttgggctctcaagattagtccttgcaaacaaaactcatgtcacaactgagctagttggcactctgggctacatcccacctgagtatgggcaaggctgggttgcgacgttgagaggtgatatctacagttttggagtcgttctgcttgagctgctcacaggaaggcggcctgtctcagccttgtttttatcaaaagaacttgtgaagtgggtgcaggagatgaaatcagaagggaagcagattgaggtcctcgatccacatctacgaggcttggggcatgacgagcaaatgctgaaggttcttgaaatagcctgcaagtgtgtcgaccatgacgcgtgcatgaggccaaccatactggaagtagcctcctgccttgacactatagagcccaccctgaggatgcaaaattcagttaggatatag

SEQ ID NO: 18675 - DNA, 651 bp, Zea mays
  Peptide Sequence Number=SeqID_60454
atgcagcagcagcaacgggtgcatccctcacatgacaacgacaagcacaacaacgatgggtttctcaaacctctcctaggcctcgcgctcgcgctcttgctatccgccttcctcccgcctacgagctcgtgctcggagcaggagaggagcgccctcctccagttcctcgctggactctcgcgggacggcggtctcgcctcgtcgtggcggaatggcacgggctgctgcgcgtgggaaggggtcggttgcggcgcagacggggcagtcaccgatgtctcccttgcttcaaggggccttgaggggcaaatctcggcgtccctgggtgagctcaccgcgctgctgcgcctcaacctgtcccacaacctgctgtccggtggcctgccggcggagctgacgtcgtcaaacagcatccttgtcctctatgtcagcttcaaccgtctcaacggaggcctgcgcgagctaccttcgtcaacccctccccgtcctctgcaagtactcaacatctcgactaacttgtttacaggaccgtttccatcgaccacatgggaggcgatgaccagtctggttgcactcattgccagcaacaacagctttaccggacagataccaagccatatctgcagtagctcaaccggccttggctgtgattga

SEQ ID NO: 18676 - DNA, 516 bp, Zea mays
  Peptide Sequence Number=SeqID_60455
atgactggccctaagcgaggcattgagttgtgtggcgaaattatgcttgaatttgacatgaggattaagaggggcggagaagagaaagacgacccacagctgattgatggtgtagcaatcgtactagacgagatgagcatgcctaggagtacttatgcattcacaaaacggatccacggcgattgtggagcggttgacataacggtatcacgccttgactttgcagttgaggcgacgatacaacttcacgtatctgaagtagagggcagcttcagtttgcgtgcgggctgttttaccagtgggttatgtgaagaaatccagatctttaagggcaccattagtgagccgcgtgccttgaggagatgtgttgttgctgcagtacatgatacttggatggatgtgaagttgaaggttgacgactcagggcattcttatagcagtgatgacaatccggaacattggtgtagcttcaaaacgaccagtcatggatggacctgccaacagagctgctcatga

SEQ ID NO: 18677 - DNA, 618 bp, Zea mays
  Peptide Sequence Number=SeqID_60456
atggagagaagaagggtggccgcatcgttggtggcggtggtggtgccgctgctgctgtgctcgtgcttcgtcgccggtgatcagggcgagccggcggcggggggctcggacacgaaccagctgtgcgtgagcaagtgcgggacgtgcccgacgatctgcacggcgtcgccgccgacgatcctgccgatgaccgcgccgccgccgccggccctggcgctgcttccgctgtccgcgcccccgccgccgtacctggagctgggaccgccgccgccgccgggggacgagtacgacctgctgcccccggtcacgccgctaacgagcccggcgccggagtccccgtgctcgaccccgccttcttcctcttcctcgtcgtcggagcctccgccgtcaccgcccccgccgccgccaccgaagagcagcagcgggtcgtcgtcttcctcatcttccccgtcggcgccctcgcacttctcctctccgccgacgccgccgtcgtcgtccaacccgtactactacctgtacctgtccggcggcgccaaggtccgcggcggcgcgtccagcgcttgcgccacggcgctcgtcctcgccgcgttcctgcccgccgtcgcccttttcaagtga

SEQ ID NO: 18678 - DNA, 2088 bp, Zea mays
  Peptide Sequence Number=SeqID_60457
atgtctcccgacgccgacgccgccgccgggggaggaggaggtggagaggcgagcgccggcgccggcgccggcgcgtcgtcgcctcccgcgtccgcgtccgcggcggcgaacggccgggcgctggtgcggtgggaccagatcctgccgcgccgctccctgcgggtgcttctcgtcgagcacgacgactccacgcgccagatcgtcaccgcgctcctccgcaagtgcggctaccgcgtggccgcggtcgcggacgggatgaaggcgtgggaggtcatgcgggagcgtgcctacgacttcgacctcgtcctcaccgaggtcgccatgccctccctctccggcatccagctgctctccaggatcgccgccgccgccgagtgcaagaacatccccgtcatcatgatgtcatcccaagattctattggcacggtgctcaagtgtatgcagaagggtgcggtggacttccttgtgaaaccagtaagaaagaatgagctgggtaacctgtggcaacatgtgtggaggaggcatgcaatgaattgccagacaaatggatcagaaaataatgcagccagcaatcatgtaagtaccaatgttgctaatgggtcaaagacaggagaaaacaatgatgaggaaagtgatgcccaaagctttggtaacaaaagggagactgaaattaagagtgctgagacgttaccagatattcgtagagatgaaatggctggctcatccaaaaaaattgaactacaaaataagtctaatgatggagtaaacacaaaagtggatgcgtcaaaagatagcgatggtgctccaagtgaaagtgagaagaatgtgcgttccaaatgccttaatggtattacttctgcaaaggtggctgagcaaataatggataatgccttgaggatcacggatgcaagttcacgtcgtccaaccaatcttggcaaagatttggctatgactgaaccagcagctgatagaaaatgccaatctttagtgatggaaaataatgctgtcaaagaaaagaaccctggtgaaaagtcgaagagtgctgtaataggtcatgctgattcttacccctcccaatttctcgagaccaacttgggaaaacaacagtatcgtaatggttacaagaatcaagaattcagggaaaaagatatctttaatcactcgaattcttctgccttctcgagatatggcaatagaaggatagaatcatcaggtgagatacagtttcttccttctcgttgcattgttgggcaagagcagcatgttcatggcaaggacccagttttccaacccaatggggtcttgctgcctcccaatgaccataatacaggtgagagtacaaggcaagctcgaattactctggacagtagcatggagggtgctgacatcatttgctccagtagtgctagggaagatgctggtgcaagtagttcttcccatagaaaggacagtatgagccatccctcatatgggtttgtacctgttccaattcctgtcggtgccatgatgccctatcattgtggtgcaattctgcagccagtatactacccacagggtccacttatgcactgtaattcatctgcaatcaacaaggcaacaattcatcaaacctctggccaatctaactaccgtgaagattgtggtagtggtagaccatctcaggttgatgaacacaaacagtcagaggaaaagcaccagttgcatcattcaagacaaattcatcgggaatcaggacaaccagttgacatggttagagctcacatggatcatgctaaccagagtgcaagctgcagccgggatatctgtaaaggaagcggatgcacgggtagcggtgaagccgataccaatgcgaacacgacggttgccctagagagtggcaacgagagtggcatccaaaatagtgacaggtctcaccgagaagctgctttgatgaagttccgcatgaaaaggaaagacagatgcttcgataaaaaggtcaggtatcatagcaggaagaagcttgcggagcagaggccaagagttaaggggcagtttgtaagccagaagctgaaagcagctatggcaacggaagccgaaactgactcgtga

SEQ ID NO: 18679 - DNA, 393 bp, Zea mays
  Peptide Sequence Number=SeqID_60458
atggccagagggaagggaaataggagcgagtgtcgctcgaccgagggaaagcgcaagcgtccaccgagccctccagcggaggacttcagtgactcggagttctcatccgagtacgacggctcacccgctctggtgttccccatggcgtcgtccgatgactcggatgactccattaagttgtcggtggcggagcgagcctacattcgatacatcgattgcacggggctcggtgggtcggatgactcggagggggaggactccttggaggaggaggaggaggaggactcctcggaatccgaggagggcactgatggcgatggcgacgacgagggcgacgacgacgatggtgacgacgacggcgacgacgccggtggcaaggtgccaccggcgtaa

SEQ ID NO: 18680 - DNA, 186 bp, Zea mays
  Peptide Sequence Number=SeqID_60459
atggctcgtagaagatcccaaaagaacaagaagacaactccgaaggagaacaaggagatttgtcaccaggtgaaggatcaagtcttccactatgtagatgatggttacagtagcgtcaaggtcgtttacaacttctatatccaagatagtttgaagatagctcaaaaaagtgacgggtcaagatag

SEQ ID NO: 18681 - DNA, 450 bp, Zea mays
  Peptide Sequence Number=SeqID_60460
atggcgaaggtagttgttcgagttcttattgtcaaaggtggttgttcgagttcaccggaggtgatgacgcgagggcaattacaatccagcgtgaacagtacatgggtactgttcatctatttatatgcaattgtacaactttgtgcgtacattcatgctctcaacaattacatacaaaggttttgttctagggattgtggcctagttaagaaagaatttttagaagtactaattcaccccctcttaggcatcatcgtttcctacagaaatgaatatggaattggacatcacaagctaagtgaaggaggtacattgcttgtggaactcggtgaacataacttagagaaaattggtaaagccaaggatggaggcaaaaaaagcttcgagataccaagtgcacaggagaaggtcaaggaggtcaagggtgttggagctcatagttggctataa

SEQ ID NO: 18682 - DNA, 381 bp, Zea mays
  Peptide Sequence Number=SeqID_60461
atggaggaacacttcagttacctggtggagcacgatgttggtgtcgacaatgaggatggcggcggcagcggcgccgagctttcgctccgcggctgcggcgcaggtggtgcaggggacgaagccgcagtagatgtcatcgcggaggtagtgctccctgacgacctgcgaagaggcaacgacggcgtcagaattcaccttccagtcaaggagcaggaggaaggcctcaaggccctaggcaccgcagtcaatgtagtcgtgcacagacttcattttgcttcaaagaaaagtgcaataatgaaagcacatctttcagcattcccagctgatcttggtatggacattgtaatctgcactactgagaggaaaaggagcatcaattag

SEQ ID NO: 18683 - DNA, 219 bp, Zea mays
  Peptide Sequence Number=SeqID_60462
atggctaaggaggtcaaatctaccgagggtgaaggcgacgacaattactcgtatgaagtttctttagacgaggacttcttgacttcattggaatacggaatgccaccggcatcaggaatgggctccaagcagttccaacttgacaatggtactcgtgaagggcttgataaagtcttgaaagcggcaagcaatgagccagaaactgttatgcatttatga

SEQ ID NO: 18684 - DNA, 438 bp, Zea mays
  Peptide Sequence Number=SeqID_60463
atgggcgagtgggagagagagagggagctcggggaggaagagagcttggttgtgggagggagaagagaggagctcgactgcccctttatagaggagggaggagatgagaggtcggccagggagagatgtatggccggcgggttcaaggccattgatgacattcacggagcttcaatgagggagagagaaacgaatgcattgaagttcataacgccgagggagagcgaacggcgtgtaggacaactcgggtggcggcgcggcgcggatcctggcgcgacggggctggggcgcgcttcgtgcgggcagggcggctgcgcggtcggtcgtgcggcgtcagggtcggctgacgtggtcgctcggtggcgcggcagtcggggcgccggtccaaagcgccggtccagggcgcgcacgagagagaggaaaggaggagagaggtga

SEQ ID NO: 18685 - DNA, 330 bp, Zea mays
  Peptide Sequence Number=SeqID_60464
atgagaccggtcgtggccacgcgcgagctcattcaccttcgtcttcaaaccaccgccagcttctacctcgccgccgcctccgcccctagccgcgcccgacgagcaccgccgcccgtagccgtgcccgccccgagcgccgccacccctagccgcgcccgcccgagcccccgcccgcgcgcctaccgctgcgccacctgcccgcgcgccccggctcgcccctgcccgagctgcccggcgctgctaccgtcgagctccccacccggccaagcccgtcttagagctcggaacccgaacgtgcgtgacgaaccccctagccgtcccccgcaatag

SEQ ID NO: 18686 - DNA, 288 bp, Zea mays
  Peptide Sequence Number=SeqID_60465
atgtccggtgcaccagaggactccaactcaaactcgccaccttcgggaatttccagaggcactcgcgctataattcaccggactgtccggtgtacaccggacagtgtccggtgcgccaaggagaagcggcctcaggaactcgccagcttcgggaatctccaacggctagtccgctataattcaccggacatgtccgtgcgcaacgtctcagttctcggagatgacttgaaaacagttccagactcaccagagagacccgatctgacacagggtaaggatgggcgatag

SEQ ID NO: 18687 - DNA, 1164 bp, Zea mays
  Peptide Sequence Number=SeqID_60466
atggcaaccggtagtgaagcctcgaaggcagctgaggctgtggttgactggcataaacacgacagcaagaggatgctccatgcggtttaccgtgttggggatctggaccgcacaatcaagtactacacggaatgctttgggatgaaactgctgaggaaaagggatgttcctgatgagaattgcacaatttactatggcgttgacaagtatgacattggaacgggctttgggcatttcgcaattgctaatgatgatgtgtacaagttagctgagaatatcaaatccaagggtggtaagatcacccgcgaacctggtcctgtcaagggaggatccactgttattgccttcgcacaggatcctgatggctacatgtttgagcttatccagagggctgacacacctgagcctctttgccaggtcatgcttcgtgttggtgaccttgagcgttctatcaagttttatgagaaggccctagggatgaagctcctaaggaagaaggatgtacctgattacaaggctctaagctccaaggatgacagcactgttgaaatcctttcttttgcctttggaactttagatgaagctttcctccacctgtcaacaaagcaggcatctcttctcttagggactgggggtaagaagagagcaacatcatcagtatacaaagaaatccagaattttgcctctctctgggacagtggctgcaataggccatcttcttctgctttagcaaataagctgttaagcacatccataactagaataaaaagtattggcgacaagggatttccctggcgtaaccccctctggtggtgtatacgttcccctggttcaccattgaccaacacttgggtagatgattataccattgccatgttgggctatgctgatgaggacaagacaactgttctggagctgacgtacaactatggagtcacagaatacagcaagggcaatgcatatgctcaggttgccattggcaccaatgatgtgtacaagagcgccgaggcggttgatctggcgaccaaagaactaggtggcaagattttgcggcagccagggcctctacctgggatcaacactaagatcgcctcttttgttgatccagatggctggaaagtggttctggttgacaacaccgacttcctcaaggaactccactga

SEQ ID NO: 18688 - DNA, 633 bp, Zea mays
  Peptide Sequence Number=SeqID_60467
atgcagcagataatcagcgcctgcaagctgcctcacacgcaacgggccgccgcgttcctgccgccgaggccatcgctcaggcgcctagacaggccagtcggagtggcgcaggcggcgctgtccttctgtcagaccggtcagtggagcagcgaagtgacggcggtcacttcggctctgccggggggcgcgcgtcaggataaagcagataatcagcgcctgcaagctgcctcacacgcaacgggccgccgcgttcctgccgccgaggccatcgctcaggcgccttccagtcccaggtttagacaggccaggaggagatgccaggaagagaataagcagcagcaagaggccgaggagggaagcggcgctgacgagcaggagcagcagaagagaacgttcctgagcctggaggaggccgggctggtggagatgtccggactcagcacgcacgagcgcttcctctgccgcctcaccatatcgtctctgaacctcctgagagtgatctcggagcaggagggcgtcccgatagaggagctcaacgccgggcgcgtctgcgactggttcctcaaggacaagctcaagagagagcagaacgtcggcaccgccgtcttgcagtgggacgaccctggcttctag

SEQ ID NO: 18689 - DNA, 351 bp, Zea mays
  Peptide Sequence Number=SeqID_60468
atggcccagatgtttagattacaaacatgggcgtcttttgatattaactttcaggtcaaaggtcagttggaaaacatacctctgcatcaggccttatgtccagacgagccattgctggtgcgcgcggcgcggggcgaggatggcatcccacattggatgatgcgacaggcagggcggtacatggcggagtaccaggcgtcggctaaggggaaactcacattcagccatcgggttcggggagctcccagctgcgaggttttgaggtgggattttgacctcaaggtccaaggagatgcttatggcgtcgatgtcagacatcgagacaacaaaacggggcagcatgtggaatag

SEQ ID NO: 18690 - DNA, 1380 bp, Zea mays
  Peptide Sequence Number=SeqID_60469
atggcgcgtgcaccgcggccgtccgcggtacccaccctgctccgcctcctctcctcccatcccagcctctccaccgccgcccacgctgccctgctcaagtcctcctccctcaccagcgccgtcccggtcgcggccaccgccctcctcacggcgtacgcgaacgcggggcacccgggcgccgcgtcccgcctgttcgacgaaatgcccgcgccggacgccgtcgcgtggaacgcgctcctcgcctgcctcgtccgccacgggcgcgcgggggcggccgccgcggccttccacggcatgtccgtctccgcgctcccgcccacggccgccaccctctgcaccatgctcaaggcgtgcgccgcgtcgcgcgccgcccgccccggccgccagctccacgcgcggggcgtcgtctcgcgccacgccgacgccgacgtcatggtggccaccgcgctcgtcgatctctacatgagctgtggccacgtggaggacgccatgagggtgttcgtgctgacaaggtgcccgaaggacgctgccctgcacaatgccgttctctcaggatgcgtggagaacggacggttcagtgacgccttctcgacgctgaggcggcggacggagctcaatgggatctcgctgacggctgctctcacggcctgcgcggccacagcaaacctggcctacggtacgcaggtgcattgcaaggctctccgtggcgactttgattcggacaccatcacatgcaatgcgcttattgacatgtacgcaaaatgtgggagggcgacggctgcgcgcgtagtgttcgaccggatggctaccagaaacgtggtctcctggtcaagtatgatgggcgcttatagtcgccatggacatggcgttgatgctttggatttgtttaagctaatggaggaggctgcgccaacggtcctgccaaacgcaatcacattcctggcggttctgtcagcctgcggacactctggtctggtggacgaagctcagtccatgctacatttgatgaagagcaagtacgggatcgatccacagccggagcactacgcatgtgtgatagacatgctcggacgtacaggccgtgttgacgaggcttgggatctgtattctagtcttctaaccgcaagtcgaaataagccttccagcgctatcagtgtcgctatgctgaacgcgtgcagagcaaacgtggatgctgcaagaggaaaggaggtggctgtgcgcatgctggaggctgatccacgaaaccctgggattcatgtgttgatatcgaattttcatgctgctctgagacaatggcctcaatcaaatgaatcgcggaggattatagtggacaaggggctcaggaaagaagcggctagcagccatgtctgttttggctaa

SEQ ID NO: 18691 - DNA, 606 bp, Zea mays
  Peptide Sequence Number=SeqID_60470
atgtggcacgccccgctgcggttcactatccctcccgccgccgacccgcgcgccctcgccctgcacgtgctgctccccgccgagcgcgccttcggcgaccgcgacgtcggcgaggtggtcgtgcccgtccaggacctcgccgccgcgtcccccgacggcgccgaccagaggcatctcagctaccaggtgcgccgccccgtcagcagccgcaagcgcggcgtgctccacatgaccacatctccctacaggctctccgacgagccggacgcccacaaccacccgtacgcacaggtcccgccggcgtcgtccatgcggcaccttggcaaggccgccgacgctgccatcaccgcgtacccggtggcgaccccacgcggcgggcagtaccaccagccgtacggtcctgctcccctacggtgcgtacccggtgccaccaccagtacgggtacggcacgtacgggcgccgcgcccgcggcgagctccggcggagggatgagcacggcggggctcggcttcggccttggcctcctcggcgggttggtgatcggcgacgccgaggtggacgcggcgtacgacggcggcgggttcatggacggcatgggcttgtga

SEQ ID NO: 18692 - DNA, 273 bp, Zea mays
  Peptide Sequence Number=SeqID_60471
atggcgccctgcatactctgtgacgacggcggctctcagcccccttacagaagcaagaggacgatgtactatgttatttccggtgatgatgttgaaccaatagaagttgttgatgtacctgacgatgatgagaggcattatcatgaatttgttgacaaggcacaatttgaagagactgatgaagaggaggaggaggagaacatagctatgggggtggatgagcaaggagacagtgatgatgtatcgagacttgattatgacaaagataactga

SEQ ID NO: 18693 - DNA, 426 bp, Zea mays
  Peptide Sequence Number=SeqID_60472
atgaagaaggcacccaggggcttctcgcacctgctggtcaccatcgacaaattctccaagtggattgaggtccgacccttaaccagcatcaggtccgagcaggcggtggcattcttcaccaacatcatccatcgattcgggatcccaaactccatcatcaccgacaatggcacgcagttcaccggaaaaaagttcctagacttctgcgacgaccaccacatccatgtggactgggccgccgtagctcaccccatgacgaatgggcaagtggagcgtgccaacggtatgatcttgcagggacttaaaccgaggatctacaacgacctcaacaagttcggcaagcggtggatgaaagaactaccctcagtagtctggagtctgaggacgacgctgagccgagccatgggtttctcgccttttttctag

SEQ ID NO: 18694 - DNA, 219 bp, Zea mays
  Peptide Sequence Number=SeqID_60473
atgataaggcgacttgagaagcaacaacgttcaaatggtgaagattttgaatatgttagattctttcctaagaacgagaaatatgtctcgctgttcactggagggaatgttcaagatattgttcaggaaaggaataaatggcgcaaacagatcaaggagaatatcatggctgatgcagcaaacggaaaagataatatcgtcgggatacatatcatttaa

SEQ ID NO: 18695 - DNA, 744 bp, Zea mays
  Peptide Sequence Number=SeqID_60474
atggcgatgctctgcagagccacgcgcgtcctccgcaaggtgtgcggactgggacccgcggcggcggcgcgacggctctccgccgctgaagccttcgccgcgtgtgagggctcactcctgcgccctctacccgggctggacctcccgccgtgcctccctgacaacctgagccgcagccccacccggatcaccacgctccctaacggcctcagagtcgccaccgaggacgtcccgtgcggattgattctgaagcttatttacggagctcgtctccggcagggtccttctgcgtgcatcggtttcttcgtcgactccggctccatctacgagtccggggagaccaccggcgtatcgcacctgctggagaggatggccttcaaggacaccaagcaccggagccacctcaacatagtgagcgagctcgagcttgccgggggcaacgtcggcgcttcagcctccagggagcagatggtctacagctatgacacgctcaagggatacatgccagaggctctcgagatcctcatcgactgcatgcgcaacccgctcttcctccaggaagaagtcgaacggcagctggttcttgctcgagaagaagtaaatgagctacaaaagaaccctgagaagtttcttcatgaacagcttaaccttgttggatattcgggtgctcttgcaaatccgctaatagctcctgaggatgcccttgctagaatcaatgacaaaattattcaaaagttctatcat

SEQ ID NO: 18696 - DNA, 1695 bp, Zea mays
  Peptide Sequence Number=SeqID_60475
atggccatggccatggcccgaccttgtgctttccttctcttcttcctagttcttttctcctacgacggatccggtcctgggagcagcaggaggactaggaggagtggcgtcgcgcaggccacgcagagagtcttcctgtatccacaggctcccaaggtctcctccatcgtgagcagcaagtacaggaccgcgtaccacttccagcctcccaagaactggatcaacggaccaatgtactacaatggtatctaccaccagttctaccagtacaacccaaacggctcgctctggggcaacatagtctgggcgcactcggtctccacagatctcgtgaactggatccggctcgcgccggcgatagagcggacgactccgagcgacatcaatggctgctggacagggctgaacccaggccagttcagagacccgacgaccggctggatcggcccggacgggctgtggaggatagccgtcggggccgaggtcgacggccacagcgcggcgcttctgtacgagagcgaggacttcgtgcgctgggacagagtggaccacccgctctactcctccaacgcctccgccatgtgggagtgcccggacttcttcgcggcgatgccgggcgagaactccgggctggacatgtcggctgcggtcccggatggcgccaagcacgtcctcaagatgagccttgacggctctgacaagtacatggtcggcgtctatgatctgaaaggtgacgcctttgtgccggataccgtgatcgaggaccggaggctgtggtcaaggattgactacggcaactactacgcttccaagtcgttcttcgactcgaagaaagggaggagggtcatatggggctggacgaatgagacggacagttcgtcagacgacgtcgccaaaggatgggctggaatccatgcaattcccaggactatatggttggataaagacagcaagcagctgctgcaatggccggtcgaagagatcgagtcgctccgaggaaaacaagtcagacaccaaggcctggagctcaggaagggggatctgtttgagattaaggaaattgacactctgcaggcagatgtggagatagatttcgagctcacatccataggcagtgccgacccttttgacccttcctggctcttggacatcgagaagcagtgccgggaagcgggcgcgtcggctcatggcccgttcgggctcgtggttcttgcttctgagagcatggaagagcacacctccgtgcacttcagagtgtactacagatcacaggagaagcacatggttcttatgtgcgccgatctgaggaaatcgtccttgagaccggagctgtacacgccagcctacggaggcttctttgagctggacctggagaaggaaaagacggtggtatctctgagaactttggtgagtggagctgagcaaacacctcaagcgtttgttcttcatgtcgtcgtcgtcatcgtcgtcgtcgtaggaaatggaataacagcagcacctctgcagatcgatcgctctgcggtggagagcttcggtggaggcggcagggtgtgcatcatggccagggtctatccggcggcgctcgtcgacgacggcggcactcgcatgtacgcgttcaacaatggcactagcaccgtcagagtgccccggctagaagcgtggagcatgaggagggcacaggttaacaagggatga

SEQ ID NO: 18697 - DNA, 921 bp, Zea mays
  Peptide Sequence Number=SeqID_60476
atgcagggcggcggcggtgacgaggaggatgccctcgccgggcggcggcctccgcgcggtggtggcgacgacgagaaaatggagatcgggtggccgacggacgtccggcacgtggcgcacgtgacgttcgaccggttccacggcttccgcggcgtgcccgaggagctactgcagcagcaggcggcggcggcggtggtggtggacgtcgtggacggcatcgtccgggcgcccagcgccagcaagacggtgttcggcgtgtccacggagtcgatgcagtgctcctacgacgggcggggcaacagcgtccccaccgtgctcctccacctgcagcgccgcctcgtcgaccagggcggcctcagggcggagggcatcttcagggtggccgccgacggcgcccaggagcagtacgccagggaccagctcaacaactcgggcgtcgtgccagacggcgtggacgtgcactgcatcgcaggcctcatcaaggcgtggttccgtgagctccctggcgggctgctggacgcgctgccggcggatgaggtgacgcggtgccagacggaggaggactgcgcgcggctctgcggcgccaggctgccggcgcccagggcggcgctgctggactgggcggtgaacctgatggcggacgtggcgcgggaggagaaggctaacaagatgggcacgcgcaacgtggccatggtgttcgcgcccaacatgacgcgcgccgacgacccgctcacggcgctcgcgcacgccgtgcagctcatgaacttcctcaacatgctcgtcgagagggcgctcaagcacgagcaccaccgggctggcctcgtcttcttcctcctcctctgcacgagcacccgactcggccacattcagagtcagagatgcgcagtagccatgacgatgccgaccgatcgccggatctga

SEQ ID NO: 18698 - DNA, 408 bp, Zea mays
  Peptide Sequence Number=SeqID_60477
atggcgatgaccgtcgaagtccgatggatggactcggttgctctcttcggaatcagggctttggagatcccgaatagattaaggatggcttgctgcactcgcgttcatgttctccacgagtattctactgcagatactgctctcatgtacgtccttgtaccaatgccatgcctgttttttggtggtggatccacacacttcttgaccagcagagaaggtggagggtggattaatgctgcaaaattcttgactggtgcatcggccatgggaagccttgctattccagcaattctgaggcatgctggcttaatcgagaccggggccatgttcatcgagttcacgtccttcttcatccttgtatgcacagtgctgtgcttccatagggcgactctggatgaagactggtaa

SEQ ID NO: 18699 - DNA, 456 bp, Zea mays
  Peptide Sequence Number=SeqID_60478
atgggcaagagcaagaaaggtggcagctcttcacatcactcgggtgacaagcgcaagcgcgagccgactcctccctcggaggacttcggcgactcggaatactcggaggaggagttctcctccgagttcgagggctctccggctcctgcctctcccccggtgttgtctgatgattcagacgactcccaggggatcgccgcggaggtatggacctacatccgggtcgtcgagcgtgccgggctcgagggctcggatgagtcggagtactcctcggacgaggaggattcctccgactcgtccgaggagggcagcggcggcgacgacggtgacggcgccgacgacggaggcgacggtgacggtggcagcggcagcggcaagggcggtgacggtagcggcaagggcgtcggcggcagcggcggcagcggcagcaagggcagcaacaaggccagtggctag

SEQ ID NO: 18700 - DNA, 2232 bp, Zea mays
  Peptide Sequence Number=SeqID_60479
gtcttgcgtacagctgttggccacagattggcaaaagtacaaggatatttattcagatctgcattccttcggcgtattccgacctttacacgtctcattattgaaaatcttcttctatgctttctccaatccacgttatatcagacatcaaagtacttaacagggtctttaggcctgcgcttcaagaaaatcttgacagatcttgtccatgctgattattttgagaacatggtgtactacaagatctcacatgttgatcatcggatcacaaacccagagcaaaggattgcaagtgacataccaaagttctgctcagaattaagtgaccttgtacaggatgatctggctgcaattgtagaagggttaatatacatctggcgcctctgctcttacgcgagtccaaaatatgtgttatggattctggcatatgttataggtgctggtggtacaattagaaaattttctcctgcttttggcaagctgaagtctacagaacaacagctagagggggaatatcgtcaactccattcacgattgagaacccatgctgagagtgtggcgttttatggtggtgagaacagagaagcatcacatattaagcagcggttccgggcacttgttaaacacttgaatgttgttcttcatgaaaactggtggtttggcatgattcaagattttcttctgaagtatcttggcgccactgtgggagttatcctaattattgaacctttctttgcggggaatcttaaacccgaatcatccaccttaggacgggcagagatgttgagcaatctccgataccacaccagcgtgataatatcactatttcaatctcttggaaccatttctattagttcaaggcgcttaaatattctcagtggctatgctaatcgtattcatgaattactggatgtctcgcgtgagctatctggtggccgtgatagattgattactcaaaattcttctgatggaaattatattagcgaggcaaattatatagagttttcagatgttaaggtggtgacaccttctgggaatgtcttggttgataatttgaaccttcatttggagtcgggctctaatctgttgatcactggtcccaatggtagtggaaaaagctcccttttccgtgttcttggtggtctgtggccaatggtatctggtcatattgtcaaacctggtgttggttccaatctcaacaaggaaatattttatgtgccccagagaccatatacagctgttggaacgcttcgcgaccagttaatctatccactcacagcagaccaagagactgaaccacttagctatggtggcatggtggatcttctaaagaatgttgatctggaatacttgctagaacgctatcctcttgataaggaagttaactggggtgacgaattgtctcttggtgagcagcaaagattaggaatggctagactgttctatcataagccaaagtttgctatcctggatgaatgcactagtgctgttacaactgatatggaagagcgcttctgcaaaagggttcgagcaatgggcacatcttgcataacaatatctcaccgtccagcattagttgcgtttcatgaaattgttttatccttagatggtgaaggagggtgggatattcaggacaacagaaatggttccttctctcccgaagttgagtttgatgtgctgaaggcatcagaaagtgatcgcaagtctgatgcacttaccgttcaaagggcttttatcaccagcacaaagggaaatgcgtcaatgaagcccaagaaacattcttattcaacagaggtcatagcatcttcccccagtatggagatagaacatacagtacaatcatctattgtcacacaattgcaatgctctccaagacctttgcctgtcagagttgctgcaatgtctcaaatactggttccaaagctatttgataagcaaggagggcagctgcttgcagtggtacttcttgtattctcccgcacttggatttcagaccgtatagcttcattgaatggaacaagtgtcaagtatgtcttggagcaggacaaagctgccttcattcgtttggctggcactagtgtgctgcaaagtgcagcaaattccatcgtgtcaccctcactgaggaaccttacttcaagaatcgcccttggatggcggattcgcatgaccaatcatttgcttcaatattatttgaaaagaaatgctttttacaaggcgagctttcctcattga

SEQ ID NO: 18701 - DNA, 333 bp, Zea mays
  Peptide Sequence Number=SeqID_60480
atgacacatgatgtagagaagttgaccaatgaccttgctggcttgcttactggtatggtgaagccattagttgatattatttggtttacatggagaatgaagcttttgtctgggcgaagaggggttgctatactgtatgcttacatgttcctaggtcttggttttctaagagctgtgtcccctgactttggggatcttgcaaaccaagaacaagaacttgaaggcacgttcaggttcatgcactcaagattgcggacacatgctgagtcaatagctttctttggtggtggatcaagggagaaagctgccaacattgtgcaccatgcaacatag

SEQ ID NO: 18702 - DNA, 480 bp, Zea mays
  Peptide Sequence Number=SeqID_60481
atggtggtggtggtggtgtcgctgcagttcgacggcagcgtccgcttcccgggacagatcgcagggggcgccaggggggtcgccttcctccgtgccccgccgttccgtaatgccgccgactgcggcgccggcgcggacaacggcaccaccgccaatgtctacgacccatggctcgtccacatcgcgactacgctcgacgaggagtacctgagggtctccatcgccgcggtccactcggtggtgcagcacgccaggtgccccgagagcgtcgtccgcgcggtcttcctgcagctctggttcaaggcctgctacctggacctcgggcgcgtctgcgagctcatctccacgtcggtgcggcaggcgctggagcagccgctcaactacgcgcgcaactacctggccgagctcctcacgccacgccatctacctcgactccgacctcgtcctcgtggacgacgtcgccaagctgtggcgcactga

SEQ ID NO: 18703 - DNA, 261 bp, Zea mays
  Peptide Sequence Number=SeqID_60482
atggtggtggtggtggtgtcgccgtcgctgcagttcgacggcagtgtccgcttcccgggacagatcgcagggggtgccagggggtcgccttccgccgtgccccgccgttccgcaatgccggccgactgcggcgccggcgcgaacaacggcaccaccgccaatgtctacgacccatggctcgtccacatcgtgattacgctcaacgaggagtacctgaggggctccatcgccgcggatctactcggtggtgcagcacgccag

SEQ ID NO: 18704 - DNA, 438 bp, Zea mays
  Peptide Sequence Number=SeqID_60483
atggcccccaagaaagagacaatcagagccagcacatcactgggtgatgctacgaaggcgaccctcgccgagaagaaatgcaaaggaaccctcactaatgatgcccctgaggccacacccaagaacgacagagcaataaacaacaaacatccccgaacagaaaacccactctcacccataaaggcaccgtttgcacgtacaattctaaagacctccctcgagacccctcaccaagctttaccctctggaagccgaagacatcatagaagacgacaaagtcatgggcatctcagtcaaagaccaactcaaactatgagtacttcgcataagcgtctcagtcaaagaccaactcaaactatgagtacttcgcataaaaaacaatcacctataaaaacaaagggagatactcgcatccaagaggtagtgaaccaatattaa

SEQ ID NO: 18705 - DNA, 324 bp, Zea mays
  Peptide Sequence Number=SeqID_60484
atggaggatgtggacgctactcagtaccagcgtcttgcgaggagccttcgctacctcgtccacacacggccggacttgcatagtccgtcggctgcgtgccctagggagccacaccttgtcgggtacagcgacagcgaccatgctgacgacatcgacgccagcaagagcaaagcgggatcctcttctttctcgaccactatttccatttcttacactgtttcgcagtacacagacaagatgaatcatgtgcagctgcagtttagaaaatacacagcagttgagtttcatgctatgttactttataatgttcaaagacaaaagtaa

SEQ ID NO: 18706 - DNA, 153 bp, Zea mays
  Peptide Sequence Number=SeqID_60485
atggctttgataccacttatgtcacacccggttttggaaggcaaaccgaatgcgaaccatgtccttacggagaggtactcaagaaaaaggtctgagccccctaaggaatcacaatatcatccacataatcagcataacagtatcgtatcataa

SEQ ID NO: 18707 - DNA, 192 bp, Zea mays
  Peptide Sequence Number=SeqID_60486
atggcgcgctggcggccggagagaggggaagtcacttgcataggtgataccgtggctttcaccgtggcaaggcctctggcgatggacgggcttgctacaagggttcactgcaacgtgttaaacctcccaggcacgtggcgcacgaccgggcaaaatccttatgagtttgaagatacagggctccacagttaa

SEQ ID NO: 18708 - DNA, 435 bp, Zea mays
  Peptide Sequence Number=SeqID_60487
atggcggagccatggccggctatggccgtcccgcgcaacggtgctccaagctcaaaaccgaatgccgcaaaatcacatggaggacaaagcaaagaggttgagcgattttcgcggacaggatttctgcggttggacggcgcggttctgttgcgttcggatgaagaggacgcatccgacaagtatggcccacatggcggcgtggagagaagtagaagggatggcgagtgggccatggagtcagcgaaggaaacaattccgcgtatggtgccactggctggcggggtccacatagcagggccagcgcagcccgcggaaaaggttggtgagcggggtgggggaacgcctaacacgtgggtccatctagtcggcaccctgtggttggagtgggctgatgagggggaacggaggtgggccaagattgggaaagtgggctga

SEQ ID NO: 18709 - DNA, 264 bp, Zea mays
  Peptide Sequence Number=SeqID_60488
atgcgctacgctgggacacgcgccgagcaaagggtggctggcatcaagggtacctttggctccagaatgtttgaaaaggcgaaaaggagaaggaaaggcgaggagatggcgacggcgtttgagggagggaggacggatctcctggcggccaccggagccagggcggggaagctgatcgcctgcagtactgcatggtgcagtgcggaagtacctatgctagaatacagaaggggtgggggattgagctcctcggggcggatctag

SEQ ID NO: 18710 - DNA, 255 bp, Zea mays
  Peptide Sequence Number=SeqID_60489
atggcgggcggaaatacgctcgccggagctaaggaacggtggctggccggtgagggattagatctagaagaaggtgtgcatctggccattgatcggctaattgacggtgtggatttggggctggagaccgagcagcgagagccattgatctctgatcgtgcggtttttgttagatcagatttcataaaatcttggccatcatattttgatccagcagatgatagcgcataccggtttgctggcatcccggtttga

SEQ ID NO: 18711 - DNA, 192 bp, Zea mays
  Peptide Sequence Number=SeqID_60490
atgtggggcccacacggccgtgataccgtctgggagaggtcggaccaggcgcttgagcaggttccgacgtctaggcctacgcaagcaacccctactgatgatactaattttgtggtggctgcaaatgcagtgcctgttaatgataggttgtctggttctgaaccttggtcttggtcatctgatggtgggtga

SEQ ID NO: 18712 - DNA, 195 bp, Zea mays
  Peptide Sequence Number=SeqID_60491
atgcggatgatgaacctgaagatggataatttgaacgagtaccaagacaaaggatggtcatcaagagatcgtcgtctaaccaacaataacctagtgttattccaggtgatgcttcatatgggatgggaatttttacaaagaaaagcttgtgatggtgaatccatcatggccatgatgggttcaacatctgaaaag

SEQ ID NO: 18713 - DNA, 264 bp, Zea mays
  Peptide Sequence Number=SeqID_60492
atgggccaaatgtcactggcctcggcccagctctctcgccctaacctgcgccgtgctcttgaccatttcaccgacgggtgggtccccctggcgggcctcccgtcgcccacgcttgcacctgaagcccctgactcgcggcccccggtgtcagcaccccctccgtcctcctcgcgtgggcgtggactagaatccgtgcgtgatggtgccgataacttcggtcaggtcgggttcggcatgatcttgcctccataccatcgctgctag

SEQ ID NO: 18714 - DNA, 405 bp, Zea mays
  Peptide Sequence Number=SeqID_60493
atgtgccactatggtgattttgtgaagagggaccaaggcagtgtcaacacctcccatctgcctgtcccaccgactctgctcgccgtcggtggcccctccattcccgaccccgtcgtccagctgctccccaaggcgaagcacaccaccaggcccatagccgcgtactgcccatgcgacacaggactcaggtcaaccaacatcacatcatcaatcagtcccagacgggcaccattcgaggagtgtggagagcgtagcagccataggagagggagcagcaagcacgagaaagggtgggatgggaatggaagacaacctggccacaataaatctctgcctctcatggcccaaacgtgtgacccaccagatctgggacttcgaagacatgggagctgtctacggaactga

SEQ ID NO: 18715 - DNA, 330 bp, Zea mays
  Peptide Sequence Number=SeqID_60494
atggcggctgctctcttctttttctttgcgttggctggtatgcggagtccggcggctgttgctagtgcgcagtgcgctcacgatctgctctggcgactgctcgtggatggcggcatggatggctggactctgcaaaagaggctcgatcttgtctggtacctcttcagaccggcggttgttcctgctactggcggcgtccatccggttggcgacctgcttcctcctgtgcagccgactaggtttaggcgtgttgacggcttgactccgggaaaactcccccggcagctaagcttcggccgcttttttataggaaacagcgacaagagataa

SEQ ID NO: 18716 - DNA, 357 bp, Zea mays
  Peptide Sequence Number=SeqID_60495
atgggcgtcgaatggaaccctaaggtttccggaagacaaaccacggcgcctccgcacatcggcgacgggattggtatcgcgcggcgaactggaggagccagacacgggttaaggcggaattggattgggcaggtggggcggcagggaacaagcctacggcgaagtgtacggggagagcgaattctccggattggacgggcaaaagcgcagggaacctacagagaacactgtggaggcggcgaggatggggcggagacgaacactcaccgacgagaggaggatcgagcggacttggacccagagcagatccaaccgcgcttggaggtatgtggatttacatatcctattgttggttaa

SEQ ID NO: 18717 - DNA, 510 bp, Zea mays
  Peptide Sequence Number=SeqID_60496
atgactagaagcagggacattctgtctaaaccagctcctagagcaaccattcgctttgggaatcctgacaacgtccttgacaacgaagaagcaacaaatagggcctcagaagccccgactctcccaaagggcgattcgctcgatatcgttggaagcttcgatcacctccaccttgatcccttgggaggtgggaatgtgcgaccgtgctcactgttttcaattttcaccaaggtcgtggaggcgttgggtctcgttcagggactattgtccggcctcccccccgtcaaggtcaggaaacggacctggttcctcgctgaatgggaccacccacaccttggcctaggaatgattcatgatctcgtcgactggggaatcctctgtattcacaagaagcctcgaggagaccctcaccgatgtcgtgtggcaaatggggcagctgcgacggagggcttggcgagcgcgcgtcaaagccgctggcgcttcgcgtcgctcgatctgcagcagggttag

SEQ ID NO: 18718 - DNA, 1257 bp, Zea mays
  Peptide Sequence Number=SeqID_60497
atggctcccagatcagtccatgcccggttccttccgttttccctgacacggttccaactcttctttccctggaactggaacgcaccgcatccgatgggtcggcgcctgggcccccgtgcccgcgcatcgtataaagccgcccctccgccacccgaccttgccgcgtctcccgtgatccccgtctccagctcaggagccagccacagcccacagctattcatcagcttgacctccccgtccgcccgcttctcgcgtcgaggtcggccgcgcgccactctgaatccccagggcaccacaccgccggacaacctcgagaagaagcaccggcaacgacgacgagctagcactagcagtcagtcacagccgggcaagattgattcggacgagcagccgatgatgatgcacgggaacgggcacgggcacggccgtgtccacccggcgtcctccagctccgacttctccggcgagatgaaccagtcggccgtgtccgacccctcctccagcccgctctacagcttccacttcgagaagcccgtcccgccgccgccgcccgcaggcacgtacgtggtgcaggtgcccaaggacaaggtcttccgcgtcccgccgcccgagaacgcgcgcctcttcgaccactacacgcgccgcgccaggcgccgccgccgcggcagctgctcctgcgcgtgcctgctcgtcggagccgcagtcgcgctcgccgccgccctcgccggcgtcctcgcgtgcctggtcctcgggccgaagccgccggcgtacgcggtccaggcgctggccgtctccggtctcgtcaacgcctcctcctccccggccgcgctctcgccggggttcgacgcgaccgtgcgcgccgacaaccgcaacggcaggctcggcgtgcggtacgaggggggccggggccgcgtctccgtgtcgtacggcggcgcgctcctggccgacggcgcgtggccggcgctctaccaggctccccggaacgtgacggtggtcgtggcgagggcgagggggtccggggtacggctgtcgcggagcgtgcgagggcagttggccgcggcggaacggctccggtcggtgccgttcgacatggacgtcgacgtgcccgtgcgcctccagctcggcgtggtcaggacgtgggccgtgccgctgcgggcgcgctgcaccgtggcggtcgacaggctcgcggccgacgccagggtggtgtccaactcgtgcgacgtcaaggtgcgcctcctgtcgtggtggaggaactga

SEQ ID NO: 18719 - DNA, 900 bp, Zea mays
  Peptide Sequence Number=SeqID_60498
atgaccgcgtcaaaaaaggctggcccctcggaggggttcaacagccgcctcagagcgctcgggctccgcgcccactactggttagaggttcgaaggccggcccctcggaagggttcaacggccgcctcaggccactcaggctccgcgcccactactgatcagggagcccgaagtgaccgcagtcacttcaccgctccactgaccgacctaacaagcggacagccgccgccctgcgccgctccgactgctgtgccactcgacagagtgaggctgacagcagcccaaggctcggactcggcctcggccgaggaagatgacgaactccgcctcgcccgacctcagggctcagactcggcctcggccccggaagacgacgaattccgcctcgcccgaccccagggctcggactcggcctcggccccggaagacgacgaactctgccttgcccgaccccagggctcggactcggcctcggccccggaagacgacgaactccgcctcgcccaaccccagggctcggactcggccctagcctcagccgacggtcccgcctcgcccgacccaggggctcggactcgacctcgacctcggaagacagactcgacctcgacctcggaggagcctccgcctcgcccgaccccagggcttggacggacccacgtcacaagaggggccatcattaccctacccctagctagctctggctacagggaacaagaccggcgtcccatctggctcgccccggtaaaacaaataatgatggcgccccgcgtgctccatgacgacggcggctctcagcccccttacggaagcaaggagacgtcagcaaggactcgacagccccgacagctgtccttccgtcaggctccagcgctcctccaacggccagacatctcatga

SEQ ID NO: 18720 - DNA, 252 bp, Zea mays
  Peptide Sequence Number=SeqID_60499
atggcgagcggcggcggagctccctgggtgtgcacattgtgtgaggcgagtgctgagggctacgagtgcttgagtgaggggaggggagggcgagtgggtacaaggcagctagtaaaaggccagggtggggatgggcacggcctcggcgtgcgtcgtgggcggagtccacggcgacgcgtgggtcatgcacaggcggttcggaggggagggtccgatagatgggaccacgggttagcgagagcgggcgagtga

SEQ ID NO: 18721 - DNA, 1368 bp, Zea mays
  Peptide Sequence Number=SeqID_60500
atggaggcccaggcgggcagcacgcaccggtggagccccggcgcccgcgccttctccacggcgccggctacgcggaccaccgtgccgctcgcgcacctggctgatctcccggcgtctctgccagaatcgggctacaccgtcacgccgcctgtccaaccctggccgcgccgcctcacggcgcggtcgctgtcccgtctcctcctcggcgcggccacgcccgagctcgcggtcctcgccctccgccacgcgctcttccacgccgcgcatcctctgccgccctcgctccccgtcttcgccgcggccctctcccgcctctcccacgccgacgcaggcgccgcggcccgccacctgccccccgtcctctccctgctccgcgcctcccgcctcccgggccttctccgaccgcccgttcctgccgctcctccgcgcgctgcgggccgctcccgtccctccgccttttcctctccctcccgtccttcaactcccgtccttccacccgctcctttaacgcgctcctccactctctcgtctccgcgcgccgcctccgcctcgccgccgcgctcttccgcgccgcgccaaccaagttatgtcgtcacttacaccacggttctcactgcctactgtgccaaaggggatctcgagggtgcacagcagctctttgacgatattattgccagcgggcgtaggccagatgctactatgtacacagtgctcatagatgggtactgccaccataggaagttgcaagatgcagcaaggatcatggatgagatgggagctgctggggtgcagccaaatgaggttacatactctgtggtgattgaagcgtgctgcaaggagagaaaatccacagaggcgcgtgatttgacaagggagatgctaggggcaggatatgtaccggacacaccactgtgtgctaaggtggttgatgtgctatgccaggatggaaaggcaggagaggcgaatgagatgtggagacagatggtgaagaagagcgtccctccagataacactgtcgtcagcacattgatctactggttatgtaagaaaggaatggttcaggaggcgaggaagctatttgatgagctcgagagggggttcttgcctagcttgctgacgtataactcgcttattataggattatgtgagaatggagagttacaggaggctggtagggtgtgggatgacatggtcgaacggcggtatgaaccaaatgcaatgacttatgaggccttgatcaagggtttctgcaaaataggcaaatcaaatgaaggttatgcgctatttaaggagatgatgtccagagggactcaggggcggatctacgagaggggctgtcgggactgcagctccggttgtctcccataa

SEQ ID NO: 18722 - DNA, 219 bp, Zea mays
  Peptide Sequence Number=SeqID_60501
atgtcctcgatggctagagcggaggcagcaaagaggaagggcgccgaatggaggagctgtccctgggctaggggagctcagcttgctgttgccgtgagggagagggaggacggcatggggaggaaggaagcagggcaggtgctgccatttttaaaggggtgctcgctgcagcaggcaactcctacacttaagtgcacagtacaagactacaaacattaa

SEQ ID NO: 18723 - DNA, 186 bp, Zea mays
  Peptide Sequence Number=SeqID_60502
atggaccgacaacccaatcttgcacactggaagtctggaaaccccgatttgagaaattcagtcagtatctgtgccgcgaaggcgagaggcttaggcagcaggacagagccacgatcggcatgcaaaactagagaggaagcatattgcttgtttggcatcaacttgtgcgacatggtacacttctga

SEQ ID NO: 18724 - DNA, 555 bp, Zea mays
  Peptide Sequence Number=SeqID_60503
atggccaatctggttaatgagtggctatcaattttgtatgaccaaagtgtccagtcatattttcaccaaaaagcaggtgttgtagttctgaaagtggtaactcaagggaattattatgtaattacaaagacagaattagcacaaactaaaccacaccacatgattatgagttatgactacagatttttttccagctatttgcactatgggttgcttgctgctagagcagaggtcttaaaatctggcaatggcaatggttacaacaactgtatgttagaaggatatcaagggcaatataaatatggctctgaaacatttgaagcctcagcttcaccttctggtgcaagttattcaaaatgcaagaatgatgttgtgaaatctcttaaagtggatgaagcatgtacccacctgaaatgttcttttggtggcatttggaatggtggcggtggtgctggacagaaaaaactttttgtggcatcgtttttctttgacatggctgatgaggtaaggtgtgccaaagcttatgctcatgcatgtgttggtggttttagctga

SEQ ID NO: 18725 - DNA, 399 bp, Zea mays
  Peptide Sequence Number=SeqID_60504
atggaccgaaactcactcctagcaaacgtgtgggacactaacatctcgctaggctggtacaaaaccgactccaactcacgatgcaccgaaaaaccggtggtaccacacatgccggacggcgagaagacgaccgaggcaacggccaaggatgtcggcggcggcagccagccaaaaccaccgtcccgccgcggtagcgcccgcttcgagcgcctcctctccgggctgggcgctggtccgctcgtggacgtcgagcccgacaaggttaaggacgagatccggcgatgggccaagaaggtggcggctctggtgcgccagctcagcttcggcgcctgggcggagaagagcgacggcggctcgtcggagaaccacggcgcaggcgatgatggatacgagagctga

SEQ ID NO: 18726 - DNA, 1515 bp, Zea mays
  Peptide Sequence Number=SeqID_60505
atggcgatgtgtttcatgttgctgttaatttgcgtctcaggaatggagcttcaatttcaatgggaccaggtcgcagcattcgttaggcagccagatggttctctgtttagctggagagagcggtattgctgcttccgctacttgatatatggcattgtgaacaagacaaactctgaaatagctattaaatttgatggtaaggagttccattggaagcaaaatgaaattaagaggaagcaactcctgagaaattgggcacttaattggcttgacttcacatggcaacctattgatgagatttactcctactttggaacaaagattgcaacatactttgcgttcctaggaatgtatacacgatggcttttcttcccagctgtttttggattgacaactcaactaatagattttgggtcattgcagtggttggttcttcctgctttctttatctttgttatttcttgggccgtcttctttctgcaattttggaaaaggaagaattcagcacttcttgcaagatggggtattaattgttcactatctgaatacaaaaatctgggcatcgaactcagttccttgagtgattctcttactgttgaggaaaagaagttttgtgatgtatctgctgagaaaagcaagttacaaaggaacgaatggtttggtgttctccttagaataaggaacaatgctatcattgtgctggctatcatctgtcttcagttgccatttgagttggcctatgctcatctatatgagattacagaaactgaggctatgaagtatttgttgactgcagtatatcttgttgcaattcaatattacaccagaattggtggcaaggtgtctgtcaatttgataaagtatgaaaacaaccaaggagaagaatcgagttccgctagtttagtttataaggtattggaaaatctgattgagaattccattccttaccttaagtacagctacaaaaagtacatagctgttcacaagaaaaagcatgagaaagaatcaccagtgggtaggtcagtgcggttatcaacaagagtggagaaagagtatttaaaaccctcttatactgcgagcattggagcagaacttgaagacggtttatttgatgactttctggagctggctcttcagtttggcatgatcatgatgtttgcctgtgcatttccattgatattctgctttgcagctctgaacaatgttactgaaatcagagcagatgcattaaagttgctagtcatgttgaaaagacctgagccgcgtgctgcagctacaattggagcatggttgaacatattccaggaggggaaatggaggattgagccaggactagcagcaatcctcataatggagcatgctctcctcttaatcaagtttggtttctcacactttgtgcctgaggagcctgcgtgggtgaaagcaaatcgtgtgcgatatgtagctcaggcacaaaacgtctgctccaaacaacttttgaggagcatttcaaaatttgacggaaaactggattga

SEQ ID NO: 18727 - DNA, 462 bp, Zea mays
  Peptide Sequence Number=SeqID_60506
atgacagcaagttgcccatcggccggcaggttctgtattgcaatactgtggcggccatcaaatgcatcaagcaaggagtactgtgcaaagaaactagtcatgcgcagtgcttgcacctacgttgcggatacaaggggctctcatgtcatcgtctcatcgatgaacactggacatgcagctatacgccaggctcgcaggcaccgcgtcggccaaccagccgtcgatcgtgagctgtctcggaggcaagcaccaggcaggcatggcacgccagggcagccagtctgtgaacgcggtggctccgcttccagcctttggcgttcgtcagctataaatagcaggcgccgttcatctctgacacaaacaccactgcaccagtacaacccagaatcccagatccctcctcggcatctccctttctacggtgcacgatattctatatcggcagttcctcagccgcagtag

SEQ ID NO: 18728 - DNA, 384 bp, Zea mays
  Peptide Sequence Number=SeqID_60507
atgctccacgccgcgccttgtccgcgcgtgtggacaagccagcagctgcgcctggcttcttgtggccgagcattctaccgcgccctcactctctccctctgctctcatctcgctctcactcgccctcacctcatcgtttcttccacccgacgccgttcgccaaggccgtcgcgagctaagctcgtgcccgcgcctccactgaccaccgtagtccacgagccaagtggccaccacttcgtcctcaagtgctcaaacccggagcccttgctcaagctcggagaaggccctgagcaccaccgtcgacgccgtcgttcatcggtctcctccggcgcgcgtggactggacgtctccattcgcgacccttcgagccaagaacaccgttga

SEQ ID NO: 18729 - DNA, 639 bp, Zea mays
  Peptide Sequence Number=SeqID_60508
atggacgaggctacgaagaaggtggaggctacggtgctggagatcccgcgagggtctgatatggagtccgtaacggagaacaaggtacgcaccgccgccgctgaccgcctcggcatcgacctctccgtctccaaccgcaagctcttcgtccgcggcgtcgttgatgaatacctactttcactctcctcgcaggaggaggcgaaggcggcggaggagggcgacgctggcagggagagcaaggacaaggaacggaaggaagatgaggaggaggatgaaggtaagggtggcgggaagagagagtacggcgaccaaggggaccttatcctgtgccgcctgtcgagcaagaggagggtgactctgtcggagttcaagggcaggtcgctggtgtccatccgagagttctacgtgaaggacggcaaggagatgccctccgccaaagaaaaatctgaggaaatcatttctgcaggcgagctgatctgcaaaagcacatttccaccgtattcaaatcagatacacacaggggcggatctacaccccgggccacccggtattagtatgacaatggagcagtgggaagcattttgcaatgctgcacctgcgatagaggatgccatcaaaaagcttgaagattcagactga

SEQ ID NO: 18730 - DNA, 1290 bp, Zea mays
  Peptide Sequence Number=SeqID_60509
atggcgtggtcggagacggacgccgcgctgttcgcggcggtgctgggggcgggacgcggcgcaccacctgagcaccacgccgccgcaccaggacgcgcccgcggcgtcagcccccgagcttcagcgcgcctgcaggacctcttggagcggggcggggcgtggacgtacggcatcttctggcaagagtcttgcgccggcggccgctccgtgctcggctggagcgacggccactgccgcgacggcggcgccccgcaccacgacgacgcggaccggagcgtgggcgcggaaagcgcgcgctgctgcggctgcacgcgctctacggcggcggggacgacgaagggggccgactacgcgctccgcctcgacccgggtcaccgccgccgagatgtactttctggcgtccattccgcggggctccgcaccgtcgtcttcctcccgtgcaagggcggcgtcctcgagctcggctccgccgtgcccgtccgcgagactcccgagaccctgcgcgcgctccagaccgcgctcgctgtcgcgcggcccccggcacgcgaggaatgcatgaggatcttcggccaggacctctcccccggcgggagcgcccgagccccgcgcagcgtcgacaattgggctccacatccacacctcgccgcccaagccaccgccgcgtccgcactagccagcaaggaagccgccgcgggacacaaggctccggagccgcccaggagcatagacttcagcaagccagggaagcctgggcacgggcaggccggcggcgaggagcggaggccgcggaagcgcgggcggaagccggcgaacgggcgggaggagccactgaaccacgtggaggcggagcggcagcggcgggagaagctgaaccagcggttctacgccctgcgcgccgtcgtccccaagatttccaagatggacaaggcgtcgttgctcagcgacgccatcgcgtacatccaggagctggaggaccggctccgcggcggcggcggcggcggcggcggctgctcggcggcgcgcccggacagcccggacgtggaggtgaaggcaatgcaggacgaggtggtgctgcgcgtgaccacgcccctgtacgcgcaccccgtctccagggtgttccacgccatcagggacgccgagctgatcgtggcggcgtcggacgtggcggtggcggacgaagccgtcacgcacacgctcgtgctgcggtcgcccggccccgagcagctcaccgcggagacggtactcgccgccatgtcacgggggatgaccagcgccaccccctccccgtga

SEQ ID NO: 18731 - DNA, 663 bp, Zea mays
  Peptide Sequence Number=SeqID_60510
atggcctcagctgctcggtccgccgcgctccgcgtgctgctgctggtggcggtggccatcgccggcgccctctcggacccgacgccgctccaggacacctgcgtggccgacatgcgggccgcgacgccggtcgacgggttcgcgtgcaagccgcagtcggcggtggtggacgaggacttcttctcccgcgccatcgcgtccgccgcgagcaccgccaacccgttcggcgccaactccacgcgcgccaccgtggccacgttcccgggcctcaacacgctgggcgtctccatcacgcgcgtcgacctggcccccggcgggctcaacccgccgcactcgcacccgcgcgcctccgagctcgtcatggtgctgcagggcgaggtcttggtcggcttcaccacgggggccaaccgcctcttctccaaggtggtcagggagaacgagctcttcgtcgtgccccgcggcctgcagcacttccagctcaacaccggcgccggcgacgccgtgttcgtcgccatgttcgacagccagtcgcccggcgtcgtcacgcccaccttcgccatgttctccactaagcctgccatgcccatggaggtgctcaccaagacgttcctcacgggcgaggaccaagtcaatgccatcatgtctaagttcgctggcttctaa

SEQ ID NO: 18732 - DNA, 528 bp, Zea mays
  Peptide Sequence Number=SeqID_60511
atggggtgcaggctcatcgtctaccattactgcctctccgtgctggttcctaccaatattcagcatatagttgccttttcagggaatgcatcacaaggtggtaccacattacccatgatctacgtgctcggagactccctggcgcctgtcgagaacaacaataacctggtgacactgctcaaggccaacttcctacgaaacaacatcgactacctagggcacaaggccatcggctgcttcagcaatggcaagaactccatcgacttcctcggtacgaagaaggtaggggaaaagcagggaagtaggtcgtaccacggtgcctcgtgctatcgccaacgagggagctcgctcaacaattccatgttgatttcctcccgtgcacgagtgtccctgcagccacagggagaccacatcgagctgcaccagaagcgccatggtaagcacttggaccacgagttgattggtactaagggcaagaggtttgtcaagaaacgctatgctgagaaggcgcagatgaagaagaaataa

SEQ ID NO: 18733 - DNA, 1374 bp, Zea mays
  Peptide Sequence Number=SeqID_60512
atggctgctcaagtattagggcttattcggttatttcaattccatgtggattggaaaaagaagggagctgtgctaaaatttcttggaggggagggggtagagatgacgtttggtagcgccgacatggaggccggcggcggcggcgagcgccgccacggacaacaggaggaacagtcatccgacgagcggcgcgcgcggttcgcggaggactggggctgctgcgcctgcgcctgcgcggggctattcctggggcccaacccgatggtggcgcgctacatgtacgcgctcatcttcctcgtcaccaacctcctcgcctggacgctccgcgactacggcgactccgcgctcgccgagctgcagcggctgaaggtctgccagggcgcgctctactgcctgggcgcggagggcgtgctgcgggtcagcctcggctgcttcgtcttcttcttcgtcatgttcctgtccaccgtgaaggccaggaaggtgcacgactgccgcaactcgtggcactccgagtggtggccggccaagctcgccctctggctcggcctcaccgccgtcaccttcctcgcgccgtcgccgctcgtccagctctacgggaaggtggcgcatttcggagcaggccacttgcagattcaggcggtgtccatcgtcacgtacgtggggtcgctcctggggatcgtgctcatgtacgtgtggtacgcgcccagcccggcctgcaggctcaacatcctcttcatcaccgtcacgctggcgctcgtgcagctcatgaccttcgtctccatgagctccaaggcaagcgagctcagacacacgcataataatacatgctctgtctggagatggcgtccgttcattactcacagctggggcttggaaataaacatatatacaggtgaaggcagggtacgtggcgccggggctgatggggatctacgtcgtgttcctgtgctggtcggcgatcagaagagctttgtgatcgccgtcgtcgtcatcgtggcggcgaccttctcgacggggatcgactccaagtgcctccagttcaagcaggcggagggggagtcggaggaggaggaggaggacgacatcccctacggcctcggcttcttccacctggtgttctccatgggcgccatgtacttcgccatgatcttcgtcggctggaacgcgaacgcgagccacaccatggagaggcaagtggacgatcgacgtcgggtgggcgagcacgtgggtgcgcgtcggcaacgagtggctggcggcaatcgtgtacatatggatgatgatcgcgcccgtcatctggaagacgaggcagctcgggtagtttttgctaagctggaggtgcagcagacaagacaacaagaaagaggaggcaactaa

SEQ ID NO: 18734 - DNA, 333 bp, Zea mays
  Peptide Sequence Number=SeqID_60513
atgaagggcaaagggcgcagagcggccggttcggcgagcggcctgggcgcgcggtgcacggtcccagtgctggacgtcgcacggtcgctggcgcgcggctgcagggcgtcgcggctcgggtccggccggggtcacgagcggctggtgcggccaggtcgtgcaggtgagggcggggcaggggcgctgctccacgggcgcggggcggccgggtcctgggcggcgcgcacgggcaagcagagagggagagatggccaggggaggggcggcggctatgggaagaggagccagggtggcggccggctgggagatagagcagggtgggcgcggcttagg

SEQ ID NO: 18735 - DNA, 377 bp, Zea mays
  Peptide Sequence Number=SeqID_60514
atgaagaacccgccgacgccactgatggccatgaagcacccccggtcgtctcttgctctccctcccttcccctctataaaaaccacagccgagctcttctttcttcctaccccaagctcgcttcctcctctcggttctctcttcctcggaccctcgctgttcgtcgccgtgaagttcgtcgccggactgtccgcgcaacacctcatcggagccccgtccaacgtcaagaacccctgcccacacgcgctgcagcaccaccactcgctgtcgtgcctcgccggagacgtgcccgcacccatcgtaccgagccttcgccttgacgcccgttcgtcgttcaccgtcgtccgttcatccctgcgcatgaacgaaatcacaag

SEQ ID NO: 18736 - DNA, 377 bp, Zea mays
  Peptide Sequence Number=SeqID_60515
atgaagaacccgccgacgccactgatggccatgaagcacccccggtcgtctcttgctctccctcccttcccctctataaaaaccacagccgagctcttctttcttcctaccccaagctcgcttcctcctctcggttctctcttcctcggaccctcgctgttcgtcgtcgtgaagttcgtcgccggattgtccgcgcaacacctcatcggagccccgtccgacgtcaagaacccctgcccacacgcgctgcagcaccaccgctcgctgtcgtgcctcgccggagacgtgcccgcacccatcgtaccgagccttcgccttgacgcccgttcgtcattcgccgtcgtccgttcatccctgcgcatgaacgaaatcacaag

SEQ ID NO: 18737 - DNA, 1326 bp, Zea mays
  Peptide Sequence Number=SeqID_60516
atggcgacccgtaggatggagcagtgcgcgtgggtggcggaggtggagcgggcggtggccgacggcggcgcgtcgtcggaggagtcctcgcggtggcggcagcagtgcatctaccgcgtgccgacgtgtatcaagaacctgaaccgtaaggcgtaccagccgcaggtggtgtcgctgggcccgttccaccacggcgagccccagctgcggcccatggacacgcacaagcgccgcgccctggtccacttcctgcgacgcgcgcgcaagcctctggcggcgttcgcgggcgcagtcgccgcggcgggcgagcggctggaggccgcgtacgaggggctcggcgacgagtggcgcgtcggcggcggagcggctgagaggttcgtggagctgatggtgaccgacgggtgcttcctcctggagacgatgcggacggccaccggctgggaggtgaacgactacgacggtgaggaccccgtcttcagcgcccacggcctgctctacaacgtgccctacatccgccgcgacatgctcatgatcgagaaccagctgccgctgctcgtcctggaccgcctcctcgccgttgagaacggcaaggatgggaacgaggatgtgatcaaccggatagtgcttctgtttctgtccccgacggcggcgtggccgctgacgacgggcaccggcctggctctccatccgctggacatgttccgcaggagcctcctctgcggtagtccgacgccgtccggcggccctcgtgcgccgccgccggactcgccggacgacatcatcaggtcggcggaggagctgtacgaggcgggcgtcaggttcaggcgcagcgcgacgagcagctttttggacatccgctttcacaggggcacgctgtacctgccggccatcgtcgtggacgacaccaccgagtacgtgctgctcaacctgatggcgttcgagcgcctgcacgtgggagccggcaacgacgtcaccgcctacgtcttcttcatggacaacatggtggactcggcgcgtgacgtggcactgctcacgtcgcggcggatcgtgtacaacaccgtgggcagcgacaaggcggtggccaagctcttcagcggcctgtccagggacgtggtgctggagccgcacagcgcgctggacgacgtgcaccgggaggtcaatgcctactgccggaagcgccggaaccggtggcgcgccaacctggtgcacacctacttccggagcccctggtcgttcctctccctcgctgccgccgtcttcctcctcgtcatgaccgtcttgcagactgtctacaccctcctaccgtactacagcgacaagagctag

SEQ ID NO: 18738 - DNA, 348 bp, Zea mays
  Peptide Sequence Number=SeqID_60517
atggcgaactctctccggtggatgggctcctccgtcgtgcccctgtccctctgcttgaccccgccacaacagaaacagagagggtgcatggcttgcggaagtgccgccatgggtgattcttgtatgacggcgtcgagtcctcggtggtcggtcgcgtgggtgtgccactactcgggcaccgaagcacggcagctacagcaaacagtggtggctgaccgtgtgtactgcggtgttgctctcgccggtagagtggggatcaccgaggctgctcgggctcctaatcggcggatgccgccgcaggatgggaacaatcacaactctgtggcctcgcgtgaagaagaagggtga

SEQ ID NO: 18739 - DNA, 187 bp, Zea mays
  Peptide Sequence Number=SeqID_60518
atgcgccatgccatcgtccaaggtctgaaaagcgagtcggaggtgatcgacgaactacggggagccatacgtgccctcgaatcagggaaacgaccacctatgctcccggactttctcaccggagttgaggtctcacggtggtgccgctcgtcgccgcggacaagactattccctggattaatcaccg

SEQ ID NO: 18740 - DNA, 291 bp, Zea mays
  Peptide Sequence Number=SeqID_60519
atgacgctaggcctagcctcgcaacaccatccccgtgagcgcctctgcggccgcaccatcgtcgtctccgacaccatctccttcccctcacaaggttctttgtttttcctgaattgtttgaagtatttttgctcaataggggtattttgccccttttcccaaatagtggcaggaaaaatacacccaagaggaaaaatcctcttacgccctgtttggatccttggaattgaattctattttaataaggacccgtttgtttcccttcattttgaggaatcggaatttaactaa

SEQ ID NO: 18741 - DNA, 366 bp, Zea mays
  Peptide Sequence Number=SeqID_60520
atgggcaacagcaagaaaggtggcagctcttcacatcactcaggtgacaagcgcaagcgcgagccgactcctccctcggaggacttcggcgactcggaatactcggaggaggagttctcctccgagtccgagggctctccggctcctgcctctcccccagcgtcgtctgatgactcagacgactcccaggggattgccgcggaggagtattcctcggacgaggaggattcctctgactcgtctggggagggaagcagcggcgacggcggtgacggcgacgacgacggaggcgacggtgatggtggcagcgacagcggcaagggcggtggcggcagcggcaagggcagcaacaaggccagtggctag

SEQ ID NO: 18742 - DNA, 915 bp, Zea mays
  Peptide Sequence Number=SeqID_60521
atggaggacggagggttggtcagcgaggccggcgcctgggccgagctcggcaccggcggcgacgagtcggaggagctggtggcgcagctgctgggcgccttcttccggtcccacggcgaggaaggccggcaccagctgctttggtctgacgaccaagcttcttccgacgacgtgcacggcgacggcagccttgccgtgccgctcgcatacgacggctgctgcggctatctgagctactcaggtagcaactcggacgagctccccctcgggagcagctcccgcgctgcgccagcaggtggcccaccggaggagctgctcggtgcagctgagactgagtacctgaataatgtggccgccgcagaccatcccttcttcaaatggtgtgggaatggtgagggtctggatggtccgacgagcgtcgtgggcacgcttgggcttggctcgggccggaaacgcgcgcgcaagaagagcggggacgaagacgaagacccgagcacggccatcgccagcggaagcggccccacgagctgctgcactacctccgacagcgactcaaacgcgtctcctctggagtccgcggacgccggcgctcgtcgccccaagggcaacgagaatgcccgggcagctggccgcggcgcggcggcggcgacgacgacgacagcggagccccagagcatctacgcaaggaagcggagggagcggatcaacgagaggctcaaggtgctgcagagcctggtgcccaacggcaccaaggtggacatgagcaccatgctcgaggaggccgtccactacgtcaagttcctgcagcttcagatcaggctcctgagctccgacgacacgtggatgtacgcgcccatcgcgtacaacgggatgggcatcgggatcgacctccgcatgcatggacaggacagatga

SEQ ID NO: 18743 - DNA, 1275 bp, Zea mays
  Peptide Sequence Number=SeqID_60522
atggcggtgtgcaccgacgacgcagagcggcgtctgaggcggggtgaggacgggagaaggaaggaactcctaccggagtgcgtcgtgacatcactgctcggaggcaaaggaacgacagcagaggggcccagaaggaagggggagtacatcgcgagcaaagtaacaagtgttgccgcacaacacaaacatagggtggctctgcagttcatacacgagatgcagtccaaggcgatccagagctgggaggcgagcaactcccaggccctgccggtcttcagcctcggcgtcgcgttcgtcgacgagaggagcgtcatctcagcgagtcttccggggcacgaaatccaagctgcgatagaagatatcaggtccgtcgtgtcgggtctgtcaccgggggataagcgagtgcacatcgcctctctcgaggaggtgttctcgtccgggtcagacgacaaggcggccaggctgaaggaggtggtcggcgtgatcagtgacgagacgggcagggacgactttgttaggcgcctgcgcatgctttcactgcagaaggttgcactggagaacagatacaccaagatcatgctgggaacgtgtgcttccggaatagcatgccatgtgctatctgcaaccgtgaaggggcaaggctacgctttaccagctgatgtccagtatgttgatacgcgatgggaagtacccgtggttcttccacttcatgattgcctggcccaagagcttaacttgctctgtgaaattgatagtttgaagacacagcaacttctcgataggccttgcagtggcatcaatggcttagtttcatcctttgtttcacggctaagggaagagaactcttctcgagagcataccattttaagaactgctcaaaagcttaagccattctcgtttaacaagttctcagcaaacggctaccatgatttcctgccatcgcggcttcgtcccaagtttcagaacattgatgccaacgagtgtactttctctgagattctttgcctaatatgtggaagcccgttcagtgaatcagagctcctgaatttggaaaacacaaagctcaaggctcagaagaaaattgatctttatactgcccattgttgtcaaagttgccatttccagattctcccagcagctacagatatgtatggacatttcttttcgctactaccgaagttttggactgagaaagtggacgctgcatctgccagccatagctcactaagagatcagatagcggactacctgctggatgaagatgatggaaactga

SEQ ID NO: 18744 - DNA, 924 bp, Zea mays
  Peptide Sequence Number=SeqID_60523
atggctagaatatcgtttgtgtctgacgactggttaaagtcctcactcaaagaacacctgatgggcgtttctgtcgacttgctctccaccatgaaccacaacattacttacaatttggcatggagaaaattaactgatccaacacgcatgccatccaattctgcacaagaggaattaggacataaccttttgtcctctattaagtacgcgtacaaggttgaccgaagggactcaagcataagacctgcacgcggatatgcttttatgtcgacttctcaagttggagggcttgcaccagagagcaaatattcacgttttcttaggcaggaatttgatcttcgaatggctttgcctctgggtgtgctgaatggtgctctcaacgccggagtggctgcgggagtcatccatccattggaaaggggatctgcaggatctgtctcaccacttgtagaaagatttaacttgggtggtaatatgcctcttgtgtgccacttgggtggaccatcttcactattaggcttcaaaacaagagggctacgggcagcaacagagtccagaacacatgaccccaacactcctggcaatggcacttccccttcctctaagctaaatggtcttggaggtgaagtagcggtgacagccttcgccgacctgtcatttgatctgcctctgaagccactcagggagctgggaatccatggtcatgcttttgtctgtgctggaaatcttggtagattaacggagtgtgatctgcggaagttccctgccactgaattcctgcagacattcagaagttgtgcaggatggggcatagttgtgccgaccagactgttccgcgtagagatgaattactgctacatcctaaaacagcttgatcatgacggggggaagacagacatacaatttaacttctcatcctcctaa

SEQ ID NO: 18745 - DNA, 342 bp, Zea mays
  Peptide Sequence Number=SeqID_60524
atggcgtccgccgacgcgcgcttggcggggattgcctcctccatccgcgtcatccccgacttccccaagccagggtcaaaattatccctacctctccctgtctctcctggaaactctgcgttcttctctcgccgagcgtggcagacgcgcgcggacggcttctacgacctcgaggagcgccaggcaggatccgccaccgtgccgggcagaagagccgccaccgcgccgggcagagcagccgccaccgcgccgggcagagctgccaccgcgccgggcttcagtctatcagtcactgagccggtagtaattcagaacacaccaaaactaacactgcgtcgatga

SEQ ID NO: 18746 - DNA, 723 bp, Zea mays
  Peptide Sequence Number=SeqID_60525
atggcatggcgcaatctatcttctataaaagtgcactcgctgctgggagagacgactcgcgacgacgatgcattcttcagcaccttccgcgacctgtgcctcaaccgttcatccgcgaacgacatcagcaagtgcctcccggcgatcgccgccgcctgcaaagcgttcaacgccaagatcgatgccggcctcggcgacgcgacgagcggcagcatcgatctcatatccgtcgcgcgtgacgcgctggcctcgggcgacccggcatcccaggcccgcgccaccgcgtgcgccgtggcgaccgtcgactcgagcggcggcaggcggaactgccaccgcgtagacctccgcaagaaagtagcgctgccggataaactgcgcagcaggctggtggctcaagcgcccaagcgcctcgtcaggatgtgcgggcagatcctgtacgagataccggcgtgccgattcactgagctccgcgcagataaatgcttgggtctctttcggcaggggaagagcacgttcgagaccagccgtgacttcaaggagacggttagcgttagtgtgctacgggatcctaaatcctatactgagacagtgactcggacggtgccggtgcatgtggactgctgcagcctaagcgacaggtgcctctgccagttgaagaagaagctgggcaacaacaccaccatcccgtgccttgcgaagaaggagctacaagcttgcaactga

SEQ ID NO: 18747 - DNA, 1038 bp, Zea mays
  Peptide Sequence Number=SeqID_60526
atggacagacaggtggcggagattgcctcggagcccgaccgcgccgccgcgtacgcacggttgcttctcctacagcgcggctgcgccgacgacgcctcctccgccgccgagctcgccgcggaattaccttccaccctcctcccgctcctcctccgcgacgcggccgccgatgacgaggccgtcgccgcttctgcgctcaagtgcctcggcttcgcgctctaccaccccgtcctcgtttctactatttcagcacagatgacccaattggtattggataccttggtacatataatcatgagcactcggatgaagtctgcttgcaatttgggtgtctggtgcttctcggttcaacaactgaacccattgattatagaggatagagcagatccaatgcttattgctattgttcatgcgctcgacaatccatttggttccttgtccacaacatttgaggcagctcaggctatcatgaagcttggtggtcaaagtcccaaaagaatgagggacctatcaagcttgtgggttccaccagtataccggagactcttaagtgctgacaaggcagaaagggacatggtagaaaggtgccttattaaggtgtcatgtgttattctaccacctcaacctctcctttccaaggctgttgcttcagaccttgagcagaagctactctcctgtatggtaaatatgcttgatgatccttccaagaaagttcaaactgtgaagtcatggggatggattgtatctttgcttggtccagatgcagtgaacaatagacctctgcttaataaacttataaaggttcctgagcagatgtttactgatctgaatccacaagttcaggttgctacaatggcaactgagattgtggcccagcaaactgtgatttccccattaaaacccattgaacaggcaagtgcacagggtcagagaggatttatgtgccccagtgaatcagaacttgctagctcaatcatgcaagcatatcaaggccttattggatattcaacacatcaaatggttaccatgggatattag

SEQ ID NO: 18748 - DNA, 204 bp, Zea mays
  Peptide Sequence Number=SeqID_60527
atgggtaaggtgcacggatcgctggcccgcgccgggaaggtccgcgggcagacgcccaaggtggcgaagcaggacaagaagaagaagccccgcggccgcgcgtacaagaggatgcagtacaaccgccgcttcgtcaccgccgtcgtcggcttcggcaagaagcgcgggcccaactcgtccgagaatctcagtttcgtgcggtga

SEQ ID NO: 18749 - DNA, 402 bp, Zea mays
  Peptide Sequence Number=SeqID_60528
atggacgagaagacgcgcgtggagcaggggatcatctgggtggggtgggtgggggagcaggccgacgctgacccgccccgcccgtgcacccaatcttggacgcttgcgcggtcggatcccaccggcaccggcagcgcgcgagaggcgagacagaccaccgcccccgctcccgcttccgcttggctccgccgcgccgcgccgctcctgcctgcgctggcggtcggaggcatgggcgggcacgggcgcctgtcctcccaacgggggcaggcagatggtctcccgagatcgtgtctgcggtgcggtgcgctaattcaacaacttgtcctcggtactattgagaagcgccgtatgatattagacttgactgactgttttctcacattctatctagagaccacttaa

SEQ ID NO: 18750 - DNA, 963 bp, Zea mays
  Peptide Sequence Number=SeqID_60529
atgaccaaattggccgtcgcggtcgctgccgggtctgtcctcgccgcgcttcttgtctacgccatgattgcgatgaagaggctggacgccgccgagattggcccagcagcacgggaagcagaggcgttcgagcagaacatggatgttgttggccgactgcgccatccgaaccttctacgacagctgctcgcgcggcgtcgtacgagtcagctactcgcgcggcgctggagctccgggcgcgggctctcctcgcgcaaccgtgacgtcgccgacatgctctgcgactacatccccagctactgcgccaagtcgtgctcggccgacgacgccaccaccgcctcgtcctcctcatcctgctcgtctggctccgttcagctcacgcggcattgggcggccttctttcattacatccaccaccgattcaacgcggcacaagaggtgttctgttccggaaattatcgaccgatggctcacgcactagcagcagcagctcggaaccgaaatctaaataaaagtcctgcccacgctcttcgccgacttcgacgctgcgccgcacttctcctgcgtcgtcacggagttctgccccggcggggacctccactcgctccgccaccacatgcccaaccgccgcttcttgcccccgtcgaacctgctggcgcccgccaatacaagggcggagtccgtgtcgcagctgctgccgcacgtgaagctcctccgccgccgccgcggtggcggcgctggacgccggcctccccggcgaggcccgtgcgccatttcaacaaggtgctcgacacgcgccgcagcgtgctgtcgcaccccttcgccacggcctgcctcgacgagctgtccatcatgatgccattggagaggaagaagagagaaggagagagctcaccggagataggagtggcggctacagcactgacggccatgcagacggaaacccgtgcccctgcagactga

SEQ ID NO: 18751 - DNA, 369 bp, Zea mays
  Peptide Sequence Number=SeqID_60530
atggaggtggtggaggcaaccaaggcgccgccggcgtccgtgtcatcgtctatgacgtcgttggcgtcggcctccgggccagcgggcggcggggagttcacggcagacgacctcgcggcggcagaccagctggtgcagctcagcgtcagcggcggcggcggcggggacgaggaggaccagtgctgttcgacgtcgccccgatcagtgaacaacgccgaggacgacgcgtgccgggggctggtggaccggagggctaggaagcgctaccggctggtgtcggagctctacgccgccaccaggaaggtgaaggcggccggcgccggtggtggtggcaggcggcggaagggcagggacggggtgaagaaatga

SEQ ID NO: 18752 - DNA, 759 bp, Zea mays
  Peptide Sequence Number=SeqID_60531
atgaacccttacctccgctcatggcctcgcggcccatcctgcgacctagcagcaccccagcgcggcccgccaactcgcagcccaccccgcgtccctcaccccttttcctccccacggcccagcagcccaccaagagcagtggaggcgctgctttctccacacccacgcgccaagtcacacacccccacttcgctgctccggcgagcccgctccacgactgtttgtctactccgccgcggcgtctgtctgtgcccatcagttgtgtggaggagccctccgttcgatgtcattcttccccgatctcgccctctccacagcggctaccgcgcttcctccgtctcgccatggcaggtgcctgtgagctcccctgcgtacctggaagcgcgcgcgccccggcggctcggcatggccagcgtggccatctcggcgcctggcgcggctgcgtgtgctcgtggcgcgtggccggcgtggcccgctgcctgcgcggtgcgcggccagcccaccgtttcgaccaacagcgcgtggccagcgtgcccgcagatcacccgcgcgccctcggcgcggcctgcgtgtggccggcgtgcccacgactcgctcgcgcgtccgcgacgcagcctcgcacgcatcctgcgtaaccccagcgtgtcgtcgttgccatcgtcttccgtgcccgcagaagccccggcagtaaagaagaaggagaaaggcatcaaggtgaacctccaggagttccaggacgtcgatgagttcgaggattag

SEQ ID NO: 18753 - DNA, 351 bp, Zea mays
  Peptide Sequence Number=SeqID_60532
atgaccgcgggggtgattggccacggcgacggcggtccgcagcgcttacggaggtcggaggggatcggtgcccctatccacgagctgcacgcgcacgcggtctccgccgcgatcccgccaggcgcggtgttcgttggaggggagatagttgcgaacccgggcggtagcgcctgttcctgcgtggcctcccgcgcacctcctgctggtccaggtcgtcttcgtcatcctccgccgggggcggctaatagcccagctggaggaggggtcgcaggcggcggcggcgcgttgacggagcgcggggacgaggtggaggaggccgacgcgacggatccccgcgggagggcggcgtag

SEQ ID NO: 18754 - DNA, 711 bp, Zea mays
  Peptide Sequence Number=SeqID_60533
atgcattgtccacagaaggtagctcaacagcagtcaggtcctagtgccccagcaaagaagaatgtgtctcagtcaggaggaggcaatcgcgccgagacacattacaaccctgggagattgaaccatttggaggctgaagcagtccaggaaacaccaagcatgatagtagcatcgcgccggaatcggaggtcgaaccggccgacttactctcgcccagaccataaaaacgggatccctgccagccctcgttcattacgccaacttagaggaacctcaacccaattctaccagggagtgcggggcgcagctggcaaggtcgcgggccgctgttctcgttctcctcccctacgcttgtcgggcgccccgggagccttcagggacgcttatccgtgggcactaaccgtgtcctgggtgccgctgagcgtgcggccgaccagtgtgaccgctattgctcgccatcgagacaccgctgccgcagaacttctccacgtcgcgggcagagtccgcaaccgtcctagcgtcgtcgaggtattcccaaaattgcctcgcttaacggtctatttcatgcgtcggggatcaaatgggaagatcggagctctgggtagtgattcgcacgcgctccggctagggagttccgccgtgcgtggcgagtcgccgggattgggtgttggctggagaagactcgcgtgcagcgtgggatgggggatgtag

SEQ ID NO: 18755 - DNA, 732 bp, Zea mays
  Peptide Sequence Number=SeqID_60534
atggcgcctcctgttgacatggcgagcctgtgccctaggttgggtgatgtggaggctcctccgaagccgaggtcgagtctgtcttccatggccgaggccgagtccgagcccctgggtcgggcgaggcggaggtcgtcggcagaggccagggcagagtccgagccctggggtcgggcggagcggagttcgtcgtcttctggggctgagcccgagtccgagccctgggtcgggcggagcggagttcgccgtcttccgggacttagcccgagtccgagccctgggtcgggcggagcggagttcgccgtcttccgggacttagcccgagtccgagccctgcccgagtccgagccctgggtcgggcggagcggagttcgccatcttccggggcttagcccgagtccgagccctgggtcgggcgaagcggagttcgccgtcttctgggacttagcccgagtccgagccctgggtcgggcggagcggagctttctatggtgcctttggcagggcctgactgcctgtcagtctcactctgtcaagtggcactgcagtcggagtggcgcaggcggcgctgtccttctgtcaggccggtcagtggagcggcgaagtgacggcggtcacttcggctctgccggaggggcctcgggcgagccggagatatgttcgccgtcggagggggggcgcctcgggcgagacggaaatcctccggggtcggctgcccttgtccgaggctag

SEQ ID NO: 18756 - DNA, 648 bp, Zea mays
  Peptide Sequence Number=SeqID_60535
atggcgcctcctgttgacatggcgagcctgtgccctaggttgggtgatgtggaggctcctccgaagccgaggtcgagtctgtcttccatggccgaggccgagtccgagcccctgggtcgggcgaggcggaggtcgtcggcagaggccagggcggagtccgagccctggggtcgggcggagcggagttcgtcgtcttctggggctgagcccgagtccgagccctgggtcgggcggagcggagttcgccgtcttccgggacttagcccgagtccgagccctgggtcgggcggagcggagttcgccgtcttccgggacttagcccgagtcggagttcgccgtcttccggggcttagcccgagtccgagccctgggtcgggcggagcggagttcgccgtcttccggggcttagcccgagtccgagccctggttgacttgcgtgggtgggatgcggccaccttcgtgcgggaggtggagttggaggccattaagattgttgggaagtatgtgccgaaggctgagatgataaagagttgggatattcgcagttctaacgtgaggttgaaccatgtttttgagttaaatagcttgcgatacggtccctacccggagggggactctactgacgccggcgatgaccgaggaaaatag

SEQ ID NO: 18757 - DNA, 540 bp, Zea mays
  Peptide Sequence Number=SeqID_60536
atggggatgtgcgcgggtcccggggaggttatgtcttcgcccgagctccgtgaaacatattcgcgcatgctgaaggttaccgggggtcgatggcttaggaattaccctataccatgggccgccgacgatgactattttatgtcctgtttggctcgtgagctgagaatttttccttatgagagaaatattggtgatgttgtgtcaacagtgatggagaaagatcgccaagatgcccagcggaagaagtggaaagccccacttcggctggtggacccatgccgaggtgcggaggctgggcaactgacggtggtaccggctacggtgcccgccggtttggtgatggccttcaccgaccaggttgcttcgggggcgctgacatcacaactggtttccgaaagaaaacagcttgagggtagggttgagcgccttcgaacacagcataccgaggcaatcaaggacaagtcaacggccaaaaataagaaccaaaaccttctcgagaaggtctcgacgcttgagaaggaaaaagaagagactccatga

SEQ ID NO: 18758 - DNA, 1515 bp, Zea mays
  Peptide Sequence Number=SeqID_60537
atggagaggaccggagcccacagcggtaagcgctggctaccgggcctcctggtcctcgccgccacgtcgtggcttttcgtcatctacttccatctcgcggtgttccgcggcccgccgatcgtcagcgcgccacgcgggcccctcgccgaggacgcgtcaggcggtggcggcggcggcggcgacgggcagcggttcctgctcctccatcacgaggagcggctcaggaaggtgaaggccccgcccgccaccaggggcgacgcgctccggacggcacgggacgacgactgccaggggcggtacgtgtacatccacgacctccctccgcggttcaacgcggacatcctcgccaactgccgccactggtacccgtggatggacatgtgcgtgtacctcgagaacggcgggctgggccggccggtggacaacgcggacggcgtgttcgccgacgaggggtggtacgccacggaccacttcggcctggacgtcatcttccacagtcggatgaggcagtacgagtgcctgacgggcgactcctcccgcgccgccgccgtcttcgtgcccttctacgccggcttcgacgtggtgcagcacctgtggggcgtcaactccacggcccgggagaaggacgcgctggcgctcgacctcgcggactggctcacgcggcggcccgagtggcgcgccatgggcggccgcgaccacttcttcctgtccgggaggacggcgtacgaccaccagcggcagacggacagcgactccgagtgggggaacaagctgctccgcctgccggcggtgcagaacatgacggcgctcttcgtcgagaagctcccctggacgagctacgacttcgccgtgccgtacccgacctacttccacccggccagcgacgcgcaggtcgccgagtggcagcggcggatgcgcgccacgaggcgcgactgggctcttctccttttgccggcggcgcgcgcggcgacccgtactccatccggcaccagctcatcggccagtgcgcctcgtccagcttctgcaggctggtgcggtgcgggaagaaccagcggaactgcctcgtccccgagcaccttcatgcgcgtgttccagggcacgcgcttctgcctgcagcccacgggcgacaccatgacgcgccggtcggcgttcgacgccatcatggccggctgcgtgccggtcttcttccacccggactcggcgcacacgcagtacaggtggcacctccccgacgcgcacgacacgtactcggtgctcatcccggaggcgcacgtgcgcgccggcaacgtcagcatcgaggagacgctccgcgcgatcccgcaggacgtggcggagcggatgacggagaccgtcatcgggctcatacccaggctggtgtacgcggacccgaggtccaagctggagacgctcagggacgccgtcgacgtgacggtcgaggcggtcatcgggagggtcaacaagctcagggaggagatgggccgcggccaagggcacctgctgcaaatgcaaacctag

SEQ ID NO: 18759 - DNA, 180 bp, Zea mays
  Peptide Sequence Number=SeqID_60538
atgggcttggactgggctgctgggggccatgaccatgatgcacttgttctaggatatgagcaacgacttatgggccaacaaatagttaaggaggttccttacaaatttccaagaacaagagcccaagacaaacggagacatggtaccaacgctttgatgcacttccacgtcctggcataa

SEQ ID NO: 18760 - DNA, 519 bp, Zea mays
  Peptide Sequence Number=SeqID_60539
atgggtgagaagaagatgcttacgctgaggagctccgactgcgaggagttcgaggtggaggaggcggtgttgatgaagtcagagatcattcgcttcatgatcgaggacgactgctccgacaacgtcatcccgctccccaacgtcaattccaagactctcgccctagtcatcgagtactgcaacaagcacgtccacgacgccgccaagcccgccgacgccgcggagaccaccaacgcctcatcagctgggggcggcggcgaggtcgacctcaaaaagtgggacgcggagttcggcaaggttgcgccggcgacgctcttcgacagagtagagctgccattcttcatcagagtagagctgccattctttgatccaattagggccaccagaatgccaaagatgaaggtacgctttgaacgaggagcagacataagagcgacgtctataaactgcaaaaccaacatccttgcaggaaagcgagaagcgaaaaacccggttcgacaaaggaataaccctaaataa

SEQ ID NO: 18761 - DNA, 552 bp, Zea mays
  Peptide Sequence Number=SeqID_60540
atgccaacttcaaaggattccgacgaaggtggcaaatcttcgaagggcaagaaaattttgtctaaacaggaggtacagagcccacacattctggttcttggaagtgctgctttcgagggttcatcatcctttgaaaatgatggtgtaaagaaatccaccgaggatgacggatctttggggcatgagaaaacagaagaagagccaaaagagcaaaatattacagttggaatagatgcggctgaagctacccaaactactagcaaagaaatggatgagcttggattttttatgaggcatattggtggtggcgagctgaatgacaaggaagtgtcagagttagaaaacaaaggtgaattcatgggttatggacctggagccatgctcttcggcggagaccaaatgctgatgtgcgtgcctgattctgacaaatcgaaaattgggtctaattctaagcaaagctttaagaaatacaccaagagaaaggaaaagaaaaacactgaccacacttcaacgatgaagttgcagaacttcataaaacccttagaaggataa

SEQ ID NO: 18762 - DNA, 441 bp, Zea mays
  Peptide Sequence Number=SeqID_60541
atggcccggggtccattttccttacaagccggaggcccggacggctggactgccaaagccatcgtcaccacagtgaagggctggtatgccgctcgacccttctacaggtgttcatgtggtaaatggaatttaggaattggtagcaccatggatgtaaatcacatcactgagatggaggatggtttaaatgatgatggaatggaatatccatttaagggtgatgctaatgccagtaacaatgatcagatagtagaggaccatgctgatgatgcccctattgctagtggtgcgaatgccatcgtccaacagcaagttggtctgagaaagaagcaatacatgtatgtgaatgaccaacgtgttgtgaaacaatggaaactagtaccaacaatgacagttcccgctatgaacaaggataaaggtccaatgccaatgagtatctaa

SEQ ID NO: 18763 - DNA, 516 bp, Zea mays
  Peptide Sequence Number=SeqID_60542
atggcttcttcttcctccatctcacgtgaacagcaggaggaggaacgagacgaaggggaggctgggtgtccattgatgctttgggaggcacccatgggagaggtgcctgctgttgtgccgtgctccatacgagagcagtggagctttggtggccggctggagttggagctcgagcgccgagaggagcagggaggaagacgacggtcatggatccggaggtcagttggagagctcgacgtccatggagaggaggagtaccaggagaaggcgctggtgctggcgtgcgtgaggaggagcaccgaggtggagctgctgtttttaaaggcagtgcttgctgcagccattggtggcgtgggcggtggccagcagagctctgcacatgtcagcttgctggcaggtgatggcagagggactttggacgaatgtttttggcatttttcatttggaatcggacccggatcactgcagaagatttgttccttgatgtatactctacaaattgtgtacatgacttga

SEQ ID NO: 18764 - DNA, 617 bp, Zea mays
  Peptide Sequence Number=SeqID_60543
acggctgggcaagcagacgagctacggacagtcccagtgcagagcacgacgtcgagggtctggtgacacagctgatgttggaggaagcgcggatgcagagctcagtacaggacatggcgcagttctgtacggatgcgagtagggagcatcgcgtgcagacgggtcgcgcgacatggacgagcagagacgacgaacggtgcgcgacgccgcagacagtagctgggcaaaggcaagcagtttggcgtgatggggagggcacgaacagggaggtcgacggcgaggttcgagcaccggcgaaccagctgcagcagggacctcggcaagacgtggccatggaggagagagagaaaagcaggggcgccatgagctgggaagcagggaggaagctggagccagggcacgactttggaagatggagcttggccagcgaactgtggacgacgcaggatgagagtcccgacgagcttggggagatgggcgcgttggagccgggcgccgggaagaagaaatccgagctgggcgcgatgagctggggaaggactccaggagagggagggctcggcagggaggagtgggaggctgcggcgaccatgggaaggggctgcaggaacgcgtag

SEQ ID NO: 18765 - DNA, 207 bp, Zea mays
  Peptide Sequence Number=SeqID_60544
atggcgtccgccacgtctaggtttgcgcggaggcgccgccggtcaggatggctgagtgttagaatcagagaaaatgcaattgaaaaagagtggctcgaagcagccaagagtctgctcagtctgggtgcaccggacagtgtccggtgcgccaggctgggcatctgcgaaattgctgctctcgggacttcgtcggcggcgtacggctaa

SEQ ID NO: 18766 - DNA, 231 bp, Zea mays
  Peptide Sequence Number=SeqID_60545
atggcgcaaggagtactcaccggagatggcgcgcacaggacaccggtctgcggtgaagtgcggattggcgcggtcgcggagctccgacgagaaactaccgtcgaggcaaaacactcctattatatgatgtacaaatttgggtattacaagaagttagaacaactcgaacaaagtgaattcaagacattcaagaagattcaaaagaagagtctcgtctgcctaaatcaatga

SEQ ID NO: 18767 - DNA, 366 bp, Zea mays
  Peptide Sequence Number=SeqID_60546
atgctggcgacaagtagaagcacgatccaagtcctccctcggaggacttcggcgattcggaaggtctggatgtacatccgttccgtcgagcgcgccaggctcgaggggtcggatgagtcgaaggtctgctcggatgagaactccttcggctcgtccaaggagcggagcggcgatgacaacgataatgagggcggtgacagcggtgacggtgacggcgacgacggtgaaggtgacggcgacgacggcaagggtggtgaaggcaacgatggtggcgatggcgacggtggcgacggtggcggcaaaggtggcagtggcggcgtcggcagtggcaacgacaaggccagtggcaaagcgccactggtctga

SEQ ID NO: 18768 - DNA, 471 bp, Zea mays
  Peptide Sequence Number=SeqID_60547
atgactctgggcttcctactgctctcctcgaggtatagaaagtcttcgatgaagtgcaggttgcggctctcgcgcctggccagtgtgctcctaacaacgagcttggtgcagcagaagaggttgcacatctcgcaggcctcgacgcccaccatggtcggcttccacccacgccgaaataggaactcctcccactccgactctaggtccccaagcctccactctgcctacttcagccgccccatcgagcacacgatgctgacgtactcctacatcactgactgcatctccaccctggcctacctcgtccgctccacgacgtctgacagcgcgctgtcgcccaacgccagtccgacatcgttggccgcacccaccgcgccaccaacctcaaaaccccctttgctgagaggagagaaagagaacggtgcttgccgtcgtggtagaatcatagtggcagagcgtattggggcttag

SEQ ID NO: 18769 - DNA, 1527 bp, Zea mays
  Peptide Sequence Number=SeqID_60548
atggcgtgctccgcaccagcgtctgccggagcctccttggaaactggctgccacaccaacttgtgccaaggagcggccagggttgtctgcctgcgcggggcactcgttcacacggtgccccgacagccgcctggccagaattcagaggagcatagacagatgatgatgccagagtttcagttacaagtctcgcaaggaaataatcatgctgtgcatttcagcggtccaccatattccaacactggggcatcttcacctgttcaatctttacctgcccagcagtcccaaccacatcagatgccacaacaatcacacatgtatggaaacacacaccttcttcatacccaaggaacaaaccagtcaaatccacagcaacagcaggcttatgctatgcgcttggccaaagagaggcatatgcaacagatgatgccccaacaacagcgtccattatctgttgccagtgcagtgtcagctgtacagaatggctcaccgatgcaacagcagagccaaggatctgcaacttgcgtaatcccagctacacagacacaacataagcagcaatatcctgcacaaaatgcacaaggtagctcaatgcttccccatcagccttcagccaccactacacataaacagaagaagcaacagggccagcagcagcctagacaaaatcaacagcaacgaaatcaaggcagtcaacaagctaagcttatgaagagtttaggccgagggaacatgatgcagcagagtcctgtggatgttattcaagcaagtggcatatcaacaagctgtaaagatcaagttcctgataagaatatgatgcaacagggtccagggcattttgttgtaagtaaaggatcaatcccattgatacctcaacctgggaatcaaccaaatgtatacacttctcagatgcctccgtctccaatgcagacaccggatattagtaatcagggtgcagtcaagggttcttccaaccatgccttgttaacttcccagcaaggttcactccatacgccttcacagttggcacagcagcagcagcagcaactacggttcatgaatccgtcacagaataatatgcaaaggttgataatgcaacagaatcggcatgtgaacacagatggcaggattgagttacctgctgaccaagtacagcataaccaggtaatgtcatctgcctcacttgcaagaagtacagattcaggcagcccaggaatctcatctataagccagcggaaacaagagtcatctcatgacccaagtgcaattacctcaacctcgcagctagctagctcacctcaagacacctttgttggaagtgatagggtgttgccatcatccagccaaagcatgccgcaaaggcaaatgtccggtggtgtgcctgtacatggatatggcattggtggccaggtgcagctacaacagtctcggcagcaactccagtctcagcagcagcagcagcagcagcagaggcctgttgtccaaggtggtgtatatgctcacccctcaaattcaggacaaggatga

SEQ ID NO: 18770 - DNA, 321 bp, Zea mays
  Peptide Sequence Number=SeqID_60549
atgcaggcggcatgcaaccacaccaagggggcacaccctttcgactccgacgcatccaacgtggaggcccaggcccacacatcatgtaaccggcgcgccggttactacgtgcgggaaaccgcaccgccacctgcgccagtaccgcgccttcttgactacggaaccggtgccgcgactcgaggcaaccccgcgcatggcccaacagtgccaaccgagcacatcggtcacgggtcagttagccgcggagaagggaccgggaaaggggatactccaaaagggatccttctccgcgaaggaagcgggccccgagccccctactga

SEQ ID NO: 18771 - DNA, 1590 bp, Zea mays
  Peptide Sequence Number=SeqID_60550
atgggatcccagccgccggcctcccgcgcggccctggagcacctcgctacgcttgaccccgccgcactcgccggcctccctgtctcctccccgctcaccgtccgctccgccgccgtctccgcccacctgctctatctcggcaccggcggcggcaagctgctcctcttctccctgcaggatccctccactcctgagttcctccgcctcctccccatcggcgccaccctacccgtctctgctatcgtcccgctcccctccgtcgcccgcctcctcgtcctcgctgacggcctcctcctcctcgccgacccgctcctctcgcgccccgtccgccgcctcggctccctgcgcagcgtcaccgccgtcgccgcccgccgcgtcgtcctcgcggacccatcatcatgctccgtcgccatctccgtcgggaagaagctgctccgtgtcgacttcacgctgcacgacgccgacgagctggatgtacagacgcgcgagatcgcctcagtcgagggggtcaaggcgctcgcttgggtcgacgattctgtcttcgttgccactgccactgggtactccctctactcgagcaccaatggtcagggtgtggatatattctcgctcccagaatccgccggtcacccaagggtgaagccgctctctggaggtgacgaggtgatgctcctggtcgacaatgtcggtgttgtggtcgatagatttggccagcccgttggaagcagcttggtgttcagcaccacgcccgactacatagctgaggtattcccctatgtgattgttgctggggactccaaggtcgatgtgtacaggaggaggaacgctgcacacctacagaccattccggttgccaggactggtcaaggcgttctgattgtggctggggatgatgatgggatagacacggagctagttgtgatcgctacaacttataaggtcttttgctaccgtaaagtatctgcattggagcagattaaggcatctttacgaagaaagaactacaaggaagctatttctttgctagaagagtttgagtcggacggtgaaatctcaaaggatatgatctcctttgtccatgctcaacttggttttttattgtttttcgacttgcgtttcgaggatgctgtgaatcatttcttgctatcggagactatgcagccatcagaagtatttccattcattatgcgggatcctaaccgttggtcagatctgctacatgtttcgaatgtagcatcacatgatatcatagtgccaagaaagcggtattggggtttgcaccctccccctaagccccttgaagaatttattgatgatggactggtaacagttcaacaggcattgtttctgaaaaaggcaggtgtggatacagttgtggatgaagatttcctttcaaacccaccaagtagagctgatcttttggaactagcgatcagaaatattatcaggtacctttgtgcatcgcggatgaagaatctaccttctccagagatggaaggagttgatactcttctgatgtatctttatagagcacttcatcttgttgatgacatgtataatctcgcatcttctcagaatagctgtattgtg

SEQ ID NO: 18772 - DNA, 1356 bp, Zea mays
  Peptide Sequence Number=SeqID_60551
gatgaactggaatcccttttggatgactctggacatttgcggacacttgctttcttgtatggcagcaaaggaatgtgctccaaagccctttctatatggcgtgtactggcaaggaattatagtgcaggtttgtggaaggatctgtctgagaatgattcttgtggaactttggttactaaaaggtctggcgaggaaattgccgctgtagaagcagccaagatcctcaaagcattatctgatgaggaccttgttctggaacatcttggatgggtggcagacattgatcaagatctagcgattgcagttttaacatctgagacgagggaaaatcaactctcaccagaaaaggttgttgcttctgttgatgcagaaaaggttgtgattcatcaaagatatttgcagtggttgattgagggtcagggctgcgatgatcctcactatcacacatcatatgctctttcactggccaaatctgcaattgaagcagttgatatggagtctaaatatagagggaaagatgatagtgaaattgattctgatgcacagtttgtttattcagtaagagaaagcttgcaattgtttctgcaagcttcagacctgtatgacccagaagatgtgctcgatgtgatagcagaatcagagctatggctggaaaaggcaatattgtataggaagatgggccaagagaatattgtacttcagatactagcattgaagctggaggatagtgaagctgctgagcagtattgcgcagagattggtcgagatgatgcttatattcagcttttgggcttgtatttggaccctcaaaacgggaaggagcctatgtttacagcagctgtacgacttcttcataatcatggtgaatcgttggaccccatacaagtattggagctggcatcagacacaattttacggacactgagggcccgagtgcaccatcatcgtcaaggacagatagtccataatctatcacgtgcgacaaacctggacgtgcggttgacaagactggaggagagatcgaggcatgtgcagctaaccgatgagagtatctgcgactcctgtcgagctcgcctcggcaccaagctatttgctatgtacccaaatgactcggttgtttgctacaggtgctatcgatcccagcaaggtgaatcttcatcagggcatggtcgtagcatgaggaaagatgttatattcaaacagagctggctttgggactattaccgtatgcgtcaaggttatacggctcggtgcttcatggcaccgaagtattatgtcataaatggtgtggaggctactatctacgacgccaacctcgacactgacactggtttgtggtgtgcagctcaaatttaa

SEQ ID NO: 18773 - DNA, 297 bp, Zea mays
  Peptide Sequence Number=SeqID_60552
atgcaaggtggaacgggtgaccaagaccccgccgagcaaccttgcgaggcggagtgggcgaccaagaccctcggagcaaccgtacgaggcggagcgggtgaccaagtccccgccgagaaaccttgtgaggtgaagcggacgactaagtctctgccgagcaacctcgcgaggtggagcgaacgaccaagtcccgaccgagcaaccttgcgaggcggagtgggcgaccaaaaccctgtcgtgcaacctcgcgagacggagcgaacgaccacgtccctgtcgagcaaccttgtgaggtga

SEQ ID NO: 18774 - DNA, 783 bp, Zea mays
  Peptide Sequence Number=SeqID_60553
atgtatggccgtttagaaataggggcagtctcaggttccctatctcttaagaaggtcataaatgtaggattccaaggtgtgaaatccatcttgtatcagagtagaaaagataagaatgatcagagtggaacagtagaagaacccaacatcaacagcaactacacgttttatggacgaattcgaaaggggaaaggtttcttaccggtgcataaggagagggtcgaccgatccagtgaaaagcatgagacgaacggcggtgaccccaggattcagcgacaatcattctccccccgcctgcgatctgatggacggatcacttgttcccaccggcaccgcctgagctgcagggatcggcggagccctcgatcccgccacgacaaactacaagctccggcacgaagccggccacacctcggccacccgcgccgagaactctgcgtgtcctggggactctacgagccgatatccaagttagccagcagcggctccacccttctctcccttccctgtctctctctctctatttccaacgccaaggctatagtctccctgtctgtggctcgacgtgcggctatggagatagaggctgtgagtctgcggagaaaaggtctagctgagatccggtgcatgcgggtggttgcaacagcttcaggaagaacgaagaagccgactgcctgcatggccctagcccccatgcgcgagcgtcacttgtgcggcgtgagggatttgcatgatgatgtaatgcatgatgccatgctaatgtcacattcggctagagaataa

SEQ ID NO: 18775 - DNA, 882 bp, Zea mays
  Peptide Sequence Number=SeqID_60554
atggcaaaattccaaatttctcaggagaagacgatgtcgcaagatcaagagcgttgtcgcaagacaagtctgagctgtttcgccacttcgagcgactggttcagatccatcatgagctactatcagactgacactgtgagccgtgatacagaggattttgatggagctaagccatcaggtgcagttaccgtcgacgctacgcatgatactgaaagcgctaaacaagcagcgactttagcttttcagacatatgcagatgaagaaccagttcagtcaattgaaagccagactacaacggctaatcatttgcagaagcctgatatagaactcatacatgccctacaacaccaggatggtagtagtatcctttcaaggagaaaatcgggggcatactttgagatgcaaagtgtggaacgtcaggcagtgcaagaggaaagtcatttagcaacaagctcagagatcctcgcatcgactgacaagctcgccgagtgccaggagacgatcacgatcctgagcaagcagctacaggctctaaagatgccaacagcttcaggtcctccagacacccctccatttgcattcccaggacgagctcggcgaagtccgactacaagccacagtcgctcacgagcatcctcgccgaggcctccacgtctcccagtcccactcccaccacgcccacgtacgccacaggtgctgtccaagaaagatgaaggcgaggaggagaacgacgccgacgtcggcggcaaggactcgatgcagattgtcgtcgtccatcctgtgttcgtcgctgagccgcggccgaacgacggtggttccgctgacccgacggagagggaggaagaggcacgtcatgagcctactgggcaggatcgtgtttag

SEQ ID NO: 18776 - DNA, 261 bp, Zea mays
  Peptide Sequence Number=SeqID_60555
atggcgactggttctgtcgcatggtatatagtcaagaaattagactatttcaagttcagcgagagggactatatggcactggaggtgtctttcttagaggttgcaatctcaacattcgaaacaacgcccagaacggcatggttggaacatgctcaggctgacacgaacctggcagatcgtcgtgtccatcggcatgactatatccatcttagggctatgcctatgccatcatgtgacagtggcacaatacggtatggctaa

SEQ ID NO: 18777 - DNA, 429 bp, Zea mays
  Peptide Sequence Number=SeqID_60556
atggaggatgtgcggcgcgacgtggaggtcccacagcgggccgacgttgtcatgcgcggggacgaggtgacgaccgtgttctacgcgcatcagtcacagcttcttcgccgtgttccgcgcgctgatggaggagatggcgagagctggcacgtctaccatgtcgtcggtgaggagatccccaccgacgtcgaggcggccagcttcgacgggtttgtcatcttcgggagctgcgttgacacgcacgacgacgagccttggatcctcgacctcgtcgacctcatccacctcctccacgccaccggcaagcgcatcctcgacgtctgcttcggtcatcaggtgccaatcccatacccgtccatgcgcgcatctcctgttcctgcatactcgttgttcggttcagttgcggttggttctcttgttttgccttga

SEQ ID NO: 18778 - DNA, 1647 bp, Zea mays
  Peptide Sequence Number=SeqID_60557
atggccgccgccaccgccgccgccgccacggcgtcggcttcgtgtcttctccggaggtctatatcctctgcattcctcgcgaagcgcgcggtccctagcattccgcgtacaactctctgctattcctcctccgcatccgccagactcaaaccaacgccgtccctgtctccgcctgtcacgtccgccaacgatggaggcggcgggatgaggtgggagtcagcgcgcaagaagagggtggtgctccgcatcggctacgtcggcactgattaccgagggcttcaaaagcagcaagagcttggcgtggattcgaccattgagtcagtcctggaatctgccatcttcaagtccgggggtattctcgagagtaattatggaaaactgcaaaagattgggtgggagaggagtagccgaactgataaaggggtacactcattggctacaatgatttcccttaagatggaaatccctgatagagcatgggaggatgatcctgatggtattgctcttgccagcttcattaactcaaatttgccggacaatgtgagggtttttagtatattgcctgcacaaaggagttttgatgtaaggagggagtgcttatatcgtgagtacttctatcttcttcctgctgaaattattggaattaaagatgactatagctctgaagaaatgcaagagcacttgtcagaattcaacaaaatactgaaaggttttgagtatttggaaaacaataggatcttccatgaattgaatcataacatgcaagtgattgggggacgcacttatatgttgaaatcagaaagagacatggcaggaaaccatccattccataattacactgcacgtgccaagtataggaaggttctcgcgggaagacacagaagggccaaaggagcaagctcggcgttgaagtccatgtcctctgacactggcatggcagaaagctcttctgaagaaagcacttctccagatcacgatgaggacttgaatatttcatcaatctttgactctggtataccagaagacactcgtgtgaatggtattctgaagctttctgaggatcggctgcagattcaagctaggtggctgcatgagcctgacgaaagcgatagattaaacgcttcacatttcagagatatcattacctgttcctgtggagacttgcaaacttcatcagggattcagttcgttgagttgaccatatgcggggtatctttcatgctacatcagatccggaaaatggttggaaccgccgtgacggtgaagcgtggactactaccaagagacatcatagagctgtccctcgcgaagttctccagaatcgttctaccaatagccccttcagaggtcctggtcctcaaggacaacagtttctgcacgaagagcaagggagggaggatcgttcgccccgggatccagtccatgaacaagtcggaagcaaccaggaagggggtcgaggagttctacagggcagcgctcctgccagaagtagcgaagttcctggacccctctctgccgccgtggaaggagtggctggagaacctggacaggttctcgggcataccgggttcgcagctggacgaagtcagggaggcgtatcgagcgtggagggatgattacgaccgagcgaagatggctagaaactag

SEQ ID NO: 18779 - DNA, 1113 bp, Zea mays
  Peptide Sequence Number=SeqID_60558
atggcaacagcgtgtccgccgctctcgctgccgtccacctccctcttccgcggcagaggcggtagtggaggaggcctcgcccaggacggcggaagagccgctgctggtgagcgcaatcagagggaggaaggtcgagaggccacccgtctggctcatgaggcaggccgggagagctaccaattgctctgcgagcggtatccttcgttccgtgaaagatcagaaaatgtcgacctagttgttgagatctctttgcaaccatggaaggttttcaagcctgatggagtcatcttgttctcggacatccttactccacttcctgggatgaacataccttttgacattgtgaagggaaaaggtccagtgatctatgatccattgagaacggcagcagctgtgaatgaagtcagagaatttgttcctgaggagtgggtcccttatgtggggcaggctctgaatattttgagacaagaggttaagaatgaagctgctgtactaggttttgttggagctccgtttaccttggcatcttattgtgtggaaggaggttcatcaaagaactttacattgattaagaaaatggccttctcagaaccagcgattctacacaatttgctacagaagttcacaacatcaatggctaactatattaaataccaagcggacaatggggcgcaggctgtccaaattttcgattcatgggctactgaactcagcccggctgattttgaggagtttagcctgccttatctaaagcagatagtggatagtgttagggaaacacatcctaacttgcctctgatactctacgcaagtggatctgggggcttgctggagaggcttcctttgacaggtgttgatgttgtcagcttggactggacggtcgatatggcagagggcaggaaaagattgggatctaacacagcagtccaagggaacgtggaccctggtgttctttttggatccaaagagtttataagcaggcggatttacgacactgtgcagaaggctggcaatgttggacatgtattgaaccttggccatggcatcaaggttggaactccggaggaaaatgttgctcacttcttcgaggtcgcaaaagggatcagatactaa

SEQ ID NO: 18780 - DNA, 597 bp, Zea mays
  Peptide Sequence Number=SeqID_60559
atggatcaaacggtcaagacacattcttcccccaccagacgcacaggcgacggtgccgccccaacctacggcggagctctcgccgatgacccaagcaatcgggttctggtgccttacattcgtcaccgagaggtgctatccgatgctataatgcgtgtgaatacgtacagagacttacaagggaggggaattgtccgatggaggctgtgcacggcacaaggcggagccacggcaccgagtggtcgacatcgaggaatcccagtggagctggcggtcaatcccgagcagcacagccaccacagctttaccccgggtctggagaaggtcctgggcactaccatcgacgtagacgacggattaatcgaagattcccccgcggcggcgctctacccagttctgcttctgctggcagcgagaaaagtgcgcgcgacgactgggagtgggggtgtgctagggtttggtgcgtgttttatggctaccagggaggtcggtggggcacccgcgaggccacggatggcggaaagctcggcggagctgttacaggcgagtggcgatggagtctgcgcacgtggggaagatctacagggcatcgactga

SEQ ID NO: 18781 - DNA, 619 bp, Zea mays
  Peptide Sequence Number=SeqID_60560
atggcgcctcctgtcgacatggtcggtccgcgccctaggttgggcgatgtggaggctcctccgaggttgaggtcgagtctgtcttccgtggccgaggtcgagtccgagccccttggtcgggcgaggcggagaccgtcggctgaggtcagggtggagtccgagccctggggtcgggcgaagcggagttcgtcgtcttccagggctgagcccaagtccgagccctgggtcgggcggagcggagttcgtcgtcttccggggctgagcccaagtccgagccctgggtcgggcggagcggacccgagtccgagccctaggtcgggcggagcggagttcgccgtcttccggggcttagcccgagtccgagccctgggtcgggcggagcggatcggagcgacgcaggcggcgctgtctttctgtcaggctggtcagaggagcggcaaagtgacggcgcgatttggtcaaggttgcttcttggcgaagacagggcctcgggcgagccgggaatatgttcgtcgctggaggagggcctcgggcgagacggagatcctccggggtcggctgcccttgtccgagctttatgctgatgggggttaccagctgagaattaggggtcttgagg

SEQ ID NO: 18782 - DNA, 309 bp, Zea mays
  Peptide Sequence Number=SeqID_60561
atgggtcgagttgaggattttatgttagagatggttgaagaattgcagcatatcattggtgccaatgttgctcctgtttgtttggaagtaccattagagcgtttgcgagctctaggtgatgaggcttatcgttggtggatgactgtcgggcatggtactgcactcgagaaagtgacttgggactttttcttggagtctttccggagtaagtttatgggagagcaatatctagaggcaaggagatgcgagttcatggatttagtccatggtactttgtcagtggatgagtacgaagctaagtttgtgtaa

SEQ ID NO: 18783 - DNA, 1077 bp, Zea mays
  Peptide Sequence Number=SeqID_60562
atggccatggtgacgttattcccaaatttcaccatgtctttacaagatcccaatctccttgatgctctaaaattccagatccagattattggagcagagatggtggaatcagcaatccaccaacttgaccagccaatccgctccacaaaaagtcagatcatcaccagatctgatgggatgagtgagataaaatttgatcacagccatctgaagcagcttcctactccgccagtattttccacacagatgatgttacaacccctggagcctgacaacatagttccagggctagaagcacctcttatacagagctttaagtctgatggaaagcctgtatattttttcaaagatcccaatataggacattgtccttgggacattaattattcttgtgaaggatgtcaagattctatttttgaagatcttgatgaagagatcagacgatcccacaggaacaaaagccgcaagaaatcaagccaatcagaattttacaaaagatggatggatggagatccaaatattggcccgttaggagaagataatggcaaatttgtccatcttgtagactattctgcccaaagaccaaagccacaatcttcaaaaatccaggatcaatctcctccagacctacctcagccacccaaggaagatccaaaaaaccagcaatggttgctaaagccattaaagcagccatgttacaaaaggattaacaaatgggtgaaaaagcacaatcaactccagaagtgtgcccaagaagagaagattgttatccctccagaaccaaagattctggaggtacagatgtatgaaagaacctcttcttatgaacaggattttcccccattagaagaattctcaaaaagggagtatattcatgctccaaaaattccttctaagctacaagcagatgcagaaggtcggcaagtaaaaatagcagcagtagaagccatacaaaactggcaaacagaaaacgccctggcccaaaatactacattaatgaagatagaccagaaggttaataaaattgactcggaggtatcagaaattgggaaaaaactaacaaaagtacagagatga

SEQ ID NO: 18784 - DNA, 198 bp, Zea mays
  Peptide Sequence Number=SeqID_60563
atggtggtacggaccgacggtgaaattgagttcgaggaagagaacaaaaatgagccaaaaatgccatccgatgaagaagaagatttagagttaccgattgaagctttcttgaatggggagcttgaagaagatatctatgtttgtcaaccaaaaggttttgtggttgttggaaaggaatatcaagtgtacaagctttag

SEQ ID NO: 18785 - DNA, 720 bp, Zea mays
  Peptide Sequence Number=SeqID_60564
atggggcgcggcaagatcgagatcaagcggatcgagaacgccaccaaccgccaggtgacctactccaagcgccggacggggatcatgaagaaggcgcgcgagctcaccgtgctctgcgacgcccaggtcgccatcatcatgttctcctccaccggcaagtaccacgagttctgcagccccggaaccgacatcaagaccatctttgaccggtaccagcaggccatcgggaccagcctatggatcgagcagtatgagaatatgcagcgcacgctgagccatctcaaggacatcaatcgtggtctgcgcacagagattaggcaaaggatgggcgaggatctggacagtctggacttcgacgagctgcgcggcctcgagcaaaacgtcgacgcggctctcaaggagtcttacttacctacctcttttgctgatcccttctctcgtttgatttttcagtaccatgtgatcagcacgcagactgatacctacaagaaaaaggtgaagcactcgcacgaggcgtacaagaacctgcagcaggagctaggcatgcgggaggacccggcgttcgggtacgtggacaacacgggcgccggcgtcgcctgggacggcgcggcggcggcgctgggcggcgccccgccggacatgtacgccttccgcgtggtgcccagccagcccaacctgcacggcatggcctacggcttccacgacctccgcctgggctag

SEQ ID NO: 18786 - DNA, 192 bp, Zea mays
  Peptide Sequence Number=SeqID_60565
atggccggcgcgcgtcctcggtcttctctgtcccttctcttctcgggtcgagctcgcccctgcctcagcttggactgcgccgctcggctctggacgataaataatcgcgtgatgcggaagaaaaaccaagtcgaccccaagcgtgggctaatctgcaagctgaatttgatgaatcaacctgaagatggttaa

SEQ ID NO: 18787 - DNA, 1089 bp, Zea mays
  Peptide Sequence Number=SeqID_60566
atggacataacaattgccaaggacattatttttgtccacaggcttgatagggattgcagtggcgtccttgttctgggaagaactcaatttagcgcttcccttatgcatgctatatttcgtgagaaaactgctgatgctttaggtgatggtactcaacaagtactgcaaagaaaatatgttgcacttgttattggaagacctaggcatcccaagggtttattgtcagcaccacttgcgaagaatcaaggaaacatgtttgacttgccattgggatatggtctgcacactaacctctataaaagctctgtcgcccccatccattgctctgatgaagaaaggcaccaaatagacgaagtcttggcctgccacatcaaagagaggtggcaccgacggccaaggcaaaggcagacctctcggtgctgggaggaggttgtattacaagatggcaggtcagagcgtctgactgtttgcgctggttcaaatactgcttctgttcaagatgctttgacagagtaccgtgtgattgagtcttttcctcaagatatcaaatcagatgtggatagaaacaaattcgttcaagtgatgggtgtgggaattgggtcagtaagcagcaaaatatgtggtgcagtgaaattgcttttagttaagtccaccacaatatgtttgctaatgattttagggtacacttggttagaactattccctcgaactggaaggaagcatcagctccgagtccattgtgcggaggttctgggaacacccatcgttggggattacaagtatggacgccaagcacaccagaactggatgcctctccccatgccacaaacaatcgacaaggaaatgctgaagaagaggaagcttccctttggtcttactttgggcggtggaagcgtagctgagcagcagcctcagctgcatctacactgcaagcagatgatccttcctgacatctcagcagctatgcaacagctgcggtcttcagatgctgaccacgatttctctgatctggagaagctgagctttgtcgcgccattgccattgcacatgcagttaagctggaagattttgttgtccgtaggcaagtag

SEQ ID NO: 18788 - DNA, 225 bp, Zea mays
  Peptide Sequence Number=SeqID_60567
atgggagaagacgtagagctccgtcaccctacccagagagaaaagaaggagggtccgccgcaggggaggatggtggtggacctggagatgtgcggcgtcacgggcacgcactgcctctcaagggcactgtacgggggtatttataagtgcctgagtgcccaacgtctcaatgtaaggacgcatgtaccctcgggcaccgggtttatccccgaaatattcttataa

SEQ ID NO: 18789 - DNA, 402 bp, Zea mays
  Peptide Sequence Number=SeqID_60568
atgacactgcagcacacacggcatggtgtgctgcagcgatttagtgtcaaggcaaggtcagagaagcggcgtcggcaaggcctgagctggaaatcgggcgagggagaaggagctcgcagggacgccaaggtgagggagcagcacgccagggaggccgagcagggagcatgtgctacagcgtccggcgagcagaggccctgggcacgagctgaagctgacaaggggcgagctcaagcatggagagcatgtggggaagaagaggccgatggccacgggctgggcgcagcttgctgtggacagaaagcgagagataaggctgacagggagatgtgcataccacttgagaagataaggctgggatttaggagctcgatgagaataggtacgcccaccacggtctaa

SEQ ID NO: 18790 - DNA, 642 bp, Zea mays
  Peptide Sequence Number=SeqID_60569
atggcgatcaggatgccggcgctcatcttccgccgccgggcggccgccgcagctccaaagccgatacaacagtacctcgctggtctatccaccgcagtggagcacgttattccagaagataacggtcacattgccggtggggaggagaacaagaagcggtgggtggagcttcctcccttcgcaccactcgacgccaacgccaccgctcgagctatctctcggggagatggtggggaaggagcatgctccaatgccacggctatcaggtgggtccgacactgctgcccacacgtaccagcgtcgctggtccagaagctgttccgcctccgcaaggtgaagaagaatctggtgactgctgatacctcttcaacagacagtattactctgcaactccggttgagaagggtttcagcaaaagatgaacttgtgcctggtgatattctctttctacctgttaacattcaagaatcttctgttaccgagaagaccaagaaatttggtaacaagaatgagattgattttctacgtgaccttgaaatctacaaggatagagccatcattgtgctcaacaaaccacctggaatgccagtacaagtagataactttatatccttaataatctgcagttcacaaaaattttag

SEQ ID NO: 18791 - DNA, 534 bp, Zea mays
  Peptide Sequence Number=SeqID_60570
atgagcgaatatggaatgagattgagagacgaaaaaaagaaacaaaagaaaaaagacgaggaaagggtagtgaggaatgtttccactaaccaagatttgaatttttcttgtgttgctacttttcaggttcccgaaaaggttcctgaaagaccgaaagataactttcaacttcaatacctcccaaatgaaagattctttcatacgatcaacataggcaaagatgaaatcacactacatgagcccgcagttcttaaaagatcccctcattttgatccgattacttgttattctttgattgtggttgataaagtcattacgaaaggaagctttctgtggttgtacatgaagtttgagttctatttgacaaaggttaactcaataatggagcttcgactacactatgcccctgatgagcgaaggtttgtattaagtggaaaaggtaaaatcgacccttattcttctgcttataaagagggttgcacgcggaccaagatcgagttgtcaagtcacaagaaactcctacgaaaactctaa

SEQ ID NO: 18792 - DNA, 1005 bp, Zea mays
  Peptide Sequence Number=SeqID_60571
atgggagctgcacaacccgcgtggcgtcaacttgacctcgacctggcgagtagacgattgaaattggtttattctagcaatggcggcaccactgaaaaaatcccatccccagaagaacagcgagaaaaaataaatgaattacgcaaggagcttggtgaacactcatcagcagccattaaagacttcctttcagatgcctcgttagcgagatttcttcgagcaaggaactggaatgtgcagaaagctagtaaaatgatgaaagcagctgtgaagtggcggcttgcattcaaacctgaaaacatctgttgggatgatattgcagaggaagcagagactggaaagatatatagagcggattataaggacaaacatggcagaactgttcttgtattgaggcctggcttagagaacactacctcagcaataggacagatcaaatatctagtctactctctggagaaagcaattatgaacctgacggaagatcaagagaagatggtatggctgacagatttccagtgctggacattgggaagcacaccactgaaggtgacccgtgagactgtcaatgtcttgcaagactgctatcctgagaggttggggcttgcaatcctttacaaccctcctaggatatttgaatcattctggaagatagtgaagccgttcctagaccatgagacccgcaagaaggtgaagtttgtgtactccaacgacaaggagagccagaagataatggcagaagtctttgacatggaggagctcgactcggcattcgggggaaagaacccagcgacatttgagtacaacagctacgcagagcagatgcaggacgacgacaagaagatgggatcttcgcacggctcagccaatagcttgcttggatcagctgggaaggaggctaatggcgcagactcggacgcctcaagcgaggcctccttctacagtggaactgactctccgacacatgagaacggtgaacacagcatcgcgaagaagaatggttga

SEQ ID NO: 18793 - DNA, 2031 bp, Zea mays
  Peptide Sequence Number=SeqID_60572
atggattcaggcatgcagtgcgatactcaccggcgaatgggggacggtagaacagaggcaaaagccagggaggggatctttcgggtaaaaaaggccatcggcgtgcaccccaccaggtctccatctgagcaacccccactattcgaaccagacattaacagacggaccctagtctgccaggagccggttgtcattgtcgatcggggccgggcctccaatctggggtccggagagccagcgactaacgaaacatttttcagtgtcattgtggaagctctcaagatggacagtttgcagaaactctgttcatcgcttgagcctattctccgaagagttgtaagtgaagaagtagagcgtgctttagccaaactgggtcctgctagaatccaaggaagatcctcccctaaaagaattgaaggccctgatggaagaaatcttcagctccagttcagaagtcagttggctcttccaatcttcactggtggaaaagttgaaggacccgagtcatttgcaaaattggatatccttgtgcttgagggtgactttagtaaagaggaagatgaggattggacagaagaagagtttgaaagtaatattgtcaaggagcgtgaagggaagaggcctcttttgacaggcgacctgcaagtgactcttaaagaaggtgttggaaccataggggagcttacattcactgacaactccagctggataagaagcaggaaattcagacttgggctgaggattgctcctggcttttgtgaaggtatccgtgtccgagaagccaagacagaagctttccccgttaaggatcacagaggagaattgtacaagaagcactacccacctgcgctgaaggatgatgtttggagattagaaaagattggcaaggatggcgcattccacaagaagttaaatgccagtgggatctatacagttgaagatttcctccggcttcttgttagggatcagcagagattacgtagcattctgggcagtggaatgtcaaataagatgtgggacagccttgttgagcatgcaaagacatgtgtcttaagtggaaagcattatgtatactatgctagagactcaagaaacgtgggtgcaatattcaataacatctacgagttcactggtttgattgccgatgatcagttcatttcagctgaaaatctcacagacaaccagaaggtctatgctgatgcattggtaaagaaagcatatgaggactggatgcaagttgtagaatatgatggcaaggcactcttgagcttcaagcagaaaaagaaaactgtcacgacaagaagtgacgttgcatctgcctcaacaagcaatcctgcttcatatggttcggccaattcacagaaacagttgtctcttccagcaaaagctggacaaacttcctcagcgggtactatgaatgaagatggaactagaaatgcatacaacgcaaatggaaaccagtcagcaagatatgcagccaacactcagagcattcctgcaaacgtcggcatgcaatacgacgggagtgcagtgtcgcctgaaatccagtttagtggttcatcccttcagagtcagtcttcaagagggtccaacatgctagcattgggccctccgcagcaacatcaaagtttcgaattcccagcgctcggccagcccgttcagccaacaggcctgaaccctttcgaagagtggccgcagcagcaggagaaccgtggcggcggtgtcgacgactacctgatggaggagatccggatgaggagccacgagatcctggaaaacgaagagatgcagcagatgttgcggctcctgagcatgggcggtgccggaaccagcctagccgaagacggcttcaatttccctccgtacatgcctgcgccttcgccgaacgtgagctacgaggacgaccgcacccgcgcgcccgggaaagccgtcgtcgggtggctcaagatcaaggctgccatgcggtggggcatctttgtgaggaagaaggcggctgagagaagagctcagcttgttgagctagacgactag

SEQ ID NO: 18794 - DNA, 1644 bp, Zea mays
  Peptide Sequence Number=SeqID_60573
atggggagggtggaggccgggccgtcgcatttccctaagagacccgcgcctcagaactccgccagtgataactttgtgtgccacctgcatgctatttgggttctgtcaaaagtccattcacttgttgtggctactcaaatgagctacgatgtttgtataattgtatcagtgatctgtgatcatgttgagctactggctaacagggtcaatctgtcaaggacacacacagtcaaacctacctctgctggcgaccgttcaggaatttctgttaaatgcaacttggggtggtcttctcaaccatcgcctgacttgaggcatcactttagaggatactcatcagcatcagaggcagttcttacttcccaatctgatgtgagaaaactgtttgttggcaatgaaaaaatcggtgttctcttgctgaatcttgggggcccagagactcttgacgatgtgcagcctttcttgtttaatctttttgcagatccggacattatccgtcttcctaggctctttcgctttctgcagaagccacttgcaaaattcatatcagaagtgagagcaccaaaaagtaaggaaggttatgcatccataggtggcggttctcctctacgacaaattactgatgcacaggctgaagcacttagggaggcattacatgggaaagatgttcctgccaacgtgtatgttggaatgcggtattggcatcccttcactgaagaagccatagaacaaataaaacgggatggaatcacgaaacttgttgtgttgcctctataccctcagttctccatatcaactagtggttcaagtctccgtttattggagagcatattcagagaggatgagtatctcgtgaatatgcaacatacagttataccttcctggtaccaacgtgaaggatatatcaaggctatggcaactttgattgaaaacgaattgacaaaatttcaagaaccccaaaaggttatgatatttttcagtgctcatggagttcctctggcatatgttgaagaagctggtgatccatataaagcagaaatggaagagtgtatcgatcttatcatggaagaactggaaaaaagaggaataacaaatccgtgcatacttgcttatcagagccgagttggaccagtggaatggctgaaaccgtacactgatgagacaattattgagcttgggcagaaaggggtaaagagcctgcttgctgttcccattagttttgttagcgaacacattgaaactttggaagaaatcgatgtggagtacaaagagttggctttagaatctggcatcaagcactggggacgggttccagcactaggttgcgaacccacattcatttcggatcttgctgatgctgttattgaaagcctaccttatgttggcgcaatggcagtttccaatcttgaggctcggcagtctctcgtacccctcgggagcgtggaggagctgctagcagcatacgactcgaagcgcgatgagctccctccaccggtaatcgtgtgggagtggggctggacaaagagcgcggagacctggaatggtcgtgcggcgatgctggccgtgctggctctcctggtgctggaagtgaccaccggcgaagggttcctgcatcaatggggaatcctgcctctgttccgctga

SEQ ID NO: 18795 - DNA, 486 bp, Zea mays
  Peptide Sequence Number=SeqID_60574
atggcggggtccttgctcggctcctgggctgctgcgtggtggcggagcaacagtcgcggaatcttcggtcgtcgggctgggtgcgcggctcggagtcgagtctgcggcgtcgcacggtcagttccttgcagcgcggtgtcggcttggcgtgcgcggggtcggcttcggtcggttcgggcgtcgcggcgagttgcgcggctggagcagggtcgggtcctggcggggcgcgtcgggcaggttcgtccctggcgcgtcgagcgtgacgcgcgggatgcggacggagcgtcgggggcgctgcgcagtcgagtcgggcgtcagggtgcggttgctgggctcggtgctgcaaggctgcggctcctgcgggctggcggggagagagaaacaaggggaggagagagagtgccgagtgggagagagaggtttggggagggagaagcagaggcggcggccaccaaggagcaggggcgtagaagctactctgcctga

SEQ ID NO: 18796 - DNA, 1737 bp, Zea mays
  Peptide Sequence Number=SeqID_60575
atgcccatggttatattcacaaaattacaaaaaactgtcattcacctttctcaaatcagaccctccaaggctccaagcgctcgccggagcgatcgcccgagcccgatcccgactggcgagtggcgactcaccggagtcgcggcctcccctgcggtcaccggagtcggagagcagccctgcgcgagctgcgaccggtcaggcggtcaccggagtcgcggcctccgctgcgggagcgcgagcgccgaagcgccgaccggagtcgcggcctctcctgcgccgctgcgcgagcgcgaacgccgaggcgccgaccggagccgcggctgcctgcctgcctctgcgccctgcccctgtgtccctgcctctgcagccgagcagcctgcctctgcagccgagcgcgaccgccgaccggacaccggagccgcggcccgcggctgcctctgcgccctgccgcgctgcgtccctgcagagccgcgaccgcctctgcggcctgcgccctgcccccacgagctccagcactccggcaaggcggcaaccgtggcgccacctccacggccacccggcccaccgaccgccgcggggacggctggagcagacccccctgctcctccccgacctccaggacagggagtttcccttcctccccgaccacctttgcgtccgtgtgtccctgctgggcctgctcctgctaccgacggccaacttgagtcgggcaccatttctatggatgggaactcgaatcgaatcgacaataacagcagccaatcatttgccgttgccgatcctctgactttgagttccactgatcgcgagattgctttggatgcagatacaggtacaggtacagctgcgacgccgtcgacagcgacagcgacagcgagtaccgcaagcacggatactatatgccacaagcgcggtcgcaagagcacttccgatgtatggaatgacttcgagcaattgttcaaggacgtaaatggtaagaaggttaggtatgccgccaaatgcctttactgcaagtctcaacttactgcttcttcaactgctggtactggtcatttgaaacgacatcgtagtacttgtgcatctaaagctcaacgtgctgctaagactcaatctttaattcagtttaatgccgatggttctgttcgttcatgggactataatcctgatattgctcgtactgagttgtgtcgattgatatgtactttagatcttcctctaggtattggttccactgctgcatttgaacgttacataaaacatgctcatagtcctaggtttactgctgtttgtagacaaacaaccactagagattttgtaaagttttataatcaaagtcgtacttcactaatagatgtattgaagtctagtgtttcatgtgttgctcttacttctgatatttggtctggaaatgctaaggaagattatattagtgtggttgctcattatgttaatgctgattgggttttggaaaagagggtaattggtatgagattgattgatgtttcacataatggggctaatattgcagatcgtgttaaaactgttattgctgattttggattgactgataaggcctcgaaagtttggtttggatatggacgtgagatggaattcgacttatctaatgttgaaacacctaatcccatacaagagcacgttctctgtttttatccaaacacactaccagcagcatatgacacaacctttgctcacagagacacattgggaagttggtga

SEQ ID NO: 18797 - DNA, 441 bp, Zea mays
  Peptide Sequence Number=SeqID_60576
atggggcgaggaggcgaggaggtaagggccacgacgtcggctatgggccccgaccgagctgtccgcgtggagcaggccgtgccgtgccagcccacgtgcctggccagcggcccaggcacggccctgctccactgggttgtgccagcccgggcccatcccatacgtgtcgggccgggcgcaaactgggccaaaaaaacgggcctcgggccggggatgtcggatcagatcgatccagtatggcaacacggggacaacatatatcccggtttcaagtacaagtactacaagaaacagtggaagggggtggtgctacacattgcaagaaacaccttgcatcgcgtgggggaaatgcgcaaggttgtcgcaatgttccacaggacactgccgattatttttagcgggagcttgacaaagtccatgataaaaggaaagcaagagtag

SEQ ID NO: 18798 - DNA, 420 bp, Zea mays
  Peptide Sequence Number=SeqID_60577
atgggcaagagcaaaaagggtggaagctcgtcgcaccattccggcgacaagcagaagcgtgagccgacccctccctcggaggacttcggcgattctgagtactcagaggaggagttttcctccaggtctgagggatcaccagtctacacctcgcccccgacatcgtccgaagactcggacgattcccaagggatcgccgtcgaggtgtggacatatatccgggtcgtcgagcgctccgagctcgagggctcggatgagtcggaggtctcctcggacgaggaggactcctctaactcgtccgaggaggggagcgacggtgacggcgacgatgagggcgacagcgacgacggaggcaacgacaagggcgacggcaagggcgacggcagcagcagggccagtggcaaagcgccactggcttaa

SEQ ID NO: 18799 - DNA, 399 bp, Zea mays
  Peptide Sequence Number=SeqID_60578
atggcgctcgtgccaggggacgaaggtgaatccagggaccgccgccgcgacaccactcgactccggcgcgtcggttacccgattggcggctgcagtaacccaagggggggggacctggggagcacgcgcgtggatctgccggcagcagggtcggctggcaactcaccgccgcgtccgcccagacgtttcatgttggaaatgcgcaccggaagctccgtggccggatcggatttctccggtgaggttgccgctgcgggtgctgggctctacctcgctgaacggtcagagatggaagaagcagtgaggtcacgagaatctgaggatcatcctggtacctggaatctcaagtcccaggcaagttgtgcccttgatcacttcttttacccagccatgttctga

SEQ ID NO: 18800 - DNA, 3144 bp, Zea mays
  Peptide Sequence Number=SeqID_60579
atgggagaccgccgcactgggagccggcactacgcctccgcccggactctctctgtcggtgctccttcatcctccccgtcccgtcaatgtggaggcaaggtgcgcgatgttgtcggggagccggccggagaaggcgttgtaggagaggtcgtggcagtgggcaggggcggtgttctgctgattggagaaactggtttggtgcggatgtttgatgccgtgttggttatagggaccgggaggattctattcagccagaagacagtgctcttctttatatcctgtccggagctcaatacagtgctccaaatccatatcagcctgctaggagtggataaggatctttgcctcaacgagtggagcaaaaccatggatgtgcctacgcctcccaaccgtgccggctgcaacagtaacatcagcaacatcggcagccccatgcaatcttttgatgatccctttggtggtgctgccatgacgagctttgatggatactcggagctcagcagcccatcagttgctgatcacatattctccctgctgaatgatccctcgtctgtgcaacatatgtttgccttgtggtcatcttcggggtcatctccgcgtgcttctgctgtgagagaagacatgtcgtttgacacctatcctggacctatggacgtgacagcatcacttgctcaaaggatcaactcagcatcagtattcaatccaactgaagtggacagaggactaaaagactcagatgggcttgttccaaataatggttcacaacaagggagtagcatcattccgaggtcggttggcaacattcttgcagacaggatgctcatggcgctatctttgttcaggaagtcattgagcgatggtgttcttgcccaagtctggatgcctgttgagcacaatggtcgtgtcgtgttgagtacatccgagcagccctatttacttgaccaggatcttgcaggttacagagaagtttctagaaatttcttgttttcagttaaggaggagcctggtctgcacctagggcttccagggagggtcttcatatctggggtgccagagtggacctcaagtgttacgtattacagtaagccagagtatttgagaatggagcatgctcttcttcatgaaatacgagggtcacttgctatgccagtttatgatcccagcaagggttcttgttgtgcagttcttgaacttgtcacaaacaaggagaaacctgattttgatgcagagatggacattggtgtgaacttgcagacaacaacagatcgcagcaatcagaaggtttactctgaaaatcagaaatatgcttctacagagattttggatgttctaagagctatttgccatgcacatatgcttcctttggcccttacatggatccctacatcaaacggcaccgctaatggtttttgtgtcgcaaagaatatcaggcttgattcgcaaccaggaaaatcagtacttcgtatccatgaatcagcttgttatgttaacgatgcaaagatgcagggatttcttcatgcatgtgctgaacgtcatcttgagaaagggcagggtattgcaggccgagcccttaaatctaatcttccattcttttcgcctgatataagagagtacagtatcgaagactacccgcttgcacaccatgctcgtaagtttggtctgcatgctgctgtagccatccgactgaggagtacgtacactggtaaggatgactacatactagaattctttctcccagtcaactgcaagggctgtggagagcagcagatgttattaaacagcctttccagcacaatgcaaagaatatgcaaaagcttgcgaacagtttctgaagcagagaccgatagtgttagtgctactgaaccaatgtatgagaagactaatggaagttgtttaccaactggtaactctgaaagttcctcacatgatgaccagccaatcacagaatctgcattccatgatctatcttcgggtgacaaacaaggagacagagaacctgctaaggcacggagtagctcaaagcgagttgcagagaaaaaacgcagtacatctgaaaagaattttagtctggatgttcttcgcaaatacttttctgggagcctcagggatgctgcaatgagccttggcgtttgtccaacaactttgaaacgaatatgcagacaacatggaatttccagatggccatctcgaaagataaacaaggtcaaccgttcactgaagaagatcgagaaggtcatcaaatcggttcatggtgtggacagatccttgcagtacgatcctgccactggatctcttgttccagcaacctcccttccggataagatgcctacctcatctgcgggcgtaaaaacagtggaggaaaaatctagcccagaaccaggacaggatttctcttcgcctgatggatggcaaagagaaagtagccaacttcatgcctccagtatacctacaagggtaggtgatgaagtccaaatgctggcaatcaacaacgaaggcagcaggaactatgcttctggtatcgcaaatatcgcgcagcattcaaactccgaagacgcacacggtcctttatatcccgtcggtgctgttaattcttcgcgtaccggagaaacaggctacatcgattctccaacctccctccacatggatagcgtcgaaggccaaacaacggtgagggactcaagatctgtacagcaagcagatgtcaccatggccaccaaggagcagacccttccctccacctctggcacaaccgattcttcgagcggcagcgcctcaagtcagcctgctttcaaggggaacccaggacgtgccctcaaagttagcagcagcgatgcactgacggtgaaagctacctgtaacggcgacaccgtgcggttcaagttcctgccggcaatgggctggtaccacctgctggaagaggtagcgaagaggtttaagctggcgacaggagcgttccagctcaaatacaaggacgacgaggacgagtgggtgatcctggcgaacgacgccgacctccaggagtgcgtggacgtcctggactcgatcggctcgcgcagcgtgaagctgcaggtgcgcgacctcccctgcctcgtcagcagctcgggcagcagcagctgctgcttgcaggtggaaggaagcgcctag

SEQ ID NO: 18801 - DNA, 651 bp, Zea mays
  Peptide Sequence Number=SeqID_60580
atgccttattactatcgtcctaagccaaatgaaattaacaagctgataatctcactaaccactaaccaatatgtacacctcttcatcctcactgttctcatcctcatcaattgtataggcatcatcattagtcgaatagccattggagtagccgaggaagagcagcttgcgaatagagcgcagcgcgacatcgacaaagttgatctagatctagaggttgtcagtgatgaagtcggtggggaaggcggagttggcatggatgcttccaacatcggaggccatgaggaccacatagcgcgggcgctcggcgtcggcggtgaagaaggcctcaaagttagcctggcgggtgaggtcaagcttggcgtgggtgtgggccacgacgcaggtgaagacaagcatgaggaggcgacacacgatggtttaaccgacaagatcgttgcgcccgacgacgaagacctttgcgtccttgtcgacgaggaaggacgggtgtgcatggcgaggggctgtggagcaggaagagggcgagcgacggtgatgcagggcgagggtgagggtgttggtgtggctttgaccagcggttgcgatggtcgcagtggtcgctggacgctaggagtttgcatggtggagggtggcggttccggcggccgataa

SEQ ID NO: 18802 - DNA, 357 bp, Zea mays
  Peptide Sequence Number=SeqID_60581
atgctcctcgcacacatcaaggccatgattcgcaatgcggatggtgattcaaatacgatggagctactcaccgcagctagagggcaatggagggagctggccacagaggacagtgtattcgtggtctctggtgaagaaatcccgagctcgggcgccccccggcgtgaaattccgccacgccgaccgccccaccagcccggtcgagtagtagccaaccaccagaggtcccgtgcgcatccagggtccccaagtgcacttcaattggccccccggagatccctggcggcggcaaactcccccgaggtcggcaatgacgggactgggtgcattgggttggggagaacgaggagactgtga

SEQ ID NO: 18803 - DNA, 690 bp, Zea mays
  Peptide Sequence Number=SeqID_60582
atgccgcacctcccatttaaacatctcccccacgccgttcctccgcaccacactccactgctctcctccactccactgccacccatccctgctgctccctctcccatcccggttccatcatgggcggccctctcggtgatcgcaccgcccgcgcgggactcggcttccccgcagcaccggcgcgcgcgccgcgcgttcctcgtgtccaactatctcatcctgggctgcgcctccgggtgcggcttcctcacgctctcgctccgcctggccccctccgtcgacggcttcctcctcatcctgctgcacgcgctcacggtggccgccgccgtggccgagtgcgccgtcatcgcggcgccggaccctttccgcgcggccgctgctacaccgtccacagacgccccgtctctcaccacctcggagcccgccgccgtcacccatctcccgcagaggatttactccgacacctcaatcgtactccgcgaggaggacggtgccgtcatccctcccgccatggtcgcggcctcggcgtcggcatcttctgcctcgagtgggtcgcgctcgcgctcgccttcgtgctcaggtactacgttttacgtcgacagggagtgcggcggcaaccccatgcgccgcagcgccaggtcgggcggcgaggacggcgccggcacctggccctggcccttccaggtctga

SEQ ID NO: 18804 - DNA, 741 bp, Zea mays
  Peptide Sequence Number=SeqID_60583
atggcaaagaacacgcagcagccaagaaaagatggcggcgcgagatcaggcgggatgtcgtcgtccaagaagtcccggtggtaccagcgcgcggtggaggtgctcctcctcctcgtctggaagcagccggcggcgggcggggccaaggcatcgccgacgaaggccgcggcggcatcgggggtgacggccgccggcaagggcacggcgctggcgacgggccccgggaagctgcgcaggtcttcgtcgctgaacgtggcggcgtcgttcacgcgggtgtgcctgtgcgcgcccatctcctcgtacaacagcgagtctctctactgctttccaagccgacgcggcggcgccgcgcccaagctacagctacccgcgcgcgtcgtccgcgtccgcgtcggcgtccgggccgccgctgggcgggggaggccggccgcgggcaaaggaggaggcggcggcgagggcgcccgccgcgtgttccgcggcaagtcgctgacggacgacgtgctgatgcggcggttcgtggtggacgaggaggcggcgcggcggcgcgacgagatggaggtggtccgccggcgccaggcggcggtctccaggcgccggcgcctcggccccagcccgctcagccgtatggcgctggcggatgcggagtcgaaagccgaggaggaaccggaagcgccggcggcggcagcgcctgcagcagctgcgagggggacggatgatcgcgtggcagctgcaggagcgtag

SEQ ID NO: 18805 - DNA, 951 bp, Zea mays
  Peptide Sequence Number=SeqID_60584
atgtggacccacatgcatgacaagacggccggcaggatgagctcatcggcgaactgcagccacgggcgtacctacggcctactggttgaaaagttgaataatcgggcttggtggtcgagggagacggtggccgtggtgaccggcgcgaaccgcggcatcggccacgcgctcgccgcccgcctggccgagcacggcctcaccgtggtgctcaccgcgcgggacggcgagcgcggggaggccgccgcggcgccgctcctcgcgcgcgggctcgccgtcgtcttccgcaggctcgacgtctccgaccccgcctccgtcgccgagttcgccgcgtggatccgcgacgccctcggcggcctcgacatcctggtgaacaacgcagccgtgtcgtttaacgagatcgacaccaactccgtggagcacgccgaggctgtcctcaggaccaacttctacggggccaagatgctcaccgaagcgctcctgccgctgttccggcagtcgtcggcgaccagcaggatcctcaacgtcagctcccagcttggccttctcaacaaggtgagcgacccgtcgctgagggcgctgctgctggacgaggacgggctgacggaggcggggatagaggcgatggtgtcgcggttcctggcgcaggtgaaggacgggacgtggggcgggcagggttggcccaaggtgtggacggactactcggtctccaagctggccctgaacgcctactcgcggctgctggcgcggcggctgcaggcgcgcggcgcgcgcgtgagcgtcaactgcttctgccccgggttcacgcgcacgggcatgaccaagggctgggggaagcgcaccgccgaggaggcggccgacgtcgccgcgcggctcgcgctgctggcgcccgccgagctccccacggggaccttcttcaagtggtgcacgccgcagctctactccaagctgtga

SEQ ID NO: 18806 - DNA, 489 bp, Zea mays
  Peptide Sequence Number=SeqID_60585
atgtcccagccaccagatctaatctggacgtcccagatcagtcctatcattgaaatgaaccgccacaatccaacggtccacccattcttcttccccccgacgccagagcgtgacggcgccgcccacacgcgcggcggagccatcgccggagcacgccagatcggggccacgatgctcctcgcacacatcaaggccatggttcgtaatgcggatggtgattcgaatacgatggagctactcaccgtagctggagggcaatggagggagctggccacggaggacagtggattcgcggtctctggtgaagaaatcccgagctcgggcgccccccggcgcgaaattccgccacgccgaccgcaccaccagcccggtcgagtagtagccaaccaccagaggtcccgtgcgcacccggggtccccaagtgcacttcaattggccccgacgacggagatccctggcggcggcaaactcccccgaggtcggcaatga

SEQ ID NO: 18807 - DNA, 1275 bp, Zea mays
  Peptide Sequence Number=SeqID_60586
atgaactttgaaaatttgaatcaaggaaacggagcaaaccttactcaaaatcctatccttattgctgatgatagggatagagctttgagacatgatacggagaatctgaggaatccaaggaaggatcattgtaaagcgttaacattgaggagtggaaagactttagagcccaattccatcgaagttgagaaggagccagttgacgctcaagactcagaagaagttacaccgagtgttgaaattctagtttcaccaaaaattggatctgcaaaacctgacaagtccatacgattttctgatacaattgatggttattcagcagtgtctgatttagaggatttaatcgtagagaaggaacccaattatgttaaggacccattggaacaaattttgacatcagatcctccaaataatgaagagggggatgaatacttagctttgttagaaactaatcaaaggggatttaatttgcaatcctgctttgaatctttggagttagagaaaagggattatgcccaaccaaaagcatcaatcgaggagccacctaaattagaactgaagatgctggacagactctcagggcgagactattactgttttcttgatggatactcggggtataatcagattacagtagcactgaaagatcagtacaagacaacattcgccttcccatatggtaccaaagtgactgtttatacggaccactcggcaattaagtatttacttgccaagaaagacactaagctgagactgatccgatgggtacttctacttcaagagttcgatctagaaattcaagatcgaaagggactggaaaaccaagtagcagaccacttgtccagattggagcagcaagaagggaactattctcttataccaattcgagagatgtttccaaatgaacacatactgaagatcaaattattaggagatgcgttgcagaagatgaagtacataagattttataccattgtcactcagctccgagtaagggacacttcagagttgttagataaatatggagtgaaacacaaggtcactacagcttaccatccgcagacgaatgggcaagctgaactgccaaataaggaggtcaaaggcatacttgagaaggtagtttgcccgaaccgacgagattggtccaaaagactagatgatgctttatgggctaacaggacaaaatacaagacacctttagggatttcaccctataagttagtctttgggaaagcctgccatctacccttagagttagaacacaaagcttactag

SEQ ID NO: 18808 - DNA, 288 bp, Zea mays
  Peptide Sequence Number=SeqID_60587
atggaaccagaagctgaacctaatatcgagacttcaatgttcagagctcaaccacctcgcccagatcttcgaaatgaactgtcaaagttaatggacataatgcaacatatgcagtggcagcaacaagcttactggaaatactcaaaaaaatgtttgaaaaaagggtgtgaaggttatcttgcttttgtattgaacactaaagatccagagttgaaaattgaatcagtggcagtgaatggccccattggaattgaaagaattggaagctcaattgcaggaattaactga

SEQ ID NO: 18809 - DNA, 322 bp, Zea mays
  Peptide Sequence Number=SeqID_60588
atgagtcaggtggcggattccaagcgcgacgaggaggatgttgttcagcgagtgccgcttgaggctgtggcggtgttgaatgcgatggggagcagaggcaaggacgagcgcgaccagaccgaacgcgacgccggcgtccagtggcttgagcggatgcggcagggtgtaggcacaaggacgagtagcaggggcggctgggcttctgggccgcgacggagacaagcagggctagtgaaaccgacgttcaccagccactggggagaggataagcaagacgagaaaaaaacaaaaaaatctcctgagatgagtggcacgttcaccg

SEQ ID NO: 18810 - DNA, 171 bp, Zea mays
  Peptide Sequence Number=SeqID_60589
atgaggcatggttccctgacgctaggcgtggttgaagctctggacgccacgagggccactacagtcactgccgaggaagcgcgcactaccgccaaggagatggagaagaaggccgccactactgcaaagctagccgccatcgctatggacaaggccaacatgactctttag

SEQ ID NO: 18811 - DNA, 357 bp, Zea mays
  Peptide Sequence Number=SeqID_60590
atggctgcttgctcagcgcatctctctctggtgttcttccatgcgcgcgcgttccgttcttcctgcgcgtgctgccgtgagctcctctgcccggccgccgtcgtgctccctgcgctcatttggccatgctccgcctcgctgcaggcactcgtctcctccctctcctcaagcacgtcgtgcctggctcaccccctgtgccacgcaccgcttcaccagctcgcccctgcgcatgcgtcctcccgcgcccgcgccgtccctactcatcgccgcgcgcctgcttcctatgcgcgcagccgctccatcccagccgtgaagctcccttttcagttctcctccgtcgcgttgtcgtgcgcgtga

SEQ ID NO: 18812 - DNA, 2028 bp, Zea mays
  Peptide Sequence Number=SeqID_60591
atggaagcgcgctgtgtacaccttgtcatcgttggtgttctactcgtgttggcggcggcacaggaggccaccgctattgcggttcctggccctcaatgccaaagtcagtgtggcggcgttgacatccatttcccgttcggcatcggtgacaattgctcgcggtcaccacgcttcaacgtgagctgccaggaggtccaagatggcatctacaagccattcctcagcggtgtctttgagctgctcaacatttccttgctccatggcacgatccgggagctgaaccccatctccacgtactgctacaactcgccctcaggtcgcatggagagcaggacctcggggcacgacgcggtctcgtccacgttccggttctcagacgtccacaacaggttcactgtcatcggatgcaacaccctcgccatcatctacgacaggaccgggcaccggctaccagagcggacggccatacccaaggggatggactactacaacgtgagcttcgacgcgagcttcaacacgagccggatttggagcttcagccgctgcagctacgccgtgctgatggaggcggcggcgttccgtttcagcaccgcgtacatcaagaccacccgattcaacgacacgggcgctgggcaggtgcccgtggtgatggactgggcgatcagggagagggaggcgtcgtcgtgtgaggtcgcccaacagaataatgggacgggctcttacgcatgcgtcagtagcaacagcgagtgcgtggattcacaaaatgggccagggtacctgtgcaactgcacccaggggtaccaaggcaacccataccttccaggcggatgccatgatgttgatgaatgtcttgcactaagtagtgccggtgccattctgattgtcgctgcagctgttgctatctttacacggaggtggcagagaatcgttcagaaaaggcttagaaagaggtactttcacaagaacaagggtattctcctagaacaactgttctcgtcatcagcaaataacaacggtacgaagatattctctctggacgacctacagaaggccaccaacaacttcgaccgcacacgtgtggtcggcaacggcggccatggcacggtctacaagggcatactggctgatcagcgcgtggtggcaattaagaaatcgaaactcgtagagagcaccgaaatcgagcagttcatcaacgaggtggccatactctcacagatcaaccatcgcaacgtggtgaagctccatgggtgctgcctcgagtccgaggtccctctgctcgtctacgagttcatctccaatggcacgctgtacgatctcttgcaccaccgcgaccgcgagctgccctgggaggcacgcctgaggattgcagctgaggtcgccggcgcgcttacgtatctccactcagcagcatccgtgtccattcttcatagagacgtcaagtccatgaacgtgcttttgagtgacagctacacggccaaagtctccgactttggcgcgtccaggtctataccgattgaccagacacatctcgtcactgctgtgcagggcacatttgggtatctagatccagagtacttccacacaggccaactcaacgagaagagcgacgtctacagcttcggtgtcattcttctcgagttattgacaaggaagaaaccgatcgtcgatggtgacagcggttataaggtaaacttgtccagttatttcttatgggaaacggagaggaggccacttgaggagatagttgacgtcggaattataggggaagcaagtacggaagcgattctaggcatggctcaactggcagaggagtgcctcagcctaacaagggaggataggcctaccatgaaggatgtggagatgaggctacaaatgttaaggtgtcagcaagatgttgctccaagggcacatccagcaaagagaacaaaaatgattagtcatgctattccgatggctgctagccagcacggctcacgccaatacagccaagagcaggagtttatcttgtcctcgcgtgtaccacgatag

SEQ ID NO: 18813 - DNA, 123 bp, Zea mays
  Peptide Sequence Number=SeqID_60592
atggctgaggccgtggagccgtggatgttgtcgtgtcggagtcattcacgttttctatctttggctagcgagaaagttagaatcaaagatgattatttttggatagccattgaaataagttga

SEQ ID NO: 18814 - DNA, 351 bp, Zea mays
  Peptide Sequence Number=SeqID_60593
atggtgcgcacgggcgccgactgcgcctgcctcatcctcacgggcaacgtgcccttcagcctccccatcaaccgcacgctcgccgtctccctccccaagctctgcagctccacctccgtcccgctccagtgcagagacacggcgacgcaaatcccagctccaggacctatcgcgttcgctccggctctgcctccactgcgtaaggacctttgccttctctgctcacgccacgccagcacccatcccaccggaatcgtccgaccctccggcggatcccacggcgatccctccggcggtggactcgccgccgttctcccagaggccagtggtggtgcccagctccgctgttag

SEQ ID NO: 18815 - DNA, 456 bp, Zea mays
  Peptide Sequence Number=SeqID_60594
atggactacatgtccggcaacgcgacggcgcccgacggcccgtgctgctcggccgtgtcgggcatgcttcgggccagcccgagctgcctctgcatggtggtcggcggcacggccgcgacgctcggcgtcgccgtcgacggcgaccgcgcgctgcggctgcccgcggcgtgccaggtccaggcgccgcctgccaaccagtgcgacgtcgcgggagctccagtgccgtctccggtggcggggacgaacacaccaggggctcaggcagcggcggcgccatcggacgccaataatgtcacccctgcaggtgcaccactggccgtacgccgttcagactcaaaagctagccctttgagacggtctggatcgacccttccatcctccgacggagacaacggcagacctggaacgaccttcgtcttcgccgctgcggcactggcgttgctacatcgtctctga

SEQ ID NO: 18816 - DNA, 678 bp, Zea mays
  Peptide Sequence Number=SeqID_60595
atggcgtgtcaccaaggcggtgccgacctggcccttgcccatttagcaccatacctaggttctgatatgacgtcgaagcacataagaggccagtgtggtcacgtagaaaaccagaggaaagaggatagcaagaagataggagaagttcagcatgctaatcagtttatgtttcctggatatgggtatcctcctgcatatccatttcctaccattccgttagtgtcaaacattcaagctgaaggctatcagacaaaaccagctggcacaagctaccgaacttcggaagattacctaaaacagtcaagttccacagaaatgtcacaagatataccatcaagaccactaacaatgacaccacaagaaaagatagaaaagcttaggcgccggcaacaaatgcaagcactgatagctattcagcaacaacagcaacagtttggtcaacagggtcctggcagtgacacaatggtgtctcaagcatacacccctggtaacaaaaatccggattccttagggagttcaattgtcatagatgaaaacacaaataaggttatttcgcctgagatgattccaactgaccatgaccgggttcacaagagttctgcaatttcagatgatccctttatagaggaaaaaatatattatcagctacaagatgctcttggcaaggcaatttgttaa

SEQ ID NO: 18817 - DNA, 128 bp, Zea mays
  Peptide Sequence Number=SeqID_60596
atgtccgaccagggttcggcgcacctcaaatttttcgcaacccgccgtcctggggacgagcaagctactgaggatcctggagttcagcagatagaagttgctgagcagaagctcattgaaggcaagtt

SEQ ID NO: 18818 - DNA, 321 bp, Zea mays
  Peptide Sequence Number=SeqID_60597
atgacgagggtgtggatgggaatgagaaacgagaaacgacaggagagccgcagaaggcagctggaagaggagaggaccgcgcgaggctccgtgccggcgagttcgggtgcttttcctgcggtccgagatgcgatcgttgggacccgggagatagcgcagctcgggttcgggttcgggggcggctaccgcgacggcggccgccacctgagcaggatgtttaactggaacgacgagcagcaccagagtagaatagagccgagccgctccgttcattgttttgttgaagagacatatgagtgtggagtggaggagaggaagtag

SEQ ID NO: 18819 - DNA, 1377 bp, Zea mays
  Peptide Sequence Number=SeqID_60598
atgcctggcataccgagggatgtcgccgagcactcgctggatatccgagcaggagccctacccgtgaagcagcctctgtgccaattcgacgaagaaaagcgcagagccataggcgaggaaatccacaagctgatggctacagggttcatcaaagaggtattccattctgaatggctagccaaccctgtgcttgtgaaaaagataggtgggaaatggcggatgtgtgtagactacactggcgcgacataccaaaggtgcatgaaccacgtgttcggagagcacattggccgaacggtcgaggcttacgtcgatgacatcgtagtcaagacgaggaaagcctccgacctcctcactgaccttgaaacgacattcaagtgtctcaaggcgaaaggcgtaaaactcaatcccgagaagtgtgtcttcggagtcccccgaggcatgctcctggggttcatcgtctccgagcggggcatcgatgccaacccggagaaaatcgcggccatcaccaacatggggcctatcaaggacttgaaaggagtacagagggtcatgggatgccttgcggctctgagccgcttcatctcgcacctcggcgaaagaggtctggccctgtaccgcgtcttaaggaagaccgagcgcttcacttggacccccgaggctgaggaagccctcgggaacttaaaggtgctccttacaagcgcgcccatcctgaggccggtctacttcatcagtgaggtactgtccgagaccaaaatctgctacctgcaaattcagaagcaactgtacgcggtaattttgacgcggcgaaagttgcgacactacttcgagtctcatccggtgactgtagtgtcatccttccctctgggggagatcatccagtaccgagaggcctcaggtaggattgcaaagtgggcggtggagatcatgggcgagacaatctcgttcgcccctcggaaggccatcaagtcccaagtcttggcggacttcgtggctgaatgggtcgacacccagcttccagcagctccgatccaaccggaactctggaccatgtttttcgacgggtcactgatgaaaataggagcgggcgcgggcctgctcttcatctcacccctcgggaagcacctccgctacgtgctgcgcctccatttcctagcatcaaacaacgtggccgagtatgaggccctggttaatgggttgcacatcgccatcgagctaggggtttggcgcctcgacgctcgtggcgactcgcagctcgtcatcgaccaagtcatgaagaactcccactgccgcgacccgaagatggaagcctactgcgacgaggttcggtgcctggaagacaagttctacgggcttgagctcaaccacgtcgctcgatga

SEQ ID NO: 18820 - DNA, 1110 bp, Zea mays
  Peptide Sequence Number=SeqID_60599
atggccggactcgacaccttcctcttcacctcggagtccgtgaacgagggacaccctgacaagctctgcgaccaggtctcagatgctgttctggacgcttgccttgctgaggaccctgacagcaaggttgcttgcgagacctgcaccaagaccaacatggtcatggtctttggtgagatcaccaccaaggccaatgtcgactacgagaagattgtcagggagacatgccgcaacattggtttcgtgtcgaacgatgtcgggcttgacgctgaccactgcaaggtgcttgtgaacattgagcagcagtcccctgatattgctcagggtgtgcacggccacttcaccaagcgccccgaggagattggagctggtgaccaggggcacatgtttgggtatgcgactgacgagacccctgagctgatgcccctcagccatgtccttgccaccaagcttggtgctcgtctcacggaggttcgcaagaatggaacctgcccctggctcaggcccgatgggaagacccaggtgacagtggagtaccgcaacgagggtggcgccatggttcccatccgtgtgcacacagtcctcatctctacccagcacgacgagacagtcaccaacgacgagattgctgctgacctgaaggagcacgtcatcaagccagtcatccccgagcagtacctcgacgagaagacaatcttccacctcaacccgtctggccgcttcgtcatcggcggacctcacggcgacgctggcctcactggccggaagatcatcatcgacacctacggtggctggggagcccacggcgggggcgccttctccggcaaggacccgaccaaggtctcctacgccatcggcgtgcccgagcccctttcggtgttcgtggacacgtacggcaccggcgcgatccccgacaaggagatcctgaagatcgtgaaggagaacttcgacttcaggcccggcatgatcatcatcaacctcgacctcaagaaaggcggcaacgggcgctacctcaagacggcggcctacgggcactttgggagggacgaccccgacttcacctgggaggtggtgaagcccctcaaggcggagaagccgtcttctgcatga

SEQ ID NO: 18821 - DNA, 216 bp, Zea mays
  Peptide Sequence Number=SeqID_60600
atggatagagctagcaagagaggcctgaattatcagcggttgctggaaggaaggctgaacgcgctgctgctcctctgcatgtgcgcgttccccgccccggcgcggtcgcagaacacgaccttggccacggccgcgccggcgtccgtcgaggggttcaactgcaccgccaaccgcacatacccatgccaggcgtacgcgctctaccgcgccggctga

SEQ ID NO: 18822 - DNA, 1506 bp, Zea mays
  Peptide Sequence Number=SeqID_60601
atgccatacattggaggaattttaaaacagctacttggccgccactctatcgactcattcatggtattcaactttgagggaagcaagaaggacaatcaaattgccagcattttctcatactatgacatgtctgtgatgggttacccacgtaactatgaagggtgccccttgctcaccatggagatgattcaccattttctgagatcgagtgaaagctggctctcattaagccaggacaactttctgctaatacatgcagaacatggtggatggccaattcttgcttttgcattggcagccttattggtttacctcaaaaggtataatgatgagaggaaagctctggaggcagtctgcaaacaggcacctgatgggttagctgagtttttttcaccactggacccagtgccttctcagctgagatatttgaagtatgtgtcaaaacggcacaaatcactagaatcatggcctcctgttgacagaatgctgaatctgaactgtataataatcaggaaggtgccaaattttgatgggcaagggggatgtagaccaatattccgcatttatggcctagatccccttgcacctaatgacaggggtactaaacttctctttttgaccccaaagacaagtgattttgtccagctctatacacaggaagactgtgagataatcaaggttaatgttcattgtcctgttcaaggagacattgtgattgagtgtgttagtctggatgaggactttgaacatgaagttatgatgttcagagccatgtttagcacagcttttattgaagacaacttgttggtacttgataggaacgagattgatattctgtgggacacaaaacaccggtttcctgtggacttcagagttgaggttatattttctgatatggaaataggcacagcagttcacaaatcagggttatctagcgaggagaaagaaagcctttccaaggttggtgatgccttcagccatctggaatggtcaagcaaaagcgttcacatcacaaacgaagattcaaaacagaagggattacagacagaacacgatggcttcgaaaaaatacctctagaggaaacaggaaccagcagcgcatcagctggaaacagcagcagaactgtccagattcatcacatagaacctgctgaaaaccattcttctcttgccagtgtgcattcttctccagaacctgaggcttctggttctggaccgaactttcaaggaggtcaactctccaatgatacatctgcacaggaggaacacgaagtggatgacaccaaagtcgaacccaatccagaaatcccccgagatgcagaagctggtgatgctgatgccgccgccaccgccgcagaatggtctgacaacaactcggatgtgttcctatcagacacgcacacgccctcgagcagcacgccgtctagtcccccaaagttcgacgaagacatcctggaggctggtatggttggaactcgatcacagctcactgaactgaagatataa

SEQ ID NO: 18823 - DNA, 438 bp, Zea mays
  Peptide Sequence Number=SeqID_60602
atggaaccattcgtcgccgcgcaggggctcgtgatcgtgctacagcggtcgcacgcacgcgcctacgacgacccgttaaacaaaccaaacgtccaaaccaccaaaaacctccgagaaaacaaatccaccggcgcggagttgccctccttgctgccaccagcaccacctccatccgtccctcctccccgatatatcgccaccaccggctctactgctcgtaacgtctcctccctgcccgactcctcctcccccacaaggttcggctacccggcggggcggcgcgttctctgtccggttcctgcgtcggcggccgggcggatgtccctgttccggcggctgttttaccggcggccgcccgatgggctcgtcgagatctccggcaacatcctcggtgcgttcgctttcttggcccagtactcggtaatcttgctattttag

SEQ ID NO: 18824 - DNA, 888 bp, Zea mays
  Peptide Sequence Number=SeqID_60603
atgaaggagagctcccctcctcctcctgatccggctgcatcggcggtagcggtgaaggaggacgagtgggaggtgcgttcgggcgggatgctggtgcagagatggagccccgacgccgacgcccccgccggggcgcccgtccctaccatccgcgtcaaggtcaagttcaacggcgtctaccacaagatctacatcaaatcacaggcctccttcgataaatatagtgagctgaagaagatgttgtcatcgcggatggggctgcaccccgaggaccaaaatctggtgtacaaggacaaggagtgggactccaaggcgttcctggacatggccgacgtcaaggatcgctccaagatggtgctgctcgaggaccctgccgcgcaggccaagcgcctcctcgagcagcggcacgccgacaaggcggagcgggccgccaagtccatctcccgcatcagcctcgacgtcgacaagctcaccaaggcaagtaagggatgcagatgcatttgcggtggcggcgaggggggtgcatcgtgtggggtggatgagcatcgcgcgcggagggtgatggggccaagaacgggggcgaggtggcggcctcttccaatatctgtgtggggggcgagggcatggtatggcctcgtgggggcggtagcgaggatcgtggggcgtcaatggcgcccttccatcgacggagagcagagggggcgatgggtgggcatggaaggaaggatgaatcgaggatggaaaggagcacggcgggcgggcggggtgcgaggagcgtgcgcggtcgagcggcggcggtggggaggagggtgggggattcgcgaccgagacgggatcggcagaaccgtgcaccactctgcactgtggacgcctacgatgcacacttaa

SEQ ID NO: 18825 - DNA, 306 bp, Zea mays
  Peptide Sequence Number=SeqID_60604
atgaaggacttgtcgcctctgcctttcagcaagtcttatcccttccccaacgagcaacacacgtgcctaatggctaaggaaaagaagaagaagatgttcaccttctacatcaagaataaggattcccataatacgatcatctttggtgatgggaaccaaggcaagaccttgtgcagcatgtcaagcagggaaacatgtgggaacaagatatccaagcaagaacgtgatgacgacgtcgagaccattggagcttcttcatatgaatctcttcgggataaatccaaaacccaggaaactgcttcttaa

SEQ ID NO: 18826 - DNA, 225 bp, Zea mays
  Peptide Sequence Number=SeqID_60605
atggaccgaatcccgcgcttggtgagatccatccctcggccgctttccaccgccgtgctgcccccggcctcttccctggacgcacggtggcgccgcgcgcccttgggtaaccaagctggcgccgttaagcgcgtcaacggcggtggcgtcgtcggctggctttgcggtcgcgttggccgtttgtcgctggatagtgcaaaaattgaactatccagcgacaactaa

SEQ ID NO: 18827 - DNA, 400 bp, Zea mays
  Peptide Sequence Number=SeqID_60606
cggggcctccactgcaaagatccggaccaagaatagcggagtcagaaagacagaaaacaccgcaacgaccgcgaagaagtcccgagaaatgtcgcgaagcttgactccagcaaagaaagcacgcaccttgctccatgaggaggctgagctgcttgacggcgtcctcggagtcggcccccatttgccgcgggaagaggcgatcccgagcacagattatgcgggcccggcgcggagccggaggcgcgaagcgaggtggaagattcagtcggcagtcggagggaggccacctgaaggcgtccgcgactccgcgtcccagtgtatgactgtttgctcggacttcggtgcagaagggaagcgcgtcacgccgtacaagaaggtgatgctcattcctcatttctag

SEQ ID NO: 18828 - DNA, 2175 bp, Zea mays
  Peptide Sequence Number=SeqID_60607
atgcggtgccatgcacctggactactagtacgcttggggaatggggatgggtgcaacggtagaggaaggtcggtggtctcctccactatccccacagaggttccccttctccttccttccttcgcttcctttttttcccctgtcgccggcggcgatagggtcccgtttttcttgcttcggcgggctgtaaatgcttccggtcctctccggcggtccagatccggcggtgaccgtgctcctgttcgttctcctggtcttgattcgattgggaggggaaggggttccttcggtcttgggaaattcgaagacatgcctgcgctctacgcttattacggagatggcgggtgcctcgtctcggcgccggctgagctggccgggctcttctgccgcggcgccgtgcagcagcggaagcgcacgctggtgaccgcgtccgcggtcgccgcggcggcggccgagttcgtgagggcggccaagaagcagaggcagctgccgctgccgtcgctcgacgcgctcccagacgagtgcctcttcgagatcctgcgccgcgtgcccggcggccgcggccgcggcgcctccgcctgcgtctcccgccgctggctcgcgctcctcggcagcatccgggcctccgagctcggccaggccgcggcggcggcggcggacaccccgtcgctgcccgacctgaacgaggaattcgtcatggaggaggataatgaggagtcccccgcgggatcgaagctcgccgtccgcggcagccacccgacccgtggcgtcacggaccaaggactgtcggcggttgcacgcggcagccccaacctcagctcgctcgcgctctgggatgtgcctcttatcaccgatgctgggctcgcggagattgctgccgggtgtccctcgctcgagcgtctggatatctgtcgatgtcccctcatcacagacaagggcctcgtcgctgttgcgcaggggtgccccaacttggtgtctctgaccattgaggcatgccccggtgttgccaatgagggcctgagggcgattggccgcagctgcgtgaagctgcaagctgtgaacatcaagaactgccctcttgttggtgaccaaggcatttccagcctggtgtgctctgctaccgctgctcttacaaagatccggctccagggattgaacataactgatgcttcgcttgctgtgattggatactatgggaaagccatcactgaccttacacttactcgtctcgctgctgttggtgagaggggtttctgggtgatggctaatgctgctggcctgcagaatctcaggtgcatgagtgttacctcttgccctggagtcaccgatcttgcgcttgcttctattgccaagttctgcccgaacttgaagcagctgtacctcaggaagtgcggatatgtgtcagatgctggcctcaaggcgttcacagaatcagcaaaggtgtttgagaacttgcatctcgaggaatgcaaccgggtttctcttgtcggtattcttgctttcctcctcaactgcagagagaagttcagggctctatcgttggtgaaatgcatggggatcaaggatatctgctctgcgcctgcacaacttcctctttgccgatcacttcgtttccttacaatcaaggattgcccaggtttcaccgatgcaagcttggctgcggtggggatgatttgccctcagttggagcaggttgacctgagtggtcttggtgaggtcactgacaacgggcttcttccattgatccagtcttctgaagctggtctggtcaaggttgacttgagtggttgcaagaacattacagatgtggctgtctcctccctggtgaagggacatggaaaatctctgaagaaaatcaaccttgagggttgcagcaagataacagatgctatcctcttcaccatgtctgagagctgcaccgagcttgcggagcttaatctttcaaactgcatggttagtgactacggtgttgccatcctggcatctgcaaggcacctcaagctccgtgttctctcactgtcaggctgctctaaggttactcagaagagcgtgctgttcttgggcaaccttggccagtctatagagggcctcaatcttcagttctgtgacatgattggcaaccacaacattgcatcgctggagaagaagctctggtggtgtgacatccttgcatag

SEQ ID NO: 18829 - DNA, 255 bp, Zea mays
  Peptide Sequence Number=SeqID_60608
atgtccgacgcccagctggacgccgcctactttgcgctcgaggccgcgggctactcgggcatggaggtgcgcgtggcggagacgggatgggcctccaccggcgacgccacggaggccggcgccaacatggggaacaccgcacgtagagaagtcgacgctgatgttcagtggcgtctcgttcttgctaacgacatgaaacgcctacgcaacaagaaggcagacgagttgtatctagtgatttgttgtattctttaa

SEQ ID NO: 18830 - DNA, 600 bp, Zea mays
  Peptide Sequence Number=SeqID_60609
atgaagatgtcctgcgagatgcggttcttgcttcaacttcctattctgcagcagcctatgagtagtctacagaagcacagggtcgacgaggacgccgagagagcccatcatccatcagaaacgaatgatggtgatggtgcggctgctcaagctggcccggatccgcatccgctgcgtgaacatctacgacgccgagcacaaggtggtggacgcgttccgtcgcacgggcacgcgcgggcctcaacctcgtggagtcgtggtggccatccccaacgagttgctcaaggacacatggccgccaacccggccaaggccatggacagatggactggcgactggctgaacgagaacgtgcatccgtacgtactacccgtccacgcgcatcgtcggcatcgccgtgggcaacgaggtgctgggcgggcaggacgccgggctcgccgaggcgctcgtcggcgccatcctcaacaacgctcaatgttacccctcgtcgacgcgctcaggatgctccggcgggacgccacgatcgagctctccacgccggactcggaggccgtcttcgccaactcctacacaccctccctccgcctgcatcttctgtga

SEQ ID NO: 18831 - DNA, 591 bp, Zea mays
  Peptide Sequence Number=SeqID_60610
atggagttcgtggcggctgtcatcgaatctgaggtcgagtccagctgtggccggaggatccccgggattatcgcgctcgcgacggccaaagatccgtgcccgcgacgaccggagatccgcgcccgtcccccctttcacgactcgcccgaggacaacctcaggcgggagacgcagtcacgactccccgaggctaccttcaggcgggagacgcaagcaagactcgcccgaggccaacatcagacggaagacgtagtcacggctcgcccgaggccaaccttaagcgggagacgcagtcacctcgggcgggagacacattcacgcctcgctcgaggccacccttgggcgggagatgcagtcacgcctcgtccgaggccaacctcaggcgggagaggcagtcacgcctcgcccgaggctatccccgagcgggagacgcaatcacagttcgtccgaggccaatcgcatgcgggagacatagtcacctcagacgggagacacagtcacgcttcgcccgaggccaccctcaagcgggagacgcagtcacgcttcgcccgaagccaccctcaggcgggagacgcaagttcttatgactga

SEQ ID NO: 18832 - DNA, 291 bp, Zea mays
  Peptide Sequence Number=SeqID_60611
atgggacgcgccctttcgactttgatgcatccagcatggaggcccaggcccatacgtcatgtaaccggcgcgccggttactacgtgcgaaaaactacactgccacttgcgccagtgccgcgccttctcgactgaggaaccggtgccacgactcgaggcaaccctgcacatggcccaacagtgccaaccaagcacatcagtcacaggtgaacttggttcgttcaatgaaaaggatccactgggaatgaatgggaagactggggtagtatcttcattagccggaaggaattag

SEQ ID NO: 18833 - DNA, 261 bp, Zea mays
  Peptide Sequence Number=SeqID_60612
atggcaagttccttcttctgcgaatatgagatagaccgacagccgtttgaatccaataaggaagaaatgaaaaagctaggccaaaggatgagatggcatttcaagagaatagtcgatcagtatggcaggaagaggtctctttgtcaaatcctctatcatctaaagctgggtcagaaacttcctttaggagcagaagaatttgcaggccgtaggacaaagcttccattctcgaagaaactagccaagtttgaaaacacttaa

SEQ ID NO: 18834 - DNA, 864 bp, Zea mays
  Peptide Sequence Number=SeqID_60613
atgatgagcgggacccgctggctagtgatcgcgggcgcgcggttggggctggcaagtagtgcccacggacagagggagtgggggcgcgggcgatgcagcggcgttgatagggggtccgctgggcaaagacaggaagggggaaacagatcagttgtgttctctgtttttcaaaacttgaatccacaaagtccaaataacacagtggcgccaaactaccttgaacacacccaggcgaagtttgagaaattttctcaaaagtttgacacgatcttggcgcagattttctcgggactcggccgtgagacgctggcgttttggcgacgcgacaactccctgtctgaagcccaaaaccacatgacttccacacacaagcgacagagctcagtcaagggaacaaatcctacatggcaatcttgcccaaattcgcaaagatctgcgccctatcggcgttataacaggagcagaagaaaccatgccacgtgttcgaccgcggctgtcatgcccggtgcacgccagcccgtgcgcccacttcgttccacgccgcccgtacaccgcgcctgcgcctttaaaagccacccccggacgtgcaacactttactccgcgcttgccctgactgtcccggcccagtccttagctccgacgagctctgcgctgcccgccaagccacccgagcactcggccaccatggccagcccttcccgacaacccccagcctcgccctagcccctagaaggcttccccgagaggtggagaagctttcccaagcttcagccgaggcattgcctcatcgaaaaagcgtgcgcaacctcaccggacttcggtcgaccgccaccgctcgtagaccgggtcactcgagaacttag

SEQ ID NO: 18835 - DNA, 249 bp, Zea mays
  Peptide Sequence Number=SeqID_60614
atgtcaaatccaaaggaaagggcgtctgcttcaagtgcgaatgggaagaaggtggagaagaaaaagaagggcgagacatacattggcaaggagtggaactcggactctaactcctccaactccaacgacgagggactcgccaacatcgccttcgacaagttctctatcttccctaacaaacaaaattctagagtcggtctaagatgggtgaagacggacgcggcacaagacccagcgacaaaaagctag

SEQ ID NO: 18836 - DNA, 2124 bp, Zea mays
  Peptide Sequence Number=SeqID_60615
atggggcccatcaaggacttgaaaggcgtacagagggtcatgggatgccttgcggctctgagccgcttcatctcgcgcctcggcgaaaaaggcctacctctgtaccgcctcttaagaaaagctgagtgcttcacttggacccttgaggccaaggaagccctcgggaacctgaaggcgctcctcacgaacgcgcccatcttggtgccccccgccgccggagaagacctattgatctacgtcgccgctaccactcaggtggtcagcaccgcgatcgtggttgagagacgagaagaggggcatgcattgcccatccagaggccggtctacttcatcagtgaggtactgtccgagactaagatccgctacccacaaattcagaagctgctgtacgtgatgattctgacgcggcggaagttgcgacactactttgagtctcacccggtgactgtggtgtcatccttccccctgggggagatcatccagtgccgagaggcctcgggtaggattgcaaagtgggcagtggaaatcatgggcgagacaatctcgttcgcccctcggaaggccatcaagtcccaagtcttggcggacttcgtggctgaatgggtcgacacccagcttccggcagctccgatccaaccggaactctggaccatgtttttcgacgggtcgctgatgaaaacaggggcacgcgcgggcctgctcttcatctcgcccctcggtaagcacctccgctacgtgctgcgcctccatttcctggcgtccaacaacgtggctgagtacgaggctctggtcaacgggttgcgcatcgcaatcgagctaggggtccaacgcctcgaagctcgtggtgactcgcagcttgtcatcgaccaagtcatgaagaactcccactgccacgacccgaagatggaagcctactttgacgagcccgaggcgccctcggctcccgagggtgaggcactgcacgtcgaggaagagcggaatggggtcccgcctaatcgagactggcagaccccatacctgcaatatctccaccgaggggagctgcccctcgatcgagccgaagctcggcgactggcgcggcgcgccaagtcgttcgtcttagtgggggacgagaaggagctctaccaccgcagcccatcaggcatcctccagcgatgcatatccatcgccgaaggccaggagcttttacaagagatacactcgggggcttgcggtcaccacacccacctgcccactcaggctctccagacaatacccatcacctggccgtttgttgtgtggggtctggacctcgtcggtcccttgcagaaggcacccgggggctacacgcacctactggtcgccatcgacaaattctccaagtggatcgaggtccgacccctaaacgacatcaggttcgaacaggcggtggcattcttcaccaacatcatccatcgctttggggtcccgaactctatcatcaccgacaacggcacccagttcaccggcagaaagttcctggacatttgcgaggatcaccacatccgggtggactgggccgccgtggctcaccccatgatgaatgggcaagtagagcgtgccaactgtatgattctgcaaggactcaagccacggatctacaacgacctcaacaagttcggcaagcgatggatgaaggagctcccctcggtggtctggagtctgaggacgacgccgagccgagccgcgggcttcacaccgttttttctagtctatggggccgaggccatcttgcccacagacttagaatacggttccccgacggcgagggcctacgacgaccaaagcaatcaaacaaaccgagaagactcactggaccaactggaagaggctcaggacatgaccttactacactcggcgcggtatgagcagtccctgggatgctaccacgctcgaggggttcggtcccgagacctccaggtgggtgacttggtgcttcggctgcgacaagacgcccgagggcggcacaagctcacgcctcgttgggaagggccgttcgtcatcgccaaggttttgaagcccgggacatacaagctggccaacagtcaaggcgaggtctacagcaacgcttggaacatccgacagctacgtcgcttctacccttaa

SEQ ID NO: 18837 - DNA, 786 bp, Zea mays
  Peptide Sequence Number=SeqID_60616
atgactgttgctattctagcaaaggaaaacagcgtcgcctgccccgctctgacggctgtgccactcgacagagtgaggctgacagcagctaagtccagcctcaggcgccataggaagctccgcctccccgacccagggctcggactcagcctcgaccccggaagacggacaccgcctcgcccgaccccagggctcggacacagcctcggcctcggcttcggaagacggtctccgccttgcccgaccccagggctcggactcagcctcgaccccggaagacggactccgcctcgcccgaccccagggctcggactcagcctcggcctcggaagacggtctccgcctcgcccgacccagggctcggacttagccttgacatcggaagacgaactccacctcgcccgaccccagggcccagactcgacctcgacctcggagggaccccctcggggtcgaaacgccgacaaggagtttgaggagagcttagggatgctagaacaaatgactgagaagcttgaactgacctgggataagctggccgcggtgagggtaatagaaggatggtgtgttgcaatcgactgcgacgtggtaaaatggctgacggcgtggcataacggtgaagaacggcggcacgccggtgatggacatgcggccacgtcgccggaatcacggcgccggcgtgattccaagcgcacgattgccggcggcgaggggctgagctggcgacctgatcccttcactgtaccatcgaattcttcttcagtgcgcctgacagccaaggtttag

SEQ ID NO: 18838 - DNA, 1521 bp, Zea mays
  Peptide Sequence Number=SeqID_60617
atgggcgccgttcccgacccggttccgaaccccgactactatcacaaacgcaccgagctgcccaacgtcaccgattcggatgtcatcggcgcgttcctcgccggcaccacctgtcgcgacctggtgagcaagctgtgtcgcaagacccccaccagggcgagcgagctgatggacatcgccaccaagttcgcctctggccaggaggcgcttgaggccatcttccggaaggacaagcagccccagggccaccagccggaagatgtccccgaggcgtccactcagcgcggcaccaagaagaaaggcaagaagaagtcgcaagcgaaatgcgacgccgccgacgcggaccttgtcgccgccgctgagtacaagaaccctcggaaacctcctagaggtgccaatctcttcgacaagatgctcaaggagccatgcccctatcatcaggggcccgtcaagcacaccctcgaggagtgcgtcatgcttcggcgccacttccacaaagccgggccacctgcggaaggtggcagggcccacaacaacgacaagaaggaggatcacaaggcagaggagttccccgaggtccacgactgcttcatgatctacggtgggccagcggcgaacgcctcggctcggcaccgcaagcaagagcgccgggaggtctgctcggtaaaggtggcggcgccagtctacctagactggtccgacaagcccatcaccttcgaccagggcgaccaccccgaccgcgtgctgagcccagagaaatatccgctcattgtcaaccccgtcatcggcaacgtcaggctcaccaaggtcctcatggacggaggcagcagcctcaacatcatctacgccgaaaccctcgggctcctgcggatcgatctgtcctcggtccgggcaggcgcggcgccttttcacgggatcattcctgggaaacgcatccagccccttggacaactcgatctgcccgtctgcttcgggactccctccaacttccgaagggaaaccctcactgctgggaggccatgctacgccaagttcatggccgtcctcaactacacctacctcaagctcaagatgtcgggccccaacggggtcatcaccgtcggccccacgtaccgacacgcgtacgaatgcgacgtggagtgcgtgcagtacgtcaaggccctcgccaaatccgaggccctcatcgccgacctagagagcctctccaaggaggcgccagacgtgaagcgccataccggcaacttcgagccagcaaagacggttaagtccgtccctctcgaccccagcaacgacgcctccaatccctcggacatgcctggcataccgagggaggtcgccgagcactcgctggatatccgagctggagcccgacccgtgaagcagcctctacgccgattcgacgaagaaaagtgcagagccataggcaaggagatccacaagctgatggctgcagggttcatcaaagaggctgcctcggccgaagaggccgccctcgggaatttgctgacggcgtacggctaa

SEQ ID NO: 18839 - DNA, 786 bp, Zea mays
  Peptide Sequence Number=SeqID_60618
atggccgtcatggctgggaggggacgacgccggggcttggcactgttggaggaggaggcctcgcgcgccgggaaggggcctggcgggccggcggcggaggtccgcgcaggggctgatgggggaggtcgcgcgccggcggcagagatccgcgcagggccggtggtcgggctgtgccaggggcggccggtggcgagcctgtgccaggggttggccggggatggtcatgctcctacacctgtagcggaggatggtaaggccactcatattccttatagagactcaaagctcacacgcttacttcagtcttctttgagtggacacggacgcatatcactcatttgcacagttacacctgcatccagcaacagtgaggagacacataacacattaaaatttgcccacaggagcaagcatattgagataaaagcttcccaaaacaagataatagatgagaagtccttaataaagaagtatcaaaaggagatatccagcctgaaagaagagctacagcaactcaggcgtggtatgatgggaaatggtggtattctccctacggatcaagaggatcttgttaatttaaaacttcagcttgaagctgggcaagttaaacttcaatcgaggctagaacaggaagaggaagcaaaagcagcattgatgggtaggattcagaggctaacaaaattaatattggtatcaaccaaaagttcgatatcctcaaatgtttctggaaagactaacttccgccgacggcattcatttggagaagatgagcaattgttcttttag

SEQ ID NO: 18840 - DNA, 648 bp, Zea mays
  Peptide Sequence Number=SeqID_60619
atgtcgtcgtcgaggccgacgcgttccagtatatccccattccgatcccgccgctcggctccggcggtgtcggcagcgggacctcctccgccggcgaggacctcatctgggggtcgcccgtccaccccctcttctactgcctctgggcgacccaccaccccctcgtcctccggtggtcgccccgctaccccgtccgccgcgttcgcgcgtcccgccaccccttcgtcgtcatcggcgcggcccgccacgccgtcctctaccgcctccgcgcggcccaccacgccctcgtcgatctcctcgcgcgttgcggtgagggcgccgctcgtggacgcggccaatgccaaggagaacatcatggtcaccgtccgcttccggcccctcagtcctagagagatcaacaagggggacgaggtggcgtggtacgcggatggtgacaacatggtgcgcaacgagtataacctcagcatcgcctatgctttcgataaagtgtttggccctgctactacaactcgccatgtatatgatattgctgctcagcatatttcaattcctatgctagccagtagaaacatatccgatgaacttcataaacaacagatatgggctgtggacaatgcggaaaaggaactgtttttgcatatggagtaa

SEQ ID NO: 18841 - DNA, 1488 bp, Zea mays
  Peptide Sequence Number=SeqID_60620
atgactgcaagggccgcttatctagcttcatttctcatcgtcaccagcttcctccccaccagcagcagccattcccatgtgcctgctgtaactgatgccttagacattgtgtcaaagatcagcacggagcacgacgcaaccatcaaggcatccatggactttggccacattgtgagagctatcccaagcggggtattccatccgacctcacccagcgacattgccgccctaatccggctctcactctcccagccaaagcccttcgcagtggcgccacgcggccgaggccactccgctcgagggcaggccctcgccgtcggcggggtcgtcgtcgacatgcgctcgctccacgaccacgaccacgaccaccgtgctggtcatggtcgctaccgcatgaataatgcagtcccaggagcatgggtggacgtcggcggcgagcagctgtggatcgacgtcctccacgctacgctggagcacgacctcgcgccccgcgtctggacagactacctccacatcaccgtcggcggcacgctctccaatggccggcatcggcgggcaggcgttccggcacgggccgcagatctccaacgcacgggtgaaatgatcagctgttctccgggcaagaactcggacctgttctacgcagcattgggtgggctgggcggatgcggatccggtttcgactacgttgagggccaagtccagctgaaccggaccctgaccgagggccgaagatcgtcttccttcttctcagccccagaactcgaccagcttgccaggctcgccgttgcgaccgggtctgcggcaatctactacatcgagggtgcaatgtactacgatgacgatactactactgcctcctctgtgaatcagaaactcgagacgctactggaagagctgagcttcgtcccggggcttgcattcgtcagagacgtttcctacgtggatttccttgaccgggtcggccgcgacgagcagaagctgcggtcggccggcgtctgggacgtgccgcatccatggctcaacatcttcgtcccgcggtcgcgcatcctggacttcgacgccggcgtgttcaagggcatcctcaagggcaccaggcccgtggggctcatcctcatgtaccccatgaacaaggatcggtgggacgacaggatgacgacggccacgccggacgaggacgtgttctacgccgtcgggctgctgcggtccgcggtggccgccgccgacctggagcagctcgagagggagaacgcggccgttctcgagttctgccaccgggagggcataggctacaggcagtacctgccgagccacgcgtcgctggacggctggaggcggcatttcggcgagaaatggagcaggttcgccgcgctgaagcgcaagtacgacccgagggcgattctgacgcctggccaggggatcttcttctccgccggccacgacttgaccgaccagcaaacgggctctgattctcgaaatgttctttaa

SEQ ID NO: 18842 - DNA, 309 bp, Zea mays
  Peptide Sequence Number=SeqID_60621
atggccaatcccatacacctctaccgaggaggcgaggcaggctccgccgcgctcaccccggcggcggcgctagccccagctcggaacactacacggctacggcccgatcctaatgtgagtgtaccagcgcgatatgaagttcaaggcggaatcaagtgggggagaattaccgaggatgaagacccagcaggcgccaccctctggtgctgccccgagaagttggacgccgacgaggaagcagaaccccgcagcgacttaaatcccgcccaaattcgcctctcggtgctctatctcaccggtcgcgtgtag

SEQ ID NO: 18843 - DNA, 861 bp, Zea mays
  Peptide Sequence Number=SeqID_60622
atggtgacgaagaccaccaagatgttaaagaagctcaacagagaaggcatcaaatttgattcaagaaagaagaaattcttttccagcaaaagaaagcccatttctgagatggattgctacaactgtggagagcttggtcatcttgctcatcaatgtaacaagcccaagaagaacaagttaaagggcaagaaagaagatgacaacaatgatgagaagaaggaaaagagattcttcaagaggaaggatggaagcaaaagaggttccacaaaaagaaaaatggaaaggcatatattgttggtgactggctcaccgacattgagtcttcaagtggatcttcttcaagtgaagaagagaatgatgaaaaagttgccgccatcgccagggacttctcttcaccaccaccatcgctatcatcgacttctcacctatgcctcatggctagagcctcgggcaaaacagggagctccgcctcgcccgacctcaggcctcggcctcatcctcggccgcgggagaaggtctcaccctcgcccaaccctaggcctcggcctcagcctcggcctcgggataaggtctccgcctagcccgacctcgggcttcggcctcagcctcggcctcgggaggagtcacatcctcgcacgacctcagcctcggcctcaggagaagtctccacctcgcccgatctcggcctcggaccgactacgccactggggatacatcattaccctacccctagctagttgcctcaggctacgaagaaacaagaccggtgtcccatctaagattactccggacccctgcagcaatgccagctgcgcttctacagggctcaagtacttctccgccggccacgttagcacatag

SEQ ID NO: 18844 - DNA, 252 bp, Zea mays
  Peptide Sequence Number=SeqID_60623
atgtccgccgggcggaagagcgcgcgactgccgctggtggttaggcgcgccagctggggttcaggggtttttctcgacatgcgtgagaagattgatgtcaacactgaagttggtgtggtgcgtgatatccgtcttaaagaacttcgactctacacggattatggacgctgcagtcgtccattgtttattgttgagggccagaggctgctcatcaagaaggcgcatatccgagccttgcaacaaagggtctga

SEQ ID NO: 18845 - DNA, 561 bp, Zea mays
  Peptide Sequence Number=SeqID_60624
atggacgtggactcgcgcatgacgacggagtccgactccgactccgacgcggcggccgccgcggccgctcacgggggcagcgccggaggctcggggtccgggagcgagacctcctcgtcgtccgcgccatcgacgcccgggacacctgggacgcccggcgctgcgggaccgaggccagcgcccgggtacacggtggtgaacgcggtgatcgataagaaggaggacggaccagggtgccgatgcgggcacacgctgacggcggtgccggctgtcggggaggacggcacgcccggatacatcggaccgcggttgatcctgtttggtggggccaccgcgctcgaagggaactctgccaccccaccctcttcggccgggagcgcggggatccgtcttgctggtgccacagcagatgtccattgttatgacgtgtcatcgaacaagtggagcaggaggactgcacccctaagcttatccactaatccgaaccctgagcctgtccctatgagcctccatgccttggctaccgccccatacacctttatgtatgaatatttgtcatag

SEQ ID NO: 18846 - DNA, 130 bp, Zea mays
  Peptide Sequence Number=SeqID_60625
ctggatgaccatcacccagatagcgcaccacagaatgcttttcatcccgattggctacacatttggttccgacatgttcgacatggatgatatcagagaaggcaacccctatggtgttggcgtcaaataa

SEQ ID NO: 18847 - DNA, 741 bp, Zea mays
  Peptide Sequence Number=SeqID_60626
atgcggcaatgtgaagggcacgcgctggccgtggaccgtggtggagcacgacggcaccagcgactcggccaccggccgcattggctctggctgtgggactcgtccctggtcccggccgcctatttcacagcggactcccccgccagatgccgcatctgtggtgccaccgccgtggagctcggtgccggcatggggctcctaggcattgctgcaacagtctgcctcggcgccgcgcactgcgtgctggcagacgtggtcgcgctgttgtcaggcctcaaaggcaacacgttcgccaacaggcggcgttgcggcaacgtccacgacagtgggagactcgatatcgccccggctcgcgcggtctactgcgacggcgtggggggagggggtagtgttgctggcggcgcggcgctgctctccgccgcctcccggaagcggaggcggcccatcggcgccacgccagcccacagcggcgtgcaggaggaggaggagccgcagcagggcgacgaccccaccgctacgcgggcgctgttcgcggagctggacgagcgagggaccacgtcggagctggagaacctggcgctcaacatccaggggctcggcaagcgcaggctggacgggagcgagaagcagggtggccacgcgcggagccagcagcaacgcgggttcgagacgacggagctcaccgacgacttttttggaggagctactgaacgaagggatgaagggcagtgcagaggctga

SEQ ID NO: 18848 - DNA, 288 bp, Zea mays
  Peptide Sequence Number=SeqID_60627
atggcggagaaggagaactcaccgccgcaacgccacaaggagccgcaagaggagacggagacgcaagcgatgtccaccccgagagcagtccaattcggcgacggagacaagaagagtacgccagacggcgtctgcgcacgggaacgagaagtcaacgtcaacgcctctatttcatcgaatccagttctctcttcgtccataatgacaattatctcgaagccaactgaagctctggtgtggctgacatatgaaccctccagcgcagcgcaggcacaaatgataacttga

SEQ ID NO: 18849 - DNA, 687 bp, Zea mays
  Peptide Sequence Number=SeqID_60628
atgccacccgtcggcgctgcggtctactacttcccgcagggccacgccgagcaggccggcgctgccgtggacctgcgcgccgccgcgggcgtcccgccgttcgtactgtgctacgtcgtctctgtaaggctcatggctgaccctgacaccgacgtgctgacggcgtccgacgccaataacggcgacgtcttctccgtgctggccaactgcgcaaaggccgtctttccggagctggactacagcctcggcacgcccaagcagttcgtctgcgtcagggatgtgcacggcgtcgagtggatgttctgccacatctggcggggctccccgaaacgccacctgctcaccgccgggtggaacaacttcgtcaacacaaagaagctccggttcggcgactccgtcgtcttcatgcgcgaagaggacagcaagatccacgtaggcctgcggcgcaccaaccgcttgttcggggcaatgcagggcaatgggggcggcccggccggcgccgtcgtgggtccatcagacggaaaggtctcgacggaggacgtggtcgcggcggcgaggctggccggcgctgggctctggttcgaggtggtgtactacccgcatgtggcctcgtcagagttctgcgtgagtgtggccgctgtcaaggagtccatgcaggtcccctggttccccggtctgcagttgtag

SEQ ID NO: 18850 - DNA, 717 bp, Zea mays
  Peptide Sequence Number=SeqID_60629
atgacgatgggcatgccgacggtgccctctcggttcaggaggatctgcgtcttctgcggaagcagccaggggaggaagaagagctaccaggatgctgccgtcgagctcggcgaggagctggtctcaaggaacatcgatctggtctatggcgggggaagtgtcgggctgatgggcctggtctctcgagcagtctacaatggagggaggcacgtcataggggtgattcccaagaccctcatgccaagagagattacaggtgagacggttggggaggtgaaggccgtggcggatatgcatcagaggaaggctgagatggccagacaatctgatgccttcatagcacttcctggagggtatggaacccttgaagagctgctggaagtgatcgcgtgggcgcagcttggcatccacgacaagccggttggcctgctaaacgtggacgggtactacaactcgctcctatccttcatcgacaaagctgtggaggaggagttcatcagcccgactgctcgccacatcatcgtcttggcaccgacaccaaacgaactgctcgacaagctagaggagtactccccccggcacgaggaggtcgtgccgaagaccaagtgggagacggagcagctgagctgctgcaagagctgcgagatcccgccggggctcaaagaagggacgccgatcgtccaagcacagcgaggaaccatgcatgctctgaactaa

SEQ ID NO: 18851 - DNA, 228 bp, Zea mays
  Peptide Sequence Number=SeqID_60630
atgaacaaaaaccctggcaatcgaaatgccattacaaacggaactccggttccccctccgcagaccggctccgagcagaagaagccaaaccgccgcgcgtggtgcgcacaaccgcccagcggttacaagcgaccccccacttttgcccagaccaacgggcgggaggggcgggcagccatgcaggcggcatgcaaccgcgccaggtggacgcgcttctccgacttctga

SEQ ID NO: 18852 - DNA, 375 bp, Zea mays
  Peptide Sequence Number=SeqID_60631
atggccacacagttgtcgctttttaagatgacagttgaggccctgtcggatggcagtcggctgagcgcttcacttcccagtgacgcggagatcctggctcacagaggccatggaagttcgcaaggatgcagctggggttgtcgtcccatatgtgtttccaaacccaggttgccctccaatgcgtcccgagctggctttgtggaatttccctcttctcctgtgttgcgagaggaccttgttcccctactgaagaaagcagtggagaaagaggcagctcgcgcgcaggcggagcagcagcgaaaggacaagaaagacagggtggagaagaaacaaagggctgaacgtgagatgtgcagggatacgtataatgagtga

SEQ ID NO: 18853 - DNA, 454 bp, Zea mays
  Peptide Sequence Number=SeqID_60632
atggctgcaaggtgcggcaacgaaccgcacggacttgacgcatatgagccacggccggagaacacagcaccggtgaggggggcggccggtagctccagcgggcccgtgaaggcacagagagagggcgcgatggtgaagctgggcacgggggcgcagtccgacgtcgagggaaggagcacgaccggcggccggacttggagcagtgcgtgggggaacggcgtgatgggaggccgagctaggcgagatccgagcggccatggggaagtgacggccggacctgaccttgtcgaggcgagcagggaggggacaaggcgccgacgcggaaggaagagcagggacggccggcgagctttcgtaggcggcgtccagggagaggcgcggtggaggaaacagcgtgagggggagatggggccaatggccggccggctggggaagatggcgtcctgggaccaga

SEQ ID NO: 18854 - DNA, 348 bp, Zea mays
  Peptide Sequence Number=SeqID_60633
atggcgagccatctgggaatcgagaatccgacggagggagacggttcaatgtatctgcgtttgcggtttgatatgaatgatgtatctgtgtggtctagcctggacgcactcaggcaattaatctctgcactgactgacttttgtggccacatgtgccaacaagataggaggatgaagcctttgaaacactgcactgtccttgaagaacaagggggcagcaagtttatggagactggaacggtatatatttggcgggatggtgacgccggcagccatctagaaggcgtggacaaaactacagtgaaagagagaatatgggtttctgaggcgcaggcttcagcttcctaa

SEQ ID NO: 18855 - DNA, 771 bp, Zea mays
  Peptide Sequence Number=SeqID_60634
atgcagagaatgcgctgctcttacgcccaggctacggaccgtccggctcagtgccgtgggctaacatcggacgccccaccgcactatacaccgggtccatgcagccttcagatcgtccacctcctgctccgatcggggaggcggagcgtcgctgcggcgcctactgagagtctgagaccgacccccgacctagccgcggtaaataaatacccgacttcgccggcgtccgcgagcttcgagaatacatccttccccgcgttttaccctaacaacctaactagctgcggttctccactatcactcgctgctactgcacctacttcctttccgctctggtactgttgctggcttgctgctgctcttggtggtggtggtggtggcaccgaaaccctagcccttgccctcatgtcgcagcaggaggctgtggacccgccttcggcgacggacgagcggctgggaggtctaccgcggagcggctccaccagccgcctcaacgcgcaggcgccggagttcgtgccgcgcgctgccgcggttccccctccccctccgcagcagaaggtggtgcgtttgttcgcgccgcctccccacgcggcgttcttcgtcgcggcaccccggcccccaccgcccccgttcgagtactatgcggcggttgccaccggtgggggtggcaggttcggtccccccgccgccgctgcagagcaggaggccgaggctgagcagccgccgagggacgggagctttgatgaccccgtgcccaagatcagaaagcag

SEQ ID NO: 18856 - DNA, 1233 bp, Zea mays
  Peptide Sequence Number=SeqID_60635
atggggctcaatgcaatacaatataattctatgacaatacctcctctaacagttctggttgcaaagaaacatcttgctggaaggattgatcgtgtagattgtagtttagatgaatgccaagtaattacagaagccacaagggaagaggttacaatcatccatggagatctaagtgccttccagaaggaaatggaaacagttcatctcgtagttcgtagtctggagacaaagcttggacgcctagcttatactcaagtagacatttacatcactgactcattcttctcccagcgactcaattatatttctaatctcatactgaaatgtcttaggatcggacaacacgaggaatatatgatttgtgtgaattcactaaaagattggatcagagcccgaaagctgatactcgtcaggcaagttacatcatcaacttctcgtcctgctattgaatcctcagagagaattattagggttgtgcgctcatctacagtcatgtcagcatcaggtcttagtttgctagctggaactacaataccacctaaaagagtaatgtgcacattgataagacaattagtatacttgctgttgctgtctatgaaaatgctgcttacagaagatgaaggcttatcgttcacgaaatggcaatcttggtccctgcaacctgcttccaagaaggacagcaaatgcaggagggagcaggggagatgggggtggattcagaggtcgagaaagagggcggtaccatggcgagagcagatcctggacaggcgcgagcgagaagttgtagtttgcgtcgaggtccgcggagcaaggagttgcaaatggcgagagcttgacgacgaagtgtcggtcggaatccgtgcccctgctatgacgcctacgccctgcgatgctactgctgctgcttggcgctcgcagagctcgcgtgctgctcggtgtcggtgctctcgttgccctggtggctggcgccttggtacacggacgcagaacagcaggactgttagggtccgctgttggagttactccagggaggagcggatcgggcgccggacggcgtgggcacggacagcagagaggagcggatccggcgcagtcatccatgcttgggatccgggagcgggggatttgagggcgcggcggatgcgcgatttggggagaggaggaggaggaggtggaccttccatccgcgcgatttggtggcgcaaccttccatccgcgggcgttgcggagtag

SEQ ID NO: 18857 - DNA, 477 bp, Zea mays
  Peptide Sequence Number=SeqID_60636
atggatgactgcgccggatccgctcctctctgctgtccgtgcccacgccgtccggcgcccgatccgctcctccctggagtaactccaacagcggaccctaacagtcctgctgttctgcgtccgtgtaccaaggcgccagccaccagggcaacgagagcaccgacaccgagcagcacgcgagctctgcgagcgccaagcagcagcagtagcatcgcagggcgtaggcgtcatagcaggggcacggattccgaccgacacttcgtcgtcaagctctcgccatttgcaactccttgctccgcggacctcgacgcaaactacaacttctcgctcgcgcctgtccaggatctgctctcgccatggtaccgccctctttctcgacctctgaatccacccccatctcccctgctccctcctgcatttgctgtccttcttggaagcaggttgcagggaccaagattgccatttcgtgaacgataa

SEQ ID NO: 18858 - DNA, 429 bp, Zea mays
  Peptide Sequence Number=SeqID_60637
atggtgctggatctgtggagccgtcggaggtgtcgcacgctcgtcgccgtcgtgccttgcggacgaggagggggcgtgcaggagcgcagcctgcgactgcgtctcccgcatccgacagcgccaagtgatgggaagcccacgatgtcgaagacgatgtggccgagcactgttgcccatgctaccgtcctcacggggaactccgtggggaggaaggagacatactcgcggtggcacgaacagagattggggcgtggcgcggtggcggcggctggcgaagagatgcgcgtcagtgtcgtcttcggggtcgtgcgggacatggtgagggccctgcccggagcagagatcgaggcgtggcgcggtggcgtcgacgtcttcttcagggtcgtgcgaggcgctcaacctatcgcaacagagacgacgaagggataa

SEQ ID NO: 18859 - DNA, 522 bp, Zea mays
  Peptide Sequence Number=SeqID_60638
atggaaggaggggcggcaatacaaaggaggaatgccgtgaagcggcatctgcagcagcgtcagcaggaggcggatttcctcgacaagaaggtcatcgcgtccacctacttcagcatcggggcgttcctcgtgctcgcctgcctcaccgtctcgctgctgatactgccgctggtgctgcctcccctgccgccgccgccgtcgctgctgttgtggctgccggtctgcctgctcgtcttgctggttgtactggccttcatgccgacagatgtgcgcagcatggcctcctcttaccttaatagaaggcaggtctccacagacgatggcggttccgtatttattggcgaagatacttacaacgggagtcagcaagggacagaaagcgaagactatactaaattcactgtgctgaagctgaagcaggagctcaccaagcacgggtttggtgctcaactactccagttgaaaaatcccaacaagaaggatatcgttgccttatatgaaaagcatgtcgtcggcaagtag

SEQ ID NO: 18860 - DNA, 228 bp, Zea mays
  Peptide Sequence Number=SeqID_60639
atgaggctgcctgcctgtgaggcgctcgaggagaagggcagggtagtctcgcggagggagcaaggtctgggggacgacggtggagtggcgacatgcggtcatgggggtgacggccttggcgacgatggcgcgcggtcgagaaggtgcgcgtgggagcccaacagacggagcctgttaaaggattacatcacaggacgagaaagtttacagttgaaagtgtactcatga

SEQ ID NO: 18861 - DNA, 129 bp, Zea mays
  Peptide Sequence Number=SeqID_60640
atgtcgcgcgcgtttgactactactatatcaaggattatgatgtcatctcggtgccggaggtgacacagaggagtaccggcagcaatgaccagttcgtcatcctcgtcaccgtcggggatcacaaatag

SEQ ID NO: 18862 - DNA, 573 bp, Zea mays
  Peptide Sequence Number=SeqID_60641
atgtgggatgttgtcggggtggtcgcgacggtcgaagacgattggaaattccaaccaccaaaggtatcatgggattgtcggctccgctgcgtggacttctcgatgagcagcctttatgcgatgcttgtcgtcaggtatggagataaagcgcttcaggagctcgcactcctagagcttgtgttggatggggaagccatgattttgacacgacgagtccatcagcttctggaaatggtcgccaccgttcttggccaacgacctagttggtcgatttgctgtgacgatttcttcaccgcgccgaggatggtggttccttcgacacttgttagggtgctcacgacgttccctcatttctccgctaggctcgccagcgtcccgtgggccctttcctatgcggaaaatggctcccacgtcatcatatccgtcagcgaacttggtcgctatgtcaaccccgtcgcgcttgcgttcgtcgctgctctgtgggccccacgcatcaggcttaccagcctcagccctaacactgccagtgggtcccacatcccagggccttcgtctccgcgtaacaacccgtga

SEQ ID NO: 18863 - DNA, 159 bp, Zea mays
  Peptide Sequence Number=SeqID_60642
atggcgttagatgatgcgtccgccttgtgcggcatggtccttggagacatgctcctagagattgaccatcatggaggcgagttcgcaattcgctcgctcgtgttcggtgtggaaattggtgtggtcgccgaacgtgatggggagagtgatccgccctag

SEQ ID NO: 18864 - DNA, 1335 bp, Zea mays
  Peptide Sequence Number=SeqID_60643
atgaggggagggcctccgactctttcaacctctgatctttctgtggtggatggagcgtccaccaatgagttaaccgggttgcccgttccaacctccctgcccgtccaagggatgctggcgacgccgtcccctagtgtctgccttattatgatgacttcctgcgcagtctctttgaggggggtttcgaccgccggtgtgtttcccctcatcggagcttcaccagaggggaggggtgttttggtcctgcttccatcgctgccgtccctgggtgccacggtggtgatcactcaacctgaggcggcgacgtcgttggttgtggcctctttttcttcaacaagggtcgtggtccctccaccaccggagggacacccttctcctccccctagatgtcggggcggacgtggaggatggaaggccagggcggaggagtttctatccgttcagtgggaggtggagcagctccatgtggtggccacccatttggtggcgaagcagcgcaagctagtcgagcttcgctctagggccgagcgtcttgagagcgaggaggcccaacttcgctctaagggcgagggtgctcggacagaagccgatcacctctggggagatgagacacaacttctggcggtccttcgtgagctccggaagatgctctctcaggcagatgacgcaaagaggacagctaaggagatgaaggcagtggctgaggcccgggtgcgagaggtttcgcttgctcacaatggtgccattgttgcatcggccgaggcggccatcatgctttccgagcgaagcgccgagcttcaggggttctgcctagtcgtctgccaggtgtgctcccacctttctccactgccttcaatcgaggtgcctttggtcgaccggatgtggtcgcttcccaggcatgaggagcgtgtcattgccgagagtgtgttccatggtagcggcctggctctagggcaaatggtctctcactttgatgagattgacaccgttgtgatcgtcgaagctttctttgtcgatcgaagcgatgaggagctggacgcaattgacgatcaagttcacccatgccagagtgctcgccgaaacggtggacgtgaagaccctgctggtaggccctggagtctagcgtcgtctgctagtgacctgcccccagcgcctaggccgcttcttgcgtttacttcgttttgtaataacgttcttggacaagatctttgtgtggcgtgttgtcttcactttgaaccttttgcccttcgaatcctagccttagtggtgcttgtggagttcatagatctttgtggcggtggttccttttgtgttgactggcgtgattttcggtag

SEQ ID NO: 18865 - DNA, 1731 bp, Zea mays
  Peptide Sequence Number=SeqID_60644
atgagcaggaagaggagagaaggaggcggcggcggaagaggcgctgggccggtggaccatcacggcggcggcaaggggtcggaggccggcgctgccgccaccgatgccgtgtccatggacggcggcctccgcgagagtttctacgaggagcacggcatgcgcgacagctactgcaaggtgaggccgttggaggcctacgtgctcccctaccataacgactcgtgtcagtcctcctactcgcactcacagacggcccaagaagcgccctcgtcgtccgcgctcgcgtcgccgcagtacaatgccaccaccggcggcaacgcgtcgtcgcccgaggcggcgttcgtgggcctcgacgagttccgcagccgcatgatgcagggcaaggcggagaacgacaccggcccgcccacggatggcggcgtcgcgcaccgcctcgagcccaacggcgccgagtacaactacgccgcggcggccaagggcgccaaggtgctcgcgcacaacaaggaggccaagggcgccgccaacatcctcggcggcgacaaggacaagtacctgcgcaacccgtgctccgccgccgacaagttcgtcgtggtcgagctctcggaggagacgctcgtcgacaccgtcgcgctggcgaacctggagcactactcgtccaacttcagggagttcgaggtgtacggcagcacgagctacccgacggaggcgtgggagctgctggggcgtttcaccgccgagaacgccaagcacgcgcagcgcttcgtgctgccggagcccaggtggacgcggtacctccgcctgcgcctcgtcagccactacggatccggcttctactgcatcctcagttacctcgaggtctacggcgtcgacgccgtcgagcggatgctacaggacttcatcgctggcgctggcgccggcgccggcgccgaggccgacgcctccagggaccgcgcgcccatcgacttcgccaaccgggacgccgactgcaacgacaccaccgctcagcaggatgggaacggcggcgctgggaggaatgacagcaccgccggcgacggcaagagcaacagctccaggagcggcgacgcgaagctgccgccgcaggtagcggcgttggcatcgcccacggggcggatccacagcgacggcgtgctaaagatcctgatgcagaagatgcggtcgctggagctgagcctgtcgacgctggaggagtacacgagggagctcaaccagcggtacggcgccaagctgccggacctgcagaacgggctctcgcagacggccgtggcgctggagaagatgaaggccgacgtgcacgacctcgtcgacgggaaggacagcgtggccaaggacctggacgacctcaaggcctggaagtcgaccgtctccggcaagctggacgatctgatcaaggagaaccaggagatgaggcaagtgccatttccccgcggcgcggcgcggcgcggcggctcatccgatcgccagtggagcgtcgaggagatgcggggcgtgcaggagacgctgcagaacaaggagctggcggtgctgtccatcagcctcttcttcgcgtgcctggcgctcttcaaactggcgtgcgaccgcgtgttctgcctcttcgccggcaagggcagggaggaacccgacgcggaggagcacacaaggagcagtagggcgtggatgctcgtgctcgccagcagcagcttcaccaccctcatcgtcctgctctacaactga

SEQ ID NO: 18866 - DNA, 354 bp, Zea mays
  Peptide Sequence Number=SeqID_60645
atggccaggtcgggaagaaagaggaactgccctggccacctttatacggaggagagaaggtcggtagcgcctggattgcagatatggccgagaatcacggcagctcaggcagggtccgtgctgcttcctagcgccggtagttacccgagcgcgaggatgcaggaggctaatccgacagatgggccccacgagtcagcgaggatacctgggcaacatgcgcccgacagatcggcccacaagccagtgaaggccagagcgcgcgcgtgtgggcttgagagctgggcccacctgttgatctcctccttcttgctctttggtgtctccatccgggtttgggacaagaggctaagatag

SEQ ID NO: 18867 - DNA, 294 bp, Zea mays
  Peptide Sequence Number=SeqID_60646
atggccaggtcgggaagaaagaggaactgccctggccacctttatacggaggagagaaggtcggtagcgcctggattgcggatatggtcgagaatcacggcagctcaggcagggttcgtgcggcttcctagcgccggtagttacccgagcgcgaggatgcaggaggctaatccgacagatgggccccacgagtcagcgaggatacctgggcaacatgcgcccgacagatcggcccacaagccagtgaaggccagagcgtgcgcgtgtgggcttgagagctgggcccacctgtaa

SEQ ID NO: 18868 - DNA, 138 bp, Zea mays
  Peptide Sequence Number=SeqID_60647
atgctgggcgcagcgaggaggcagcttggatccggtcccatgctgggacaggttttgcgaagactccgaccagcggtggcggctgaggtggcgaggggctactccgccgcggcgaaggagtggtttgtgggccaatga

SEQ ID NO: 18869 - DNA, 831 bp, Zea mays
  Peptide Sequence Number=SeqID_60648
atgccattttcatcatccggtccacctagcaatgatgtaaggacgattccatatcttgatgaatgtgatgccccaagaagaaaaagaaggcacacctcatacccaaataggtcatactacggaacaccagattacgaatgctcttattgtcatgctgtgttctggtatgctgaaagggtcaggagtaatcaacaggattcatctatgagatacagcaactgctgcaaaggtggaaaaatcagcattcctcccttcaagcctcgacctaagcctttagcatctcttgcaagatttgatggtgatgccacatcgagaaaattcattcgcaatattagacagcacaattgtctatttgcttttacatcaatgggagcacaaatagataactctgtcaatgatggtcgtggtccacctctttttaaattttgcggccaagttcaccatcgtattggaactttgttaccagacgatggatctcctccaaggttcattcaattgtatatttacgacaccacaaatgaagtccaaaacagaataaatgctttagacagtggtgacagaacccaagacaatttcgatcctgtaataataagaaatttaattaaaatgcttgatgatcataacccattcgtgaagaaattcagaatggcaagagatcgtttggcggataatccgaatgaagaattcactatcagacttattagagcaaaggaaggtgatcctatccaatataacttgccaacaacagatgaattagctatactggttgtcggagatttcacattagacacattcaaacgtgatattattattgagactcagaacaaatag

SEQ ID NO: 18870 - DNA, 1677 bp, Zea mays
  Peptide Sequence Number=SeqID_60649
atgtcgaaaactggagggtcccgcttgtcaatgactggttgctattctagcaaagggaagttccggccgccgcggtgctccgagcctccgacggccgctgtggccctgtggcgggcggaagcaccctcgggcactagccttctgtttctcctcttcgcggctgacctgcaaagaatccccgaaaaagagttgaggagagtgtacgagttgggtaaagcagaggaagagatggtctgggtgttggaccccgtcgacacagtgcgcgggattcagaagcgttacatcttcgctgccgggacgtacaaggtcggccgcaaagattgtgatgtcattgttcaaactgacacatctatatcccgagtccatgcggagattgcaattgaaaagatggttgcctgggatccacattctggtgcacctgccagtccatcatttgttcgtgtaatcgaccgatcaaagtatggcacatttgtcaacaaagtacatggaacccagggcagccgtctgcataaagatgaagatatgatgcttactgatggggatgctgtgacgtttggaactggtgcatatgctactcgtaagtggagcaatgaatgtacacatgttcttgttgacggatcatgttcgttgacacctgagctcctcgatgcagttatggcaaagaagcagatcatgttgggagactggtttgaggcaatggctgaaaagaacatacacacagagatcccttcttgtacacaatacattccaaacttgactctagatgggatggtgatcaaaatggtggatatcaacctcattcagaatttcctagaaggctatacttttatcctggggtcatcagataaagtttatcaatttggtgagaagctccatggattactggaatcaactggagcaaaatacgtgcacattgacgacttttgtgcaaacagccaggactcagcagctggagacactgatcatcaaattcttgtagttcctgcacgatatccattggaattcagcaagatacgtgtgctgtttactttgtcaaagatcagtgatattaagctatttgcagctatattgtctggccgcctggaagcaacttctattgaaccacctgctttcatcgttacatcctcgaattccacggatgccactattgtggcggattcggatgttgaaatggagacagcaacttctaatcctactggtgctgccaacaagtctcaacatcacaccgagaatatctctgacgatgaaaaacaaaccacaaatataaccaacgaagttgcaaggaagggtaacgttattcacccaaaacacccagagagcgttgaagatttgaaaccgatggaggaggatgtgaaggtcatagagaaaacagcaacgtacaggtccacgggtagagacgaggatgctcgcattctaagcaaggcgccaaaggatgaaaaattagacaccagcagggatggggcttctgatgtcatatttagtcagaatctggtcgtcagaagaagcctcccccagtcagctcctgccgcaccagcagaaatcggaggcgttaacttcaagcgcttcaggaagagggaaatggtgtctggaaacagcttcaaggacctcattccgtttgcgcgggaaccatacaggcaagtgctcaaaaggcttccggtgagtccgaaaggctactga

SEQ ID NO: 18871 - DNA, 1137 bp, Zea mays
  Peptide Sequence Number=SeqID_60650
atgaaggcgcagccgctgctactgccggcgctcaagaggcggagaggccctcgcgtggcggtgctggcgctcgtcctctgctccctgctcgtgcccttggccttcctcttcgaccgcgccccctccggatacgtgacgacggaggagcggcaccgacaggaggtcgttctgcctttgttggatcacgtggcggagaagagacgtccgagtggtagtggcgctgacacgcgacaggatgcgctggagaagaaggtccccggtagtagtgcaggagtcattcatcaacaaacaccggataagaacatctccaaagtcattcgtcaacaaacaccggagaagaccatctccaaaggcagtgcaggtgtcgttcatcagtataagcaaattggtagccactccacaagtgatggtgctaaaccaaaagagctgctatttcatgtcatctcacatttttcttattttaaggcatctttcgttgctgttgtgttgatactagccaagaaggtgaaaaggctgatgaagtggaaaaagtcaaagtcttgtcaacttgaatttgggagttattgtctctggtccattgagcacaaagaagtaatgaaagattatacagtgaaaaggctaaaagatcaactcttcgtagcacgctcatactatccaagcattgcaaaacttcaaggacaggaagctctgactcaggaaatgaagcaaaacatacaagaccatgagaagattcttagtgtatcaacagttgatgctgatctaccatcctctatcaacagaaggatgaagcagatggagcaaacaatagtgagagccaaatcttgcacagtagattgtagaagtgttgacaggaagcttcgccagattctttatatgactgaggatgaagctcattttcatatgcagcagagtgcattcctctacaatctcggtgcccagacattgccgaaaagtcatcattgcctttctatgaggttgacactagaatatttcaaatcatcttcattggattctgatgattctcctggcaggttcagtagtccagaatacaggcacttcgttatactatcaaggaacgttcttgcggcttctgtagcaatcaactcaactgtgagcagttgtaaggtatttggctga

SEQ ID NO: 18872 - DNA, 2481 bp, Zea mays
  Peptide Sequence Number=SeqID_60651
atggccaccggaagcggcaagtccatctgctatcagattcccccactggttacgaagaaaacagctgtcgttgtaagccctcttctgtccctgatgcaagaccaggttatgagtttaaaacaaaaaggtgtgaaatctgagtaccttggcagcacccaaacgaatagctccgtcagtaatgaggcagaaaaaggcacgtttgatgtgctttacatgacaccggagaaagccatttcacttccttcaagattttggagtaacttgcaggcttctggaatctgcttgttagctgttgacgaagctcattgcatatcagaatggggccatgatttcaggacagagtacaagcagctgcattcattgcgcaaccttcttgtgggtgttccctttgttgctttaactgctacagccacagaaagtcctcacgtggtggttggttcatttgatcgtcataaccttttctatggtgtgaaaacatgcaaccgatctatgtcctttataagtgaacttgtgaaagatgtttcaaagaggagtgatgtgggtgagtcaacaataatatattgtacgaccatccgggacacagaacaggttcatgaggctttagttacttctggaatcaagactggaatctatcatggtcaaatgggcagcagagctagagaggaatcccatagatccttcattagggatgaagttcttgtaatggtggcaactatagcttttgggatgggtattgataagcctgatgttagatgtgtaatacactatggatgtccaaagagcctagagtcttactaccaggaaagtgggcgttgtggaagagatggactgccttcaatctgctggctatattaccaaagaagtgatattacaaaagctgatttctattgttctgaggcaaaaaatgaaacccagaggaaagcaatcatggattccttcatggcagcacaaaaatattgcttgcttgctacatgccgtaggaggttcttattgcaatattttggtgaagaatggaacattgactgtggtaattgtgataattgcacagcagtgaaaaatgagagggatttgtcaaaagaagtctttttgttgctgtcctgcatcaaatcttgtggaggacgctggggcctcaatttacctattgatgttctccgtggctcacgagccaagaagattgttgacaacaattatgataaactacaaatgcatgggcgtggtaaagattattcgtcaaactggtggaaagcacttggtggtcttcttatagcacatggtactaatgttgacctctctattcattctattattcttctgactgcagagatgattgaactagaggagcacggtagttcacatcataaagaaggtggtttgaatcttgtgccaacattagaatctgaaaaattttctgaggatgaatcaaaactctatcaaaggctcctgaatgttaggatgaagattgctcaagatattggcactgctccgtatgctgtatgtggcgatcagacaataagaaactttgcaaagatgagaccttctactggagctagacttgctaatatcgatggtgtcaaccagcattttatttcacgtttcagtaacattttcatccaaaatattgcggaattgtcgaaggagttaaacctcccgttggataattcaccatttccaccaccaccaccaacaaatccagctgcagaaaatattgctggtataccaaaacctgtacaaaacaatcttcctgggatcttgggtgatgcaaagctgactgcatgggaattgtggcataagcaggagtactcattcctgaaaattgcttatttccgcagagcagtgccaataaaagagcaaacagttattgcgtacattcttgatgctgctcgagaaggatgtgagatggactggagtaggttttgcagggaagtagggctgacacctgatatagccaccgcaattcgtcttgcaatctcaaaggttggatcacgtgagaaaatgaagccaatcaaagaggagctcccagagaatgtaacttatgacatgatcaagacattcctgactattgaggggtgtggattgtcagagcaagtctttggtaacggtaccgctgacggtgtctctagtagaatagcagagtcaccaatatcttcctgccatgcaagtgaagcaggcggaaatggtgtcccagcagcggcagaggccagtgatgcaaacccttcagcaaagagaggtcaaactgtttgtgctgaggagccagcaacaaaactgcaaaggacatacgagcatggagctgagttaactggcacggcgactgctactgtagattctgtgctagatctggttgcgagctgcaatggggtatcgctggaggatgttgccaagcacttcaagggatccaagagagaatcggtcctggagatattggagggccttgaatctgaattcacaatttacaagaaaaacgggaactacatggtcctgtga

SEQ ID NO: 18873 - DNA, 1839 bp, Zea mays
  Peptide Sequence Number=SeqID_60652
atggcggcggtgaaggcgtcggaggcgcgcggggacccgccgcttctgcaggtggtggagctatcccgcatcgtcgccgtggagggcgcggggaccctctccagcgccgaccttgccaggatcctcgtctccaacctatgcttcgcgcacaactcgccctcgctctggaagctcctgggccaggccgtcgtgtcccgcctcctctgcccgctccacgttctcgcactcctcacccctagggtgctgccgcagcggcgagcgcagcctgaggcgtaccgcctgtacctggaactcctcaagtgtcatgtcacgtcgtccttactgtcgatggaggctgggcctaatcgtgacaagatagggaagtccattgctgaagctttgcaactatcaaaggtttatggattttctggaacagagtttggacatgttgtcattatgtttgtgttggctgttgtcagtaaactgattgatagtatatttgaggattgtggctttccatctgcgatggtagaggggcaagagagtgtcaatgccatcgatgggccacagcctatggacttagacgttaaaatgggatctactgagaaccaaaatgagcatcgcgaacagttacgtcggaagaacactctcatcgctttggacgtgttgcatatgatgactgctgatagaaagattcaatcatttctgcgcttgatattcctgaacatgcctgaaaggttcagttctctacgccagaggttgagttctattgaagcacagaaggtgtccttggagactctactgccttctggacacaaaattaatgaattgttaataaatttctggagagtttgcaaaacagactatcaaccgaataacaaacacattcttggtgttcttggtaatatgggatctggtggatcccttctgggccaacttactggagctgggaggcctgcctgctggataatatttgatatatatgtggagaatgcaattgatgggaggcatctaagtgttatatcagctatccgaattataaaagaaatgaccaagacaatgcaagtgcttaacgaagcaagctggcaggaaacatttaaagctctttggatttctgcccttcgtcttgtacaacgggctagagaacctcttgaaggaccaattcctcatctagatgcaaggttatgcatgttgttagctcttataccattatcagttgctgcgattcttcaagaagaaagcgatatgcttggagctgaaggaaacaaaattcttccacaaagacaagggcttatatcgtctctccaggatctgatccagtattcaggacttcttgtgccaccttcatcagtggtgaatgcagctaatgctgcagcctcaaaagcggcaatatttaaggccaactatgaggctggggttggcaactctagcatgatggaccagactgactcttcaatgaaagctgctgggaacatgctccatcttattattgaagcctgtatctcgagaaagttgatcgatacatctgcttatttatggcctggttatgttgtaccatctgggactttaaaagatacagctttgccccaagaatccccttggttaaactttatgaaagggtctcgactttcaggaccccttattgatgctctggtcgcatctcctgcttcaagagttagagagatgacattccactcctgggacaccactcatccacagatccactctgtccccatctccactcatgcatatttggcaggaagtggtgccactgtggctgcagtagtctgtgcggctgtggccgggcaatggaggtggagtgactgtggttgtggacacggagtggattggattggataa

SEQ ID NO: 18874 - DNA, 351 bp, Zea mays
  Peptide Sequence Number=SeqID_60653
atggcgttggccagactgactgggtgggatctagcgcatgactggtcggggcttcctctccacaagccgcatgagcagtgcctactcaacaacccatgcacattcaacgccatgagtcggggcatcgtcgtcctcgagatctggcccgtgataggcaacctcactgcacgcctcctcacgtcactctcggcgtgcgtcgccactagcaagatcgaccagcgcatggtcgacaccgtcaccacacgcatggagaagaccgacgcatttagcggcggctcgcaccgcgtgtgtggagaaggcagacacagacgccataataggatggaagaggacgtaatcttgggagtgtag

SEQ ID NO: 18875 - DNA, 393 bp, Zea mays
  Peptide Sequence Number=SeqID_60654
atgcaggccaaagtaaggcaaatgatcctagaagaagagcaaaaagctagggagctggagcagcaaatcgctgaaatgcagggcaaagacctctgccaccagcaatcagccatcgcactcaatcaaaaccttcatcgcccccacagcttgcacttacccaagtacaacgacaatgcggacccaactcagtacatcatgagctatcaggtcgcaatcctcatcgactttcttggcgaggaactgtcagacgccccgcctcgtggacttgctcaacaggaacctaggtggtcgccctgccttgcggggcctggtggtcgcggacttgctcggcagggttatggtcggttgccccgcctcacggacctgctcgacagggagactttggtcggctag

SEQ ID NO: 18876 - DNA, 1172 bp, Zea mays
  Peptide Sequence Number=SeqID_60655
aaatattcaagtatctaaacaaggtggtcgtgttggatgacgatgtagttgttcaacgtgatctgtctttcttgtggaatattgatatgggagacaagttcgaagtcaaggatgagctgtccctgcgagcagcagcatttcctctaagcttgctatccttccaacatctaatataccccctagatgaaaaattgacgctggctggacttggatatgattacggaatcgatgaagaggttgcgcggagatctgcatcattgcactacaatggcaacatgaaaccttggcttgaattaggtataccggagtacaagaagtactggaagaggtttcttgtccgaggagatcgatttatggacgagtgcaactgcgagaaatgttacaagaagatccagaaagttctctgcaagctccagtccaaggagaagatcaacaagatcgactacgagaacaccaagaacaaggtcaccgtcgtcggcgccttcgaccccaagaagctttccaagacgctgagatgcaaggcctgtgatgtcatcagggacatcaccatcgtcaagcctcccgaggtgaagaaaccggccgcggaggagaagaagaagccggaggaagaggagaagaagaagaagccggaggaagaggagaagaagaagcccgcagaggagaagaacaagggcggcgaggagaaggccgccaagccagcggcggcggcgccaccgtcgacgacggtgaacctgcagttcaccaacatatgcgggatctgctacccgtggccgtgcagcgacccggcgcaccggggcggtttccaccacccgcagcagctgccgcagccgtggctgccgtgcggagggatggctccagctccagctcccgcgcctgcaccgccggttcacacccacccgcaaccgccctgcggcggtgcccctcagaaatgggcgccgtgcggcggccctccgctgtgcggaggctgcgcgtggtgcctcggcggcggcatcggctgctggtcgccgccgccgcagcagccgatgtgctgccccgggccgtcgctgtgcagagggtgcaacgggtgcaagatcgtgcgcgagaccaagttcagctacgaggagtacccttccagtgcatgtgccatcattgagctgcatccggcgctgctactgctagtgctagagggctga

SEQ ID NO: 18877 - DNA, 744 bp, Zea mays
  Peptide Sequence Number=SeqID_60656
atggcgcaggatgatccggttgtttctgctcagtggatgcacgagcacctagtgatgcctgatgttaaggttttggatgcttcctggtacatgccggtagagaacagggaatcatggaaagaatatcaggttttcagcatcagctatctcatcttcctttttgagataattgttggagctaaagtgttctggtatcctcaggtggcacacatccccggtgcgctattcttcgacttagatggcatagttgatcggacaactgatgctaggcaaatagttggttcagctgtacttgtgaaagctcgagatagaccagaaattgaggatgatgaattctattcacttgacctttattgtcaaggcaagctcgtaggaacagttggtcagggtttcaatttcggaggtggagatcttctacaggtgataatgggctcttctgagggtactactgttgatccagattcagaaaatcaagattcaatctcatcacgtgagcatgtgtggactccatttgctgaagatattgtacctgatgttgatatgggaagcagagaaatgcggattacacctccgaaggggttacttgagctcaattctcgttctgacaagagatcgaagaaagaaaggcatgcgatggttaggtctgcatcatccttttctagcatccatgctcgcatctacagccatgatttgcatcttaaaagaaataaagaatgtgtcaggtccatagtactgaaatgttga

SEQ ID NO: 18878 - DNA, 963 bp, Zea mays
  Peptide Sequence Number=SeqID_60657
atgtcggagaaccgtctgtggctagagcatctcatcggcccaacgattctagcaaagggccactcacatcgatgcccaccgtgcaacaaatctggccgtggacgccataccttgtcggtctgtcgattccgacaagtggtcactcgtgttgacgaatgttggaaggacccgccaattggtatcagagctatgttgtcaaagatgtctaagacaaagcctaaaaatgatacctccgaagatggtgtggtgatccaactgtgcgcgcgcccgaagctacccgccgccacaacctcgcagcgcgcgccctgcctccaccccgcgcccgccccgccgccccaccgcgcgcaggctcgcgcgccgccaccagctcggccagccctcgccaccgccgccgccagaaaccggccgcgcacgtccctccggcacacgcgcgcgtcccgacgcctcgccggcccaccgcgccccaccccgccagcgccccgcctccgcctgctcacgccccaccgcgcgccatcttctccccccgctccgctctccgtcgatggaagggtcgctactgccgttgccctctcccttgcagtccatgtccgtcgatggaagggtcgctacagcccctgccctcgcctccgcaatccatggacgccccccgcccccgagacgtgcccacctagagagccgctcgctcaccttgctacccggcccacacccgtctcgttctcctcctcatcccggcgctcctactactcccctccatggcgcgcaggcaaaagctctgtggggtccctttgctacgtgggggacgaatcagcgagggcgcttagcgtcggcgaggagctcatggccaagagaccatgccgttgggtgtacaggatcgacggactgccctatctgtgtgttggcaagactggtcgccagaagctactcaagcagaaaggatgtgttgtttgcatcacgggcctttag

SEQ ID NO: 18879 - DNA, 426 bp, Zea mays
  Peptide Sequence Number=SeqID_60658
atgactcacattcttcagcataccggtgttcagattcccccagttcagtcagcaccccctccagctcttcagacagctattgtgcaagccattcaggcaggaccccctcttccttcagttggtccttcttcctctctgctccggccagtcaccctggttttctcgtcgctggtcatcagctccatcagcactcagtcgccagtgccaccagctcctgctgttaccattgctgttgtggcagtgtctgtgacctcttcagctccggcagctcctgcagcacagcctccgtccgagtcagtaccagctccagcttctacgacagatcctggatccgagactgactctgaccctcagcttgcgtttgctcttctgccacgaccgcgaccggatgcgcccccaccacctccttcctcttccggtctgtag

SEQ ID NO: 18880 - DNA, 249 bp, Zea mays
  Peptide Sequence Number=SeqID_60659
atggtgggtacaagtgcggtcactgcacggcggcagccggggtcagtggagcatttgtatgccaaggcggtgaggcctggacgcgaacggggaatcgatggggacggttgtcatgtgtggggtcggagtaccctgacatgccgtaccattcaggaaatggttgatggtgtgacttggcctaccaccctgccaccgggttggacggtcgagtgggatgttgctccggcaggagaggagcacgaggagtag

SEQ ID NO: 18881 - DNA, 978 bp, Zea mays
  Peptide Sequence Number=SeqID_60660
atgcaaacatcgtcggaggtggtgacgacgaagaagaggatcgcgacgaccaccctcctcatgacgccgacgcccacctcctcctccacggacgaccactcctccacggccgtcatcaagcgcaagcagcgcaccaagaggccgcgcccctccgcgcccgcgtcatcgtccgagagcaccaccaccgaggaggaggaggacatggcgcactgcctcatcctcctggcagcgggcgccgcccatgcctccgatccatcgccggcgctgctgccgtcgtccacggcaccacaccagagccaggcgccgcccccgagggccgagaggtacaccagccgcaagtacacggaggcggccgccacgccggacggcgtcagggccggcttctacgtctacgagtgcaagacatgcaacaagtgcttccccaccttccaggcgctcggcggccaccgcgccagccacaagaagccgcgcctcgccgccgtcaacgtcgacggcaccaccaccaccaccacagcaacgacgatgaccgcgtcgccgtccccaccgcctcccctagctattgctgttcagccgccgcctccgcctcgccagacgacgccgatcgaattcccggacgtggccgtggccaccgcgctcagcctcagcagcagcagcagcgtcgcagccgccgcgagcggcaagccgagggcgcacgagtgctccatatgcggcgccgagcgctgggcgggccacatgcggcgccaccgcccgctcaacgcgccggaccgcgcggtcaccgtcgccaccggtaacagtaacagtaagaaggaaggcatcaacctggagctggacctcaacctgccggcgccgtccgacgaggaagccgtcgtgtcgcttcttccgccgccggccgtcatgctcggtctcggccagttcaacgacggcagcaaggctgggcatatgctgacagcctcagcactggtggattgccattattga

SEQ ID NO: 18882 - DNA, 501 bp, Zea mays
  Peptide Sequence Number=SeqID_60661
atgccagccacgcgcccgccgctacctgcccgcctccagcaccccgccgcgcgtgccccgccgccacccctcgcggtgatctgtgtgggcgatgtccacggctacatcacgaagctagagagcctctggtccaacctccaggccgcactccccgtcaacgccttggccaccgcgctggtcatcttccttggcgactacaacgactttggcccgcacacccgcaggcgccatgtcttcctctacggcaaccacgaccttgccttcgcggtgttcgttggggcgctgccgccgcccgacggctccccgttcttcggccacctgcgcagcgccatctctctttcctccctctctcgctgctccctcccccgccgccctgttccgcatccgacggctgaaggatttggtgatcccgccccgctcaaccgcgcccgctccgcttgtcaccgcggcctgtggcacgtcctcaccaccctcacgccccatctcttctccctctcatga

SEQ ID NO: 18883 - DNA, 1333 bp, Zea mays
  Peptide Sequence Number=SeqID_60662
ggtttgctcgcgtctcctccttcccttggctgctgtcgtgccggtcggcggcgacagcaagggagggaacatgtcgaagaagaacaatcttgccaagaggaagaagcagtacgagttcgacctccaacgggagaaggaggccaaggagaagcaggccaagaagctgcaagccaagaaatccaagatgaagcaccggggcatcggggcgccgggtgtccccggccactcggcggtgctccatgacccgccgcccgccgggtaccggcagcatcttgatgctgtctctgctgggtacgcattccagaccccgcaggttgggggttcccacattggacaggggtaccaccatgtcgaggcctcaccccatgtggcgcaatacagctccggtggcggcaccagctccggcggtgatatggacattggcatgggttcggctgtgtgcaccaatgttaagggggagctggggagcgggcctgcccaagatgagcaggtgaagaagaagcggggtaggccaaggaagtataagcctgatggggcggtgactctcgggttatcaccctcttcatcattaacacctcactcggccagcttggggatgggaaccatgattagtgctccaggttctggatttgggtcggagggatcaggggcttcaggcttgggtgcgccatcagagaagcgtggcagggggcggccacctggctctggaaagatgcaacagttggcttcgcttggaaagtggtttcttggctctgttggaactggttttactcctcatgtgattattattcagccaggagaggacgttgctgccagaataatggccttctcacaacaaggcccaagggcagtgtgcatcatttcagcaactggagctgtttctgcagcaacccttcaccaggattcagaatctggcagtgtggttacatatgagggtcggtttgagatcctgtgcctttctgggtcatacttggtggtagatgaaggtggcggcgcacggacccgaagtggagggctttgcatagctttgtgtggtcctgacaacagggttattggtgggagtgtaggtggagtcctgatggcagctggagcggttcaggtgatagtggggagcttcatgtacggaggaggttcaaagaagaacaaggtgaaagccgagttggacgcggagcctgaggaggcgaacgccggcgaccaagaggtggcacttgcggagcacagcagcatggcccctcatcctgccatgagtggtggtggcgggtgggcatctggcatgatgaggcagatggagtcgagaactcccaacatcgatatcaactccatccgcgagtag

SEQ ID NO: 18884 - DNA, 953 bp, Zea mays
  Peptide Sequence Number=SeqID_60663
atgcaggcggcatgcaaccgcaccaagggggcgcacccttccgacttcgacgcgtccagcatggaggcccaggcccacacgtcatggaccgggaaaggggataccccgaaagggatccttctccacgaaggaaacgggccccgagcccccctactgctcagaggttcgaaggctggcccctcggaggggttcaacagccgcctcagagcactcgtgctccacgcccactactggtcagaggttcgaaggccggcccctcggaagggttcaacggccgcctcaggccactcgggctccgcgcccactactgatcagggcaccgcccgcgtcgctccgactgctgtgccactcgacagagtgaggctgacagcggccaagtccggcctcgggcgccataggaagctccgcctcgcccgacctagggctcggactcgggctcggccccggaagacgatgaactccgcctcgcccgacccagggctcggactcgggctcggccccggaagacgacgaactccgcctcgcccgacccagggctcggactcgggctcggccccggaagacgacgaactccgcctcgcccgacccagggcttggactcgggctcgaccccggaagacgacgaactccgactcgcccgacccagggctcggactcggcctcggcctcagccgacggtctccgtctcgcccgacccaagggctcggactcaacctcgaccttggaagacagactcgacctcgaccttggaggagcctccgcctcgccctacccagggctcggaccgaccacgtcacaggaggggccatcattaccctacccttagctagctctggctacggggaacaagaccgacgtcccatctggctcgccccggtaaaacaaataatgatgacgccccgcgcgctccgtgacgacggcggctctcagcccccttacggaagcaaggagac

SEQ ID NO: 18885 - DNA, 375 bp, Zea mays
  Peptide Sequence Number=SeqID_60664
atggaccgcctcctgctctcccacccacccctccccgcggcaggcaccgacggcgacctcctcgagctcgatgtgctctggctcgccgccccatccacagtagggctcgggatcctcgtgaaagggaaatgtgcccttgggccatttctaaggattttggaacagaaaaaagaagaaaagaaaaggggagagaaagacttggctgtgtgcagccaagactcagctcggtctggagcaccggactgtccggtgtgcaccgaacagtgtccggtgcgccaggttgactctgagcgaactggtcgctctcgggaattcgccgacggcgtaaggctaaaattcactggactgtccggtgtgcaccggactgtccggtga

SEQ ID NO: 18886 - DNA, 276 bp, Zea mays
  Peptide Sequence Number=SeqID_60665
atggactgcggacggggcggcgggccagagcacgtcgagctcgaggaggtcgccgtcggcgcccgccgcggggaggggtgggcgggagagcgggaggcgatccatcgcatccgctcctgctctggggatcaccggcacggcggatcttcggcatgtgaggtggaggcgggctgggcgtgtgcgaacaagggacatgcgacacctgctagactaggcgaggtggctacactccagatcatgcctagtacatttttcttcttcgatgaaggcaagtga

SEQ ID NO: 18887 - DNA, 426 bp, Zea mays
  Peptide Sequence Number=SeqID_60666
atggaccacctcctgctctcccgcccacacctccccatggcaggcgccgatggcgacctcctcgagctcgaccccgcctccacctcgcatatcagagcgccgccgcatcgctggagatctgccatgttggtgatccccggagctggagcggacgcgattgaccgcctcctgctctcccgcccacccctcctcgcagcgggcgccgacggcgacctcctcgagctcgaacctgcctccatctcacatgtcaaagcgccgccgcatcttcggagatccgccgtgccggtgatccccagagcaggagcagacgcgatggaccgcctcctgctctcccgcccacccctccccacggtgggcactgacagtgacctcctcgagctcgacgtgctctggcccgccgcccggtccgtagtccacagtccataa

SEQ ID NO: 18888 - DNA, 327 bp, Zea mays
  Peptide Sequence Number=SeqID_60667
atggggaggtgtgggcgggagagcaggaggtggtccatcgcgtccgctcctgctccggggatcaccggcacggcggatctcctgcgatgcggcggcgctccggcatgtgagctggaggtgggctgggcgtgcatgaacgagggacacgcggcaccagctaggctaggcgaggcaggttgtggtggttgggaagtatttatagcccccaaccaccttgtagccgttggccaaggctgcaggcgatgggcgcaccggacagtctggtgcgccatcggacagctgcaccagacagtccggtgccacaccggacagtccactgctctctga

SEQ ID NO: 18889 - DNA, 942 bp, Zea mays
  Peptide Sequence Number=SeqID_60668
atggtggtagtcatgattgaagagcatcgacactacttatctaatgtgatctctgcactggtggaggaggagttggttcgtaagggatgtgagccattcttggcctgtgtaagtgtttcaaattctggggactctatagctacggatatcagaatagtaaaggatattctgaacatctttcctgaggagctaccgagtttacctctgaatcgtgaagtggagtttgggatagagctccttcctgatcggtttgtggtggtattcattgatgatatactggtttcctcgaggattgaggatgagcatgatgagcaccttcgagtcattattcagactttgagggaaaaacaactctatgctaagtttaccatactgagagaggcgcatggtagcccttatgctatgcatcctggcgaaaataagatgttccaagacctccgtgagttatattggtggccagggttgaaatctgaggttactgattttgtgggcagatgtttgacttaccaacaggttaaggctgagcatctacagtcagttaagattcctctttggaaatgggagcgcgtaactatgaattttgctaataggttgcctttagcacctactaagaaggattcaatatgggtcatcaagtatcaattgaccaagttcgcccacttcatactggttcgtactgattattctctacagaagctagcgaagctttatatttctgagatagtgagactgcatggagtaccaatttcgatcacctctgatagggatcctcgtttcatgtctcggttttggaggaagttacatgaggctctaggttcaaggttggactttagtattgcattccatcctcaaactaatggtcagtttaagagggtgattcagatactagagaacatgttgaggcactaccgctctgatcttactcatattgtccctgtttaa

SEQ ID NO: 18890 - DNA, 225 bp, Zea mays
  Peptide Sequence Number=SeqID_60669
atggccacacgtatgagcacacgatgtatccacggatggggtactagaggccaaggtaaaggccgtagaggggctcaagctaagtcctcgtcaacgggcagtctgccaaatttggatacgagtgagaagccagtgtcacccgctactgagactgagcctcatgatcgcatggttggggatgactatgctaaggattttggagagggtcgttgggcccaatactag

SEQ ID NO: 18891 - DNA, 393 bp, Zea mays
  Peptide Sequence Number=SeqID_60670
atgcgaggatcctctggagagcttctctggagcctgggcgcgaggatcctgcaagccggcggctggagaaaggcgagcggcacggcgacctccacaatgcggctgttgaaggccgagaaagcagtatgggtatcctctgcaaaaggcactctgtctgcgccaaacactccaactagggactatgggcccttgtctgccaaatggaatcaggatagggcagccccggacgagcactcccgcccagggaatctaggtgcgaggtatttgtccccctgggtgcagactcccctgggtttccctgccctggctgccaaaggagccctcaaactgtgtggcacacccaggaaccgttggagtgcgagggggtcatgtcgtaccccctctaggcgataa

SEQ ID NO: 18892 - DNA, 3027 bp, Zea mays
  Peptide Sequence Number=SeqID_60671
atggcggcgcccgacccgtgccggtgccggtgccgggggcccacctccgcggccacgcgcacctcaccaactgcatccacctccgccaccaccacggggcacgcgcacgggggagcgggggcgggaggcgcgtcgtcgtcgggctggcggcggagccccgcatccgtggcgtctgcgacgctgatgcgcgaccttctcgcgctgcagcgctcgcgatcgctccgggacccgtccacgcgccgctccgtcgagtcgtccagggtggcggccgaccccgacgccggctccggggatgacgtcgatctccccgccaagtcccgccgcagcgccggggcgctcaaggcgctcctggaccagctcgccgagaacccccacccgcatccgaaacccggccgacgcccgccccgccgcttcaaacgccgggccggccgccgcgccaccgctgtcagtaagcctccagaccgcgcggccgcgctctccgtcaactccagctcccaggaggccgtctgcggcaacaagtacttgttccatggaggcggcgatgacgacgatggcgcggaggagctgcagcagcatttgccgcaggacttgcgcaacgtctgtggcattccatggaactggtcgcgtctgcaccaccgcggcaagtctatcatcgacatggccggccgcagcctttcgtgcggcctttctgactccaggtcggcggcggggcgaaagtctgaggctggcgccgcgtcaggtggccacgtcaatgcctcgcgtccccttttccccgctaaatccgagaggctggcctcgtcgaccagttcggactcggacgcgctgccgctgcttgttggggctgcgacctccggtgcgcgcaaccacattggcgccatttctggaagctactctggagagcttgggattttctctaaccagaccagccagatggactccgacctgctctctgagtctcagtcagggcagaagtcacaggcctcgcagcatggccgtggtcgtcaccgtagcctgacgcagaaattcgcaccaaagacgttcaaggacgttgttgggcagagcttggtggtgcaggcgctgtccaacgccatcctaaggaggaagattgggttggtgtatgtgttctatgggccacacggcacgggcaagacttcatgcgcgcgtgtcttcgccaaggcgctcaattgcctctcctctgagcaccccaggccctgtgactcgtgcacggtgtgcatcgcccacaatcttggcaagagcaggagcctgatggagattgggcctgttggcaacatcgacatagatggcattgtggacgtccttgataatgtgatgctttcaccagcaccatcacactacagggtgtttatatttgatgactgtgatactctgccagctgacacttggagtgctatctctaaagttgtggaccgggcgccccgccgtgttgtgtttatccttgtcagtccaaaccttgaacttcctcatatcatcctgtcgagatgccagaagttcttttttccaaagcatagggagtccgacattgtcaatacattgcagtggatttgcaccagcgagagtctagatgttgataaagatgcactgaagctaattgcatcccgttccgatggatctttgagggatgctgagatgactcttgatcaactcagtttgctgggacaaaggatttccttgactcttgtccaagaattagttggcctggtgtctgatgataaactggttgatttgcttgatttggcactatctgccgacacggtgaagacagtgaagacactacgagacatcacagaaaccggtgttgagcctttagcactgatgtctcagcttgccacaataattactgatattcttgctggttcctatgcatttaatcgagaaaggcccaagagaaagttcttcaaacgtcctaccttgtctaaggaagatatgggaaaactacgtcaggccttgaaaatactatctgaaactgaaaagcagttgagggtttctagtgacaagacaacctggcttacagctgctctgcttcagcttgctcctgataaacagtacttgctgcctagttcatcaactagtacaagtttgaaccatggtttgctggttggttcctttcctgataggggtatagggaggtcgtcagcagttgagcataaatgtaacctggcaggcacgtcttatggggaaggaactgttgaacacacagaaaatggtcatgtgttatcaaccagttctgtcaaaggaaatgagggaactaaaaacagaaaagcggacaatgaaatgatctggcaagctgtgcttgagagtatccaatcagatacattgagaaaaatgatggctaaagaggccaggctaaactctgtcagcctaggaacagcaccaacagtgcaactaatatttagttcacgtatcaataagttcaaagccgaaaactacagagctcagattctgcaggcatttgagtctgttcttcattctgcaataatacttgaaatccgatatgaatcaaagaatgacacaaaagcaggtcacgttccatcaatgtttccttaccctgagaatgactcctccaatgtgacactgaggtcctttactaaacatagtccgctctcgtctagaggtgagaatctaattacgaggcttaaaaaggatagtgctgtgaagggagctaactctagtaagactacatggatgcaatctgatccccacatattaacagaaggtgaaataattgaagttggaccttctcacatgcattggcatgctcaaacaaatagtggtgttcttgacataaatggaagaaaaaaggagaatgtatgggaggaagaagcttcatcatcaccaaaccaagagagtgtaacaaatcaaaaaggaagaaatgggaacagacagcgtcaacagaacagcatagtaaaaggaaaggtatctcttgctcatgttattgggagggcagaagcttgttctcaacaaggaggctggtctagacgaaaagctatatcgattgtcaaaagctag

SEQ ID NO: 18893 - DNA, 405 bp, Zea mays
  Peptide Sequence Number=SeqID_60672
atggaggtacacatcttgcccagggagatgcttggccactccacctttggtctgtcaatgtggctcctcaagtggctcccggtccacgttgtggaccgtgttcttctgtgcatagcgcgggccatgctcggggatactgctcggcttgggctaaagcggccggcctctggtcctcttcagctcaagtcactgtctggaaagaccccagttcttgacgtcggcacatttgcaaagatcaagtctggagatatcaaggtacgacctgccgtaagacaggtatcaggaagagcggtagaatttgcggacggtgagttggaggagttcgacgccattgtgcttgcgactggctacaagagcaatgtccccttctggttgaagattggtaagctacagttcttcttatga

SEQ ID NO: 18894 - DNA, 483 bp, Zea mays
  Peptide Sequence Number=SeqID_60673
atggccccccttgtgacgtggtcggtccgagccctaggtcgggcgaggcggaggctcctccgaggtcgaggtcgagtccgtcttccgaggtcgaggctgagtccgagccctgggtcgggcgaggcggagaccgtcttccgaggccgaggctgtgtccgacccctgggtcaggcgaggcggagtccgtcgtccagcgtcgaggttgagtccgagcccagaggtcgggcgaggcggagtccgtcgtccagtgtcgagcttgagcccgagccctggggtcgggcgaggcggagcttcctatggccgcccgaggctggacttagccgatgtcagcctcactctgtcgagtggcacagcagtcggagcgacgcgggcggcgctgttctcttgtcaggtcggtcagtggagcggcaaagtgactgcggtcacttcggctctatcgaccggagcgctgtaacactccaaaatcatacattggtgaattaa

SEQ ID NO: 18895 - DNA, 378 bp, Zea mays
  Peptide Sequence Number=SeqID_60674
atgaacgtatgtgagctcactcttgctgtctcacaccccccacaggtcaagaacagaaacttcgtcacggcgtcctgcttggcaagctcaggccacactacctctccagcgacgcctacggcctacctcattgatggcctcccctgctccaacctcgccgccggcgccgcgaagtcccccgcgaatctccccggcgtctgcggcaagacgggagctggtgaacaagattacaagacccatcaattgcctcctccaaccaccgtgtgttcccaagagaaggcccaaggctcaacgtcctcgctccatgcctcgccgcagcaggactgcaggagggtggccggcgttggcccctgttcccccgggaccagtggtgtctga

SEQ ID NO: 18896 - DNA, 405 bp, Zea mays
  Peptide Sequence Number=SeqID_60675
atggcgaagaggtgctctcagcccaaactgcaacagggcatctaccgagttgatggatctagggatattggcgaccagcctcgggcggccataggaagctccgcctcgcccgaccccagggctcgggctcaagctcgacactggacgacggactccgcctcgcccgacctctgggctcggactcaacctcgacgctggacgacggactccgcctcgcctgacccaggggtcggacacagcctcggcctcggaagacggtctccgcctcgcccgacccagggctcggactcagcctcgacctcggaagacggactcgacctcgacctcggaggagcctccgcctcgcccgacctagggctcggaccgaccacgtcacaaggggggccatcattaccctacccctag

SEQ ID NO: 18897 - DNA, 627 bp, Zea mays
  Peptide Sequence Number=SeqID_60676
atgtcgggagatcacgccaagaaggagatggagaccggcgaaaagcccactacaagccaagggagcacttcatcggaaaagtcccgcaccaagaggagggagaagaagaagatctcctccaacaaagggaaggagaagaaatcctcttctcaccacaaagagaagaaggaaaaatcttcttcccacaagccgcatcggagtggggacaagcaaaaaaggatgaggaaagtggtctactacgagaccgacacttcatcaacatcgacctccggctccgacgcgccctccgtaacttctaaacgccaagagcgggataaagactatgatgaggatgaggtggcccaaatcgagcacttcaactctcaagcaacgacaatactcctcgcctctttaagtagagaggagtataacaaggttcaagggttgaagagcgccaaggagatttgggatgtgctcaaaaccgcgcacgagggagatgagcttacaaagatcaccaagcgggaaacgatcgagggggagctcggtcgcttccggcttcgcaaggggaagagccacacacatgtacaaccggctcaagaccttggtgaaccaagtgcgcacctcgggagcgtaaatgggatgaccagg

SEQ ID NO: 18898 - DNA, 366 bp, Zea mays
  Peptide Sequence Number=SeqID_60677
atggacacactaacagatgatgtccccggcgccgtcctagtgcaggaccggctgcaggtcgccgccaccaccgaccggctgcaggttgccgtcgccgaccaagcgcagggaggccaagtttcgaaggagatgaacaatttggcagctcgtcgcctctcatttgatgtttggttagatgaaccacatgttacatcagttgattcatcttctcacagtttaagtacaccaacaaagacttcatatattcccccaatgtattcgtatttcaaacctatatgtgcagatgaaacgaagcctgttgttgggatgtcatttgattctacggatgatgtggaagagttctacaaagcatatgcgagagtgtag

SEQ ID NO: 18899 - DNA, 207 bp, Zea mays
  Peptide Sequence Number=SeqID_60678
atggcttcatctcagcatgttgagatggaggctgcgaaacttctacataaacttatccaggagtcgaaggatgagcctgctaaactagcaacaaaactttacgtgatatgtcagcatatgaaactaagtggaaaggagcaatcactgccatatcaagtcatatcaaggtggatatttactttgctacttttagaaatgagaaaatga

SEQ ID NO: 18900 - DNA, 372 bp, Zea mays
  Peptide Sequence Number=SeqID_60679
atggggatgggaatgccagagccacatattcctggagtacccgacccagtggctcccgtactagagccccctgcaccagagattcccgagccggaaagcccaacacctgtgtttattccacaaccgctatggatgacttcggttcactgtagtagtggcctaacctttaagtttccttgcatgcctcggaacttgctcagggcttcaggattgaacgaagtcatagtgacctacatcgacgtgcgctgccagcgtgttctcagactctactgtgctgagtggcatgtcacagctgaggtttatggccctgatgtttttggaggtcaagtggtgatagggagacactgccatcgtcgttcaagccaactttga

SEQ ID NO: 18901 - DNA, 2265 bp, Zea mays
  Peptide Sequence Number=SeqID_60680
atggagacagttgtgaaccaacatggaattgatatggatgcattgcgatcatcacgaattccatttgctggtggtcctcaggcaggggattctagtggtgtcatgtcaaaggacaaggaggtcattggtaaccagtctcccatggtcggaagtgatgcttcccaaagtagtggacaagctggattatggcagcttccatcaggttcaaccgatatgataagacatggggcatctatttcaggtagggtacccacagggccaaataggggagatttctcagcagctgatattcatcaaggctccatgtcacaaaaaagcggtagatcctctggcattgaaagccctgcaagtctgcagatggaggacaccagatctatgaattcacatgattctttgaaatccgatgagaaaacaagtaagaaaacctcttccaagagaaaaaggatggattcaaaaggagctggtgatttgcgttcagaagacaactcaaagtcagatgttatctccactggacagaataccaggaaggggaaacaggttggtaaggctggtagacaaggtcagccttccatgggaattgagcatgagcagcaacctcataaactgcaaggtggtactggtcaggtaccacctatacatggtggtgcaccttttctcaggactcgctcagaaggtccttctgggaggacaatggacaagactaaaccatcaaatccattctcaatgggtcaaattccaaattttcctgaagggctggcttctactggtgctccaatcgagttgcagaaaagtatacagggtggagcaagtttatttaatcctggttttggctggaaccaaaatccacaagttcaaaccttgaagaattctcaaggttctattcataatttagtgaggtctggagttactgttgaagggaagtcccatgcaagaaaggcaagttttactgagtatatcaacgcttcagagcatggcatccgaacttcattttctggcacccatcccaggaaggtacatcttgaaattgctttgggcagagggcctcctgcagaaagtgacagtgcaggtcaaaggggcagcgagggcagagtgtctgatgctctgggaaaggaaaatggtagcagtcgggagaactctggtgtcttttgtaggcaaactgatatctctagacttccagccacatctgcaggaagtattgcagaggatgattccttatcgaaggatccagaaaatgctacaaaaaaaatcaagttagctgaacaggagaagtcattgatggaagtagaaaatgtccagcaagcttctgttatgcaaggaactagttctgaaatgcgttcccaagaaactgcatctcaaaatccatatcgaccacaacagtcatattatcaaggagatacaagaagaatcgcctcggatatccataggactgatgctgaaattttgaaccagaatttaagttggggaggccagggatctactgctttgggtggtactagacagcttctgaatcaggaaactaaagaatcacttgcaccttcaaagtcacaccatatgcctgttgatggttacaactccaatatacaaggaatagatcggactccagagatagctggagctggtaatgatgttgaaaattgtagccacgtagcagatattgtgcctgagcaggctgctgatgaaggagatgaggacctctcagagcatgaggatttattgtcatctccaaagcacacaatgacggaaaaatggatcttagattaccagaagagaatttacaatgagaaacaaaagagaacattggagcagcataaggagagcgttaattcatccgaagatctttctgcaaagaccaagagcgtcattgaattgaaaaagcttcagcttctgccacttcaacgtcgtcctaatacatccgacttagagcgcataaaatcactgaagaaacataggcatgggcggcgggtgaaacagcttgaaaaaattgaacagaaaatgaaggaagaaaggcaaaagagaattcgtgagagacagaaggaattctttgctgatattgaagcttacagagagaaactcgaggataacttcaaggttaagagagagcgcttgaaggggttcaatcgatacataaaagaatttcacaaaaggaaagaaagaattcatcgggagaaactggataggatccaacgcgagaaaatcaacctgcttaagaacaatgatgttgaaggttatcttagaatggtcaaggagagatgcacatcattataa

SEQ ID NO: 18902 - DNA, 4651 bp, Zea mays
  Peptide Sequence Number=SeqID_60681
atgaaaatagcacatgttgcggtggccgataagcctgttgagaagcaaactgcttcacgtcgccgcagaaagaaaacatctagtagcgaggatactggagtcagcactagacaaagatcagctatgaaaagatcttactacaacacctctgttgccgttgatgatattggttctgctgtgatcccaaatgaaaaatcaggaataacgaaggaaagagatgtcagttcaattcaaagtacatccaatgaactaccaaatattaactcaccattgtatgagaagtctggatatgattctcaaccaagcacacctatagctgtccccatcaatgaagacactcttcctagtggttttgacacctgtactaattctatgataactcttgccacatctgccaactctgctgaagatgataaaccagttgatttgcaccttaatgcacctgtttctgttgattcccaaaaccaagaacaacacatgacagggaaggaccatttggcagtgtgttctagaatctttgctactcagttacagacggacactgcaaatcctgctattgatcataaaccaggaactgcccagtttgaaccatctgcttccttgccccagaattcaggcaaggatgctactgcactaccttctgaggttgacagtgctgctccaaatagggcatcaagcaggaggaggaaagggtcaactcgagaaccacgcaccagaagtaattctgcatcagctgcaagtgaacgtcgtgcccgacttactggattgaagcaggcagaggacataaagaagttagagatgtcagcaacgccgaccacaacagtgtgtatttcatcggtagagcaacagggagctgcttctttaagtgcgaagattaccaatgcttctgtttctgaaggacagaagaatcctggaaattatatgccttctgccatttcaattcccgtggggagccatgttctgggcctgggcgcaacaagtattgaagaaacaactgccactatgataactcaggctcctgcagtttcaaaatcagaacgaagaaaacttccaggaggcagtcaacaaggtattcagtttgagagttcagcatcaaaaacaaagatggtatcagctgtggaaccagcacctgcaaatgttgaatgcatgcaaggtactgaagttaatagttcagaacagacaatagtttctgctactgaaccagcacctgcaaatgatgaacacatgcaagagcaaccaacaaatatcgtttcatctgtggaatcagaaccttcaaatgatgaagagcacacaaagcatgaagtgtttcttgcgactactggtgataatatgcttgcttctagtgcaggaactgaaatattgcgggatacagttgagcatgctgcttgccagccagaagcagtatgcacagatggaactgcaaggcagtctgaattgtcgcaacttgatagaaaagcctttcatgatgcctcatataaatacactcatgggtccactaaagatgatggtatcttgcccagtgaaggtacttctgttgatgttactggttctaagcaggatgatgtgaacattgttggcacacaaactgatgatgtttctcggggttctagtcattttccagttattttacaatcaactgagtcagatcggcctccaggtcaagtgaagaatttggagagtaggatggagcaggtgaaaacagaagaagctttggttaacagttctggtggcaatcaaactcacagtctgggcgatgaaccttctcataatacatcattagcaagaaattctccctcagaacactcgaatgagcgttgctctgatcaagtaattggtgaaaatttcaaaagtaaagaaaatattgttgaagtccattctggcattaatactgatggccccgatgaagctctgaatgcattgcacacccaatctaaggaggccagcatgacagatattggtgtacctactgatggtgatagatgtgaaggtaaagggactagtgtcgaggtctgtgctgacatgaatactgatgggcctgtggctacccaggatgcttcgtccacgaaatctgataaagagtcctgcatgatggaatgtggtgtgtctaccgatggctgtcccacagtttgcaaaacacacaatgatctccagggtcatgtatcttgtgaagaaacctttgttaggactggtggtgatgacacaacccatatcaccaatgcaaattatggttctaataatgaaagtgaggccaccattgctagtcctgttgaaaccacacaaaaactgatggaagggagcactgttattgtgtcggagaattctgatttaaataagcaatgccacacattgcatactagaaatgatcctcctgcaaataccctgttgatagttgagtctaacaaagttacttgtgatgctgaaattgtttgtgctagcaggttagaatcttctggcattgaggctgaaacagtgggtatccaagagtcagctcttactgattttgagggaacaaaaggaactggggatttgggtgacagaactaacagtcaactgcatgatgatgttcatgggacatcatgttccacgatagctcttgtatctgagaaagaaccttccgaagatcttaccaccggtagccattcagaagcatctaatttacttgctgctgtagaacaaactcaagaaactactgttgagaaccaagagatcatagatgcagtagtgtttatggatgcctgcaaggcagaacctgttggtgattttactattgctaaaggagctgaacagactgtagaaatggttcattatgttgataagcaatctgctgtattagactatgttgagacacagacaaaacgaacttcggtttgtggttctacgctaaatgaatcccctcaggctgcagggttggaagaagactgctctgtactgaagcatggtgatcctacttcatctgagcttcttactgtagcacctaatccaatcggtgaaacttctgttattcaagtggaaccagaggcaagaaactcagatggatactgcacaacagaggctggcagtgctttatctgaaactgtcatgggattggagccaaataaagaaactgcggttccaatgcaagagaatattggagaagctaatgataattttaataattgcgaagcacacaataattcggagattcatgcatttgaagtgtcgatggaaacgcagtcatcagaagtcaaggaagtatcttctattcagtctggtgcagcaaatttgagcacacagacaactgcactgcctgatgtaacaggacaaaccagtatggcatcgactggagaactagtatctacaaatgaacacatacacatgcaaggcactgaaatcaattcagagcaacaaacaaagatggtttcacctgctgaatcagcacctgctaatgatgaacacgtgcaagacattgtgattcttagttcagaacagcaaacaaagatggttttagctgcagagattgacgcattatgcgtccaggagactgcaattattgatcttgggggagcaagaggaacagttgacctgaatgacataagaacacaggttcctgcattacctggaagggatgtgctaggtgatgaaattaagggttcagaacaagcaaaaatcgaatcgattgcagagatcgaaacagtgggcgtcaaggagaatgtcattgctgatcataaggaaacaggtattgaggttgatgctcatgttttggaacaagcaaagatggtttcagctctagaaccagactctactccagatgtggagagtgctggcaacatggcagggcagaggtgggcaccgatgaagaggacatggcttgtggcaggtgagaggcagctaggcgaccttgacacccagaaacttttcttgcctggacgactaggcaacgactttaaaaccatgaacataagcagtggtgctgatgtggacctaataactagccaaaggaaaacagactctgaagggaccatttttactgatcctcctgtgactaccctggtgacagctgaatctgataaagaaccttctggtgctgatgatgttggaatgattgttgtccaggaggctgcttctgttgatgatcacaatagagcacaaggtggtgaggctcattgttcagaacaaataaagatggcttcaattgcacaagcggtgtctagcatggctttagtaggatattcttcttcagaagactcaatggtggatgctgctgcccgagtaactgatgctgattttgtggatagtaaagcagctggtgtttatcgccaagaaactatgcctactcaaaccacctctaccctcccagagaacatggattctcctgcaactgctgctaccatggttgaatcgaagtttgctgcctcgtctgagcacgttgcaggacccgagccaattgatgaaacttctgttatgcaagtggaactggcaacaagcacaggggatggatgtgcagcagatggtcacaatcttgtttcatctgaaactgttgttgaagtgaagcttgctcaagaaattgttgttcctagtccaggtggtagcatagaagctaataatacttctaccatcagcgaagtatacaaagatacccagtctcgtgcatctggtgaagcatgcaatgatg

SEQ ID NO: 18903 - DNA, 249 bp, Zea mays
  Peptide Sequence Number=SeqID_60682
atggcgcggcgcggccagcagcctgtggccggcatggcgtggcccggtgccccggcactgcagcgcggcggcccaatggcctgccagcgcggcacgctcggtggctcggcagcgcgccagcccccggccagccggcgtggctcgcctgcgcagcgacccggtgcatcccgcccggtcgtcgaatccagtctcgaaaccggtcatcgtgcttgtgcaactgcgtgtgaatggggtgttgtcggagtttag

SEQ ID NO: 18904 - DNA, 372 bp, Zea mays
  Peptide Sequence Number=SeqID_60683
atggaactcgctgccatcaccgtctgtgtggatgaactaccgctgcgcatgtccaggttgccaccacagtcgacccgcgtcatcctcaccgttgtggcttcgggctgggcgctgtgtggaggcacactgatgatgcacatggaattttcgggcgtgattaggggcaaacggtgccgcaattcctcgccgtgtgcacgacgccgccgcgattccaccctcctccgtgggcagcaaccaccgcacatccaacaccgatccaaagggccgtatggcatactgattcagtcaaagcctagatctaatcctaagcgcccattcttgatcgagggatcagaaaaccccaataccccttcagtcgcaccaattgcatga

SEQ ID NO: 18905 - DNA, 888 bp, Zea mays
  Peptide Sequence Number=SeqID_60684
atggctctcccgcggggggcagtagcgaagcgcgccgcgtccattgctatcgccgacaggtgggcccatgtatcagtgaaccagcgcctcgcgctcgtctccactcacgcacacctgacccgtccttccaatgaccggtggggccgatgccgcagcggccgctcgcgtgcctcgtcggctgtggggctccgttgccagcgactccgcgtgtgctcgcatgctcgaccgctgccgcgtggggccgtcgggtcggcaacatcctcgccctcctcacgcaacaacctgcgtactgaacccgtcgggtttgtcgccaacggccatccacgattcatggggtctggggctcaacgaccgcgaagactgggtaggatcttcaattcgcctccctgtggactccatgcccctataaatttcacccgggttgtgccatcaccactttatgggttcaccggagaaccaatttggagagaggatagaacctgtgtcgggcgctccgtggtcgggctccaccacctgcgtccagcccttggtgatcgacccgtgggggagtctagcgcacaaggatgctcttcgcggcttagcctgggcggaatcgtgctccggatctccgggattcttcgccggagtgggagctctgctgcacctccgccgcgtaccgtgggcaggctcgcaacctcttcaatcgccggtgaggcacccgtattcctgttctctaggtcatcctctaggtgtagcactctttgctttagtcaattgatggaccgtgcgccgggcgggaggtcggcggcgagaatgccgctgccgcgcggggcgcctctgctcagccgtggttgcgaggtgggagaagcactcctaaccgttcatcgcaaaccaagggccaagatttga

SEQ ID NO: 18906 - DNA, 456 bp, Zea mays
  Peptide Sequence Number=SeqID_60685
atgcaggcggcatgcaactgcaccacggggatgcacccttttgacttcgacgcatccagcatggaggcccaggcccacacgtcatgtaaccggcacgccggttactacgtgcgaaaaactgcaccgccacttacgccaatgtcgcgccttctcgactgcggaatcggtgccgcgactcgaggcaaccctgtacatggcccgacagtgccaaccaagcacatcggtcatagggaccgggaaaggggatactccgaaagggatccttctccgcgaaggaagcgggccccgagccctcctactgatcaggggttcgaaggctggcccctcggaagggttcgacagccgccccagagcactcgggctctacgcccattactgatcagaggttcgaaggctggcccctcggaagggttcgacagtcgcctcagaccacttgggctccgcgcccactactga

SEQ ID NO: 18907 - DNA, 1515 bp, Zea mays
  Peptide Sequence Number=SeqID_60686
atgtttttcgacgggtcgctgatgagaacaggagcgggtgcaggcctgctcttcatctcacccctcgagaagcacctccgctacgtgttgcgcctccatttcccagcgtcaaacaatgtggccgagtacgaggctctggttaacgggttgcacatcgccatcgagctaggggttcggcgcctcgacgctcgtggcgactcgcagcttgtcatcgaccaagtcatgaagaactcccactgccgcgacccgaagatggaagcctactgcgacgaggttcggcgcctggaagacaagttctacgagctcgggctcaaccacgtcgctcgacgatacaacgagactaccgacgagctggctaaaatagcctcggggcggacaacggttcccccgaacgtcttctcccgagacctacatcaaccctccgtcaagaccgacgacacgcccgagcctgaggaggcctcggcccagcccgaggcaccctcggcccccgaggcacctcgagccctcgttggaaacgccttccgacaaggtttctactggccaaccgcggtggccgacgccactaggattgtacgcacctgccaagggtgtcaattcgatgcaaggcagacacacctgcccgctcaggccctgcaaacaatacccatcacctggctgtttgctgtgtggggtctggacctcgtcggtcccttgcagaaggcaccccgcgggggcttcacgcacctgctggtcgccatcgacaaattctccaagtggatcgaggttcgacccctaaacagcatcaggtccgagcaggcgatggcgttcttcaccaacatcatccatcgctttggggtcccgacctccatcatcatcgacaacggcacccagttcactggcaagaagttcctgaacttctgcgaggaccaccacatccgggtggactgggccgccgtagctcaccccatgacgaatgggcaggtagagcgtgtcaatggcatgattctgcagggatttaagccgaggatctacaatgacctcaacaagtttggcaagcgatggatgaaggaactcccatcgatggtctggagtctgaggatgacgccaagccgagccacgggcttcacaccgttttttctagtctatggggccgaggctatcttgcccacagacttagaatacggttccccgaggacaagggcgtacgacgaccgaagcaaccagaccagccgagaagactcactggaccagctggaagaggctcgggacatggccttactacactcgacacggtatcagcagtctctgcgatgctactacgcccgaggggttcggtcccgagacctccaggtgggggacttggtgcttcggctacgacaagacgcccgagggcgccacaagctcactcctccctgggaagggtcgttcatcatcgccaagattttgaagcccggaacatacaagctggccaacagtcaaggcgaggtctacagcaacccttggaacatccgacagctatgtcgcttttacccttaa

SEQ ID NO: 18908 - DNA, 324 bp, Zea mays
  Peptide Sequence Number=SeqID_60687
atggcggtagccaaaagaatgaaactcgataagatgcaaataacaaaacaaccaatttattgtctgcaacatgtcgtctaccaaaccgaaacaacaccttgcctaagttgcctattaatattcagagcagcaagaaacgtcacacgctcgagcgctcgcaaggccgcgttggacaaagaggtggatgagtacaagttcacctatgccataatgctaatagatagggatgacaataaggataaggagaggatccacgatagtcgcagtagagaacgggagcgcaaagagggggataggcgcctgctcagagaaatgggagtgtaa

SEQ ID NO: 18909 - DNA, 417 bp, Zea mays
  Peptide Sequence Number=SeqID_60688
atggcgcggcgcggccagcagcctgtggccggcatggcgtggcccggtgccccggcactgcagcgcggcggcccaatggcctgccagcgcggcacgctcggtggctcggcagcgcgccagcccccggccagccggcgtggctcgcctgcgcagcgacccatccacgcgctcgccttcaccgccgttcgccagaacagcgtctcgccacgagtttcgtcgtcgctgcacagcacggtttacgtcgctctcgtcgccgtcgagatgagctttgtctaccccggtttactctccgtctacttcgtgcgcagtttagacgacgttcgtctacccctaaacgactcccgtctaccccccgtctacctcgtctatccccctgcgctaattaattttctattcaattgtcgattagtaaactga

SEQ ID NO: 18910 - DNA, 183 bp, Zea mays
  Peptide Sequence Number=SeqID_60689
atggctgttgcgcttgtggggagggggagaggaggggaaggagcagaggcgctgggcgaggtggttggcgtcatgggcgagatgggtggggggtttggggaaggcgttggcgccgggatgggccaggtgggcctcgcgcgctgggtaggccgcagggcgctgggctgcgctggctggggctag

SEQ ID NO: 18911 - DNA, 297 bp, Zea mays
  Peptide Sequence Number=SeqID_60690
atggtgaccatgaccatgacaaacaccatgatgttgatgtcggcgatggcaatgacaacgatgacgatgattatgatgtggggttttggattgaacaagaacgacatccataaaaaggatggtgatagacacaaaggaaaatcaagtgctcaatatggaaagagggaagagaaaagagaaaagcaaaatgcgagggctcaagacaaagttatagctaggacattttgttttgtcgatcaagacatagtaaagttcattaccagatttaggatagacggtcgtgctattaagacataa

SEQ ID NO: 18912 - DNA, 275 bp, Zea mays
  Peptide Sequence Number=SeqID_60691
gtcgcggagaaggcaaggatcgctctttcatcgcctccgccctctccggcggccgcatgtctacaagaaaaggaagcacagatgtccatgagtttgatggaacatttcagggttcttatgcgaacttcaaagtgacatcagtcattggacatgtcttaagtgtagatttcccccctgcatatcagaactgggaaggaactgatccaatggacctatttgaggctccagttctgagatctgaatgcaacccaaagttgactctaggtggaatctga

SEQ ID NO: 18913 - DNA, 993 bp, Zea mays
  Peptide Sequence Number=SeqID_60692
atgaaagctggaaaggtattccaaggaatgcgtgaagctgtaatcaattttcctccaacatacaaatttcaaaagcaccaaccaggtctcggaggttatgattcgggtgagaagaaacggatacctgcttggtgcgatagggtactatatcgtgatagccgttctgtatcagtagctgaatgctcattagagtgccctgtagttgcttcaatcacatcgtacgtggcatgcatggatgtcacagagagcgatcataaacctgtgaggtgtacattcagcgttgatattgcaagagttgatgaattaataagaaggcaagagtatggagaaataattgagtcgaatgagaaagtacggtctttgttacaagatggttgttttgttccggacactacagttagcataagcgagatcacactggagaagcaagaggatattgtattccaaattgcgaataaatgtgaaacaagcagagcagctttcgaaatcctgtgtgacgggcagtcaaccaaggaagacggtactaaatcagagcttcttccaagggcatcgtttggcttcccactttggctcgaggtccaaccagccgtcggtctgataaaaccaggtgaaacggtagaaattactctgcatcatgaagatttttacacacaggaggaatttgtcgacggaataccacagaactggtggtgcgaagacaccagggacaaggaagccgttctcagaataaacataacgggcaacagctcaaccaaaaccaagacgcacaccatcaacgtccaacatcgctgcccaccaccatcggcgccaccgccggcgatgaaccaacaaccggtggctgccgcgccaccaagcaatgtccttgccagcgagggacactcatcaaagcgttcctcgaagaagagccagtccaagcaccgggaacagcagcaggattacccgcagtttgggacctcagaggtacacgacctgtgccgcatgcggtgcccttga

SEQ ID NO: 18914 - DNA, 1692 bp, Zea mays
  Peptide Sequence Number=SeqID_60693
atggcgccgagattaagcttttgggttgaactggttagtgcgtccactctaacactatggaggccgaaagcgaaggtgtcgccttgctttacgcccttatcgcttaaagataaaaagggggtcatccgccttacttcgccttaccgccttaacaactatggccgaagcataggtctaaggcccggtccccgttatcctcgtacagagagcactgcatatccgtcatcatttgattttcgaggtgcacttgctgcactattaaataatcctctatggtccaatgatgtccggaaattactggatgctggttttgttaagcctcgtcaaggtcatgatgctggggaccatcctccaatcactccaatgaggtcagcaacagaagcatctttgggaactgatgcttggaggctgtaccaatacatatgccagcacttcattggaactgttagtcctgattgtagatatacaaggactgccattgagttcacttcaggtggtgaaacattccactgtgttgggtatcgagtcacttctaaaggatttacatctatcatgccatggctggctgtcagcgagaacagtcttcctgcatttaaaaagggagactctgttagtattcataaggctgacatatatgagggaagcactacaccacctgattacctcactgaaagtgaattgatttccctcatggagaagaatggcataggtacagatgcatcaattcctgtacatataaacaacatttgtgaacgtaattatgttcagctgaatgcctctaaggctctaatctttcttgaaggtgaattctggaagaagattgaaaacatggatgctctgttcgaggcacagttttcacctttggcagactctgggcgcctactaagcaagtgtggaaaatgtggtcggtatatgaagtacatttccactcagccaatgaggttgtactgtataacttgtgaggatgtctattatcttcctcagaacggttcaattaagctttacaaggaaatcgtatgccctcttgatggttttgagttgcttttgttctcgatggtgggacctgatgcaaaatctttcccactgtgccctttttgctataattgtcctccatttgaaggcatcgacaaactctttggtgctctcaagctcgatgacaccggcaaggttgggaaaggggccggcatgccatgcttcctttgtcctcacccgacatgcaagcaatctatgatcactcagggagtttgtgcttgtcctgagtgtagtggtaccctgattcttgatccagttagtgcacccaaatggcggctttactgcaacatgtgtaattgcattgtattgctcccacatgctgctcacaggatcaccactacagataagaagtgcctaacatgtgaatctactatcattgaagttgatttcaacaagaaaaccacccctcttcaagatggagctacattgcatgagggatgtatcttatgtgatgatctgttgcattcactcattgaaatgaagcatggatctgaaggaaccgctataatgaccaccacgtgcgtttcatttgagtttggattaggaagaacaaggcaagtgatgatgaagcatgagcatgtctgcttcttcgtgactgctgccaagactgccccggctttggaacacaggaatttcacaggaattagttcaaaaacatag

SEQ ID NO: 18915 - DNA, 477 bp, Zea mays
  Peptide Sequence Number=SeqID_60694
atggcgcgaaaccgtcgcgcccccaccgcgcctcccccagcattccatccatggcgctccctccgcgctcgcccccgctctctgttgtccgccgcccccacccccgttctcctctctcgcgcccccactctctgctgtccgctctctcgcatcctccacggagtcgtgggccagtggctccacggtgatggactgggtcagcctcgtggtggccgagatgcagcgcgacgatggcttctcgctgctgatctacgcctggaagagctaacaccggcgacaacgacggcagcaccttcaccacggctccgccacactacctcgtcaatcccgtcattctcgcgaaaatcaccgccccctcctcagtccccattcgcgtcccgacctcgtcgtggaaggccgagcaacccgccattcccgctcttcccgaccatcctcgcccccaatctcgcctccacggaatccgaccaacccgggtga

SEQ ID NO: 18916 - DNA, 274 bp, Zea mays
  Peptide Sequence Number=SeqID_60695
atggctgggaggaccgcgcccgcctccctcccctccttctccctcacgcccgactccctcgctgcccctttatcctggatctcgtcatggacgctaccacgaccaacggttcgacggagcaggcgccgcactctgcgccacgggacggagcccgtccccacccgacaccggccacctccaccccgagctcctccgagaagagatgagcgcgcccgcccccgcgcgcaccaccaccaccacgcgtccacgcccctcgtgcaccttctcgcccgag

SEQ ID NO: 18917 - DNA, 555 bp, Zea mays
  Peptide Sequence Number=SeqID_60696
atggcgaaagctacaccagctgcagctcttgctgcctccctgaaaatggtggctccagcaataccaagcctcccacctcgtccacgcttgctcctcgcaactctccagcgccgccccagcgcccacatcagcagcaccccagtggtggctcgggtggcggctctggatcttcgcagcagtgctggaaacgcggcaagcgcgatggtggacacactcctggtggcagcagccacacctttggtgcccccaactcatccatggaccatgggccacaactactacaacccctggacggacgccatctatgtggctggggcaacgtcctccctcttcctcttcttcacgtcctcctgctgggccgacctagcagtcacacgctctcatcgccggaacgcccggacagtggggtgtcccgctgcagcttatgggcctccacctggctatgttggcccggtctcctctccgcctggttgggaccaacacaccttggccaccaacttccagaccatgactcttcaacgaccacaagactggtattttggtactggtgcttag

SEQ ID NO: 18918 - DNA, 1362 bp, Zea mays
  Peptide Sequence Number=SeqID_60697
atggctgatgaatcgaaagcaataagttctgttccaaaatctgtagagaaagccgatgaaccgaaagcagtaagttctgttccgaaatctgtagaagaagtcaatgaaccgaaagcagtaagttctgttccgaaatctgcagaagaagccaataaaccgagagcagtaagttctgttccgaaatctgcagaggaaggaagcgttagccgtgaaagttctaaggtttcagatgattatgaagagctaaaagcaatggctaaagttgtggggcaagcttcgtcactgatagccaacactgtacccaaatccgactcaaaagaacatgaatacgctgaactgtctcggtgcttggaggaaaccaagaagaagttactggaactggaagcaaatcatcaaaacgaactgtttgaactaacattgcagttaaaagaattgaagaacagcaactccaagaaagacgaagagattcgatctttacgtctgaaagtaagccgaaaccaaagcggtatcgccaaaaccaacaacgctgaccaatccgaggaattcgaatgcataccagcgtctgcaactacatcagcaattccagcagaagagaaagaagtgaaggaagtaaaagaagtgaaacaagagaaagaaaagaaagaagtagctctgggccagcttttggactcggaaaaatcggcagtggaagaaaggttccggacgaacatcgacgaactgctagaagagaatttggatttctggttcagattcagctcaacattatacgaagtacaaaagtaccaaaccggggtaaaagatttagagagtgaggtattaaaactagaggaaagatcagaaaaccaagagggaagcagcacaagcaagtactcagtaaaatcggacgtacgaccattatacaagcacctgagagaaatacagacggagctgagcctgtgggttgaaaaaagcatgtcgctgaaagaagaactgaagaacaggttcacgtccttatgcgaaatccaagaggagatcaccaaggcgttgaaagcaagtgcggaggacgaggagtttaggttcacgagtttccaagcggcgaaattccaaggcgaaatattgaacatgaaacaagagaacaacagggtgggtgatgaattgcaagctggtttggacctggcggctgcattgcagcgtgatgctgagaaggcactgaccaagttgagtgaagattggggagtacagggttccaagagccgccacagctctggccaacaggaccctcgctccaatgtgcccttgagggtcctttatctttggtgtcaaacaaaagaaacaaaagacttccatcttttccgtggttcagggccaacggaagtaccataa

SEQ ID NO: 18919 - DNA, 1161 bp, Zea mays
  Peptide Sequence Number=SeqID_60698
atggcggatgaatctcccatttttaccagcttccattaccaagcaccaaagcttgaagacttccttggcgattcttcatcgatggttcgatattcagatagccaagctgaaacccaagaagactcatctttaactcaaatctacgatcccagtgtctccacttacttcgatcaccaccaagatctcaaccaaataactgggtttcaaacgttctcgacgaactcgggatcggaagttgacgagtcgtcatcaaggggtcgaactcagttgactggcgttgagttacctggtcactcgattgaatcatctggtaacaatactactaataataacaaagccattgtttcggttgactcagataacaagaagatagctgatacatttggtcaaagaacttcgatttacagagtatacttaggtggttatgataaggaagaaaaggctgctcgggcttacgatctggccgctttaaaatactggggtcctacagcaaccaccaacttcccgatttcggattattcaaaagagttggaagagatgaagcatgcgaccaagcaagagtttattgcatccttgaggaggaaaagtagcggattttcaaggggtgcatcggtttacagaggtgtcacaaggcatcatcaacagggccgatggcaagcaaggataggtcgggttgcaggaaacaaggacttgtaccttgggactttcgctactgaagaggaggcagcagaggcatatgatattgcagccatcaagttccgaggtgtcaatgcggtgaccaacttcgagatgagccggtacgatgtcaaagccattgcccagagttctcttcccattggtggggcagctaagcgcttaaagctttcacttgaatcagagccaaaaccgatagtgaaccagaagcaacaaccaccaccaccccggtgcagctccaacagcaatattataagttttgctcccatgaagcagccggtttccgctattccttgtggaatccctttcgatgcagcagcagcaacggctgcattttatcaacagaatatctaccagcaccttcagactgccaacaccagtgtctctgaacccccaggttcttcctcgacaacggtgatgtcgcagtcagcggctgagttctttttatggcctcaccgatcctattaa

SEQ ID NO: 18920 - DNA, 2091 bp, Zea mays
  Peptide Sequence Number=SeqID_60699
gggttttccttcctgccactgggcatggacgctcaaagtcaggcggcttttagtggacagaaaaagatgcttcctccacctcctggaatatttcaagatcgtgaggagctcattgaacatgtgcgggactttggggctagccaaggatatgtagtgactattaagaagtcaaggaaagacagaagagtcatccttggatgtgacagaggaggcatttatcgcaataggcgtaagattgatgaaaagattgttgaacatgcttgtggagtggcaactctgcaaatgggagaatttgtgccaaatgcttctaatggtattgatacattctgcattagagaaccacttggcgtttgtgctgggatatgtccttctaactttcctgcaatgatccctttgtggatgtttcctattgcagttacttgtgggaatacatttgttcttaagccatgtgagaaaaatccaggggcttcaacaatcctggcagcattagtaaaggaggctggtttacctgatggtgtcctaaatattgttcatggaaccgatgatattgtcaattatatctgtgatgatgaggatataaaagctatatcagttgttggttctaacacggctggcatacatatatatgctagggctgctgctggagggaaacgtattcagtccactataggtggtaagaatcatgcgattataatgtctgatgcaagcatagatgctactttgaatgctctagttgctgagggatttggagctgccgggcagggatgcatgggtctaagtacagctgtttttgttggaggttcaatgccatgggacgaagaacttaagctgcgtgccaaagcacttaaagtgaatgtaggatcagatcctggcgcagatgttggtccagtgattagtaaagaggtaaaggataagataaacagattagttcaatgcagtgttgatgctggtgctaggctgcttcttgatgggagaaatattgtggttcctggatatgagaatgggaattttattggtcctactataatatgtgatgttgcatccaatatggagtgctacaagatcagaatggtggcacagcagtggagggatttaccgagtgtaggagtgtcctcaggtttgcatctatcgtctgagacagatatgacaagccggggagtttcttctggattgcatccatcatcagagagagattcactctaccatagagtttcgcctgctgtgtctcaagaatcggagggtaactcaccaaatcacacaatgttgctttcaacttcagagagggatctatcgaacccaacaatcacatctccgcctccaactgctgatggtgagttgccaaatcatggagcatctcttgttctacctccaacatctgagatggatatggaaaaccaagacatgtcccgaactatgtcacaaggaagaaagagagacatatcaagccaaggagtgtcatcaataacaccctatcaatctgaaagagtttatacacagcaatcacaatggaaagaatcttcggcaccctccgagaggatttatatacccataacgtctcataggaataacaatgcagctccaactgttcagaggtcagacactgcaataggtttaactcaagagcgagcatatatgccaacatctcataaaaatgacggcctggttcctgtttcaaacaggaacagaagcatttctccagcttccgaccagatctacatgatggcaactactcacttgaatgacaccatgggtcaaaggattcagagaactgatgcacctatattcccaacttctgagcgcatatatgtacctgcaacccctcacaggtccgaccacatgggttcgacctctcaaaggaatgatgttgcattacgaccaggctccgagagtttatacatgccagcaacatctcgaaggaatgataacattgcttcagcttctcaccaggccgattcaatgcctcaaaattctgagagcatgtatatggctccaatcgttcaaaggatgtatgctcaaaatacaataatatctatggatgattatcctaatcaaggaccaactatgactttgccaacctcacataggatatag

SEQ ID NO: 18921 - DNA, 975 bp, Zea mays
  Peptide Sequence Number=SeqID_60700
atggcgagtttgtatgaattatcgcaaattgaatgcagccacaaagatgatcattttccactttcttcattgaccaaattttatgggaatgattttgatctttatgctaacaatttggataaattactgaagcgatgtgaggacactcatcttgttctgaattgggaagaatgtcagtttatggcaactgaaggcatcgtgttaggccatcgtatcactagtcagggaattcaagtagacaaagctaaggtggaaatcattgagaaattacctccactgacaaatgtgaaagaatttgacattaagataaaagaccgcaatgggttagaaaatcaagttacagatcatttatctagattggaagctgacagtgaagatgggaacatatttcaaactgtcgacgcattcctagaagataagttatttgctgttgatgcaactcattggtatgcaaatttggttaattacttggtgtgtggtaagctcccattgagtatcaagggctataaaaaagaaagatttcttcgtgacgtagtgaagtaccattggaacgagccgtatttattcaaggtatgcaatgaaaacatcattcagcagtgtgttccggaagaagagatgctttcaatccttaagcactatcatgatgctccttatagaggccattttggagttgttgttgactatgtctcgaagtgggtggaggctgttgctgtcccaaaggatgatgcagagatagtgttcaaaatatttgagaagcatatactcacccatttcgatacaccaagggcattgagtagtgatcaagtgtgggcagttaagcaagtgaacatcgagtatgaagctgttagaaagaaaaggctgttagacatcaccgagctagaagagattcgaagaaatgcttataaaaatgcctatgaaaatgctgcgatttataaggaaaagaccaaacgatggcatgacaagattatattttag

SEQ ID NO: 18922 - DNA, 249 bp, Zea mays
  Peptide Sequence Number=SeqID_60701
atggtcaagagacacgcttgtgtctcaggcgtgtgggcatttaaaataggaacacacgaccgtgtcccagctcgtgtccgtgcccgtggacacaaggctgtgtcacctgacagtgtgtcacacacggttgagacacacgcccgtgtggacgaacataggctattttacaagccattttttcacccaatttggcatgtacctacactcaacgttgcacatttacaagccatatcaaggcatccaaattag

SEQ ID NO: 18923 - DNA, 573 bp, Zea mays
  Peptide Sequence Number=SeqID_60702
atgacggctacccctgttgatgatcgtgggccatctagcccgattgaagatggcgccctccctgctgatgatgaagatgaagatttaccgtcggtgctgcacccttccgatgagggcgcggagctcaaaggtggttctgtatatgtcccgaagaaattgatgctccatcctgggatctctgttctgggagttggggaagcgtgggagatggggtctcttgggccactgggcctacgtctggtccccgacgtcggcgatgtgtcgctgggacgggccctcgctgggctagtctcaccccattgtctgtcctctgcgactgaagctgcagaagatgacggtcagtgcaatgtttcggctcatggcaccttggatccctctatcaccattcatgagagctcaaccttgaaggtatatagcagaagaaggcagagggatcccttgcggcaggtgcctagcgcacatgaagatactctggtggaatctaggcatgataaagacacaaccccggttagtgattttgtaaccatggtgacgaagaagatggatgacctgctcccccgccgacacccctga

SEQ ID NO: 18924 - DNA, 678 bp, Zea mays
  Peptide Sequence Number=SeqID_60703
atggatggctccgaaccccccgtccctcccctccctggcgcccacacccaccgccacagcccctcgctggacttcgctctaaacccggcgaacaccagcacaaatcacactctcctggcgccagggcgcactgtgcacacaatttcggtatcccaggctgggcgatcaaaattccagagatggagtaacgccagccctatctcttcatcttccggtggctcttgggtggcgccgtgctcctacaaagaggcagctctctccagcggagggagccctgcttccactcctcccctgggggctactgttcttcctcgatcgtgtggagcccctctgcccggtgcgggatttggctaccatgctctcgggtgtccacttcaggtggctcagagggcagtgaggccgcaccctgagaatcaggttggccgtgttccggtgtggcagcgtctcggaaagatgcaggatcccggtctgcatggaggagtctctcaaggtttcaagcgaaaggaatcgatatggaggccgattgctccatcacagccgaccaccgggggagaactcctttcaccaccgttcatggcccagggccccggagagtctattccactggtcattggaggggagaggaagaggcgttgggaaaaacgtcggtgggctgcggttggcgatgtccatgattag

SEQ ID NO: 18925 - DNA, 498 bp, Zea mays
  Peptide Sequence Number=SeqID_60704
atggaggtggcgaccgggggcgcgggcggcgcgtccagacacgtggaggtgcagactggcatggggaagggccctgtcgcaccaggaaggctgcttttaatcaaaaccatcatcaggaaggctgcttttaaccatcttcctgctatgggtatacgtgatttgcttctgccatcaatacaaaatctgttaaaagatctggatgctctagaccctgcgcacaaggaggctttagaaatcataagccgggaaaggtcagggggtacgctggaaagcattagcaaggtaatgggggcgcatcttgggattgcatcatctgtcagcagtttctttggtgagaacagtctcctcacaaagaaagaaggtggcgaggaacatgatcctgctggccccaccgctcctgagcaaaacctgcaggctcagccagagagcacgaggtttggtcgcataatgaggagcggctttggagacatattgcgaggtcaaagcaaaggacagtga

SEQ ID NO: 18926 - DNA, 696 bp, Zea mays
  Peptide Sequence Number=SeqID_60705
atgccgcctcctgttgacgtggtcggtccgcgccctagtttgggcgaggtggaggctcctccgaggtcgaggtcgagtctgtcttccgaggtcgaggtcgagtccgagcccccgggtcggaggcgtagaccgtcggctgatgacagggctaagtccgagccctggggtcgggcgaagcggagttcgtcgtccttcggggctgagcccgagtccgagccctggggtcgggcgaagcggagttcgtcgtcttccggggctgagcccaagtctgagccctggggtcgggcgaagcggagttcgtcgtcttccggggctgagcccgagtccgagccctggggtcgggcggagcggagttcgtcgtcttccggggctgagcccgagtctgagccctggggtcgggcgaagcggagttcgttgtcttccggggctgagcccgagtccgagccctggggtcgggcggagcggagttcgtcgtcttccggggctgagcccgagtccgagccctacggtcgggcgaagcggagtttcctatggcgcctgaggccggacttggctgctgtcagcctcactctgtcgagtggcacagcagtcggagcggcgcaggcggcgctgtccccctgtcagaccggtcagtggagcggcgaagtgactgcggtcacttcggctctgtcgactggagagcgggcgtcaggataa

SEQ ID NO: 18927 - DNA, 1317 bp, Zea mays
  Peptide Sequence Number=SeqID_60706
atgaagagcagggaaggagctaatagtcaggttgccgctttaaggaagtctttggaagctgcacacaaggatataaaagacaaggaaaaaatgaggaaggagctgaatgactgcagagctgaaatcacagccctgaagatgtacatcgaagggactcaatcaatcaaacaattgtttgttggaactagtgatggtgtaaagtcgcattcctttgctaattctgtgggagcatcatcattgaataatgaagatgaagattcaaaaggatctgaagccataacaaataagctagcatcagcagtaaatattactgatgatacgcagaaagatcgccaagttctagaaagtagcgctgaaggttcctcagtttcagaaactccagtgtctttcacagctgttgagaatgacagctatggtacatcaaaagaagataaatctgtgtcaaatatctcatcgaataatgctttggagactataaagatagtttcagatgcacttccaaagattgttccttatgtgctcataaaccatcgtgaggcttgtgtagaattagcaaagagcgttggtgagatgaggacagaaactgagttacttccacaatgttgggagcagtcgtgcggtgaacttgccgtttatgtccgtccagagatacgagattccctcattttatccattgtgcaacaacttgtcgaagatgctgcaacagttgtaagggaagctgcaacacataacctggcattgcttcttcctatgtttccaaatctggacaaatattataaggttgaggagctaatgttccaattggtctgtgacccgtctggggcggttgtggaagttgcactcaaggaacttgttcctgctgtagtaagatggggagataaattggatcagatatcaagagtactattggctcatatcctggcatctgctcaggtgttgaagaaagctatacaaacttgcccctttgcatcagctgatccaacaagctctacaccagagaacttctcagcatcctgcctaaaatcatatgcaacaggtgactctgagtggtcagcatttgagtggatgcacactgattgcctgccagatttgatcaagcttgcctgcttgttgcctgtgaaagaagataacttaagaaccatcatcacaaagtacctcttggaagtatctggactctacggtaaagattatctggagcacattatgctacctgtatttcttgtagctgctggtgacattgatagtggcgattttacctattttcctctatcaatccagccaaaagtccgtgtcgtcaacagttggaagagtatctga

SEQ ID NO: 18928 - DNA, 819 bp, Zea mays
  Peptide Sequence Number=SeqID_60707
atgaccgcagcgccacctccgagctccgtgatcgtagctcgcccgctcgcccaccacaatcgcaactgccgagtcaattctcacgccacctataacgtcatgagagggcacgggcctatgactctcggcgatgattcaggtggcggttgttgggattgcgctcctctccgcaatcgtcgcctcgtgcgccacgccgcctcactctacttcgtcatcgacaccgtggggattgggtttgacttcgtgcgccgctacatctccttccgtgtgtgtgcccctgccctcgacgagcccgccgcatcgctctcctctatcgctgcgggtggtgctgggggagcggattcgggcaggtcgcccacatggcatggacctcgactccagtcagcaggttcagtcgtcgtgctcgccttcctctcgggcctcggtctctctgatgctgacatcactgctgtcgtcgcctatgaccccaagcttctcttctccgaggtcaagaacaagacctaccttctcagctccgacctcgaacgcattgttaagcgcaacgtcgcgttcctagtggagtgcaggctagatgcttgtgatattgccaagctatccatagttgtccctaggccgatcaccaccgacccagatcgcgttcgggcagtggtggagcgagttgaagctatcgatgtgcctcgtggcgttgggatgtttaggcacacattgctggctgttgtattgcttaacgaggaaaagatcaaagctaagcccctttttgactacgaggacaacgtgcatctcagggacaacaacagcaacatttcctttagcatctag

SEQ ID NO: 18929 - DNA, 507 bp, Zea mays
  Peptide Sequence Number=SeqID_60708
atggctgagggctcgcgctgccgggaagcagcagtcatagatggtaacagctggccgtctaaggccctatttggaagcacccaatttttaagaaactgctttatagaaattgaggctaggaaaatagttggttcagctgtacttgtgaaagctcgagatagaccagaaattgaggatgatgaattctattcacttgaccttgttggaatgagagttattgtcaagattcagaaaatcaagattcaatctcatcacgtgcggattacacctgaggatattgtacctgatgttgatatggcaagcagagaaatgcggattacacctccgaaggggttacttgagctcaattctcgttctgacaagagatcgaagaaagaaaggcatgcgatggttagggttaaggttaagaacgttaagaacgtgggtaccgtcgaacttaatgggcagccctcgtcgacccacgcaggacccataagtgtgacggccacgtggccccatcgaacttaa

SEQ ID NO: 18930 - DNA, 344 bp, Zea mays
  Peptide Sequence Number=SeqID_60709
cgcaggactttgccgaggccggcactcggcaaaggggtctttgccgagtgcccgataaaaagcactcggcaaaaacccggattccggttttggagcttgttgagaagaggtatgggaccatggaagctattgttggcaagacgaaggatacgaaggaaggtcaagtttccaagagaggagctgatttggccagccaagctttggccgttgagattgagctccgtgactcgatatggtcgagtggaactgcagttcacaccatgccaatggcagaagtggatgctggtgttccaattgctcaaggctccgtgcggatcactggtgatgcccttcttgaactctag

SEQ ID NO: 18931 - DNA, 1914 bp, Zea mays
  Peptide Sequence Number=SeqID_60710
atgagtctctggaagcagccgtcgaaactcgccatggttgtagtactgctgctgctgctatgtcatgcagtggacaaagtccattgctcgacgcaccataacaacagccaagattttcattctctgctagagttcaagaagggcatcaccagtgatccgcacggagccttgagcaattggaaccccagcatccacttctgccattggcatggtgtgaactgcagttccacgcgaccatatcgagtcacggagctcaacctcaccggccaaaacttggctggccaaatcagctcctctgttggaaacctgaccttccttcatacccttgatcttagcaacaatagcttcattggccccctacctcttcttaacaagctccgaaacctggacttactctttctgggaagcaaccatttggaggatgttattctagattggcttacaaactgttccaacttagtctacctagatctctctaaaaaccatctcacgggtcatattcctccgaacatagcctttcttaaaaagctagaaggtatcaacctttatggtaattatctcagtggggtcatccctccaaccttaagaaacctctccacactattgttagttgatctttcaaacaatcaactaaatggaagcattcctaatgaagtttggcaaataccgaacatacaaatggtaaatctagcaataaataacctatcaggtggaatcccagatactttcactaacttatcttctcttatgatattaggccttgaccacaatatgctgggcggcacattgccatcaaacattggtgatgtgctccctcatctgcaaggactatacttaggaagcaacttattttttggtacaattccaacttccctaggcaatgcttcaaatctagaagtcgtagacctaccaaacaaccttttcagtggcacaatcccaagttcttttggaaacctttcaaagttgcagattctaaaccttgaggtaaacatgcttgaagcaagacatatgtctcataatcatctacacggacctataccaaattcgattgctaatctgtccactagtcttcaacaactattcatgggttggaataacctttcaggaatagttcccccaactattggaaaacttagtggcttaactaaattatcactagaaaacaacaacctcataggtgtagttttactcctagaaaagaggacatcaagaagagcatatagatcagagcaatcttattatgagcattttgagaaagttacctataacgacttagctcaagcaacacatgacttcttagaatccaacctgattgggagaggaagttatggttcggtgtatcaagggaagctgaaggaaggcagaatggaagtggcagtaaatttttttgacctagagatcagaggagcaggaagaagcttcttgtcggagtgtgaagcattgagaagcattcaacactggaatattcttcccatcatagtttcttgttcaatagtagataatgtacgaaatgttttcatagatttaatttatgagtacatgcctaatgggagcttggacacatggctacatcacaaaggcgacgaggaggctacaaaatgtcatggcttgactcaaagtataagcatagctgttaatatagctgatgcattggattatttgcaccatgattgtggacagcaaactatttgttgcgacttgaaacctagcaatatccttctagattgtgacatgaatgctcttttgggagattttgaaattgcacgtttgtatcatgattccgagtcaaaatggacagagtatgggggaggtggtcatgcatcaacgtctggggatgtttatagttttggaatagtgttgttggagattttgacgagcagaagcccaatagatccaacgttcaaggacggctag

SEQ ID NO: 18932 - DNA, 1164 bp, Zea mays
  Peptide Sequence Number=SeqID_60711
atgaatgtagagcgcgatctccatatgacccggggcgacggcgaacacagctacgcctctaactccaggcttcaggagaagtccatactgaagacgaggccggtgctgcacaaggccgtcgtggcagcggctcacgcctgcttgtcgctctcctcaggacccggcggcgctatggtcgttgctgacctcggctgctcgtcggggcccaacactctgctcgtcgtctccgaggtgatcaaagcggtggccgactgctgccgacacgagcagcagctggccgccggcggccaaccacagcacgtgcagtttttcctcaacgacctccccgggaacgacttcaacctcgtcttccagtcgctggagctgatcaggaagctggccgccaaggacgggctggaggagccgctactgccgccgtactacgtcgccgggctgccgggctccttctacacccggctgttcccggaccgcaccgtccacctcttccactcctcctactgcctcatgtggcgctccaaggtccccgacgagctcgccgctggcgccgtcctcaacgagggccacatgtacatctgggagaccacgccgccggcggtggtagccctgtacaggacgcagttccaggaggacttgtcgctgttcctcaggctacgccatagggagctcgtgaccggtggccacatggtgctgacgctcgtgggcaggaagagcaaggacgtgctccgtggcgagctcagctacacgtggggcctcctcgcgcaggctctccagtcgcttcttaaagagggccgtgtggagaaggagaagctggactccttcaacctgccgttctacgcaccatctttggacgaggtgagggacgtgatcgcgcggagccaggcgttcgacgtcacccacttccagctcttcgattccaactgggatccacacgacgacgacgacgacgatgacgcggagatgaagatggaagaagaagacgccgtccagagcggcgtcaacgttgccatgtccatcagggccgcgatcgggcccctcattgcccgccacttcggcgagcacatacttgacgatctcttcgagctgtatgccaagaatgtcgcggtgcacctccagaaagtgaagaccaggtaccctgtcatcgtcgtttccctccaggcgaaatga

SEQ ID NO: 18933 - DNA, 258 bp, Zea mays
  Peptide Sequence Number=SeqID_60712
atggggacgcgctcgtcgtcgtgcaccatcggtggcttcctcgtcgccatggtggacatcgtctgcgcgtccgtgtcatgccacgttaccaagcctgccacgctctcgtgcttagtacagggagcgctcgagcccagggatcatatgccaggcgaacgggaaatcaaagaaatcaatttcttgattcaccgaagaggggaaatcaaagaaatcaaagactatcgtagttcggctatgccaaaggacctaccggtttaa

SEQ ID NO: 18934 - DNA, 1107 bp, Zea mays
  Peptide Sequence Number=SeqID_60713
atgacccggggcgacggcgaacacagctacgcctccaactccagggctcaggagaagtccatactgaagacaaggccggtgctgcacaaggccgtggcagcggcgcacgccttgtcgctctcctcaggacccggcggcgccatggtcgtcgcggacctcggctgttcgtcggggcccaacactctgctcgtcgtctccgaggtgatcaaagcggtggccgactgccgacacgagctggccacaggtagccaaccacaacacgtgcagtttttcctaaacgacctccccgggaacgacttcaacctcgtcttccagtcgctggagctgatcaagctggccgccaataaggacaggcaggaggagccgctactgccgccgtactacgtcgccgggctgccgggctccttctacacccggctgttcccggaccgctgcgtccacctcttccactcctcctactgcctcatgtggcgctccaaggtccccgacgagctcgccagtggcgccgtcctcaacgagggcaacatgtacatctgggagaccacgccgccggcggtggtggccctgtacaggaggcagttccaggaggacttgtcgctgttcctcacgctacgccacacggagctcgtgtccggtggccacatggtgctgacgttcctgggcaggaagagcaaggacgtgctccgtggcgagctcagctacacgtggggcctcctcgcgcaggctctccagtcactcgttaaagagggccgtgtggagaaggagaagctggactccttcaacctgccgttctacgtaccatcggtggacgaggtgagggacgtgatcgcgcagagccaggcgttcgacgtcatccacatccagctcttcgacgtcaagtgggatggaggcgacgacgacgtggagatggaagactacggcggcgtcgagagcagcgtctccgtcgccaggtccatcagggccgtggtcgggcccctcatcgcgcgccacttcggcgagcacatactcgaccatctcttcgagctgtatgccaagaatgtcgcgatgcatcttcagaaagtgaagaccaagtaccctgtcatccttgtttccctccaggcgaaatga

SEQ ID NO: 18935 - DNA, 501 bp, Zea mays
  Peptide Sequence Number=SeqID_60714
atggcgcggccatggcgcgggccatggcgtgcccgcgcggcccctgcttcagccgcggcgcggccgcgcccgcccttccccggcgtccgcccgccccagcccctccctgcgtggcgcgctcggcgcgtccgcccgcccgagcgcactaccccgcccctgcccctgtccgacgcgtggcccgcggccacggcgcgcggcccccgtccccgccccgcccggcgaactcccctgccccgtccccgacgcggcctcggcggcgtgctcgcgcagccctgccccagcgcggccatggcgcgcccgcccggctcgccgcccctgctcgcggcgcagcgcggcgtgccccctcccggcacggctccccagccccggccacaatcccaacatatgttcgggttgcaggtggcaatgagattgatggttcttggtattgactctggtaatggagaagatgaagttgtggaaggagaccaccaggagttccaggattacgacgagttctag

SEQ ID NO: 18936 - DNA, 222 bp, Zea mays
  Peptide Sequence Number=SeqID_60715
atgaccagggaactcagcatgggcgcgatgatttggcagacatgccgcgacggggctgtccacacacaaagacgacgacgtgggacgagtagcgcacacacgtcgcaacaaattgatggttgttcaaggcttgatatttcctggagcagaggcaagggtgctgggagtttacagcggtgctccacgacggccatcaccggcgtcgagcaaggggcgatttag

SEQ ID NO: 18937 - DNA, 1035 bp, Zea mays
  Peptide Sequence Number=SeqID_60716
atgcccctgcctcccctgctcccgcgcctttaccccacgccgcctccacttcgcgccggggacaggggtaacgccgtccctctctctcctggaagaagaaggccggcgcttctcgctgtcgtccgcgcaaagagaaaggacgaggcaagcttcaccgaccgcatccttgactacatcgagggagggccaaagttaaggagatggtatggagcacccgatttgcttcccaaggatggggctgcggaggatgaggaggacgagtctcaagatattgaggagtctcgggacgctgtgctagtcaccaatggcgacagtgagattggacagagaaacagataccacaatcatacaagtataaaaactgaaatatgcatgttaagaattgaaggaccgatggtgatattagcactaattctgaaaagggctagaacaaaagcacttgttaaggataaacgaaccactgaagaagcttttggaacttatgtggagtgcatggttggtgatatcggagataagtccttcacaaagagagcactaaggggcgttcgtgctataatttgtccagctgatgatggttttttctctgaaccgatcgacctcaagggtgttcaacacattgttctgctatcacagctagctctagcatcagtcatttacccctatgagatcttgatgaggttgcagctggctgtctacagaaatagtggtggtttgcaagctattatgaacagcaagctgaagacgctagcagagaaggatgaagaagtggttcttgcatctggcatcccatgtacaataatcagaacaggttctctgcaaagcactcctggtcgcgagagaggttttgattttactgagggcatagcaagcaagggaagaataagcaaagaggatgctgctaccatatgtgtggaagctctgaatagcattcccctaaagacacacatttttgaggttgcaaatggtaaggagaaggtgatagactggaaagcatggtttgaagagcagaccaaaagagaagaagaaatacagtaa

SEQ ID NO: 18938 - DNA, 150 bp, Zea mays
  Peptide Sequence Number=SeqID_60717
atggtgctagtgccaccgtctgaccgccaagtgctgaggtcggcaacctttgtgtacacgaactctgacgagcaagctactgaggatcttggggttcagctggtagagactgctgagcaggagctcgttgaaggcaagttgtgcccttaa

SEQ ID NO: 18939 - DNA, 168 bp, Zea mays
  Peptide Sequence Number=SeqID_60718
atgattggctctgtggagggcgcaaatatcatatttgtgattgtctacaaatatgctcaccactatggtgatgtccacatggtccatcaacctcaagtcggggaggataaagaaggtaaccttcagggcgacatattggtgccacttctggtctcagcttcagcctag

SEQ ID NO: 18940 - DNA, 414 bp, Zea mays
  Peptide Sequence Number=SeqID_60719
atgaacttgatgtcgtgcgctccatctcaatcgaggtcggcaacccaccaggggcaacagcacccacgtgcccgtcatctgcggcctctcgcggtgcaacaggagggacaacgaaggcacatgggaggctggaaggcccagacgcgctccaatgaggtgtgggcatctccggcggcccaacttgtacgaggcgatggcgtatcggggctgaggacacgaaaggccaagcgcacaggacatacgacagtaagcccgcctgcaccgcaccagaccgccacccgcgacgcgcccatgtcatggcgccatgggtggcggcacgctgacccatcaacgtcaccctcttccccgcttccactcgacagcctccagtttcctgagaaggaagctggtgatgagctgatcaaatttgtctag

SEQ ID NO: 18941 - DNA, 288 bp, Zea mays
  Peptide Sequence Number=SeqID_60720
atgggcggtgggtgtggaaggtttggcggtggtggagcagtagggtttagcggtgaaggccatggttggtggccgtgcggcgggagagggggcggggtctggaaggttgctgcagcgcatttgagaacaagtccccaacattggcgcccaccgtcggtgaactcatccgaccaccttcagcaagacctgacctttgtcatgccgccgaagaaagcttcagcgccaggggctgctgcattgcagccactggacccaaaccaggaaactctctctgtccgagaggcttga

SEQ ID NO: 18942 - DNA, 1911 bp, Zea mays
  Peptide Sequence Number=SeqID_60721
atggcattggcttccaaaagggagacaatgtcaaacttaatgcccctcctaaaagattgtcaaactttgttaagggcaaggcttccatgcctcaggataacgagggttacattttgtaccctgccggttatcccgagcacaaaattagaagaattcactctaggaagtctcactctggctctaaccatgcttgatgagtataagacttcggatcggttttgggcggaggcagtcaacaccgcgtgctacgccatcaaccggttgtatctacatcgaatcctcaagaagacatcatacgaactcctaaccggtaaaaagcccaatgtttcatattttagagtctttggtagcaaatgctttattcttgttaaaagaggtagaaaatccaaatttgctcctaaggctgtagaaggctttttactaggatatgattcaaacacaagggcatatagagtctttaacaagtccactggactagttgaagtttcttttgacattgtgtttgatgagactaacggctctcaagtagagcaagttgatcttgatgagctagatgatgaagaggctctgtgcatcgcactaaggaacatgtccattggggatgtgtgtcctaaggaatccgaagagcctccacaagcacaagatcaaccgtcttcctccatgcaagcatctccaccaactcaagatgaggatgaggctcaagatgatgaaggagaagatcaagaggatgagccacctcaagaggaggacaatgatcaagggggagatgtccatgatcaaggcaaggaagatgaacaagttccaagactgccacacccaagagtccaccaagcaattcaacgagatcaccctgtgaacaccatcctcggtgatattcaaaagggggtaactactcgatctcgtgttgctcatttttgtgaacattactcttttgtttcctctattgagccacacgggatagaggaagcacttcaagattcagattgggtggtggcgatgcaagaggatctcaacaacttcactaggaatgaggttttccgcaacaagcaagatgagcatggtgtggtgacaaggaacaaagcccgacttgtggccaagggatattcacaagtcgaaggtttggatttcggtgaaacctatgcacccgtagctaggctagaatcaattcgcattttacttgcctatgctacttaccatggcttcaagctttaccaaatggacgtgaagagtgccttcctaaatggaccaatcaaggaggaggtctatgttgagcaacctcccggctttgaagatagtgagtaccctaactatgtttacaaactctctaaggcgctttatgggctcaagcaagccccaagagcatggtatgaatgcctaagagattttctcatcactaatggcttcaaagtcggaaagaccgatcctactctatttaccaaaacacttgaaaatgatttgtttgtatgccaaatttatgttgatgatattatatttgggtctactaacgaatctacatgtgaagaatttagtaggatcatgacacaaaaattcgagatgtctatgatgggggagttgaagtacttcttgggatttcaagtgaagcaactccaagagggcaccttcattagccaaacgaagtatattcaagacattctaaacaagtttgagatgaaggatgccaagcccatcaagacacccatgggaaccaatgggcatctcgacctcgacacgggaggtaaatccgtagatcaaaagaaagagcacatccgggacttgccagttcttgagaaggtctctggtgtcttgggcttcaaagaagcaaaattcagtagctctttctaccgccgaagccgagtatattgccgcaggccattgttgcgcgcaattgctttggatgaggcaaacccttag

SEQ ID NO: 18943 - DNA, 1371 bp, Zea mays
  Peptide Sequence Number=SeqID_60722
atggattggttgagcagcatgctgggggaccgcccgctgaagagcgtcttcacggcgctcggtctcccggataagattggcggcgcggtaatcgacgctctctgctaccggggcgtccgcctgtggaacgtcgaggaggaggccgacaagctgcggcgcaccaaggaacgcatccgcgccgtgctcgaggacgccgagcaacgccgcttcatcgaccacgactctgtcaggctctggctccgggagcttagggccgtcgccttcgacgtcgacgccctgctcgaccgcctgggaaccatcacggccgtgtccaggctagcggccgccgagcaatcacggaagcggaagcggctatggcccagcgtcgagctcggcccgcggcagcggtgggagctggatgagaagatcgcgaagatcaacgaacgcctcgacgagatcaacacgggcaggaaatggtataggttgcaggccggggacgggacgagggcagcgtctcagccgacgcagcgcccacggttccttgaatctgccgcgcatcgcgacgagaggcccattggccgcaacgaagagaaggagcagattgtccgtgctctggtttcggatagcgcagatatggcggtgatttccatatggggaacgacaggcatcgggaagacagcactggcacaatcggtttacaaagatcctgaggtacaaaacttcttcaccgacaagatctgggtttggttatcagatagggatgggggcaggtgcaacatcaacgagctgaggaacttgaagatccgcggagagctttgcattcttaatctggaagctgccaccagcgacggtgccacggaggccaatctgcgcgggaaggagtacctgcgcgaactgatgctgaagtggagcgaggacgcctgcaaggacgaacaacagcagcagcagcagcagggcatagagaacagcgaggcggtaatcgaggcactctgtccgcacaccggcctcaagcgtctgcgcgtcgagaattaccccggaagacggtttcctccgtgcttcgagaacatcccgtccctggaatctctggagattgtctcctgccccaggctcactcagttctccgtgcggatgatgcggtctctcaggaatctgaggatacgccagtgtgctgatcttgcggttcttcccggaggcctgtgcggcctagaatcccttcgttgtctggaaaccgtcggcgctccgaatctgagaataggcgcagtggacatactgccgaggaacgtatcacgactggctgtgagtgggtgcgacgcgctagagagatggtgcctggaagaaggcgctgagagggtgcagcagattcctgatgtaaggatgcggttgaaaaactga

SEQ ID NO: 18944 - DNA, 510 bp, Zea mays
  Peptide Sequence Number=SeqID_60723
atggctcaaccaaatgcctcgggaagacttccgcctcgcccgagcagggctctgacctcgataaacgcagcagggaatcacgacgtcacctcgagcaaggacgatgaggcaccctactctggccacgcgacattatttactacactaccggaatccggctctttgccgagtgctcgacgctttgtcgagtgctttctatcgggcactcggcaaagacttgccgagtgttgccctcggcaaagtcctactctcggtaacgaccgcgtttaccgagagcagtactcttggcacagaaatacactcggcaaagaagtctttgccgagtgccgaacactcggcgaatggcggcgctcggcaaagggccgtcagcagttgtccatagctgacgtaacttgccgagtgttttatacattttttaaacaactggatggcaagttcaaggtcatgtttagtgagcatggtgctcgaagattccggtatgttcctgaaatcggccgtaacttgtgctaa

SEQ ID NO: 18945 - DNA, 315 bp, Zea mays
  Peptide Sequence Number=SeqID_60724
atgccccacatgctaggagttcggctccactgctctatgcatcgacgcaggcgtggaccccggcacggcagcatcggtaatggccctcgtcgtggtggcgtgggtgctggcctcgtctcggctgcgggggcatgtcccctggcgtgggcgcgagcccctggcatggcggcacaggcgttgaccctcgatgcagcaaaaacaaataaaaatgtgtatactggtcactttgtggacagtaacactcgacaaagtcgttatttgccgactgtcagggccatcgccctcgccagagaagcaacatctgggcacccctag

SEQ ID NO: 18946 - DNA, 1458 bp, Zea mays
  Peptide Sequence Number=SeqID_60725
atgggattaagcttcacttttcattcagttaatcagttccctgtgaatctaaacgcactcacttgccggcagcgcactccccactcccaccggttccgccctggtctacgttctgtcgttctgtggctgagctccaaagtccaaagattagtgaatccaaaaggcgaccaaacagatcccccgctcctgtgctccgctcatgttagagaaccccctgggaaaacgcagcggagaaactctggagatcgaaaccccggcacgcagctaggcgaactgcacgcaactgcaggtcgacgtctgatccatttcttgtcgcttcagcttctggtgctggtcttcttccagttgcatcctggttacctggtgagggtcttcctcgaccgactcgattcgaaggatcgttcttggttcttgacgcctcactctctctggatttgctcttgcagtgtcaaggggcggttggtgtctggtgtagttggagggcagagcttcgcgggcggcgaagaagaagagcagcagagagactctgctgacactgaccgagggagatcggctaacattggagtattcatttgcctaaagtgttctggtgttcacagaagcctcgggacacatgtttcaaaggtgctgtcagtcacactagatcaatggacggatgatgagatcaactccatgatagaagttggtggaaactcttatgccaatgctatatatgaagcatttctgccagagggctatcagaagccgcatccagattctagccaagaagagagagctgatttcatcaggtcgaagtatgagttgcaagaattcctgaagccaagcctaaggttagtttccagcaataagggctctttagaggcgaccagctctcgaaagcatatggataattctgtgtctctttctgctagtttcagcagtgaggctggaatggttgagttcattggaatactaaaagttaaagtgataagagggactaaactagctgtaagagacctgatgagtagtgacccctatgttgtactgaccctaggacagcagatcatttcagctgacaaacatcagcattgttctctgcagaaagcaaaaacttctgtgagtaaacgtaatctgaatcctgtttggaatgaagagcttaagctgtcagttccccagcactacgggcctctgaaacttcaagtgttcgaccacgacatgctatcgaaggatgacgagatgggtgacgcagagattgacctgcagccgatgatcagtgcagctacagcgtttggcgaccctgatctgctcgcggacatgcagatcggcaagtggctcaggtccccagataatgcgctggcaagggacagcgccgtcaatgtcgttggtggcaaggtcaagcaggaggtctctctgaggctgcagaacgtggaatcgggggaggtggaactggagctggagtggataccactcaatcagtag

SEQ ID NO: 18947 - DNA, 1293 bp, Zea mays
  Peptide Sequence Number=SeqID_60726
atgaactggcaatgcatttacagtgcagagtacaatccagatcagtatttatgggagccagagttcactcttgccggaaggaagtataaaaggctagatttggaggcaatggatgcagagcagatgcaaatgaagccgctgtcatacttcttccttcaaatatcaccctttttacacttgactttgcgggatcagggctatcaagtggagattatgtcagccttggttggcatgagtctgctatatggagcagaagacccctcaattgctggcatggttctggatagtgctttcgctaacttatatgacttaatgatggagcttgtagaagtttacaaaatacgagttcctaagttcacggttaagatggctgttcagtacatgcgatgcgtcattcagagaagagctaaatttgacataatggatcttaatgttgtccagtttgcacccaagacgtttattcctgcactatttggacatgcttcaaatgatatgtttattcagcctcatcacacagaccatattcatcaggcttatgcgggggataaaaatctaatcaaatttgagggtgatcacaattcgccaagaccccagttttattacgactctgtttcaatattcttctacaacgttcttcacccacctcagtttccttcaacctgcacacataaacttgataagtattataaccttggtgcttttaagggtgctgctggtactaatgagagcttattgtatgagatcatcaatggtctacgggcagctggcactgatgcaggaagttcatcagctgctacagctagtttcacgaatgctacaaaatcagtagttgaattgctgacagagagggtaaatcagctatctgttaaaaatgataatgacttggattttcttttggatgaaaaccataaccttactgagatggacggtaacacaggagagtgtcatttagaggataaatcaaacagacaaacagatgaatgctgttcgtataccagctcaaaccgagagagctggggaagatgttcttccttgggtggagctagtgatggattgtcatcaggcgaacagcctgagatacctaatcataagcttaagagcttgacactaagggctctagcaaccccactgagacgggtacaaaggaaacctctcgcgatcccgaaggagaagaatcgatcactgtggaagaggttgaaaaaggagaggcaacagatgggggaaaacatatcccagcgtctgcggttgtgtctccaaggccaggctcgacacaagagaaccaaatcgtcttga

SEQ ID NO: 18948 - DNA, 615 bp, Zea mays
  Peptide Sequence Number=SeqID_60727
atggacaagatcaaaggcctgaacaaccctggacgtggaagtggaaaaagaaagacgagagtgacgaccgagctgacaaacatgacaaaggcgctcagaggagccctggatgctgaagggactgtgggtgggaggcagtgcccgaccaagaggtggagagctggtagagcagagcacaacaggcgtgctggcggcacaggcgaccggttggagcaactgagcagcggggacgagctccgacgccaacggcatgggtcgagggacgacagtggcgtagggaggaccaccggttggcggctgtgtgcggaggaggcgtgcacagacgcgcaggaaggggtgcaacatgagggcgtgggtgtcgggcgtagagcaggcgtgcgcgcggcggatctggcgagggcactagcagagacaccggcacgcggacgacgcacggacgtcatgtccggcgagcgcggcgatggatggtggcatcggtctgaggctgagcctgatgacaggagggaggcgtggatccaagcaggacgacgattaggacagaggaagggcggcttgcggccaggcagagggcgcccgttggctggggtaggatggtgggagggaagagaaaactaa

SEQ ID NO: 18949 - DNA, 1731 bp, Zea mays
  Peptide Sequence Number=SeqID_60728
atgggagtttctcttctttcatcaccagcatttctggttttcttctcatttttcactttctgtctacttgttgaccccgtacttgggatcaccaggcactacaagtttgatgtcaagttgcataatgtgacacgtttgtgtcatacaaggagcattgtttcagtgaatggacaatttccagggcctcgcattgtagcaagggagggtgatcagcttctaataaaagtggtcaaccatgtgcctaacaatgtttctatccactggcatggcattcgacagcttcgaagtgggtgggcagatgggccagcatatgtgactcaatgtcccatacaaactggtcaaagctacgtttacaacttcaccattgtaggccaaagaggaactctcttctggcacgcccatatatcatggctaagagccactctttacggtcccattgtcattcttcctaagcgcggcgtaccttacccttttgctaagccttacaaggaagttcccatcgtcttcggagagtggttcaatgcagatcctgaggctgttattagccaggcactccagactggtggaggtccaaatgtctctgatgcttataccatcaatggtctccctggaccactttataactgctcagccaaagatacattcaagctgaaggtgaagcctggcaaaacttaccttctgcgcttaatcaatgcggcactcaacgatgagctcttcttcagcatagcaaatcacacactaactgttgttgatgtcgatgccatttatgttaaaccatttgagactgaaacacttctcatcacccctggtcaaactacaaatgtgatccttaagactaaaccaagctatccaaatgccactttcttcatgactgctagaccttatgtgataggccaaggaacatttgataattcaactgttgccggtattttagaatacgagtcaccacccaaaagccttcatttgagcaaaatgtttcccttgtttaaaccaattctacctgctttgaatgacacttcctttgctacaaatttcgcgagtaaactccgtagcttggccagtgctcaatatcctgccaatgtgcctcagaaggttgataagcattttttcttcacagttggtcttggaaccagcccatgccagcataaccaaacctgccaaggacctaatggaaccaagtttgcagcttcagtgaataatgtatcgtttacaatgccgactacagcactactccaggctcatttcttcggccaatctaacggagtttacacccctgattttcctagcagtccgacaattccctttaactatacaggcacaccacctaacaatactatggtaataaacggaacaaaggtagtagtgcttccttttaacacttccgtggagctagttatgcaggacacgaacattcttggagctgaaagccacccacttcatctacatggcttcaatttcttcgttgtcggccagggttttggcaactttgatccaaataaggaccctgcaaagttcaacctggttgatcctattgaaaggaacactgttggtgtgccatcaggaggttgggctgcaattcgttttctagcagacaatccaggggtatggttcatgcattgccatctagaagtgcacaccagttggggcttgaagatggcttggattgtcttgaatggtgaacttcctactcagaaactgttgcctcctccagcagatcttccgaaatgttga

SEQ ID NO: 18950 - DNA, 2730 bp, Zea mays
  Peptide Sequence Number=SeqID_60729
atggcaccaaagcgttcaaaccctattgaagtcccaccagccgcttcttcctctgaagaagatgaagaggtgacttcttctgaggaagtagacgaagggtcttcaactgaggaagaccccaaaacccagtctactccaatgagccagaagagcccaccacctagaaagcttgaaaccgctacgcctgccatcgttaaagagggatctgatgaatccggttctgattccgaatccgacaccgctgcacagattgctattgcgacggaacccagatgtaataagtccttggcttcttcatctaaacggcctgggaagtcggagttggatgccaaagaagcgaaacgactcaagaagaaggttggggaagaagggatggctactgcacctgttgtggagggggtgaaaaagactggtgaagatgcaaagaagctgctgttccagcggttgttcagtgaagatgatgagattgctttgttgattggtatgttggattattctgctaaaaaaggggctgacccttgcgctgatatgaatgagttctatgaatttgttaagaaatcgattcatactgatgttagcaaagtacagctgatggataagataagaagattaaagaaaaaattcaaaaacaatgctggtaaaaatagcaagggtgaggatccaactttctctaaaccccatgaacaaaatgcttttgagttgtcgaaacagatttggggcaaagaagggattagtggaaaagttgagtcttcaactgctaagtcgaatgggaaagccaaggggaaaaacaaggcagaggttgcagtgaaagctgagttgctttcttcatccgataagaaaatagacgatgcggtgccagtagaagtcgatgaggtggtgtctaagagttccagtaatttccttgataagaaatttagtctctctgacttagaagaggcagttgtaaaggtggggttggatatggttgatggtgaaaagaaggcggctttggaggcaaaatggatgaaattgcaagtcgcgcagctggaagctgtctcgaatgtacctcgagcccctcgatcgattcggaagagggaccggactaagagggtggttgaagatagtcgaatatgcgcatttgaattgttagcttcattagctgggaagctactggaggagggtgaaagctctgcttctagcaatgcatctgcaggacatgatcatgtttctataggtaaagatgttaaactggaaactcgatacgatgataaaccgttgaaaactgaatgcgtcgggcatgtaagctgtgatgcgagtgttgttacctctgattggaccgctgaaaacagtgacaattcgaaggaacctaaactttctgaaaacaatgctattctggaacctactttgacaaaggcacctcctgcttgctcagtgcaaattaatgatgatttaaagtatacaattcagaaatgcaatgtaggatatgggagctttcctggtaatttagatggttgctcccctaattttggggagttgtgtgatggtatcagtgagaatggtgttaaacgagaggtagagactaataattaccccacaatggatccattagaagtgtctatgacatttcctgcacccattaattccgatagagatgtcaaattgccatcacgtagtgattctgttcttaatgcttctttttcaaggcataggaatgatattaagttaggtagtagagatgatgatgaaaaattttctaggtttaataaacttagcaacaggtttaaggtttctaggcctgcaacatgtatcgaagaccgaagaataaggaagttgctaacatccaaatactggaaagccgctccaaagttgaaggattttgaagattctcgagctgatggaggaataaaggctctacaacgcaagcggaagacatactatgacaaatgtcaatatgacacactttataaaaggaggaagttctttgaccgtagctcaatagtaacttctgatgggaggatcggtagtgaaaatgtttctaattcacctgagaaagttacgaacgagaacgaaaataagtgtcgcttggtggcaatgtcacatggagcatgtgagatagcttccttgcttacaggtcatcaagcatcccataagtctgatgattctcatgtgaagctcagcattaagtcctttaggataccagaactttatatcgaggtgccggaaactgcaactgttggttcattgaagcctggtcctgtgatagctcctccacctatatgctccgaagaaccccttctacagttgccgtgtggctctgcccctcaaaatttaacaaggtctttagtagtcactccagccttagatacggggattccagatgccacacctgacccacctttactgaccaattcagcaaaatctgtggatattccagcgatgaatgtcgaggcactagctgttgtccctgtcaaccagaaaattcggaaatctgagcttgcacagcgtagaaccaggaggccattttccgtgtcagaagtagaagcattggtacaggccgttgaggagctcggtaccggaaggtggcgggatgttaaattgcgagcttttgagaatgctgaccatcgaacttacgtggatctgaagcaaaaatttcgccgcagcaaagacgaggggaaccggtaccccaagaactattggatcgggtcatggctgctcatgcttactggtctcagcatcaaactaaacaacaag

SEQ ID NO: 18951 - DNA, 264 bp, Zea mays
  Peptide Sequence Number=SeqID_60730
ggtgataacaatagacaaagggatgaaatttctggtgatccaaataacaaaaagattcgtttcaaggacccggagtctaatattaaagatgtgatggctgtcggcgcaacactgattccaatcctgtcttggaaagatatggttatggggaaaggctccaccgtttctaatggggacagagattcgaacactgccaatgagactttctccctcctggaaggtggcgttaaaaagtcattagtcagtgggcattcccgctattga

SEQ ID NO: 18952 - DNA, 1338 bp, Zea mays
  Peptide Sequence Number=SeqID_60731
atgccgtttctcgaggtttccaaacaggactcaaagggtcatcgaatatcctatatttccacccctaaaaatattagtcgcctccctaaacttcccccacatctgtcctctaacttaagtttcgtcgagttttctcttccccatgtgcatggcttacctccaggagttgaggccacttctgaggtaccaatcgacaaagtcccttaccttaaaagggcatacgacaagcttcgagaccctttaactgacttcctcaaaaactcaaacgtcaactggataatccatgattttgcaccttactggttacctggtattgcagctccattaggcgtcaacttggttttcttcagcatattcaatgccagcacgtttgctttcttaggtccaccatcagctttgctcggtgatcgccggaaacgaccggaagatttcacggtcatccctgagtggatagattatccttgcaacaacatagctttcaagctacatgagatggtgaaccaccaacagtgcatggatgacgacgtgtctgatttccaacggattggacgactgattcaaggttgccaatttgtaaccatgcgcacctgcttcgagttcgaacgggacgcgattaaattgcttatcaagctttaccagaaacctgtggttccggtaggcctgttgcctccgttgttatcactgccatcaaacgaggataacaaatgggaagctataaaaagctggcttgacagcgaaggagagaaatcggttctctatattgctcttggtagtgaagtgaatctaagtgaagagtccatgcaccaattggcatttgggatagagaaatccaacttgcccttcatttgggtggtaaggaaccgtccagtgggtgaagggcagatgaatgacataattcctccagggttcgaaaaacgagtgtctaacaggggcttagtgttgagggattgggctcctcagttgcagatattagcccactcttctgttgggggtttcttgactcactgtggttggagttccataatcgaggcactcaagtacggtcgagctttgatcttgttttctggggcaagttcggatcaagggttgaacgctaggttgttgcatggcaagaaggttgggttagaaatcgagaaaaatgaagtggacggttcgtttacaagcgacttggtggctgcaaccattaggcgggtgatggtggaaccagaaggtgaggtgtttagggcaaacgcgtgggcaatgagagagatttttggcaatgaagatttaagcaacaattatttgaatgaattcactcggttcattgaagagttttcaacatcagcttgtcattattag

SEQ ID NO: 18953 - DNA, 510 bp, Zea mays
  Peptide Sequence Number=SeqID_60732
atgtgggaaaatcggcatgaatatctacctactcgggaacaaatcatcgttcccgagttagcgtgcgttccagaatacatgccatggtttaggatccatgggaagccgtatttacttacgccagaggagaggcagcggcaaatacgtgtcagaagggaaaggcgcgggcctctaaatccaaggggacaagactacgagggcagcccatcaacgaggcctagacattcacccggctcatcatcagtggccatgcaatcaccgtccccaacgaaagcaccgacgcagtcacctgacgcagcaattcaacagatgatacccacgcaatcgcctttccctatgatgccaggtaaatcatcgtctcaagtccgacaagcagatgccgaaccggaagaacaacaatcaccacccgaggaagaacaaccgccgccggaagctagaggaaagaggaatccagcgcgtaaccgtcgacggccgccatgtggaaccgaatcccccggtcatatacattga

SEQ ID NO: 18954 - DNA, 324 bp, Zea mays
  Peptide Sequence Number=SeqID_60733
atggctgcccggcacgctcgcccgtcgcacctcaccgtgccggaggagcccgcgctgaacgccgccacgtcgactcatcgccacaccgagctcgcctcaccgctgcccagccctggctgtggttccctggtacctgcgctgaagcctagcactgagccccggccaggccagcctgcgcccctctcctgcaagccggtcggcgaacccctgcgctgccctgccgtgctcaggccagcaccactttccctccacccccacatgatcccatcctcccttgcggttgccattcgtgtcgagcataggagagagaaagttgaaaactaa

SEQ ID NO: 18955 - DNA, 429 bp, Zea mays
  Peptide Sequence Number=SeqID_60734
atgccggcgacaagcggaagcacgatccaagccctccctcgaagggacttcggtgattcggagtactcggaggaggaggtttcctccgagtccgaggggtcactggctctcgcctctcccccgacgtcgtccgatgactcggacgactcccaggggatagccgcagaatactggactaacatccgttccgtcgagcacgctaggctcgaggagtcggatgagtcgaaggtctcctcggatgaggagaactcctccggctcgtccgaggagcggagcgacaacgacagtgacgatgagggcggcgatagcagcgatgacagcggtgatggcgaaggcgacgacgacggcggcgacggtggcggcaagggcgacagtggcggtgttgttagtggcggcagcaaggctagtggcaaagcgccactggtctaa

SEQ ID NO: 18956 - DNA, 222 bp, Zea mays
  Peptide Sequence Number=SeqID_60735
atgcctgggttcggtcggctcggcttggccacggcggcagcagcgcggggctggttgcctggcgtgaccgcggggagagagcgggaagaggagagagtggggagggagatagagaacagagggagagaaggagtggcacagggcggtggctggcttttccagggagcgcgcgcgcggctggtgctagggtttggggaactcctgataagtggccgctgctag

SEQ ID NO: 18957 - DNA, 436 bp, Zea mays
  Peptide Sequence Number=SeqID_60736
atgacagagaggaagcgtaaggagatggagaatcgcaagcgcaagttcagtggaccccagcctgaaagcatcaatcgtcctcgtttctcaagcaatcaacctcagcagttcaggcagaaccagcgtccacctcagcagcagcagatccaaaggcagtatcctcagcaccagtatcagaatcgccagaacaatcagtcagggggaggtcagttcccgaggcagaatcagcaggcacctcgtcttcctgccccagcaaaccagcagaacaatcaggcagcaccggctcaggttggaaacagagcatgcctcaatgccccagcaaagcagaatgtgtctcagcctggagcaggcaaccgctctcagctgcgctataatcatggaagactgaaccacttggaggctgaagcagttcaggagacccccgacatgatagtag

SEQ ID NO: 18958 - DNA, 369 bp, Zea mays
  Peptide Sequence Number=SeqID_60737
atggcgaaggggtatcttaacctctgggccactcggattagatccaacggcccgaatcagaccccaaatcggtacgagatcgcggccatcggatcaaaatccgaccatcaagattttatgagctctaaaccgttcgccacccaccgatcggctacgaacggtccaaacgcgctcaaccaaaaacgatgcgctacaccaggtcttgacgacggcgacccgcccgccatggaggcgccatggccgaaattccaagctacgcctaggatgatttacggcggaacgcccaagctggtgatccgtccaccattctgcaagcacggccgaggcacacagatgattggtggagatcctactggagctatggcctag

SEQ ID NO: 18959 - DNA, 204 bp, Zea mays
  Peptide Sequence Number=SeqID_60738
atggccgaaattccaagccacgcccaggaggttagggcgaatcgtgtgtggttctttactggagatgaggaggccgataaggctgtcctcgcgagcaggatgatttacggcggagcgcccacgctggtgatccgtccactagtctgcaagcacggccgaggcacacagagggttggtggagatcctactggagctatggcctag

SEQ ID NO: 18960 - DNA, 339 bp, Zea mays
  Peptide Sequence Number=SeqID_60739
atgggaggctcgatgattatcacgtcgctgcgcaacggcccaaagggtatcttccacgacccctctgaggtgctggccccctctgcgtgctccaaccctgagctcggcgcaacttcaagggtgtcggggatagcgcacaggaggttggagaccgtgggcgtcgcggcgcatggcgcccagccagcgacgcgggacgcgcgggagccacctcagccgcagctatgtcgagctcgaccgacgccccgagaacagggcacgctcaactataattcaccggactgtccggtgaaccagtcgaacaacggctccctacgcgccaacggtcaactgacaggatga

SEQ ID NO: 18961 - DNA, 609 bp, Zea mays
  Peptide Sequence Number=SeqID_60740
atgtcgggagctcacaccaagaaggagatggtgaccaacgagaagcccaccacaagccacgggaaagctccatcgggagagtccggcaacaagaagagggaggaatcacctccccgcgtcaagtcgaaccggagtggcgacaagaagaagaaaatgaagaaagtggtctactacgagaccgattcttcgtcgccttccacctccggatccgacacgccgtccgtcacttctaagtgccatgagcgcaagaagtttagtaagatccccctacgctatcctcgcatttccaaatgcactcctttactttccgttccactaggcaaaccactggtttttgacggtgaagattattgtatgtggagtgataaaatgaggcaccatctaacctcactccacgctagcatttgggacattgttgagtttggtgcacaggaaccatccgtgggggatgaaggctatgactcggacgaggtagcccaaatccggcacttcaactcccaagccactactatactcctcgcctctctaagtcgagaggagtacaataaggtgcaagggttgaagagtgccaaagagatttgggacgttctaaagaccacacacgaatga

SEQ ID NO: 18962 - DNA, 1272 bp, Zea mays
  Peptide Sequence Number=SeqID_60741
atggcgccaccgcattgggatggccaccatcgtggctgggtgttggagatgggaggtgcagctaatccaccctacccctatagaaaagttgtagtcgatagagaggagagcagactggctgagctggacgacgctttgtgctcccgttttgtccctagctcgtctgcaaccaaggcagatggcaactgccatgtggcagccgcggggatgcgtggtcatcacgccctagcgcgtgcgcaacgctcctcctcgcgtgcacgccttgcctgcgtcgcgtctgactgcttttggctgaagtggatgtgcctcactctctcccactcactccagcgcctcattctcactcgccctcgcctcgcgatctcttcttcctcctctcgccagcaccgcattggaccaccatggccgacgcgagctaagctcgtggtcacaccgtccttcatttctccactgtccaaagcgagtgtcgtccctcacttcaccattgagtcgggatcccggagccccttgctcgagctcggagaagtgcggagcaacgccatcgacgttgcagtgccttggttctcgccggcgcgcgtggaccaagtgcctccgtctgcgacccaccgagccaagaacgctgtcgacttcgtcgtcgaccgccactactccccggccttcacctcgtccatcttgccgccggaggaagtaccatttgggattgtcgaggagctatcaggaattcttgtggaagagggttcgggccgctttgagaggcgtaatactctacttcctggggtggatctgtatgtggcgcgggaaagtcgggtggtttcttggggtagcaaacgattcgacggaccatctggacccgagtccatcgccttctcggaccggcccattccacaagtagttttttgcctgacccacgaagagatggtcttgcaggacgacaaacgtaagcgcgctccaagtcctccttcagaagactttggcaactcggaatactcgaaggaggcctcctccgagtatgatcgattgcccgctcctgcctctccagtggcgtcgtccgaggattcagatgactccatgggactgtccatcgcagcccgtgcctactggcgctccatcgagcatgccaggctcggtggatcggatgactcggaggtctccttggaagaggaggactcctccgactcttccgaggagcggagtggcggcgacggtgacgaggacgaggacgatggcagcagtggtgatgatggcggtgagggtggcggtgacggcagctag

SEQ ID NO: 18963 - DNA, 432 bp, Zea mays
  Peptide Sequence Number=SeqID_60742
atgaagtccaagtacaacatctcaaataactgctacaatgatatcgtgaagcttattattgatgtcctcccgctgaaccataagatgccagagaacttgaaagatacaaagtcatttcagaaaggcaattgggttagagatgggcgtccaaagcgacaaacaggtgaagatatcatgagacaacatcgttacctaaaaccatcagaaggagttaggtttgaagggtatgatcaggtggcagatgacaagactaatgaggtggtagatgatgaggacaatcagatgatagcagatgaggtagaggttgaggcgacaacagatgagaaggaggcagatgaattgacagtcgcagccactgccagcattaggtttcttcagtacctaacatttaagcctcggaaggagttcgagcaacgacacataacaaggtag

SEQ ID NO: 18964 - DNA, 192 bp, Zea mays
  Peptide Sequence Number=SeqID_60743
atggaggtggtagatgatgaggacaatcagatgatagcagatgaggtagaggaacaatatcgcttacacaatgatatgagccttgatgatcaacacgtgcgacatgtttttaacatctctacccaaagagttgtgaagggtatgatgtatgatgcacgagtcaaggcggtggttgtctggcataagtgctag

SEQ ID NO: 18965 - DNA, 129 bp, Zea mays
  Peptide Sequence Number=SeqID_60744
atggacgggcagagcaccgaggtggcggcagggaccggcggcacgggcggtctagcggcgtgcgtgtgggctgccggtgacgagggcgtgcgggcgctatttgaacaacaagtcaatcgaaaaatgtaa

SEQ ID NO: 18966 - DNA, 306 bp, Zea mays
  Peptide Sequence Number=SeqID_60745
atgggcggcgacggcatggagaactggatgcgatgggagagagaaagggagaaaggagaagagaagccgaggcatgttgcgtgccaccattcgccggacttcatccgcccacctgtgaacgtggccagcgccacccagtacactgtcgcccgattccttgcgccagcagcatcctcgacctccagtgaagctccccagccagttgaatcgagctcggtcatcactgttgataggaatttggagccgccgccgaccaccgtcgcctacgcacgtggaccgagtagctccgaccaccaccgtccatga

SEQ ID NO: 18967 - DNA, 510 bp, Zea mays
  Peptide Sequence Number=SeqID_60746
atggacaagcttgtttctcaagaacaatttggtggtgaaggatatcgaacgcctagcgacccttgtcctagcatagatagggccactcgttgtgagttgcaatgtgaccctagttgtgatccacaagatgatgagaggactaacccagattgcatatctctaatcaaggcaaatttagaactatgtaagaagaacgagtaccaccacctgggcacaagtggttacaagcgccacattgttaagtggagacaagaagtcgccaagaagaaggccgcagggttgccgatgctgtctaagcaacttggtgaaaggacggctaattggatccgtgctcaaaaaccaagggaaaccgagtctggtgtatcttttgataatccaactatcgaagaagcgacaaagaatatatatgtaatggcagctaagcagaaccaaggagcatttaagccacaaagggagagaggcatcctaacggcttgtctcggtaatcatgagcatcctagtcgtgtatga

SEQ ID NO: 18968 - DNA, 432 bp, Zea mays
  Peptide Sequence Number=SeqID_60747
atggccagcggacggagaaagagcggcattccagctctggggtggtggctcatggcagtcggcaccatccgctccgccatcgtgtggtcctgcctcttcagttctgcatcgctctgcttggccgtctaccccgagatgaccggcgtgcaggagcgagctatggctgcgtggactctgctatcctgcacgctctgcttcctgtgcgcgttcaacatggacagcaagccgctctacgtggccaccttcatgtccttcgtctacgtcgccggctacctgctcgtggagtgcttcttctaccacagcgtccatgcagccagtatcgctccgtactgcttcatcgcagacattgtgaggaatatcatctttgtggtatcacatagtaaatatgtgagcatcgtcaccatccttcacaacatggaggaattagcataa

SEQ ID NO: 18969 - DNA, 552 bp, Zea mays
  Peptide Sequence Number=SeqID_60748
atggcgcctcctgttgacgtggtcggtccgtgccctgggttgggcgaggtggaggctcctccgaggtcgaggtcgagtctgtcttccgaggccgaggtcgagtccgagcccccgggtcgggcgaggcggagaccgtcggctgaggccagggctgagtccgagccctggggtcgggcgaagcggagttcgtcgtcttccgggtctgagcccaagtccgagccctggggtcgggcgaagcggagttcgtcgtcttccggggctgagcccgagtccgagccctggggtcgggcggagcggagttcgtcgtcttccggggctgagcgtgagtccgagccctggggtcgggcaaagcggagtttcctatggcgcctgaggccggacttggctcctgtcagcctcactctgccgagtggcacagcagtcggagcggcgcaggtggcgctgtcctcttgtcagaccggtcagtggagcggcgaagtgactacggtcacttcggctctgtcgactgggggcgtgcgtcaggataaaggtgtcagaccacctttgcattaa

SEQ ID NO: 18970 - DNA, 366 bp, Zea mays
  Peptide Sequence Number=SeqID_60749
atgggtaaaacacaattctcaaatcgagacgggaaagatgataagtcaaaaggtaggcataatataagcatcatggaaagatctagatattacaaaggtaagggtgatatcgagcaaaagctaagacttgcaacgcgacaaaggagaagggaacgaaaaagagcgggatgggatagagtgatgagaagggtaaaggagttgacaaacaaaacacaacaaatgatagagttaaaaaaacttgcaggtgacaaagaagaggatacgaccaaggggaaaatagagttaaggcaagactcgcaaagtgatgaagtggagaaaacaatcaaggataagataagtgaggttccgaccgaagagttgaagtaa

SEQ ID NO: 18971 - DNA, 372 bp, Zea mays
  Peptide Sequence Number=SeqID_60750
atggccgccgccgccgccgcccccgacgccgacgtctacgatattccgtggctggagaagtacctccccgcccgcgtcgctgacgtcatcggaaactccgatgccgtcacccgcctagaggctggcaatgtgattgatgatgaaactcatttggaagagcatattcccccattccccagttcaacggatgttaaaagggattcacctcttgctcctccccaccctccatcacctacccttgaagaacctgtggaagaagcacccaagacatatgcttctgttgcgaacgaaatcaaaggcaacgatggcgattacagagtcacagcaggctcaacagttggcccagcagccacagtctgcctcagtgcatga

SEQ ID NO: 18972 - DNA, 117 bp, Zea mays
  Peptide Sequence Number=SeqID_60751
atggagagacgggtcgaggagcggaccgcacgcttccttccatggagacacggatcggggtcggcttggattgtggcgccgttgatgggggaggaagccgcgcgtagaaggaagctt

SEQ ID NO: 18973 - DNA, 1053 bp, Zea mays
  Peptide Sequence Number=SeqID_60752
atggagctccagttccatccccagcagcaccacagctaccaacaacaacaacaaccaccaccgccagccacgaaggaacccaaacccaagccaagaacgagaaccaagtgcggcggcggcggcggcggcagcagcaagttcgtgggcgtccggcagaggccgtcggggaggtgggtggcggagatcaaggacacgacgcagaaggtccgggtgtggctgggcacgttcgagaccgccgaggccgccgcgcgcgcctacgacgaggccgcctgcctcctccgcggcgccaacacgcgcaccaacttcgccgccgcgccgccgcccgactcgccgctggccgcccggatccgcggcatcctcgaccacaacaacaacaacggccggacgccgccgaagaagaccttaccgcaccgccccaccgccgcccgcttcttccccgcagccgcggccagcaccgctagcacctgcagcagcacggccagcccgaccagcagcagtcctagctccagcatcagcttcgccaccagcacccacgcccgcgctcccattcccaccctcccggatcctcggagtcagagcgcgaccgaggaagcttattacgcgccgtactcggccaccggcggcggcgaagagttccagctagccgcgaccacgcaccagtacgaacaacagtcatgggcgctcaacgccgccagcagccccctaacaccaccaccacctccggacgcacgcgacgtgggtagcgtgaacgctcgccgcttggcggtcgcggcggagacaggcagagacaggatgatcaagctggagaagaagagcagctctgcgtcgctgtcgctgtcgccccacggcgtcatcgacaggggtccggacaaggatctagcgtttgacgtggggaatgatgcgtctgactccctctgggatctgccgccgatctgcccactttcttcttgcagcttctggccaccaaaagctgctgcagactgccaaacactcagtttttcagccagcttctataaaattcgtttcggtaaaaaccattcaaaatcaacataa

SEQ ID NO: 18974 - DNA, 399 bp, Zea mays
  Peptide Sequence Number=SeqID_60753
atggcgtttaggggtgtgacgggggggttcgaccgagaggaaaaccggtcgccggagcttgacggctaccagagaagggagggagggctcaccggagcggagaaagagggcagcgcgctggctcgattgagctcggggaaggggaagagaggtggccgaagctggtgtgaagaaagctggagctcaggtggtccttttataggtggccggggagggggaggagagatggcgagcaccggtgaggcttgccgcggcggcgatgatggcgcacagtggtggcgacgggatggcttggggcagacggtggtgacgggatggctcggcacaggcgcaaggcgccaatttggctggtcagcgagtaatggcaaggggatgtggcggagcggtggccgatggtga

SEQ ID NO: 18975 - DNA, 1101 bp, Zea mays
  Peptide Sequence Number=SeqID_60754
atggcttgttacctagcagcgattgatctagatatttggagagttaatcgtgactggataaaaccacctaagaatcccgagaagctcaccgcgagcgacgaaaaagaaattcatttgaatgctagagccagaatttcttgtgatgtggacattgtgaggaagatcatctcccttctatctcagcaaaaatatgggagtatcatcaccatccttcacaaattggaggacttgagcacaatgaccccgacactcgtaatcgagaagattgtggcatttgaaatgtcacggaagatgggtcaagaggaggagccaacttcttcaaagccatatgcttttgcatgtgatgaacataaaaaggtgaaagccaagaataagactccaagttcaagcttaagtgaagaagaggaagaagaacaagatgatgatgaagatgatcaagcctctacatcatccttcgaggacgaagaagcggcccgacacgttgaaaaggctcaacttaaaactttgaaaaatggtttgcttgcacgcttgcacagaatgtctgcttgcataacagtcattgcccataataatgagctaactactaagctagaaagtatcggtagtaccccaggaacatctttagttgaaattcctaaaattattaagaaagatgcttctacttcttgcttagatttaatttatgattctaacccttgcaaccaagttgttttaaagaatgtcattatagaaacaagttttgatgaggttgctttggaaaatgagttgttgaagcaagaggtggctcaccttgttaaggctttgtacgacaagaaatacaaagccaaacaaattgaatctcctcaagataacaccattatgggagtgaataagcttatggagggagaaactatggcgaagaccggggagaagcaaaagaaaaagctaacaagcgaagtcttcaacacatatatcaacaaggtggataagaaggtggctacactatacttaatcaaaaggaataagaatggaaaggtgatagccatcaaggctaacaagcaatccaacgagggaaagggggccaaatggatctgggtgttaaggagattatctcaaccatga

SEQ ID NO: 18976 - DNA, 374 bp, Zea mays
  Peptide Sequence Number=SeqID_60755
gctccttcactggtggtctattgatgaagatagcaaagaggaacaggctcacttatgctatgcaaataatattgggtatccatttcagaattttgtttagtcgtttagagcatagacattacacatattcatgctatagtaccttttgcagttatccaccagaggtggtaaaagagatgccaaaggaagttcttgtcaaagaggtacagagacttcaactggccttggaagagcaaactgaaatggcaaatcatagccaacagcagtgtgataggctaagaaattttaaaagtgcacatgttgacagtatttgtagggtacctacttctggtgttgacaaagatggcccacacctgtttcctggcagtgaatga

SEQ ID NO: 18977 - DNA, 576 bp, Zea mays
  Peptide Sequence Number=SeqID_60756
atgcaggtcctcacgctgcgcggctccaacgtcatcgaggtgatggacggcgtgggcgtcaggtccctggccttgttccccgccaagttccagaagagcttctggatcaagaacgggagtttcgtggtcgtggatgccagcgggagggaccaggcgctggaatcggggagcaagatcgcgtgcgttgtttcgcgagtcctcttccacgaacaagttcgggccctgcagaagtctgcttatcatagaataactcacttgactactcgcagctctgtagtatgtcaaattgtttgcatcatgcctcaagaaaggggttgctgcattttgctcatcttgacttatggaattgggtgttctgaccagttcgtcccttcttatgttaggccggccattttcaactcagctccgactccgaatgaagcttcagaggcgggagcagaagcacaggctgcccaggttgacgaggaaccagattccgatgaagaagacgacgatcttccaccacttgaggcgaacacgaacaggaataggccgtatgaattgtattctgattcagacagtggttctgacgcttga

SEQ ID NO: 18978 - DNA, 2796 bp, Zea mays
  Peptide Sequence Number=SeqID_60757
atggaaggcgcggaggcgcttttccccggcgacggatgcggcggtgaccccatggacttctcgtggaccgctgacggggagaagcacccggacccggcggcttgcgccagccccggccgcgacgacgaggctacctcggcctcgaccccggttccttcgccgcaggagatggcggagtccatgattctcgtgcccgggccgcgcgtcgtcatgtctggactcaggctggctgattgccgttcagatgactgtgttctcttcattaatgctggtggtggtgcaatcgaaagctgtgatccctgtgtgaaggtttctggtgattcattctttgaaggaggggatgtgatagaaacaaatgagagcatagccgaaggttcagctaaaaaatcatcacttttgaatccacagatactgtctcagctcgatgtatatgctgtagttggagggaacagggcccttcaagtgcgtgatattagggttactgttgagatgaatggtgctgttatgatcaatttcaaaggagtaagaggaagtcccatggtttgtggtatctgtattcgcaaagcaccacttttatcagcaaactcggttacaaatggcaatgtcttgtgcaaaagatgttcatctgatattgatgtctcaactacacagactaggacaagtaaactgatctcaaagtatgagaagcagattgaggagctcaccagccaatgcactatgaagtccaatgagtgctatatggcatggtcttcagtagacactaccaacgtggagcttgggagactgaaaatagagcttcaccaaaagggtgctgaaatggagaatcttgtgcaaactcttggtagagagagcgaccaactaagaaatgtttctcgtaagtacaaaaatgacaagaaattgtgggttgctgctatatctaatttggaaaggaaaataaaggccatgaaacaagagcagcaattgttgtcccttgaagcacatgattgcgcgaatgcaattcctgatttgagcaagatgatcggggctgttaagggcctagttgcacagtgtgaagatttaaagttgaagtactatgaagagatggataagaggaagaaacttcataatattgttcaagagacaaaaggaaatatcagggttttttgtagatgccggcccttaagcaaagatgaggtgtcatcgggtcagaaatgtgtagtggattttgatggatccagtgatggtgacattgtaattacaaatggcggaactaaaaagacctttaagtttgatagagtcttcacgccaaaggatgatcaagatattgtgtatgccgatgcgtctccactagtcacatctgtcttagatggctacaatgtatgcatctttgcttacggacagacgggaacaggaaagacttttaccatggaagggactgagagtaataggggtgttaactacagaactctggaagaactgttcaatattgcagaggagaggaaagaaagcgtcacatatgacttatctgttagcgttcttgaggtttacaatgaacaaatcagagaccttcttgccacgtctccatctaaaaagctggagatcaagccaaacagtgaaggacaaaatcatgtccctgggttagtggaggccaaaattgagaacataaatgaggtttggaaagttttgcaaactggaagcaatgcaagggctgttggttcaaacaatgttaatgagcacagcagtcgctcccactgcatgctatgcatcacggtgagggctaagaaccagcttaatggagagtgtacaagtagtaagctttggcttgtagatttggctggaagtgagcgtttagccaagactgacgtgcaaggcgaacgacttaaggaagcacaaaatattaacagatcactttctgcattgggtgatgtcatttcagctcttgctacaaaaaacagccatataccctacagaaattctaaattgacacacttgctgcaagattctctaggaggagactcaaaagcattgatgtttgtgcaaattagcccatccgataatgatgtttcggaaacattgagttcactaaacttcgctagccgtgttcggcgtattgaattgggaccagcaaagaaacatgttgatactgctgaacttcaaaagaccaaacagacgcttgaaagagctaagcaagaactcaggcttaaggatgattctttgagaaagctagaagaaaacttacaaaatttggagagcaaagccaaagggaaagagcaactttgcaaaaacttgcaagagaaggtgaaagagctcgagggtcagttagattccaaggcacagtgtcaaataacatcagagaaacagcaacggcagctttctggaaaactaaaagagaaggaagaaatgtgtaatgtacttcagcagaagattgcggacttagaatgcaagcttagacaaccacaacaatcagaatctgaggttgcacttcttaagcaaacgatccaagagttggaggtcaagttgaaggaacaacaacatgaccgatcagccatggaattaagtgtgagttctacaaagatgttatcttcagacctgatcaaagagatggagctaaggttcaaggaagaagaacaccagcgatctgttgcagaactaaagatcaaagagctggagctgaagctgaaggaacaggaacaccagcgatcagttgcggaactaaaggcaagagaaataggacatgagctgctggagactcagagaaccgagtcaatgcttcagattaaggtagccttctttgtcacagctgctacaattgagtag

SEQ ID NO: 18979 - DNA, 237 bp, Zea mays
  Peptide Sequence Number=SeqID_60758
atgggacagaccatctttatggaggaggagcacgacgatgccgattggggtgatcttgagtcgactccaccagctgcaccagttgatcttgcttccactacttcggatgacggacccgaccccacttcttccaccacttggggtccgctcgagccagctcctgctgagactggaggagttaaggctgctgttgagggggagaccccttcgtcaagggaggctccacatcacatttag

SEQ ID NO: 18980 - DNA, 2154 bp, Zea mays
  Peptide Sequence Number=SeqID_60759
atggacgccgcgttccgggaggccgccctcaagggacccctctgggaccaagtctccaggaggctggaggccatgggctacaagcggagcgccaagaagtgccgcgagaagttcgagaacgtcgataagtactacaagcgcaccaaggacggccgcgcgggccgtggcgacggcaaggcataccgcttcttctccgagctcgaggccctccacggcgccgcgccggcggtggcgtcgctcgcgcgtcggcctgtggccatggcgcccgcgccaccaccaccggtcacggccctcgtgggcgcgtccaccggcatggcgccgaccgccttgcatgccgagccaccgccgatgccgcagcctgcagctccggctccaacggggacggggacggggactgggactggcagtgtcactgctaccatcgcgccccctgcaggcgccgccgccagcgacgcggcggcggcggcggcatgcatgatgacgcctggtgacgtcagcttctcctcgggctcggacggggaggacacggatgagaccggcggcggcagcgggaagcggaagcgggacggcggggaggacgaggacggcttcggcggcagcatcagcagcaagatgatgcggttcttcgagggcctgatgcggcaggtgatggagcggcaggaggagatgcagcggcggttcatcgaggccatcgagcggcgggagcaggaccggatgatccgcgaggaggcgtggcggcgccaggaggtggcgcgcctcgcccgcgagcaggacgcgctcgcccaggaacgcgccatggccgtgtcccgcgacgccgccgtcgtctccttcatacagcgggtcaccggccagaacatccccatgcccgtgccctcgcccgtcgcgcctccgccggccttcatcaccgcgctcacgcatgcgccgccgctgcagcccacgccggtcgcttccgctgcaccggcagcgccagccccggcgcaagcgcaacaccaaccgccgccgccagctcatcagctgtcgccgaagaaaccgcaaactgtaatgccgttgacaccacaggcgccccaacaaccgcaggtacagccacgccaggcgccgtcgccgtcgccgtcgccggcgacgcatccgcagggcaataaggagatcgtcgtccgcgctccgccgccggcggagtcgcaggacacggcggggttcggtggcggcgcgccgtcgccgtcgaggtggcccaaggcggaagtgcacgcgctgatccagctgcgcacggagatggagacgcggtaccaggactccgggcccaagggcccgctgtgggaggacatctcgtcggggatgcggcggctcgggtacaaccggagcgccaagcgctgcaaggagaagtgggagaacatcaacaagtacttcaagaaggtgaaggagagcaacaagaagcgccccgaggactccaaaacctgcccctactaccaccagctcgacgcgctctaccgcagcaaggcgctcgcgtcgtcgtcgtccgggcccggtgcagctccggcgctgccgccgccgccgccgccgccgcagcgcccagatcagcaggctgctgctgcggcgccgcccgtcaccgtcgtgctagccccggtgccactgtcccagacggggcctcacggcaacggaaacggcaacggcaatgggtgcgcgggcaggggcagctcggacaatggcggcggcggctccgggggcatgcagaagcagcaggcgagcaacggcggggttgctgccgccaggttctccgccgtggatggcgccggtggcaatggcgttgcgacgaacaagcgagaagaaggcatcgtcaggaaggaggaggcggtggcggcggagacgaggccacagccggtgtcgatgaacgacagctacgtggacagcgacagcagcatggacgacgacgaggaggacgacttttacgatgacgatgatgagggcgacgttggcgacggcgggaacaataagatgcagtacgagatccagttccagcagcagcatcagcatgttcagccgcagcagcagcagaaccagagcggcggcggagtccggccgaacgcgagcggcagcgccggcgctggcgccgggccggcagcgacaacaagtgggtctttcttgaccatggtccatcactag

SEQ ID NO: 18981 - DNA, 135 bp, Zea mays
  Peptide Sequence Number=SeqID_60760
atggcatgtgcagacagcactaccaggtgtcagcgcagtagaactgtcagatcatcgattgtgattgaggagtggatgggcgccgacacgggcaccggtcgtggtgccaccacccgccacgccgacgaagcctaa

SEQ ID NO: 18982 - DNA, 735 bp, Zea mays
  Peptide Sequence Number=SeqID_60761
atgacggtgacagagtcgttgcgagtgttcggccaggcactcgacaaagagtccacctttgccgagtatcttgctcattcgcacttggcaaagaaagttttgtgggacccatttgaagttcctgtgtcaagcacgcagtctcggtccaggtgggtagaggttgtgttcatgccttctttcgtgtggctgctcgaccttttgctgcttccgatgcctgctgtcgaggatgtgtcgagcgtcatggatgctttcgaggtggtccttcacaggggcgcagcggttctctccacaaagttgtggaggtttccgtacatcaccttcgcctgtggctcacccggctctggtatggatcggagaatcatggctgatgtggacatgttctacgtgggattaaggaaatattacgtggtcgagtttttgcacgagggcatcaaactcctcctcctgctagcggagggagtcattgtcattcagtgggggatagccacgaagcaggcccatttcgacacttcttcgacattggagttagcactggtcgagctgcaccttgaattatcctcgagcgtcgctttaaggcagtggtgcgccgttttagatgttgcttctccgccttgctcctggtggagcgtgcgagtcatgcgcccatggtgttgggcatgtcggggcggcgaggatgagctcgctagtgacggtggtgaagaagttgagggcgttgaacgtgatgcggctccctag

SEQ ID NO: 18983 - DNA, 300 bp, Zea mays
  Peptide Sequence Number=SeqID_60762
atggatgaatcgttggctcggtcgtgctatgcaagggagctatggaggttcagctcgttccaccgcctatgtgcttggccgagttgggcgttgagagataaccgaggccagggaaatcgctcaccgcagcgccggacgcagtacgccggacgccggagctggagcgcagccgcgcccacgcaggagcagaacgccgggagcagtggagcctggagcggacgccgggagcagtggagcggacgcaggttgggcgctcgctgcgtggccaaggcctggcgcgggtccggaagcatggcgtga

SEQ ID NO: 18984 - DNA, 1281 bp, Zea mays
  Peptide Sequence Number=SeqID_60763
atgggtgagacgatctcgttcgcccctcagaaggccatcaagtcccaggtcctggcagacttcgtggccgaatgggtcgacacccagctaccgacagctccgatccaaccggagctctggaccatgttcttcgacgggtcgctgatgaagacaggagccggcgcaggcctactcttcgtctcgcccctcgggaagcacctacgctacgtgctacgcctccatttcccggcatccaacaatgtggctgagtacgaggctctggtcaacggattgtggatcgccatcgagctaggggcccgacgcctcgacgctcgcggtgattcgcagctcgtcatcgaccaggtcatgaagaactcccactgccgcgacccaaagatggaggcctactgcgatgaggttcggcgcctggaagacaagttctatgggctcgagctcaaccacatcgctcggcgctacaacgagactgcggacgagctggctaaaatagcctcggggcgaacaacggttcccccggacgtcttctcccgagatctgcatcagccctccgtcaagatcgacggcacgcccgagcctgaggcaccctcggcccagcccgaggtaccctcggcacagtccgaggcgccctcggctcagcccgaggcaccctcggtccagcccgagaaggcacccgggggctacacgcacctgttggtcgccatcgacaaattctccaagtggatcgaggtccgacccctaaacagcatcaggtccgagcaggcggtggcgttcttcaccaacatcatccatcgcttcggggtcccaaactccatcatcaccgacaacggcacccagttcaccggcagaaagttcctgggcttttgtgaggatcaccacatccgggtggactgggccgctgtggctcaccccatgtcaaatggggcaaaatacggttccccgaggacgagggcctacaccgaccaaagcaaccaagctagtcgagaggactcgttggaccagctggaggaggctcaggacaaggccttacaacactcggcgcggcaccagcagtccctgcgacgctaccacacccgaggggtccggtcccgagacctccaggtgggcgacctggtgcttcggctgcgacaagacgcccgagggcggcacaagctcacgcccccctgggaggggccgttcgtcatcgccaaagttctgaagcccggaatgtacaagctggccaacagccaaggcgaggtctacggcaacgcctggaacatccaacagctacgtcgcttctacccttaa

SEQ ID NO: 18985 - DNA, 1071 bp, Zea mays
  Peptide Sequence Number=SeqID_60764
atgccaccaccactggtgaacggccagcagcacgacggccacaacaagatcaaggagtgggaccgcccgctcactgctaataactcatcaaggtcatcgtgtgcgagcacagctatggcttgccgagatgtcgtcctcgacggcggcggcggcggcggcctccctgccatggccgccgtcgccgccgatcttgacgacggcaccgtgctcccggcgagcgtcaacgtcccccggacgacgacgacgcgccagaggccattcccggcggcgccgccacctctccccggcgacgcgttcgagatactggcttcgtcgaggctatgcaagaccctgctgcttagccaagcttcttcttcggtactgctccataatggcacgacgatgcctttgttgagatcagagcatgtgccctatggccctcctgctcctgctcatccccaaggaccatccatcggcaactacaagcagctgatgatacttatcctgcagtgtcttagaactcaagcatgtgtgctggcagccagtctagtgcatgctctctcgctctccgatgagatcctggccgaagcaaagtgcatgcagatgggcgcgtcttgtggaggccgcgcgcagcacgaagcggcatgtcaaagcatggcggcggcagcagcacgcccagcactgccagtggtgccgtcgtcgaagaagcctcgagtcgagcagcggtcctccaccatcgtcccttctttcaaggtaaggaaagagaaattaggggaccggatcgctgctcttcagcagctcgtctcaccgtttggcaagactgataccgcatctgtgctcatggaggccatcggttacatcaaatttcttcaagatcaagtcgagactctgagccgcccctacctgaaatcctccagaagtaagaagcccaggccgacaccgcggggttcttcaaacgcgagcgctggggagctggaggaaacgaggcctgacctccgcagcagagggctctgcctggtgcctctctcgtgcacgtcctacgtgaccaacgagaacggagtctgggttccaccgaattttagggcaaactaa

SEQ ID NO: 18986 - DNA, 489 bp, Zea mays
  Peptide Sequence Number=SeqID_60765
atgtcgtcctccgtgctgagggctgcggccgacagggccattcgcaggcaggccctcacgctgacgaacgccgcggtgtccaggatccggcagctcctcagcctaaggcaacggccatacctgcggctgggtgtcaaagcgcgaggttgcaacggcctctcctacaccctcaactatgccgccaaccggagcaggagaagggatgggtgcagcttgctggaagatgccgccacggagaacagaaatggtagaaggattaggcttgattttccaaaagatgaaaaggggaagttcgatgagcttgtcgaggagaaaggagttaaagtactgatcgaccccaaggctttgatgcatgttataggcaccaagatggactatgttgatgatccattaaagtccgagtttgtgttcataaacccaaattccaaagggcagtgtggctgcggtgagtctttcatgactacaggcagcaaagggtcgacgtcatga

SEQ ID NO: 18987 - DNA, 522 bp, Zea mays
  Peptide Sequence Number=SeqID_60766
atgcctggtttcagtttgcattgttctatctctacactccagaggcagatatgcgcgcgtgctgggctccccctgctgcagccagcagtgcaagatattaactcctatgacaagttatgtgatcttgatgttatgagctgcatctacttatatgatattatatttataataagtgtattcttgtcccacaagatacacctctccaattttcaccagataccttttagaatgtctgccgaatgtcatcttgatgatttgttgtttgattccaagtatgtgtgtggattggaagatgagaacatagttatagttgaacctcaagtgccagttgtagtgttgaatcaattggcagcggaagaccaaggagtcaataatgaaaagagaactctacctgacacttgcatgttccagctccaagttggagactgccatcagggtctgcatccgacacacaccaagttgcagactgaaatcaggcgtcaaaggttaaaaatagagtctgttggtttccaagccttttag

SEQ ID NO: 18988 - DNA, 291 bp, Zea mays
  Peptide Sequence Number=SeqID_60767
atgaggaacatggcacagatcggagcaaaggcagggtctgatggcgaacaatcgatgcgcaaggctctggaggcacagaacaagaagcttgtgctcatttcgaaccagggcagtgtgtccttgtctgcacaagcgttacatgagcgaggccctggcgctgaagccggtagtctgcaaataggcctgaggaatattttcgaagcgatggagaacttcacctctgcatctgcaaatacgtacagggagcttcatctttgcgccgaagaagcgatggagaatttcttgttgtaa

SEQ ID NO: 18989 - DNA, 129 bp, Zea mays
  Peptide Sequence Number=SeqID_60768
atggcgggcagaattgagctcgccggagctaaggaaagggggctggccggtgaggagatatggagccaggaaatccggtctgtctccctgcccaaacccgaggcaaatccaaggttttgtcgtgtctag

SEQ ID NO: 18990 - DNA, 510 bp, Zea mays
  Peptide Sequence Number=SeqID_60769
atggcgtcagctagcagatgctcgagccaggccctcaccccctccgcaaggtggatgggggagaaactggatgataaggtggtcatccttgattcccaccatgccgcaaggaactttggcctccggattgtgtgcccaaaggcacgtggccccggccctggtgtcttggggctatgctcacgtctcctttcacatggttgcttgacctattcttgctcccgatgccaattgttgatgatgtgtcaggcgtcatgcatgtcctcgaggcgatcctccatgggaacgcgtgttcttgcagattgggagggttgtgcaccctactctaggatgaggtcgtgcgtggatcgtagttgttcatacccgtgggcaactaccgatcaatttcggcttgttgcaccgtggctttctccattaagttgcgaaggtgttgatacatcacccttgcccctggttcgtcaggctcgaggatggaccgaagcatcatggttgtcgtggccatgttctgtctag

SEQ ID NO: 18991 - DNA, 432 bp, Zea mays
  Peptide Sequence Number=SeqID_60770
atgcatagcgagaagaaaaagaaagaggaaagctgcatcacgttcggctccctcgacttctttgccactgccaccggtgaactccgcctcaccaacctcgacatgcctgtcaccacaagcgcaagacccacatgttccactaggagcaaggtaaagaagcggcgcctcaagaggtgtgtcgccgccctaaagcgatgccttagccggctcgctgcctccatcaagcagcaggcagaaggagcctcgccttcaacactcgtggtcgtcatcagccaccaaccaacatccatcctcaacctaatcgaggaatactcgagccacgactcgattgagccagactctgacacagacgaggtggctgaaagggtatgtttcatggcaacaccaccacagaaagataatggtggaggggacgaggattcccctaactag

SEQ ID NO: 18992 - DNA, 717 bp, Zea mays
  Peptide Sequence Number=SeqID_60771
atggaaggtgttcttagccatcaactgaagcaatctgtgattgatggtaacaaagttgtgctaagtgtctccaatgctgatacaaaggttgacgatgctgaatttgaagaaaatgaagtctatgcaatcgatattgtcaccagcactggggaggggaagctatcaaaagactgggtgaaacatattcagcaggagtggaaagtagttgttgtttatgattgcaaaattgtggaaggtgttcttagccatcaactgaagcaacctgtgattgatggtaacaaagttgtgctaagtgtgtccaatgctgatacaaaggttgatggtgctgaatttgaagaaaatgaagtctatgcactcgatattgtcaccagcactggggaggggaagcttatggactgcaatagggcatcagaagagaagcgtgcacgcttaggcttggtggaatgcatgaaccatgagctattgcagctgtaccctggacttcatgagaagccaggagtgttcagaactttagccatcactgaaatatccaaagttggactgaacaatatctacctaggggagccttatctaactgtcccctaccgtggtgagctccatcatttgtactgccttgctgcgttcatgagtcgagcgtggatccctggatcgagccacgcactcatgctcatgcagttgccaacccctcaagagtatgcttcgttctacatcccttga

SEQ ID NO: 18993 - DNA, 135 bp, Zea mays
  Peptide Sequence Number=SeqID_60772
atggagaccatgaacgagctcagtggcttggatcagaacgctccttctgaggaagaacagaggctgctggcaaagagcatgcgacatgccatgaaaactggaacactattttgtatatcgatcgctatttcttag

SEQ ID NO: 18994 - DNA, 1167 bp, Zea mays
  Peptide Sequence Number=SeqID_60773
atgatgctggcttctcctcatggcttcggcgtcggcgccggcgccctgcacctgcagcggctcggtgccgctaccgccccggccggcgtggagtctgcagatgacgcagtgatgccgccggcgccgccgccgctcctcttccgcgccctcgcgtcgctcaacctcctcctgctcgtcggctacctcctgctcgtcctcctcgccaagctcttcgcccgcctgcaccaccgcagggccgccgccgaggaccgggcaagtagtggttggtatgatggccgccgctgcgaccaccgccgccgccgcgcggaagccacggccaccgatgacgaagagtacgccgccgcggataccgtcgaagggcagcaaccggacgcgctgttctggttcgacgaggccgtgttcgaggacagcgctgccctgctgatgcttggcgacgaaggaaaggatcaccacctgtacgctgccgcttctacacgttgcttgcagcaggtggagagcacgagcacctttcccgcggaggaatctgcccgcatctcgccgcgcaccgagagccccagccccagcagcatcgatgcggagcgtatgcagcgagcgcaggaagaggaagaggccaagggcatcgtcgccgtccagcatgccccgacgacgacggtcgtcctggaaccggaacagcggaggaacaagcagcaggaaagcgacggaggagaagacggccgtcgcgacgccgacgccgaccgtgccgagcacgaagaggaggctgcgcccccgccgcagggggggaggtttcctcaaggctgccatgacgtcaggctgttcgtcaacagccgcgcgctcgccgacaccaggaagctcctgctggaaggcgtggtggccggaggaggagcgcacgggcggctgcaggacgagagcggcaaggacaggaacggcggggacagcagccgcttcggcgcgtcgtcgacgctgacgagcgagtccacgtccaagagctcggtggagtggcagagctcgacgctgaccaaggactcggagacggagtaccccttctcgtcctcgtcgcgccggagctcggcgcgctgggagtcgtacacgctgttccgcaagtacgacgaggacatggtctacttccaccgcgtcggcgcccagaagctcaccgaaacaggcacgtag

SEQ ID NO: 18995 - DNA, 441 bp, Zea mays
  Peptide Sequence Number=SeqID_60774
atgccgaagctatcacctataaagcttcggcatagtgacatgactcaagacgaagatcagaaggtgtggaaagtaaaggtcataataatcattgagaccacaaaacatgtgaccctcactatttatgagctttctagcaagcgcgagtccaccgaggtagaccaacaaaccagagccaaattagggaacccattagcactagccatggatcctttatctgatagatcaactattaacctctcactaggctttgctttgtgttatttgatgtctatcacaaaggatcaagttaaggatcttggtgataatgagatggctttggtcatcaacaggtcaaagcagttctgtgacaaccacaagagtcctatgcattgtgtagagaagaatggctactttaattacgaagacactaaccacttcattgcaagcttcctcaaatga

SEQ ID NO: 18996 - DNA, 450 bp, Zea mays
  Peptide Sequence Number=SeqID_60775
atgagtccgcacgccctgctacccgtcggatcaaggatccacgacccacagtatgatcgcacgcggatcccatcagagccccaggatgttgatctaacggttactaacttcgaatcccgcccaaagcacccgaccattcgatcttatatcaacggtccaaatctaccagcccccagatctaatcttaaccgcacctttaccatccaagggccaagcgccctcttccccctcctccagccattgccagcggcaatgtccaggaccgcggtcgagcttggccggagctggcccaatccgacccccaggcgcgcccaaacaccgattcgacgaatgcttcgcaaggcagtaatgacggcgaacatggccaagggcatcttaccggcaaagacgtcgcagaggagtcgggctacggcgcgagcaggttctacgacggggcagcaggtgtggtga

SEQ ID NO: 18997 - DNA, 201 bp, Zea mays
  Peptide Sequence Number=SeqID_60776
atgtcggggtccagcaccttgtgcatgccccccttcaactataaaaggggaggtgtggaggaaggtggccacggaggtatcggtggagctgcaacccctgcgcgagaagtgggggctcctactggccagtctgatctttcagccaatgaactggccatcgaacattcaattgtcaggggcgttcgacagactaactggcag

SEQ ID NO: 18998 - DNA, 2262 bp, Zea mays
  Peptide Sequence Number=SeqID_60777
atgtgctccactgcagtgctgctagttcgcacatgcgttgtgcttgtgtgtttggccgccttggcgcgagcgccggccaaggtccatgctgcctccggcaccggggatgggctccttgctatccctaccaacgcctccctgtcgcactgcccctcttggtgcggggatgtccaaatctcgtacccgttcggggatagggccgggctgcttccgtcaaggcttcgagctcacctgcgatcaaacagctccttctcccaggctcttcttcgtgtcgcggaacagctcgatccagctgttgggttcaacgtcaccatgagcgcaggcgtggacacctacaccaagtcttgggaggcccctactgccactggtgtcagtttttatgcagatcataattttctgtacactgttggatgtggtgtctacgtctacgtgttcggtgataatatgacagatatcattggttattgcacgagtatttgcacagataacagagagatcatggagagcgttggtgcctgtgaagggttaggctgctgcagcattctaatgcgtggcggccaaggcttcactctcaaactaggtcgcctcaatagtaccattccacagttcggtgaagcgctctccagtgtcaagattatcttttcggaatactatgaattcgttactgatgatgtttatgcaagttgggtgaatacaagcaatgttcatggcatagtacttgacattgcaatcacggaccaaccaagctgcgcgagtgcccggtcccaagagaacaaggatacctacgcatgcactagtgaaagcatctgcgacgacgttcaaggaggctacagttgcgtctgccctggtcaaatagagggcaacccctatattaaagatggctgcatagcatattacaacccagaggcaccgagtattaggaactgtacgagattatgtggaaacataagcgttccatttccttttgggatcgaagaaggctgttacgcaaatgataacctacgactcaactgcacaattaacgacactactcttattcttgatcgagggtacgcacagtattgtgtgaccaatttgtcacttgatgatgggcttttgatggttacaaacatgctgaatgccacaagcttcaacaatatggagagggtagtcatcactaactatgacggttactaccagaacggcttctattcaaccgatgaggacgttgtggatgggattgtaattgggcttgtttgtggtcttggatccataagttttgcacttggtgcaattgtactcaccggtaagtggaaaaaaggtatccaaaggagaattcgaagagagtacttcaagaaaaatcaaggtctactcttggagcaactaatatcgaatgaaaatgctacaaacaaaacaaagatattcactttggatgaattagaggaagcaaccaacaagtttgatgctactcgtgttctaggtcatggtgggcatggcactgtttacaaagggattttggctgatcagcgtgtcgtggctataaaaaaatctaaaatagtggagcaaatagagatagatcagttcatcaatgaggttgctattttatctcaaatcattcaccgcaatgtggtgaagctttttggttgttgcctagaagatgaggtacccttgctagtctatgagttcatatcaaatggcactttgtatgacattcttcatgaaaatattgcaacaaaatgcttgttctcatgggatgatcgaattaggattgcaacggaagcatcaggagcacttgcttatctacactcagctgctgcaataccaattttccatagagatgtgaagtcttctaatatactcttggacgacaacttcactgtaaaggtttcagattttggtgcttcaagatctctatcccttgatgaaacacatgtggtgacaattgtccaaggaacatttggttatttagatccagagtactattatactggttctctaactgagaagagtgatgtgtatagttttggagtgatacttgtggaacttttgacaagaaagaaaccaatttttatcaatgaatcgagtgccaaacaaaacttatctcattacttcattgaaggactacaggaaggggctctcatggaaataatagattctcaagttgtggaagaggcagaccaagaagagattaatgatatattaattttttatagaagcgcgcttaggatcgccaggagggctgttttcttccctcgagaaagcacaaacgagattgcaatgtag

SEQ ID NO: 18999 - DNA, 657 bp, Zea mays
  Peptide Sequence Number=SeqID_60778
atgggaacgcaggcgctgatgctgaacacgcggtggaaggtgttccggggcgacagctcccgccagcgggacctcatgttcagcatagtgaagccatccatgatccagctgcggggaaatcaaatggcgacgtcgccgctgtgctccgcttccccacggctgcttcgagccctaggccagcctccccgagacgtccactcgccgcggacagtcgtcgtggccgcgggcacccgtgtgagcagagtggaggcccgcgcgtcgttggtgctggccttggcctcgcatgcgctctccgcctcgcagcgccgcttcgccgagcacaccgatgaggcctccaagtacgccttcccgtccggccgcttcgagccccgcaccctcgaggaggccctcatgtccgtgcctgatctcgagacagttctgtttcgcatactgaagtgcgaggcagagtatgagatcagagaagtggagatctgggttcatttcaacgggtcatctcagtcgttcaacgtgctggcatcatatttattcgataagaatactgcctctgagcaaatggaaatgacaacacctatttttactcggaagggtgagttaaacagccaatcaatggacatgacgaccccagtgataacaaaaaaggttacttcattatcttga

SEQ ID NO: 19000 - DNA, 1353 bp, Zea mays
  Peptide Sequence Number=SeqID_60779
atggcaaacatacgtgcacttctggtcggcttatcgcgggcaaggggatccttagcagaggctggacgatgtgcttccacgaggccatcaattctagcatctctgggcgcacattacaagatccccatgccagcccgctggttctcatctacagggcttcctccacatctggtggtcggaatgccagcactatctcctactatgtattctgacacagttttcattagaatcaagatagaggttggtgatgtgatatgtgagatagaaactgataaagccactcttgagtttgaaagccttgaagaggggtatttggccaagattttagcacctgaaggttctaaagatgttcaagttggacaacccattgctgttacggttgaagacgttgaggatattaagagtataccagctgatacatctttcggtggtgaaacaaaaggaagagcaatcaacagaaagtgcaccgcaaaaacaaaagtagttaatgtgtctgaacaaagctcaacagtgagccggatcagcccggcagctaaattactgatcaaggaacatggactggatacatcatcactgagagcatcaggcccccgtggcacccttctgaaaggggatgttctggcagcattgaagtcaggtatcaattcaagttcaaccaaagaaaagaagtctccagctcaaccttcgtctcagccaactcgagattcccaatctcaagcatcctctatttcacaaaaggatgatacatatgaagatattccgaatagtcagatacgcaaggatatatttgctttgaacgttgaggatccctgccagggaggccggcggcagcgcacacgtctgcaccggtcagggtggccgcgcctgcggcaaagtaccgggggtatcgacagatccggtcgggaaagccacgacagtgacggatccagccatgaagacaacgatccgaccaaagggacgacagatctagccgagaaggtcgcgggagcgacggatccagctgtggcggcgacgaagaaggtgtgggcggcggggtgggtccagctggacaggggcctgcgctgggcctggcagggtgaggtcgacagggcgagaagggccgcaggtgccggatctggtgaggagggcgggggagcaccgttggtgggcggcggtgtggatcccggtcggtggcgcgtggccttggctccacgacgacggttgcgtgcggatccagtcagtggcggcggccacaacactgtccgtgcgggtgaggtccgggtcatggcggaccgccctggcggcggcggcggcgtggattcaggcggatccgccagcggcggcgcggattcgggcggacaaccacgcccctga

SEQ ID NO: 19001 - DNA, 345 bp, Zea mays
  Peptide Sequence Number=SeqID_60780
atggcaccgggaagggctcagggaggttcgggggacatggtgaacatggtcatgggcatagcaacgacacagaggcaccagaggacaaccgtccgtagcggggcggctcggctgcggcgcaactacattccggcgagcaatcgcgcccagccgagaatagagaaagggaaaattaggggcggggaagggtgttacaaccctatggtcacgcgacgggccgctggtgtcctttggcctatcgatcggttcatcctcggtatgaccacctcgccggcgttctcccccaagccatcgtctgcccatggtgcgcttgccgaccccaactggcgccgcgccatggagtag

SEQ ID NO: 19002 - DNA, 756 bp, Zea mays
  Peptide Sequence Number=SeqID_60781
atgaatcaggaggcgaaggactcgaggccctcaaggtctcccagcgagccaaacctcttcctgcaatggggcagccggaagaggctgcgatgcgtcaagacgcgtgacgatggctcgccatcgccgtcgccgtctgaaggtcttagacgcgccataccccgtgctactaggcccctccttggagctgacattgcggcattccggcgccctagcacctttaaccgcaggtgtagtttcaccgctttgttttcactgcccactacaactacaatatacatgagcaagtgccctgagccccagaggcccctgatacattatgcaaaatgcctttctgtcagcaggaaatcagattcactagtgaacgagtacaggcactcgatggcgctatcgctggagaaggacaagtattacacaacgaggggttcaccgttcgatggaaacgggttcgactttggtagcatagctgaggagaagggaaccaccgcgttgcctagattcttcgtagcattgtcgaacaaggagaaggaggaggacttcatggcaatgaagggctgcaagctgccacagaggccaaagaagcggcccaagctgatgcagaagtgcttgcttgtaatgctcactccactgattcagtctgtaagttttcacttccattgctatgaccatgctcatccttttgaccctgccttctgctttatttctggacgaactatagatggtgagcccaggagcttggttatcagatttgtcgcatga

SEQ ID NO: 19003 - DNA, 876 bp, Zea mays
  Peptide Sequence Number=SeqID_60782
atggcgcacgctggtccgccgccgcgccgtcgatccaccgctgctctgccgcacggagtcgcactgaccgacccagcacgtaaggtgccgcggatcctggttgcgtccgaggagaggctgcgccggaacgcggagttcctgctcaacgaggtcgggctgccgccgcagtacatcgtccgccgttcggtgcttctcatgtacagcctcgagaggcggatagtgccccggcacctcgtgctgatggttctcaaagagaaggggttggttgagcaggaccggtgcttcttcaacgtggttctcaacgaggctgcacttctgtttgtgaattgtgatggattgatgatgaacctgttaagttatttcctgtggtgtatgaacttgcatggtttgctggctgatgagtgcaaggacaagaaaagagaagagaataaaaaggaaaggaaatgcccatgcggccatgccattgttggtggttctgacttctgtagagagcagtgcagcaatggcatgtacatgcggaaattagacatggatacagttttgttgggcgcgcagaagagcagcgccgcagcggcagcagctcacatgtcaattcttacgtgcgtggtgtggtggcaccgtcgtccgcaagcgacgtgtgtccgggtcaagggctccaggaaggtactccagcagtcgctgtggacgcgtcgactgcaggcagcatggcagacatgcctggcagtcgacgacgacgcagtcgcagtcgcagtcgcattatcgcacagtggaggagcagagcacatgcctggcagggaagggagcagtgtgcatggctctgggctctggcaggctgcccccatcctggcttgttggctggcatcaagcatccagtaa

SEQ ID NO: 19004 - DNA, 474 bp, Zea mays
  Peptide Sequence Number=SeqID_60783
atggcccacccgccagctttgcccgctcatgccaccgccagcacggtggcaggcgacgtccgtcggcatccgcctagcccgacccgtcaccctgcgcggcacgtgcgcctgcccccggccacgcccaaggagagacgcgggccacggcgcccgcgggccatgcctggcagccgctcatcaacgcgtgccgcgtgcgtgacggtgatggtgacggtgacggagagtcggagaccaccaccccaccgtcctccaacagtccaaccagaccggccgggcggtgttggatccgggcgcacgcacgcgcaaagcgggcggggcttttgtcaaagtcgacgccgttacccaagtgggcatcgggtcggcgaaaggcaacggctaaacaccgtcaccagcaggctgcaggcgagtactcccaggcagaccgacattttttaccagcgggcgcgcggtgttagatcatctccaagaggctag

SEQ ID NO: 19005 - DNA, 531 bp, Zea mays
  Peptide Sequence Number=SeqID_60784
gtcattgccaaaaggttgctcgaatcaaaacagacgactccacatttgtatctatccaaagatgttgtgctggatcccttgctcgctttcaggaatgaactaaaagagctacatggcattaaagtttcagtaaatgacatcatcataaaggctgtggcaattgcgttgcggaacgtccctgaagcaaatgcttactggaacaatgataaggaagaaactcaaaagtgcgattcagttgatatatctattgctgttgctacagagaagggcctgatgaccccaataataaggaatgcggatcaaaagactatatctgcaatatccgcagagtctggcattctcgcagtgggtagaggaaacaaggttgttgaacctgttgtggacagcgatggaaccgagaaggctgctgcagttacaaagatgagcctgacactatctgctgaccatcgtgtatttgatgggcaagtaggaggcaagtttttcacggagctggcgctgaatttcagcgacatcaggaggctgctattgtaa

SEQ ID NO: 19006 - DNA, 327 bp, Zea mays
  Peptide Sequence Number=SeqID_60785
atggcttgcggctccttggaatccaaaatttcgccgttgttgtcacaggcagtggcggtccgcctcactccgcgatcagcgatcgttaattcgttctcgtcctccatctccctcgaggaggaggacggtgggggcgagggtgtggatgagagccatgctcatggtcgcgttgcgccgtctgctaacgaggaggcaagacatgttcgtggctgcgaaacgagatatttaaattcaaatttcaagtacaaatgtctttatagaaatgatacgattatgaggcccggttatgggattttcggttacggttccatctcaagggacatatag

SEQ ID NO: 19007 - DNA, 333 bp, Zea mays
  Peptide Sequence Number=SeqID_60786
atggccaacaacacttcaacggaggtgattagccgaggacccgagaaaagaatggcggtggactcgcgctatacctctctggtggcggcagtttttgttccagggaaaggagtgcgcgagagggtagcggagggagagaaggttgcggccctatccttttatatgcgtacggacaccaggtcaacacgtacggacgcgaggatcgcgatggtgtccgcggagtgcggcatggtggttgaggacggatctgacgtgttggccccacattccagtgacacagcgcgtgagagaaaacagtggaaggaactgacgggcgggcccgcatggcagtga

SEQ ID NO: 19008 - DNA, 324 bp, Zea mays
  Peptide Sequence Number=SeqID_60787
atggcagggggatccggccatggcgtgctcctggcagggggagagctcggccacgtccagagcagggaaggggagggagatgctgctgctgggaggaagatgaacagggagggcactggaaaaatttctgggcgtccatgggagctgctgccgctgctttgtgtagtagctcgaccatgggaagaaagtgcagggctggacgccatggaaggaagtagaggtgcgcagccacaaggggaagaagggggcgaccacagggcaccatggaacaaggagtcgagcgccatgggggaagcttgcctgggcgcctgtgtgccagcgtga

SEQ ID NO: 19009 - DNA, 222 bp, Zea mays
  Peptide Sequence Number=SeqID_60788
atggcgtggagcggaggtcatgccagcaatggcgccaccgtccctagtgggcggcgccaacatgtcttgattcaggccggattagatcgtggtcatgagaaatcttggccgtgggatcgtgatcatgtggccatggttgggtaccgtttcgagggagagtctggtttaatcgtggacgtgcaagttagatcgtgcggttcagatcccatagtggttcaatga

SEQ ID NO: 19010 - DNA, 274 bp, Zea mays
  Peptide Sequence Number=SeqID_60789
gggtttatttctaagggttaatccatggcctggaaagcgactattgggaaaactaaaggataaaaaggcagagtacgaagcgatgcttctagtgatagttctgttcatcttgaagacattgataaccagattattactgaagttttgggtcctgaaaggtatggtcgagttcgatttcaaggatcttttgttagcccaacccaatattttggatccagctcccaccaatacatggcttcggggagtcaggctcaagctgaagttcagaggttga

SEQ ID NO: 19011 - DNA, 996 bp, Zea mays
  Peptide Sequence Number=SeqID_60790
atgccaattaagacaagctcacatttggagacatgctttcaactttgtattctagatatcattcaaaatcatggcaagcccatgactattaccgagctagttgttgcgctaccgatgcttaaccctactaaagcatgtgacatctatcggatcatgcgcattctagttcactcgggcatctttgcacgccaaaagctatacaatgatgctcaagaagaaggatatgttctcaccaactcttctcgtattttgctcaaggataatcccttttgcataacacctactttgaacgctacgatggatcccgttataacaaagccttggagttttctaagcacctggttccaaaatgatgatcacactccatttgctaccacatatgaggagacattgtgggactattttgcccatgatccacagctacaagatttgataaatgatggcttagctagtgattctcaattggttactaatgtttttatcgacaagtgtaaagaggcgtttgagggattgatctcccttgtagatgttgggggtggcacaggaactacggccaaggccattgctgatacatttccggacatggtgagcactgtgtttgatcttcctaatatcgttgctggcctgcaaggcagtaagaacttgaaatatgttggaggcaacatgtttgaggcatttccaactggagacgcaattttattaaagaaagcgttgcacgattgggatgatgaaggatgcttgaaaattttgaagcgatgtaaagaggccgtttcaagccaagacaaggtaggaagaaagttgatcataattgacatggttgtgagggagaatgagaaagtgaatgatgaagcctcaaccttaactaaaacacagctctttttcgacatgttgatgttggtgttggtggctggaaaggagaggcagcaagaagaatgggctaagctgttttctgcagctggttttaggtcctacaaaattactcctattgtaagttga

SEQ ID NO: 19012 - DNA, 354 bp, Zea mays
  Peptide Sequence Number=SeqID_60791
atgaaggcccccaacaatgtcccttgtaaccttattactggacaagaaaggaatgaaattgaaggtgcaaaacatagctcagtgacagttgagatggctgatatgacaactaactatcaatgtgctgttattgatgaaattcaggtacttaaagtaacagtgatctatagactaccaggatgtgatattagatatgtatgtaaatatctacagataatggttggctgtaaatcaaggggttattcgttcacacgtgcacttctgggactttgttcagttatgggcattttctttaatgggttatgcaattgcaagaacatgtctagattagcatatgacagatgttacaactaa

SEQ ID NO: 19013 - DNA, 213 bp, Zea mays
  Peptide Sequence Number=SeqID_60792
atgggtggcgcggtggggcagggctcgaccgcgggctcctacagggggaaaggccacaggggcgcgggggaaggccgcagccgcgaccacaaggtggctagccaggctggggaacacggcaaggacacgaaggcaaggcggaataccatctggaatgtaatgctcccggaatgcttgtttaaactctgcccaagtgacgagatgaccttctag

SEQ ID NO: 19014 - DNA, 201 bp, Zea mays
  Peptide Sequence Number=SeqID_60793
atgaaccaaccgcaccgggggaggaacctcttcatcgggaatctcgccgacgaaggaaccgacaccgaaatggccgacgacatcacaaagccagagaacgggatccggcgcagcctgtgtcacgagatgagatctcagagggacattcagtggccccctaacttcaaagtctccaacgtcgacaaatacgagcctaagtag

SEQ ID NO: 19015 - DNA, 390 bp, Zea mays
  Peptide Sequence Number=SeqID_60794
atgggaggggcaggaaagaagcaccacggagcagtgcttgggcgcgccatcagagaaaagggagatgagctagtcggctgggcaccagagacccgcgcgaggagctcggcgcgcgtccatggcagggaattcacgacgcgagcagggaggactggagggagtatcgcgcgcagagaaatcggctggggagtgggaggccgcgactggaggagtaccagggagggagaagcagcagggagcgctgccccgctagccgaactggaggaaggaccgggcagaaggattgccgttctggagaagaagataaggaagatagaacggtggctgcaaagatctgaatacgtcggtggaaaaatatcaacagggtgggctgcgggatttttcgtttga

SEQ ID NO: 19016 - DNA, 264 bp, Zea mays
  Peptide Sequence Number=SeqID_60795
atggcgtcagcgatgagccaaaagcgaggcggtgcacctaatcgcactctcactctctattctatctatgcggtgcaagttcacgcgatgaaggcgctggtggtgaagaggacgcacccaggcacagaggcaaaacatataagggagatcaattctcttctaattatttacaacttgggtattacaaatcagagtaaggtgactgttgccgtgtgcagccttgcaccagacagtccgatggctctcctccacagtgccacctag

SEQ ID NO: 19017 - DNA, 405 bp, Zea mays
  Peptide Sequence Number=SeqID_60796
atggcgcggtcggccgagtcgtggtgccgggtcgcggttgcagttgcggggaggcagggcgtcgcgcggggttggcgtcgcgtcggctcgtcggggtggggtcaaggaggggacgcgctcggcagcgtcgggtccggctggggcggcttgtcacggcgctgcctggtgcagctgcaggtgaaggagcgtcggggtcgtggccgattgctggcttgcttggcgtcctggcgtccaacggctcggaatcgggtgaagcagggagaaaagaagagagagagagagccggatgggagagagagatgggtggggggagagaaggtgcagagggcggcggcggctggcttgggaccagggggtggtggcttagggttaggggaagcaggggcgcggcttgttgggccttaa

SEQ ID NO: 19018 - DNA, 5046 bp, Zea mays
  Peptide Sequence Number=SeqID_60797
atgacgggctcgaaacccgcgcccgccgcctcgcagaaccctagcgcggtcccgcatcgtcgtcctcctcctcctcctcctcctcctcctccgccgccggtgacagcggttgcgagggtgcgcgaagaaggcgagctctcctccggcgccgacgacgacgagactctgcaaactcagctaggtgccgcatccattcttgggaagtttgtggaggctggatctcaagtgccatcggcaagtctcctcggtaaaggcagtaacaccttgattgtctcaaatgctctgaatcataaagcgtctgctccaagttacaagaagatcatgagggtgaatcaggggcaattcaaacctggcactaaccggaatctttcatggcagaagcctgtgtcaagtgataaccttctgataactttctcagatgatgatagtggggcagactctgggaagacagggcgagataaagttaggaaggctagctctcaaggtacacagagaacagggaacagtatgcaaactaggatcatgagagaggaagtatctcagcagaaaaaccttggttcaaaagtaggtcctgcacacttgcctgcttttccattcacacatagaaatgttggggccggcagggcatcaggtaatacctttttcaggaaagagctgcctgtccgccaagttaatcctctaaagtctaaacagaaagttcaaaatggggtaggagtacattctgaagatcataggttagaaatcttgcgccataagatagctgctaaagaaaatgaactaaaaggtcaaaaaagacctttgtccgctgttgctacaaagaatgcagatttttcttccaatcagccaaggctgccatctgaaaagataaggcttgaagcttccagcattggtgaatattcacgctttaatagtctgtctgaacatagtggaggaccaaataaaaggttgaagctcaatcagcagtacaaccaattttgtagtgacctgacaccattggcacctattggttctatatcaggaaaaaccaatgtgcaatcttcagaagtgacaaatcggtctgaaaatggaattactatgaaccttaatgttaatgaaacagatacaacagacacaacagaacttgcagatcaaatacaacaaggtggggcaactaagagcctacgtcaccacaaagattcaggaggtgctgagaaccatgttatgcttgagtcacatgatgggcttgcagcacaaccaccatttactgacacacaaactataccagaagatacaagtgcgttggcccctgtgacgtcagcccaagctaggcaacaggtactggctgttggtacttcacctgtgttagacggaacaccacaattgcaacctggaaaggagaatgacgaatgtttgaacagcagtggccagataggcgtagagacacagaacacaatattgttctctctacttgagatggaagaattacaagacaaggaattggaggatgctcaggagcatagacaaaaatgtgaagctgaagaaagagaagctcttagagcttatcgcaaagcacaaagagctttacttgaggcaaatgaaagatgtgcaattcttcgtagaaaaagggagatttgctcttcacaagtccatggtttaattgcagagaattcttctttggtgcagtctttgagtattcggaatcctgaagatggccttgcaatgccatcactgctcaattctcagattcatgcagttagtcagattcctgaaaatcagggtggtagacacaggctgtgtcctgaagaaccttctcagcagcaaattgataagcatgaagatgaagcacgtccacactattgtgataagcttgctgccagcacagctgatcccagctctgtgagtgctgtcaatgctgacagcatcctttcagattatatggaggatgatcttctgttcccgactagacaggcaagatcagaatgtgctctggatgttgagaatcaaatggaagaaactatacatgtatatgcagaggaaaacagacaagtttctggtgacggtggtgaggattatgaacttttagaagcttctttgaggtctagattggtggaaaggtttgggaagaaatcatgtttgaatggcaccattgatgaaggtactgaaggacttgctgttgggaaagtagctgcagaacatggcaagcagtctgcatatgttggacatcagttacaggaagcagagcagaatattatgacaactactcttgaaggtacaatggagctggaaaatgatggtgctgaaaaaactgttggcctctctaattcttgtagtggtccttcaatgggcaactgtgatcctgaggacaacatttcctctctcaaagagttatgcatgccattggttatggacagtcttatttttccttcttcagctccactaaatgctgctagacaaatcaagcgggcatttcctgggatttgcaaggagctttcagattacaaaaatgaccatctgaccagtgatgcagtgtctgaagttacaggaagtgtacaagatatgatacacgaccttgttggagaaaatatgaagatgctcccaactacccaaaatgataataatatggtgcacagtgtgattgatcccttctggcccttttgcatgtttgagcttcgaggaaaatgcaatgacgaagagtgccagtggcagcattttgagcatcatgattggagaaagctagagcttacaaaacactctatgatctctgtttcaggccagatcccttatggtttgtctcagtatattcttccagtgccagtgtatcgtgttggttcaaatcttattaaagctgatctgaacttgacacagtcagtgttggctagcagtttatggcaatattggcaaagggggttttgtgcttcttttcctttacctttatctgttcaaagagttcttccatcagatgcaccattctttcaggctggtgatggccggattgctgattttgataggaacagacaactactaaaatttcgaatgctggatagcaggaagaataagattgtacagggttctgttgatattgaattcttcttggaggcagcccttgatttatattgtggaaaagtaaacaagcctgacagaatcaaggctctttcatttctggcgcggtccattgaggctgatccaagtacagttatcctgtgggtgttttatctccatatttactatcaaaaggatgaaggacttggaaaagatgacatgttttctgatgcggtgcaacacaatgtttattcttatgaattatggcttatgtatataaatagtaggttacgcgttgatgatcgattggatgcttataacgatgctttgagcatgctctgccaaatgacagctgagactgacaaggatctacaagaaagaagtgctttcatactagacattttcttacagatgatttacttcctgtgcatgtctggaaatatagacaaggcagtttctaggattattggaattcttccaactgcaatgcctgataattctggtgacaagttgcttgctgatgtcatttcttgcttgaccatgtccgacagatgcatattttggatttcgtgcctatatgtcttaatttacaggaaccttccagaggaaattattgatcagctggagtttcagaaagctttacctcgtgctttaatatggccttctattgatcccagtgtagacaacagagataagattacagatcttctaaattttgctgcttgtaagatggctgaagatattagtgagtgtgttaaaaacggggatccatcttacctgatgttatcacaattcctcgctgttaaccacattagttgtctagcggccattggaggcttaaaatcttctgttgatatgctggtgacctacatgaaggagtacccaatgtgtcctcagattcttctgatctcagctcggttagacagaaagcatggtacatgtccaggtctgaaaagctttgatgagttgatcttgaattggcctaaagaggcacaaggaattcaatatatgtggaatcaatatgttgaacatgctctggccactgatgccgagttagctgagaaggtactgacttgctggtttgaagaacatggaaaggactgtgatatccaaagcaatgctgctatttgtatagaactgagcagtgaagaacctggaacatcatcacttgtttcacctcaggcagttggttctggtccatctatatcagaagatctcgtctttcggttactaaacctctcactgtataagatactggagaacaacctacaggaagcacaaatggctgcgagtaaagcattgaaattggctcatggggagtggtacgagcactgtataagagaacatgctgcaattcatgcactggagctggagaaatcatcatcttcgacagatgctcaaactcgggctacattcagtttaatcattggctaccttgctgatcattgcaacttgcccacgagggagctgctgtcacgaaggttttgccagaatattaagaagcataggcttaggcagcttatagatgatactattggttctgttcctgcagattcttctctgataaactctgtccttgaagtgtgctttggcccatccctccttccaaaaagcattagcgatgtgaagtacctggttgattttgttgaaacagtcatggaggctcttcctgcaaactatcgcctgggcttggctgttggtggattcgtagctaagcacttcacaggttatggcgcagcctccactgggaccaggttctgggcaagctctgttctgatcaatgccatctttcgagctgtacctgtcgcaccggaatcagtatggctagaaggtgcaggcctcctggagaaactgcatgccacagagattttgaagaggttctatcagcaggcggcatcggtctatcccttctccttcaagctgtggcacgcccatctgaattactgcaaagccagtgggagcaacactgagagcatcctggagagtgcgaggcagcgtggcatcgagctgaatctgacaccaacatag

SEQ ID NO: 19019 - DNA, 369 bp, Zea mays
  Peptide Sequence Number=SeqID_60798
atggcggcggcgctccgtggcgggccgacggtggcggcggcgctcgggcggggcggcctcgggcagggtggcctcgggggcagggcggcctcgggcagggcggcgacgctcaagcggcggcggtgctcggccagggcgccgctcgggcaggcagcggctcaggcggggcggctcgggcgggggcggccggcaggctcgggcggggcggctcgggcggggtcggcctcgccggcggcgctcgggcaggggcggctcgggcggcggtccggcagtgtggcggttgagcaggggcggcggtcgggcagggattgtgcgaacggagaagaaatgagccccgcgcggctgtggcctggctctaaaaaagattaa

SEQ ID NO: 19020 - DNA, 174 bp, Zea mays
  Peptide Sequence Number=SeqID_60799
atggcgaaattggagttcactggcacgtgtggatcgtgtgggagtgagcaattaggtgtgagcaccaccggcgtcaaccgaatttctcgccgatgttgggaggcgccgcgggttcacctccagccgtggtcgagcggctgcgcttcatcactccgtgtctctgttttggcatga

SEQ ID NO: 19021 - DNA, 832 bp, Zea mays
  Peptide Sequence Number=SeqID_60800
atgtgccgctactcgaacaccagagtacggcaacagcggcaaatggaggtggtggccgaagagatgggcatggaccgtctctacgtcatggacggaagcttcggcagcacgatatcagccaaagcggtggtcgcggtgatgtgccgctactcgtacaccagagtacggcaacagcggcaaatggaggtggtggccgcagagatgggcatggaccggctctacgtcatggacggaagcttctgcagcacgatatcagggatgaacgtcgacgagcagggagggttcgactggcaaggaacggcgaggtacaagctccggcgaggctccacggactacgatggcgagcgaaggagagatggggcgaggggttggcgagctcgggcaagggagggagtgctccgtgggcgtggcttttatagaagaagggggagaggaagaggcggccagggaagggagatgcggccgggacttcatggcgccattgatgggtcggtttcttccatggaggagagtaatgggggagtaacggctccattgaagatgaggaacggtcacgggcgtcgtgttcgggctgggcacggctcggtcggacttcctggcgtgggtgcgcagcgcgtcgggtcgcggggttgcctggtgcggtcctgctcggcggcgtcggggtcggctcaggtcggcgtcctggcgtgttgggtgcgcatgttgcaggggcgtgggggaaggggtgtcggggtcgcggctccatgggtaggggcgcggtttaggtcctcctgggcgcaggcaggtccaaggccagtcaagggcgtgggggtcgcggaagtcggcttacgtg

SEQ ID NO: 19022 - DNA, 165 bp, Zea mays
  Peptide Sequence Number=SeqID_60801
atggctggcaagggtgatgggcccaaggaacccaaggaggagacggtgacgctcaagatccaactgcactgcgacggctgcatggactgcatcaagcgccgcatctgcaagatcaaagatctatcactatatgtccgatttagtcttgggacagagatccgctag

SEQ ID NO: 19023 - DNA, 831 bp, Zea mays
  Peptide Sequence Number=SeqID_60802
atgggcgaggtggaggctcctccaaagtcgaggtcgagtctgtcttccaaggctgaggtcgagtccgagcccctgggtcgggctaggcggagaccgtgggctgaggcctgggctgagtccgagccctggggtcgggcgaagcggagttcgtcgccttccgaggctgagcccgagtctcagccctggggtcaggcaaagcggagttcatcgtcttctggggctgagcccaagtccgagccctggggtcgggcgaagcgtagttcgtcgtcttccgcggctgagcccgagtccgagccctggggtcaggcgaagcggagttcgtcgtcttctggggctgagcccgagtccgagccctggggtcgggcgaagcggagttcgtcgtcttcaggggctgagcccgagtccgagccctggggtcgggtgaagcggagttcgtcgtcttctggggctgagcccgagtctgagccctggggtcgggcgaagcggagttcgtcgtcttccggggctgagcccgagtctgagccctggggtcgggcgaagcggagttcgtcgtcttccggggctgagcccgagtccgagccctggggtcgggcgaagcggagttcgtcgtcttccggggctgagcccgagtccgagccctggggtcgggcgaagcggagtttcctatggcgcctgaggctggacttggctgctatcagcctcactctgtcgagtggcacagcagtcagagcggcacaggcggcgctgtcctcttgtcaggccggtcagtggagcggcgaagtgactacggtcacttcggctctgtcgactggagggcgcgtgtcaggataa

SEQ ID NO: 19024 - DNA, 417 bp, Zea mays
  Peptide Sequence Number=SeqID_60803
atgccacccacgccgccggagacggagacggagccggaattcgccgaggtcgaccccaccggccgctacgggcgggtaatgcctctcttcccttcccccgaccaccctccccgcctccgatccctcgccacccccgatgtcgtgctcacgcattccgcactcttgcagtacacggaggttctcggcaagggcgccttcaagacggtgtatccttccattccccctgggcgtttttcacatcagggacgttgcgccagtaccggattaagcaatgctgacattagagctttaaagaaatggtcaaggcaaatcttgagcggtcttgtctacccgcacagccacgatccaccagcgatccatagagacttaaaactagtaaagattgaggacccttggttaagcgactatcctggataa

SEQ ID NO: 19025 - DNA, 1866 bp, Zea mays
  Peptide Sequence Number=SeqID_60804
atgccgtcccgtagctccctcctcccgctcctgctcctctgcgccgccgccgccgccgccgccgcgtcctcgcgcaacgccgagctggacgcgctgatggagctgaaggcggcgctggacccggcggggcgcgctctggcctcgtgggcgcgcggcggcgacccctgcggccgcggcgactacttcgagggcgtcgcctgcgacgcccgcggcagggtcgccaccatctcgctccaggggaaggggctcgccggcgccgtccctcccgcggtcgccatgctcccggccctcaccggcctctacctccactacaacgccctgcgcggggagataccgcgcgagctcgccgcccttcccggcctcgccgagctctacctcggcgtcaacaacctctccggccccgtccccgccgagctgggccgactcggtagcctccaagtgctgcagctcggctacaatcagctcacagggagcattccaacccagctgggtctgaagaagctgaacgaggggtttctgtatgagaacaatccggagctctgtggagcgcagttcgattctctgaaagcttgtcctaacgacggcaacgacgacggcagaacgccccggaaacctgaatcgacctctgtcatcaagccccagcagattcaaaaggcggccgacctcaaccggaactgcggcgacgacggaggctgcttgaagccttcgacgctccctacaggggctgttgttgccggaacattcgtcatcgtggcaggagcagcggcctgtggcctgtccgcgttctcatggcaccgccgccagaagcagaagatcggcagcagttcggtcgagcatctggaaggccggcctagcctggaccggtcgaaggaagcatacgagagaagcgccgtgtcgtcactgatcaacgtcgagtactccagtggcggctgggacacttcatccgaggggtcacagtcacagcatggggtggcgaggctgtcgtcggcggcagagtgtggttccccgagcgtgaggttcaacctcgaggaggtggagtgcgccacgcagtacttctcggacgtgaacctgctcggcaagagcagcttcgccgcaacgtacaagggggtcatgcgggacgggacggctgttgcggtgaagagcatcagcaagagcagctgcaagtcggaggaggccgatttcctgaggggcctccgtgcgctgacgtcgctgcggcatgagaatcttgtcgggctgaaaggattctgccggtcccgggcgagcgggggatgcttcctcgtctacgagttcatgaccaacgggagcctttctcggtatctcgacgccaaggaaagcgatgcagcggacgccgccgccgtcctcgactggcctacacgggtctccatcatcaaaggcgtcgccaagggcatcgagtacctgcacagcagcaagctcgcgcaccagagcatctcggcggacaaggtcctgctcgaccacctccacgcgccgcgcctctccggcgcgggcctgcacaggctgctggccgacgacgtggtgttcgcggcgctcaaggacagcgcggcgatggggtacctggctcccgagtacgcgacgacggggcggtccacggacaagcagggcgacgtgtacgcgttcggcgtggtggtgctgcaggtgctggcggggcggcgcgccgtgtcgccgccccacctccagcaggacggcggcgggcggctggacgacctcgtggacccgcgcctgcgcgggcggttctcgcgcgccgaggccgccaagctcgccggcgttgcgctgctgtgcaccgccgaggcgcccgcgcagcggcccgccatggccgccgtgctgcagcagctcggcaccagcagctag

SEQ ID NO: 19026 - DNA, 1059 bp, Zea mays
  Peptide Sequence Number=SeqID_60805
atgtccggtttctttggtggcgcaaatccctttgatgaccctttcttcacaaacccctttggtggcatgatgcaacctagtttctcaacccctttcagcggcatgatgcaacctagcttcatgaacccctttggtagcatgatgcaacctagcttgcttggatcaagtatgtttgcatcccatggcaatctcaatggaggcacttttggaagccagacacatctcaatcaaggcatgagcaatgccagtggtttcattcagcaagcctctgaatcgagcaggcctaaagggccaattatcaaggagttgtcttcagatgacgaggataaaccagaggatgataaagaagatggcaagaagaatggcaactttaggaagcatccaagggaaagcagagaaccgtgtgtggaggacccagatgaagaagaagaagaagataataaaagacctaaacatagacaatttgggagggagctcagcagatctggtacatcacgtctacagcctcagacatttatgtttcagagttcaactgttacatatggtggtccaaatggagcctgttatacatcttcaacgactaggaagactggtgcaaacggatttatcccttccccagaccccacacgtggaagctttggcactggggtgaagggcaggcctggtgaagtggtgagagttgtctcattgagtactcatgtgggagcctcccgcactgggtctgtccttttttgcttatatgtagggtccaaggttatagtgggtcactcgttaacaagaaaccttaactccgatggacgtgtgaacacccttcaaactttacacaacttgaatgaagatgagcttggtgggtttgaagaatcatggcaaagaaatgccaggcagaatatgcctggctgggatactagaatgaacatgcttggcaacggaaatcttcacacgggcttccgagatgcgaatcaaaggccagcacttcctgccccaggacgatcccgtaaagcgaattcctcatggaacttccagaatggctcttccacgggtcgtgcaccccgcacatga

SEQ ID NO: 19027 - DNA, 375 bp, Zea mays
  Peptide Sequence Number=SeqID_60806
atggcccccatcaccacccactctgcaacggcccagccggagggtggtgtgcaggacgcagttttctgttactggacctcatcaaacatattcaccctgttatatggtcttgttatccggcgaccagctgtgaggaagtggtttgatcttcctgctttggaaaatacgcgttcgctcacggcaaagccagtattcaatatgtttggtggatccaaggcaataccagccgcacagtcaccagtagcgatcgcaggagcccagcaatctggtctggaccaacctgatgcttctgctcttggctataaggtcaaaaatcttgagaagaaagtgaaatccaggggtaaatctcggaaacacaggggggggcgggggtga

SEQ ID NO: 19028 - DNA, 456 bp, Zea mays
  Peptide Sequence Number=SeqID_60807
atggcggtgacacggcggcgcgctagggccggcgtccgggcggggtgggttgtcgtaggagcgagcgtggcgaccgggtatcggcggcgcgagcgcggcggcctggtggcggcggcgcgggggccgggtggcgacggcgcgggggccgtgtggcgacggctcaggcgcagcggccagttgacctggtgccgggtggaggcggccgagaagcaaaggcacttgcgcggcggccagctattgttcttctatttttctctcttactcacccgagctcctggtgtttcttctgatcttcaaatcgagaggcagaggaccctacggtcgggcacgaaggtggtggcccacaaggtggcagctgttcgcacaaacttgtgcacatgcatggctgcccgcagcaccagcgagcgcaaacaactgctccttgttgatgtgtcccagtcagaccggtccacgtag

SEQ ID NO: 19029 - DNA, 489 bp, Zea mays
  Peptide Sequence Number=SeqID_60808
atggcggcacctcgccgtgaagctcgggggtcgtggcggctgcgtagaccggcccgtggggacttaaataccgaggacccgaggtcctcagaccctctccttctgtcgcggctcaatcgtcctcgctgtgggcagtattggggattttgggcaagggaattctgccatcgccgcgggcacgattggccgtcatcggtaaagccctcttacacatccggagagcattgtgtcgtgtcctggagggtcgccgttgtcgcgccgtgggggattatcggcggtggtgcgaagaatctgtcgccggagtttctctgccgtggcggatccgcccctcgttgtcgcctggtcactgcacaacataagtcgggggggtgcgcttgggcgaatccggcgaactccgccgccgcgggctggttgcaccgctgggatgggtggcctggtgttgaagacggctcgtgtgccgttgattcagccctaaacggccgagattag

SEQ ID NO: 19030 - DNA, 111 bp, Zea mays
  Peptide Sequence Number=SeqID_60809
atgacgaatgttgatgcttcgccgaagattgtggaaatattgttgacacagggaagtgttatacaaactattgtggttgttcgagaaaatgagatggtgcttggtggttaa

SEQ ID NO: 19031 - DNA, 339 bp, Zea mays
  Peptide Sequence Number=SeqID_60810
atgccgcgaccagaatccaccgtggaccccgcccccacggtccccaaccccagcccacgccgccgtagcaccgtcgcccgcaatccgtcgtggcgtgatgggaagaggggtggccccggggaggcgcgaatgcgaggatggccaccgcacgggatccgtcccatcgccctgatgccgtctttgctcacgcaggcggagggagatggagcagaggagatggacgcgtgttggggacttgttctcaaccgctatgaatcaagaataagacaacataaaataataaatgataatgaccttcgtccaatgaagcattactccctcggggataatgcattctag

SEQ ID NO: 19032 - DNA, 696 bp, Zea mays
  Peptide Sequence Number=SeqID_60811
atgccgcgaatggggccaggccacgactcggcccagtcatggaccgctactcagggcccacagcagcgcccgaccgcaccacatgggagggtccagagccgccacgtgtccatgaaagaaggaatgctccaggtcaccaacagcagcgaccaggccgtctcgcaggcggcgttcctgtccgttccgctggcaggcagtgcgcccgtgctgcggcgcgcactgtgctcatcatcactcacacgttgccaggaaggctttcgctgtacgctaatactatgtaggctgcggatattaggacgcaaggagattgcactagcgactagcattagttgctccaagttctacatccgctatgttcctaggcccacatgtcggggctcaacacccttctgcgactgggggcggaacgagcgcaacaagcgcccacagtcgcagaggggcaacaacggctcatgccctgtacaccccaacagtcgccacagcgtcgcagaatgtcgcgagatcatcgagctcgcgaagcacgtcagcgagcagcgcgagcagtcagacggctccccacctcgtcgccgacctagcaaggaaagggtcgacgacgacgaggtggccgcggctgaacaggacctcgggtatcagtcgcccaagggggtcctgaaagatgttttcaccagagactccgactccggtgacgacaactag

SEQ ID NO: 19033 - DNA, 450 bp, Zea mays
  Peptide Sequence Number=SeqID_60812
atgacccctgccacgggagaaaaggacgtggacgccccgttcaccgaggagatgcgggcggcggccatgcggctgcactccagggaccaggccagggacggcacgaaggaggcgcccctggagccacccgtcgccaagtggcagaccactgtcgagggatgccgagttcagggatactggtttggagagatcggagccgctcggcagggatctggaatggttcaggcagcaaggtcacgtagttctggaaccatctgggcattgcttcaaatctgttgtaattcatcagaaggatctgtttacaatgttcatggtcatttttctgtactggtttattttgaccaggcaaccaaacattttaggttggctcattatatacgggctcccttgagcctggttctctcactgagccaggctcaggctggaccaggcaaccaaacatatccttag

SEQ ID NO: 19034 - DNA, 577 bp, Zea mays
  Peptide Sequence Number=SeqID_60813
gggggtcgagctggaggagttgagcgaaggctattgcgacgcttggagttattcgaacttcgctggcatggtgaaggccactaagccttttgcccagaagctatgtgttgtctcgcccaaacgacgtagtggctcggtgccaggcatgctaggcggcctagcgtatggttgctacctcttcgtccccgcgatcggcggcaggagttcatgcaacttcctctaccccgtcttctactcttcttcctgtggtggtttgaagccggccatgcaaggagcccggggtgcagttggtgacggcggccggggatgcggctcctggcgcgattctcccaagggtcgtttccccagcatggtgcggcggccggtgctggcgctgcccggggccatggcgtgtggtgttcgtcctcaacgtgtcgatgatgaagctgcagatcagttctgggcgagttccagggtgccaatcaaagctttgaccccgggctacggcgggtatggtgccggggatgacctcggttcccggcacaatacggcggaagggctggccggcttgggatgtggtactggcaggtcgcggtaa

SEQ ID NO: 19035 - DNA, 426 bp, Zea mays
  Peptide Sequence Number=SeqID_60814
atgtgcgaggactgcgtcgcggcggcggcgcccgagaaggtgttgctgtcgtcgatgggctggtgtgatctggatgagcgggacctcgcctgtgcctgctgcagcgtcgcgctcgagagcggtttctactggtcgtcgcacgcgcggcatggctcagactgtggccacaagcaagaggagaaggcaccgaggtcaaatggaagacgctggagtgagatgaggtggatgaagcgaggagaggagaggcatctagaagcatgtgtggacggaactctcgagaggcagagggactgtgggagtgaggaggcacgtacagggagcaccgcagcaggtatatggctcggttgccgtccaataacacatggtgaagctacacagttcatgcgggttgcaaatgatgatgggcacatatggacgtggaagtga

SEQ ID NO: 19036 - DNA, 294 bp, Zea mays
  Peptide Sequence Number=SeqID_60815
atggaactatttgtcttggtgatagctggcttgtgtttgcttccaataataaaggtgaacaaggttgcatattgttttgttgatatacttctgtggactctttgctttaagtggtcatctttgaccataccacatgtccaaaaaggcataaaagaagaaagaccatttcttgtggagatttatgctgatgacataaatccaactacaactataaaagggaagcactacatcggctctggtacttcagtgaaaagatttcaccatatgcaggtccatgtttatgacaaatcatag

SEQ ID NO: 19037 - DNA, 1065 bp, Zea mays
  Peptide Sequence Number=SeqID_60816
atggcaatggcaccacgcgcaggagtgttggaggaggctaaccctagccgcccatccgcccgccgtgaaggcgtcgatcaagttccgggacgacgaccgaccgctgctgcgcgccaaggtgtcgatggcgtgctagggctgcccttcctctcaggcctcgcggcggggggagacgccaaggacctccgttttgacctctccaccgccttcccctctgtcccggcgctccgcctctcataccgccccaacgaacccctccagccttttgccctctccgtccgcacggggtcccctatccgcgccccattcgccctcgccgccgaattcaacctcacctcctccaacccgcccgccttctcgctcctcttcaagccccggatcggggacttcgccgtcgcaagctccgtccactccccgccgacaccgccgcccacatccactccgcccccgctagcgatcaagatggtcgacctcaccaccaacagcgacgaccacgactgcgaagcacacggtaacgacctctccttcgccgagaatgtattcggggcgaacgtggcggccgccaccgggacgaacggcggcggcgtaggcgcgctgctgtccgggatgcggctcacgaccaggagcgtgctgccactgtggagtaaagcgagcctgtggttccagtgggggctgcgcgtgccgccggagatcaaggccacgcttgcagacaacgggtacgggcgcaaggctgggagcctcgccatcagcaagctgccgctgctggtgatgaacaagatcactatcgagcacacgcccaaggtgccttcacagtctgaagcggacaagaagaggaagaaagacacaccaccggcagctgaggatgaagagttctcactcatgaagaggcaactggataagctgaatgcggagagcacaatgctgcgtcgtgcagtcgaggacttgagtgcagagattggagccggcaaaggcaatgatcgttttgtggttaataataatacttcctcgctggagaagattgctaaagggcagtttagcccctcgctggagcctggaggcaagtga

SEQ ID NO: 19038 - DNA, 285 bp, Zea mays
  Peptide Sequence Number=SeqID_60817
atggcgccattccctcctccccttcttcttcctcaagcaagtagcagcccctccagctcctgtccatggcgccagttttgcgccctccctgcgcagctccatttcccccatggccgtgagctccccatctggccgccatccacccctgtgctcggccctcccagtgcggcgtcaaccaatctgcgcaacgatgctggtccacagccgcgagccccatcgatctacacggccctagttgcaatcgtttcccagcacgtcggcatcgagctccgcgagctccgctag

SEQ ID NO: 19039 - DNA, 561 bp, Zea mays
  Peptide Sequence Number=SeqID_60818
atggtcgacctcaccaccaacagcgacgaccacgactgcgaagcacacggtaacgacctctccttcgccgagaatgtattcggggcgaacgtggcggccgccaccgggacgaacggcggcggcgtaggcgcgctgctgtccgggatgcggctcacgaccaggagcgtgctgccactgtggagtaaagcgagcatgtggttccagtgggggctgcgcgtgccgccggagatcaaggccacgcttgcagacaacgggtacgggcgcaaggctgggagcctcgccatcagcaagctgccgctgctggtgatgaacaagatcattatcgagcacacgcccaaggtgccttcacagtctgaagcggacaagaagaggaagaaagacacaccaccggcagctgaggatgaagagttctcactcatgaagaggcaactggataagctgaatgcggagagcacaatgctgcgtcgtgcagtcgaggacttgagtgcagagattggagccggcaaaggcaatgatcgatatcctgttctgtataaattttcatattttgatctaaaatga

SEQ ID NO: 19040 - DNA, 585 bp, Zea mays
  Peptide Sequence Number=SeqID_60819
atggtgcccgtgggctccacctgcgcagctgcggggccgcgccgggggggctgcaacgctagccgtgatgcctacaactcggccacgcccagaggggaggagggagggcagctgtggcaggattgggcggtggtcacggaagctgccgaggcctgcgccccggggacgggatactcgcccaaaccatcggagctcgccggcctcgctgcatctgcaccctgccctcgtgcgatcgtcaaggtgagcattcccccttctcctcttccctctcctcccttccctgctccgcttccccccccctttttcttcctcggcacgcaacagctcgacacaggcgcgcagatacccggcccccgtgcgagctcgcagcacggcggccagcgagtggcgcttgcttggcttggcttggctagagcatggcatggtgcccggcagagcggcctgcgcggcgtggccagctcggctcatggtgtggccagcgcggcccgctcggcccacggcgtggccagcgctgggcgtgcgccctgcagggccctcggcgcggcgcgtggtgcgacgggcgttcaacgagactttggtgcatag

SEQ ID NO: 19041 - DNA, 1416 bp, Zea mays
  Peptide Sequence Number=SeqID_60820
atggagatgaagctgaccatcaggagggtgcccaccgtcgtctccaactaccaggaggacgccgacaagccgcgcgcgggctgcgggaggaactgcctcggcgactgctgcctgcctgcttccaagcttcccctctacgcgttcaagttgactccggcaaagggctcgcaggaggatgctgcttcaaccaagttacttgttgatattctccttagtgaggggattgaagaggctaaaatcctctacgcgttcaagttgactccggcaaagggctcgcaggaggatgctgcttcaaccaagttacttgttgatatcctccttagtgagtgggaggacaggatgactcgaggcttattccgctacgatgtcactgcctgtgagaccaaggtcattcctggcaaccttgggtttgttgcacaactcaatgaagggcgccatcttaagaagcgccctactgagtttcgtgtggaccgtgtgctccagccgtttgaccctgccaaattcaatttcacaaaagttggccaggaagaggttctcttccaatttgagaatagtggtggtgatgacagctatttcctgaacaacgctccaatcattgctgttgatcgggctccaaatgttattgctatcaatgtaagcccaattgaatatggacatgtgcttctcattcctcgtgttctggaccgcctgcctcagaggattgatccagagagcttcttgcttgcactgcaaatggcagccgagggaggtagcccatacttcaggcttggttacaatagcttgggtgcgtttgccaccatcaatcacctccactttcaggcgtactacttgtcagtgcctttccctgttgagaaggcagctacccacaagatcccactctctgaggacacgaagaagaatggggtgaccgtgtccaagctgataaattatcctgtgagaggcctggtatttgagggagggaacaccctggacgacctggccactgtggtttctaatgcttgcatttggctgcaagacaacaatgtgccttacaatgtgctcatttctgactgtggcaagagggttttcctgttcccccagtgctacgcagagaagcaggctctgggtgaagtgagccaggagctgctggacactcaggtgaacccagctgtgtgggagatcagtggacacatggtgctgaaacggaggatggactatgaggaggcatctgaaacctccgcgtggaaactcctcgccgaggtctctctctccgaggagcgcttcgaggaagtgaaggcgtacatcttcagcgctgctggcctggttcagtatgatgaggaagaggaggaagccagcgacggtgagggccctacggcctatgttcctgtcaaggttacccctctgcccgtcgctgaagggtgcctcgtcctcccgtga

SEQ ID NO: 19042 - DNA, 534 bp, Zea mays
  Peptide Sequence Number=SeqID_60821
atggatgaactcaacaaatggcggcatttgcatccggaccctgaggacgagctagcatacatgtacaggcagcaagaagaagatcatgccgggatgcaacagcaacatcaccatttcgctgagcggctgcccgagcagcagcagtactacacaccaccaccaccagcagcagcgccgcctacgtcctctagccccttccttcctcgtcttcaccacacctccagtttcccgggctttggggacccggcagtaccacctcggctgccgttccggccggccaaggaagagccagggcagccgtcatcattgagcaatcgcatcctctccttcggcgggcagcctcctagcacgctcaacttctcaggaagcgattggacggaagccggcgttgaagcggtgcaacagatgccgccggagaggcggagccggatgcactggaacacgcaggagcatgtcatcgccgagcgcaagcggcgcgagaagatgcagcagcagttcgtgacgctggccaccatcgtccccgacctcaccaag

SEQ ID NO: 19043 - DNA, 438 bp, Zea mays
  Peptide Sequence Number=SeqID_60822
atgaggttcttaattggaagttgggtattgcggatggaaaagacagataagatctctttactagggagcaccattgagtacgtgaagcatctcgaggagaaggtgaaggccctggaggggcgaagggaaaggagaacgtatgagcccactgactttgagagcaaatgtcatatatcaactgatattgacgcctcatcctccagcgggagtgcctttggtgcgggtgggttcaacccgacggttgatgcaagcattcatggcgacaccgtcctattgaaaatatgctgcaaggagagaagaggagtgctagtgatgatcatctccgagattgagaatcagggcctcgccatcataaacactagtgttctaccattcacagactcgtgcctcaacatcaccatcactgcaaaggcaatgcattctctctctcatgtttaa

SEQ ID NO: 19044 - DNA, 242 bp, Zea mays
  Peptide Sequence Number=SeqID_60823
atgacgggccacgccgagctcttggctacgaagaccaagggacccaagggtccacatgtattcctggctttacccagggttgacaacgtcggtggaagtcgtcgagaaggtgcttcccaaacaccttattctccctctcctggtgcggggtctcgaagacgacaggttccgaagacctactttctcgattataaatgcacgccgaagcttaaaatgaagatgactacaacgacgatgcaaca

SEQ ID NO: 19045 - DNA, 534 bp, Zea mays
  Peptide Sequence Number=SeqID_60824
atggtggtagcagccctggcccagtggcagtggccccctcccctggttgcacacttgcccgcgacgcgaggcacagctgcggctgcgggccatataaaccaaagcaaaccggaggcggggttctgcgctcaacattcgcctcgtgctctcggccttttggattcgggattcctcctcctccttctcctcctgatcacctcccactcccactcggccagccccacccaccgccggccccccacgcaacggggagcacaggagcagatcgatccagcctcgcggccgcgccacgcgaccgaccgagctgcttgcctgcctgcgtgcctgcgtggtgatcacgtcgcgcctggcggtggtgtgggtccggcgggcaacaaaggcgccagcatggcgagcaacaacggcggcgcgatgcaggagccgctgctgccgaaggcgcccaagagcggggggtggctctggaaagggacgcgccccgtccgcgtccggcgaccttcccgtcgtccaaggccgtgctgcggctgcccccgccac

SEQ ID NO: 19046 - DNA, 126 bp, Zea mays
  Peptide Sequence Number=SeqID_60825
atggcgttgttgtctccgggccggcctgcttttccggccgcgtcccgacgagacaacggacttggtttctgtttggcatcccgtccctgtctcccgctttccccagctgaccatgtacaggtatga

SEQ ID NO: 19047 - DNA, 489 bp, Zea mays
  Peptide Sequence Number=SeqID_60826
atgggtactcgaaaacccgacgggttttacttgatatgtaggcaggaatctgaaaatgtgaaggaaactaagaaattgaaaatagaaaaaaagaaaaagaaaagagaagagcaatcctgcgcttgggccagatcacctcccacccagcccaagtcgagagagaagaaaggaagagcagagagagaacgggagcgttgccgggagggtgttcaacggtgccgcaccctggacgtccagggacattcctgtgcttgcggcgtggagcgttctgggcctcctcgccgggcgttgaggactgcgcgggcgccgtcgtccggttgggtcgcagaccagggcatgctcgaagtggtgggcgactggagtcgcgtctcgagcccaggaagtcggcggcgcgcttcggtagaacttgtgcggcgtaactcgggccacgatcgcatagcaggcgtactggttcgacgtaatcggctcagggcgtcgatctgcggttga

SEQ ID NO: 19048 - DNA, 726 bp, Zea mays
  Peptide Sequence Number=SeqID_60827
atgcccgacaccgaaaggcggccaccaccgcggcgacgctgcccgttgcccgccagctggatctcgtggcaccttcccgctgcaccggccaccaccagcagcagccgtgccactaccactgccactgccactgccaccgcccgtcacgacgatgaggaggaggacggattcaccttcgccgccgtcgccgtgccgtgccccgtgtacgccgtctttggccgcccacggtggtcgccgcagaagcagcgtcaacaggaggaggaggaggaggaggaggggcccgctggcacgggcgcggccaccgcgcggcgggtgccgctcgggcggctcctcctggaggagcggtggtgcgacgacggcgcaccgtcggtgtcggggaaacagcccgcggacgccgccgaggccgagctcgacggcgtgccggcggagacctactgcctgtggtctcccgcgtcgccagcagcaggatcttctcggcgggcgtcccccgcgcgctgccggacgagaggatcagccggtttgtcggtcctccggtggcagcggcagcggcgggtcgccgccggcaaggacaagttcgtgttcctggccggcgccggcgaaggacacgggagcgccgccaggggtggcggcaaatcgacgacgacgacgttcctcccgtggaagcaagatcttgtcgggctggttgcgagcgccatcaccttccgcccgagctgccagccgttctga

SEQ ID NO: 19049 - DNA, 1284 bp, Zea mays
  Peptide Sequence Number=SeqID_60828
atgggcaaggcgaaggggaagcagcgtcaggacaagttctaccacctcgccaaggagcaagggtaccggagtcgcgcggcgttcaagctgctccagctcgacgcgcggttccacttcctcccgacggcgcgctcggtgcttgacctctgcgccgcgccgggagggctcatggactccaacggcgtctccgcttttgacgtcgtgctccacgacgggtcgcccaacgtcggtggtgcctgggcgcaggaggctacgtcgcaatcggcgctcgtcatagacgcactgcgcctcgctaccatgttcctcgctcccaagggcgccttcatcacgaaggtttttaggtctcaagattacaacgctattatgtactgtcttaaacagttgtttgagaaggtcgaggcgactaaacctacggcaagtcggtctacatctgctgaaatttatatcatttgcctgaaatacaaggctcctgcaaagattcaaccagaacttctcgatataaagcacttattcaggtatgaagaagggaatacaacattacggaaagttggtttggcatcagactttatatggtctgacacccaggcgccactagagtttttgggctcttacaatgcaatttcattcgataatccagaatccctgcccataaagaatcatgagcttacaacagatgatataaaaaatttctgtgaggacttgcttctgttggataaacatagtttcaagcatattttaaaatggcgaattcgtttacgaaaatcactgtcagcatcatcacaagtcaccccaaaggtcaatgatgctgtggagagcacaaaggtcatggatgatgatgtacttctacaggaaatggaagaattgactagtgtcattgatagaaagaaaaaaagagaaaaaaagcgactatcaaagcgtcgagcaaaggataaagcacgcaaagccacaggaatgcaggttgatgctacaggagatgattatggcgatcctgacctgttttctattagtgttattaagggtggaaaagaacttgaagctgttgaatcagcagagattgatgtggaagatgaaattggagacggtgataatgaggatactcaagctcttgaagactctgatgaggaaatggattctgatgacgaacagcagaggtatgatgcccagcttgaagagatgcttgatgaagcttatgagcgctttgtaactaaaaagggtggtgaaataaagcaagaacgcaagcgtgcaaaacgaataaatcctgatgctgatgcagaactgttagag

SEQ ID NO: 19050 - DNA, 1512 bp, Zea mays
  Peptide Sequence Number=SeqID_60829
atggcgccgccaccacaaccaaagcagctggtgctcgctgcgtcatccgcggacgcgggcgtggctgcctgggacctccgcaccggcgcggaggacatccgcctccgcccctgcgcctcccgccctcggtcgctcgcctcggttgccgaccgcttcctcgcctccgctcaggctcttcccgcgggcggcaactccgggaccatccacttctactactgggacaagccgcaagtggccgtcaagagctttcctgctgagccgatccgcgcactcatcgccgatcaggagggaagctacctcattggcggtggcagcaatggcaacattttcctttgggagtgtgtttccttggtcgctagtgagctcaaggtggtgcgaagtggatgctcctggtgtgctagagggatcctgagtcacgttagcaatgggaagagaggcagggtaaaggcaaagttgacacaggaagaggtgtctagtggagagcttctccatacatggcatgcacactatcgtgctgttaggtgcctcgggctgtatgactatttgcttgtctcagggtcagaggatgggactatcaaagtttgggatctcatcacggtgcttgatgagcaatcaaggctggaggtccagacaccatatttgtatagtttcagtcagcatgcactgcctgtaactgatattgcttgttttcttggagcaatcgctatatcttcttctgaggatcgaacctgcaaaatttggagtttatctgagggtaggatgctgagaagcatttcatttcctactagcattgattctatagcactagacccaagaagtcatattttctatgctggtggtagagatggaaaaatatatgttactgctatgggtgttgatctcagttttcatggtagggatgagtcatctattctgggtgcattggatgaccacagtcggcaacttggaaattcttttctttctcaagacattacgagtgtagccggggatcgaacatgcaacatgtacattatgcacagcattaggaacattaaacaaagttgtgttgccagggccttcggtctggatgagggacaaccagaggcagcctggagcaaggcagtaacaagcttagcatcaagcagagatggacttctacttgtctctggatctgaggatggtccagtaaccaatgttcttattgtaacgccacaacgagtaaatctgccaccgctacaaccattacgcaaagttcggtctgcaaatggggaggctgaacggcaggcagtacttcttcatcggcctgaaaatgatgtcccaattcctggaaataagaccttcatttttatggagcgctacttggatgagcttcagaagcatggtggttcatccaggttatttgattttgggccgaatgctcagaatggcactccaaaccaacagggaacagaatggagagatagatacttggagttgcaggatctctttgtacatgaggtcctccatcagatgccatcctcgaggaacccatga

SEQ ID NO: 19051 - DNA, 195 bp, Zea mays
  Peptide Sequence Number=SeqID_60830
atgagaaggcaagcgggccagtgggactgggaagaagggtggcaaaggcgcaaaggggaagggtggccagaaaggcatgagagggaaagctgggaagaaggcagggaaagccccacggtgacagtggctttggttgctttggaccaaattggcgactttggctctggaatcggcttgcatttccttatcagatga

SEQ ID NO: 19052 - DNA, 1002 bp, Zea mays
  Peptide Sequence Number=SeqID_60831
atgaacggaggcgccgccccaccatcagctgcggccgcggcgacgccgcctcaccggcggctgccggactttctccagagcgtgaacctcaagtacgtcaagctggggtaccactacctcatcacccacctgttgacactgatgctgctcccgctgatggccgtgatcctcctggaggccgggcgcaccgaccccgaggacctgcggcagctgtggctccacctccagtacaacctcgtgtccgtgctggtcctctccgccgtgctcgtgttcggcgccaccgtctacgtgctcacccgcccccgccccgtgtacctcgtggacttcgcctgctacaagccgcccgcgcacctccaggtccggttcgaggaattcatgcgccactccaagctctgcggcttctccgacgacgcgctggagtttcagcgcaagatcctggagcggtccgggctcagcgaggagacgtacgtccccgaggccatgcacgcgctcccgccccagcccacgatggccaacgcccgcgccgaggccgagaccgtcatgttcggcgcgctcgacagcctgttcaggtccacgggcgtcaggcccaaggacgtgggcgtgctcgtggtgaactgcagcctcttcaacccgacgccgtcgctgtcggccatgatcgtgaacaagtacaagctccgcgggaacgtccgcagcttcaacctgggcgggatgggctgcagcgccggcgtcatcgccgtggacctggcccgcgacatgctgcaggtgcaccgcggcacctacgccgtggtggtgagcacggagaacatcacccagaactggtacttcgggaaccgcaagtcgatgctgatccccaactgcctgttccgcgtgggcggcgcggcggtgctgctgtcgaaccgcggcggcgaccggcggcgcgccaagtacgtcctgaggcacgtggtgcgcacgcacaagggcgcggacgacagggcccttcaactgcgtgtaccaggagcatga

SEQ ID NO: 19053 - DNA, 2040 bp, Zea mays
  Peptide Sequence Number=SeqID_60832
atggcgttcactggctgcgctcatctcctcctcaccatgtccattctgctgctactctgtcatcggaggacacgtgcattcccactaccatcaccttctgcatcgtcaagcgccgcctccccgtcgcctcctccggtgccggcgctaccgcgaggcctaccacggctcataccggtgtggacgtcgctgcccgtgaatccgttcacggcgaaggcggcatttatccggtactggaaccggaaggtgagcagcaaccgcccgcacccggccttcctcttcgccaagctgtcgccgctctcggccccggacgcggccacgttctccaacctggcctccgcaggcaagctcgcctcccgcatccacgacttctgcgacgcggcgtccctgctctgtccatcgacccccgcggcgtcctggtcggcgtcgtccacgtccatggacggcgccgcgggcgtggcctcctccggcggtggcagtggcgctgcctccgccgcgccgttcaaggactacgagaacggaaacttcagcagctacggcaacagcggcggcggcggctctgaccagttcgcgatctactcgagcgggaagagcggacccgttgactcgttcaagcggtacggcaagggctcgctcggccggaacgactcctttgcgaactacgaggagggggcaaacgtcggcacgtccaccttcaactcgtacaccaccggagccaccggcggcgccggggagttcgccgggtacgctggacagacgaacacggtggcagtggccttcgccacctacgacagcgtcggcaatggccggacgcacgagttcacggcgtactcgcaggacgccaactccggcgttcagagcttcaccggctacggcaagaccgcgaacggcgcaggtgagtccttcgaaacctacgggaacaactccaacaccgttgcgtccggcttcatcaactacggcgagaagtccaacggcttcaacgacacgttcacctcctatggccttgtcgggaacgcgcccgagaacacgttccggagctacgcctccggcagcaacgccggcgtcgaccagttcaaggcgtacagggacgaagccaacgtcggcgacgacagcttcatgtcctacgcgaacaacgccaatggcgccgccgccgacttcgacagctacggcaagtcgaccaaccccgggagcgtggcgttcaaggggtacggccagggctccaaccccaaccaccgcatcggcttcaagcactacgccggcgaaaacacgacgttcaaggcgtactcaaacgaaggcgtcgagttcaaggagtaccagaacatgtcaaagatggaggtgtcaaaggcggccgcagcggcgcctgggcgccggctgcccgcgtggtcgccggagccggggaagttcttccgtgagcgagatctcatgatgggcaaccgaatgccgatgccggacatcgccgacaagatgccgcgccgcgcgttcctgccgagggacattgccaccaagataccgttcgaggagaacgccgtgtcggcactgttcggagcgccaccgggcacggcaatgaggcaggtggtggcgtcgacggtggccgagtgcgcgcgaccgcccagcccgggggagacgaagcggtgcacgacgtcggccgaggacatgctggacttcgcggtggagatgctgggcagcaacatcgcggttcgcagcacggagtccacggcaggcagcggtagggacgtccggctcgggaagatcacgggcatcgccggcggcagcgtgacgcggtccgtgtcgtgccatcagagcctgttcccgtacctggtgtactactgccactcggtgccacgggtccggctgtacgaggcggacatcctggacgtggactccaaccgtaagatcaatcatggcgtggccatctgccatctcgagacgtcggactggagccccaatcacggggcattcgtagcgctcggaggaaaacctggtcagattgaggtctgccactggatcttcgagggagacatggcttggacccttgttgattga

SEQ ID NO: 19054 - DNA, 747 bp, Zea mays
  Peptide Sequence Number=SeqID_60833
atggtcactcccagcaaaaggagctggacttttgctggtgccacaaatggttcgtctagatttcttgagtttgtggaatctaaaggtgattcagttttggaattgttgagcactccaacaaagataagcggggtgcattatgttcagggttcagttacattccatgatgtcattgacaatgcccacaatggtggagtggctcaaataaggttagaaggagtttacatatggccttttagacaacttcgcatggtagcaaacagtggtgcagatggtgaaccactccaggaagaggattatttcttgtcaaatccataccatttattgcggattttctcctctcaagtgtttcaagaatcttctgaagagaagaaccgaaggaagaattctctcacatatgacatggagaaacattgcaacacagaaatagctgctaaggtggttcgtgtgtcatctaacccaaatgatggagaacacgagaagtaccgtttggagggtttgatggagagtccagccgtcgatgatgatggggaatgcttctctcctatcttattgaatgcaacttctttgaatgttgaagtttattacaacaaagcagtcaactacacactgatgggagctgctaaggtttctattttaatgattggccaacaagctatcatggatgcatatctctgtctacttcacctgactgctgggatattggttgtccccttttgctcagttactcagttcatgcttaaatga

SEQ ID NO: 19055 - DNA, 249 bp, Zea mays
  Peptide Sequence Number=SeqID_60834
atggcatggcagaaaataggggaaagaacttccaacccggcaatcgaagtcccacagcaccttactcacctcatcgccccacgaaccagcggaggctgcggctccgatggacgcgacgtgctcccggagcggccgcagcgccgcggccagcggcagggctcagggcgatgcccaaccagcacgaggccctaccacagtggccctgatcacgacggctactgccgggaacgggcgaggtccccattctaa

SEQ ID NO: 19056 - DNA, 684 bp, Zea mays
  Peptide Sequence Number=SeqID_60835
atgtcaagacaatctaaaagactgtctatatcctgcatgacccactcggatgaagactcgctcgcgagtcgcttcggcgttgcgcggaacagcgtcgcacatgcgacagtagcactgtatttccgcttagtccacggccacgctatgctcacgggtcacggccacgctatgctcacggccgagtcattattccacgcgggtgcgtcctcactcctcagccaggcaaagaggccgaggccgaggccgcgcgcacgatataagcagcaccgccatcgctccacgcttcttggtaggtcgccggtcagcaggagcagcagcggcggcggcggggagaaggctgctaactggtggccggccgttcgccgcgagctccggcacgcctccggtccggcggacggcagcagcagcatgtattcggccgccccgctgctaggcgacgaggccggcggtggcgagcccgcgccgcggacgccgccgccgccgtcctcgtgggtggggcgcgtggtggacgcggccgaggcgcgcgcgcagctggggttcgcggtgccgatggtgctgaccagcatggcctactacggcatcccgctggtgtcggtgatgttctcgggccagctcggcgacgtccacctcgccggcgccacgctcggcaactcctgggccaccgtcaccggctacgcgttcgtg

SEQ ID NO: 19057 - DNA, 426 bp, Zea mays
  Peptide Sequence Number=SeqID_60836
gaactcttcgaccatgacacgttcaccaaggacgacagatgggacgccgagttctccatcctcaacttcgtggagatcgccaagcaggacctgagcgacgtccccgacggcacggtgatgaagacgatccacacggagaagggcagctgcctcgccaccgacagccacatcacgtgcaaggacggcaaggtctcccaggacatcctgctcaggctcagggacaccgagaccggcgacctcgtcctgcgcctgacctgggtcaacatccccggcgtcgcgcgttctgataaggtgtgcaagaaggctcatgctactgggagcaatgcttctgcggcccagcctggggctccagctcctggcaaaatgcagttttgcagagcttcagaccacagtacaaaactgacaataagcatacttgaacagtga

SEQ ID NO: 19058 - DNA, 510 bp, Zea mays
  Peptide Sequence Number=SeqID_60837
atggccgcggaaggcaagacgccgtccctcgccgaggagtattcacttccaccacaggaagttccagtggaaaaggcagctgaggagaagccctctagtggtactgagtctgaagctgctccctcaaccaatgatgaaactcctccatctgtagaagacaagaatggaacttctgaagtacaagatgctgctgaaaatccagaggcagaagaaactaacactgctgcagaggaaacacctgctgtagaggaagcaagtgagactaccgaggaggaagaggctgagaaacctgagatcaagatcgaaacagctccagcagattttcgtttcccaacaacaaaccaaacaaggcattgtttcacacgctatgttgaatatcacaggtgtgtggctgcaaaaggtgaggatgcacctgagtgtgataagttcgccaagtactatcgatccctgtgcccaggtgaatggagttataaatggttggatgtgttgcttcaccttgtccttgtctag

SEQ ID NO: 19059 - DNA, 1800 bp, Zea mays
  Peptide Sequence Number=SeqID_60838
atgcaacgagccatccggatagccgcggctgcgacaaggcgagcgctgtcgtcgtcggcggcgagggcatcaccccctcctccccgcggacccctggctcctggctggggcgccactaggtggctctgcagcgggcgggaggcgctgagctacgacgtggtgatcgtgggcgcagggcccgcggggctcgccgcggcgatccggctgaagcagctctgccgcgctgctgacaccgacctctccgtatgcgtcctggagaagggctccgaagtcggtgctcatgtgctgtcggggaatgtgtttgagccccgagccttggacgagctcattcccaagtggaggcaagaggattctccaatcagagttcctgtttcatctgacaagttctggctgttaacgaagaaccaagcttggacactaccatctccatttgacaacaaaggaaactacgtgatcagagggtcaggctttgctgaaaaattaattgtgtccagcttgagccaattggtgcgttggatggccacaaaagctgaagagttgggtgttgaagtgtatccaggttttgctgctagtgagatactttatgatgaaaatcaaatagttacaggagtcgcaaccaatgatgttggtattgctaaggatggtaccaaaagggaaacttttcaacctggtgtagaactaagaggcaatttgatgctaaggataatcatatttcagaaaataataagaaatcacaagctcagagagagagggcaagggcaacatcagacatatgctcttggaattaaggaggtttgggagattgaagaaggaaagcacaatccaggttctgttattcatactgttggatggcctttggatactaaaacatatggaggatcattcctgtaccaccttgatgatagacagttggcaattggtctggttgttgcgttgaattatcgaaatccgtttctgagtccctatgatgaattccagaaatttaagcagcaccctgctgttagaaaacttttggaaggtggaacagctattcagtatggtgcacgtactctcaatgaaggtggtttccagtcaataccatatccaattttccctggaggtgcaattattggatgctctgcaggatttctaaatgttcccaaaataaaaggaacccatacagctatgaaatcaggtatgcttgcggcggaagcaactttcaagtccctcgttgaaggatcttcgatggaactgtactgggagaacctcaagaagtcatggatatgggaagaacttcataaagctaggaattatagaccagcatttgaatacggattaattccgggtatggttttgtctgcactggaacgctacatattcaaagggaagtcaccttatacattgaagcatgggagacccgatcatgaagcaacagactctcattttgttgccactgagagtgacaaaagacttcattgtggacagacggccaatctgcatgcgcctattcaatatcctaaaccagatggacatataacatttgatgtcccaacatctttatacagatatatctctgatgagaaaggtgacccaaagcttcatataaatgcacagaattgtcttcattgcaaggcttgcgacatcaaagatccaaagcagaacatcgagtggacagttccagaaggtggaggtggtcctggttacacaccctttggtgaagatgtctgtgaactgcaacatggtcgggacattgagaacgtgaacgtcactggtggcgacacgctcgtggatgaaatgaaggttgatctccacgtgcgctga

SEQ ID NO: 19060 - DNA, 324 bp, Zea mays
  Peptide Sequence Number=SeqID_60839
atgaagccgtctagtggtggaaagacatggagaaggcataaggtcaattttgtcctcagcagggcccagaggaaggaagtactacagtggatcaagatgttgatgttccctaatggcctctcaagggcactgtacgggggtatttataggtgtctgagtgcccaacgtctcaatacgaaggctggagcaaagggtagcgtcttcgccttcgccccaacatttgccctccgagggaccagttcgactaagtcatctagtgccgaagacgtcgctagatggtggaggcgctgccctcgctcaaagtggttccgcgggggtttttga

SEQ ID NO: 19061 - DNA, 918 bp, Zea mays
  Peptide Sequence Number=SeqID_60840
atgacgatggagatgttgtctgagatcctagcgaagttggaagatttgagcgctcagtggccgagtggcgcagccgtgctgagccatcgttcatcgactccatcctcctgtacatatcgccgacaccgtggattctggacgagagtgccgcacctccatggtctccaacaacgagtcagcgatggcaggtggtctccttgccatcgcccacgtgttacccaccctgggctacacgcctacaccacaagtcatcaactccgcggttctcattacctcctccgagcacgccgaggtgatgcaccccaactgtttgacgccgagcctgcatcctcgccgccaactccgacgactgcgagctcgaggtcgcgatctccaccaccagcatggacatcatccccgctgtacccgtcgccggctctaacaaccaagaaccaccctcagcctctgctccctcacaagtcacagcacgtcaaccttgctgaagcctatgcctctaccaagcttgtccaggtgatgcccgctaggtgtttgatgccgggtcatggatgcagcctgtgtgttccaatgccagtacgcaagtcatccaccgtactgactttacctgcagttctgccctgtcttggcaccatcccttgcaatgcacacaaggtgtccgagtggcattacaagagaagctgcagctgtcatggagtgtgccaggcacaaccgaattttggtattgccctaactcatctcagatactgtgacacaaatgctggtattttgcttgattttgttggcagctttgagcatcatgaatgcaagtgtctgggaatcgcttatgtttactgctgggacaagcatatgccacccaatatatggtggttaacctggaaggattctcggatcttcagaaaagggttgtggaaaactaactaa

SEQ ID NO: 19062 - DNA, 249 bp, Zea mays
  Peptide Sequence Number=SeqID_60841
atggcatcagtgcttctatcgtatccttatggtgagctggtccattcaactcaaatcaagctaggatttgtactgctattagaggttgttgaggacctggctattgacactaatgtgattgaacttttcatggcacacacaattttggatgacattctgccactggctttcctcagcaaggcaaaagtgccaaaggttcacaacaagccaattaaaagaaccaatgttgggttcaaaatagagagctaa

SEQ ID NO: 19063 - DNA, 333 bp, Zea mays
  Peptide Sequence Number=SeqID_60842
atgcagccgcggtacggagaagcacgacagccgctgccggggcgaaaggtttacttgaaccctaagcaagcgatctttatctcttacttgacccctaaatgtcgatgttcccctacagacgtgatgcttagaagggcaccatctgatcgagttgcatgtgtacaaccaccgggatcccatggtgtagtctggtgtgtgatgatacctaggagtggtcacaacaacgataacggagatgccctcatagaggttcgtgatggaatgtggcggctctatgcagtgcgcgcctgcaaagaaccccatgctttctcaccgttggatgactgcttgtag

SEQ ID NO: 19064 - DNA, 588 bp, Zea mays
  Peptide Sequence Number=SeqID_60843
atggttgaaagggaaggggctcggtcactctacctgggacttgcaccagcgttggcgagagctgttgtctatggtggccttcggtttggactgtatgagccctgcaagcatgtctgcagttatgcatttggttcaacaaactttgcttttaaatttgcatctggagtcattgctgggggccttgcaactgctttaacaaatcccatggaagttttgaaggtgaggctgcagatgagtaaaagcagtaccagtacaataagagagatgagaaaagttatagcgcacgaagggtttaaagcactttggaaaggagtcggcccagcaatgacaagagcaggttgcctcactgcatcacaaatggcgacttacgatgaggccaaacaggaattattcctggaatgttacaaccgaggagattggaaatacaataccttgagcgccaacaacatgaaggttgtggtgacagagggtgtgaagtcactttataaaggtggatttgccacattcgcgagagtaggccctcagacaacgattacctttgtcgtgtgcgagaaactgcgcgaacttgcaggaatgactgccatctag

SEQ ID NO: 19065 - DNA, 719 bp, Zea mays
  Peptide Sequence Number=SeqID_60844
atggagcccaagatatcttcggtcggcgttcgcgacctccgtcgtgtcgtcttccccacccccgtcctcgtcgtcgaccttagccgtgtcgtcatccccacccccgtcctcgtcgtcccgctcgacgcccaccgtgacctccaccgcgtcatcatccccaccccgtgcccatcgacccgtgtcgtcatcccccctcctgcgataggatctgggagcagcaaggcaccactagagtcggcctcgaccacctacgcgctctcctccgagccgacctcgaagttgagggtgacagtgttgttccatagtgtctccctgaagctggcgcggaggaggcggctcggcgtcgcaaggtccaggggaaggcgttgtcgttggggtagacgaaatgccctggacgatcgcctgcctgtcgccccccgcgtcgtcgacctccgcaacggcgcggcgcgtctgcgccttgcagggagctcgagtcgttgtcggcaccgacttccagttcccgacctcggcgccatggacctggacccagaggggatcttccgcgatgacagcgatgaagacgaagatagtgtcaagggttctttcagcagcaatggcctcactgtttcttctaaattcccaagattctcggacatgtacactctcacgatagcaagtgtaaacccacagtctatcgcagcaaacaagccaatccatttcactaagagcgtgacaaagtg

SEQ ID NO: 19066 - DNA, 585 bp, Zea mays
  Peptide Sequence Number=SeqID_60845
atggcggaaacagttaagcgctgccgctgctccgggccaataaagaaacgccacagatgcagaacaggagcgagcctaggagctgcccccgggaacacggcggaaggcacggatgcgaccagcgctggggcgcctcgagcaatgcaaggacctgagcagcagctcagcgggtggcgcggccgcggatttgaagccctggggagggagatgaccagatggcgcagagagaagggggctgcaggcagccaggcagtgctgtgcaactgtgcaaggacggacgggactcgctgctcctcccttctcgtctgcgcgggtgcgcgctcgcgctgttcgagaagacgactggcagcagagaagcagggagaggagggtaggccggtaggggagtggggggagagcagcagccagcagcggcagtgggtactggcctactgggagggagcaaagagcgaaggagctgagaaatatgaagggaataaaggcaaaagcgttgggcccctttctttccccttctacggttctatgcctacaactacaatagacgttgggccccctttctttagcttcagtataataaaatggtaa

SEQ ID NO: 19067 - DNA, 258 bp, Zea mays
  Peptide Sequence Number=SeqID_60846
atggagagtgccagctgtgttggtgctccggttgatgttggtgctccggttgatgttagtgcatatgaccctatgactgatccaaagcggagaccaaagtttaatgatcccagctggaactatggctattggatagaaattgagaaacaagatatggtcacattcaacctttgcaagatcgtgacaactggaggaataaaaaacatagttattaaggcggtaaggcgaccaaccccctttttatcttttagacggtaa

SEQ ID NO: 19068 - DNA, 1176 bp, Zea mays
  Peptide Sequence Number=SeqID_60847
atgaggccaaggtttaataacatggtcaaccgacatgttgcatttccggcttcagtggccttggcgcccacaggcgcgatcatgaatgggctcattgcaagtgtgaaaatggtgggggtgacgcaggagacagacagtggggacgttccccaagaggggataaggcggctcctgggcgaagcggaggcaactcccgaggcgcccgccatgctgcgcaacagatcgagaagggcggttggtggtggtgccaaccaagcccaaggacgagcgggcggcctcatggccgagctccccgcggccgccgccgcccagtcgccgaggcatccttcgtcgtcctcctcctcctctcccgctgctgctcccgtgttcccttccccgaggccgttcgtggcgatggcggcgctgccccaggccgggctcctgccggacgggtcctccgaggggccccggtcagccgtgagccccacctccatcctcgagaccaagcacttctgctgctccccgctcccgccgttcctgtcggagcggagcctccggagggcggcgcgcgtggacgcggccgcggccgcggagccggccggcgtcggcctcgccgacgtgctccgggaccacggggacgccaaggtcgccgggggcaaggtggtgctagggtcccagctcagagtccaggtcccgtccggcagggccgtcgagctgctctcctccccgatcgagttcggcgccaagaacagggacgcgcagctggcggcgctgtcgcccgccaggaggctcctgccggaggtcgtgagctcgccgtccgcccgggtgttcgccgccggcggcgtggccgtcgtgccccccggcgagatggccatgtcggaggactacacctgcgtcatctcgcgcggccccaacccgaggaccacgcacatcttcgacgactgcatcgttgagagctgcggggatttgctagccgacaagcccgcggccggcggcgcagcagctgctgcctgtggcttcttcagctcttgccatgcatgcaacaagcaacttggacatggcaatgacatcttaatctatcgaggccataaagcgttctgcagcagcgagtgccggtaccaggagacgcttttggacgaagcggtggacggagaatttgcgctaggcgatggaggaaaaggaggagggcgttgttag

SEQ ID NO: 19069 - DNA, 228 bp, Zea mays
  Peptide Sequence Number=SeqID_60848
atgggaggcgagggcgtggacaccgggacgcggaatcgcggattcgatgggagaggggatgggaggaggcagcggagggtgaggaggcgtgattggatccgctgcgggacggtgtgcgagaccggcgcgaggcggacgccgccgcggacggtctgcgagaactgcgcgacgaggcatgagcggacgccgccgtggacggtgtgcgagaactgcgcgggcgaggcatga

SEQ ID NO: 19070 - DNA, 183 bp, Zea mays
  Peptide Sequence Number=SeqID_60849
atggagaaagtgcagcgtgggggtgaagctgacgatggagaaggtgcggcggaccacgctgcgcgggtttttttttgtcaccaatttgtgtggccttggccggcgttcactgatgttcaggtccaggttattaagatatgggatcatggtcaagtggacttttgtgtggtatattacggttga

SEQ ID NO: 19071 - DNA, 1539 bp, Zea mays
  Peptide Sequence Number=SeqID_60850
atgcataatcaaaagacgaagcagtttcttgggttgctggttgatgccaatgtcttaattcgagatgcagcacgcaagatctttgggttagtcaacatgccaaaacttcaaatattcaaatctgcagttgatggtcttgttacaagtttggagaagtatccagaggaagaggatatatatggtattatgttttccattggtaagaaccatgggagcttttcagctaacatagctaaacatttggccaaagagattactatggcatctgacggagagcttatcttggacaaaccaagggtcaaagcattgttaatagtgtctatttcagcacctttttctgatgataagcacaagcagctgggtataccttcgattatcttctcgtatgcaattcccctactggagaagatctcatgcgcactaggagaggttgatcaggattcactcttatcttacttgtatcataaaggtggaatgccattttgggaaaacaggtcagtatctgcagagtttggagaatctgaaagctgcaatgttgaaacagtgaaaattggtgcccatatagaaaacactgcaaaggaagccaaatgtctagatgaagttctggtaatgaaatccatactagaaatagttgaaggagtctggactatgagaatgtcgtgcaatgtttgtgaagttcgaactattttcagaacatgcaaagaagagctgagattattggcagaaaattcttctggatcaattggtgcattattgagctttctgagtgagtatcttgatgcaatattattcattgttgaaatatggcagttgattcagttggacaagccttatacttgtggcctaacgtcacttgatattttactggagaggttggatatgtctgtaaggaggatgaaatattgttatattggattaaatagagtattggaggtccaagttttggagctttctttgatagctcatttatgtagactctcaaagattgcagtgtgttccaaggtagttctgggtaaggtgctctgggtaattaatcgcttagaggatctgtgtgctgatgggtcctgtgaactgtctgacttcagtggagaaattaagaaggcctgtgataccaaccgtattggagataatctgattggcaacatcaacaatttgtttcaactcttccatctgaaaccaacaacagactttggaatgcttaaagtgataagtgcaatgttgcgggtctgtgataacgattctgaaaatccattacaatacatttgtggattaccggtgggtgtcagctttaaaatatctctgtggaacatatctggtcaccatcgactgtggctccgcatgaccattggtgaatctgtgcaacataccttcctagaattttctcgttttgaaggcaatgatgaggtgatgagtggctctatggttgttcctttgtatgctactccaaagacatgttcatttgtgcttcggggatcagcacccaccagggtggacatggaggaccgagtgattgtgtggttcaactctctgatgaactga

SEQ ID NO: 19072 - DNA, 966 bp, Zea mays
  Peptide Sequence Number=SeqID_60851
atgctcaaggagccatgcccctatcatcaggggcccgtcaagcacacccttgaggagtgcgccatgcttcggcgccactttcacaaggccgggccacccgcggagggtggtagggctcgcgacgatgataagaaggaagatcaccaggcaggagagttccccgaggtccgcgactgcttcatgatctacggtgggcaagtggcgaacgcctcgggtcggcaccgcaagcaagagcatcgggaggtctgttcggtaaaggtggcggcgccagtctacctagacttgtccgacaagcccatcaccttcgaccaagacgaccacctcgaccgcgtgctgagcccagggaaatacccgctcgtggtcgaccccgtcatcggcaacgtcaggctcaccaaggtcctcatggacggaagcagcagcctcaacatcgtctacgccgagaccctcaggctcctgagtgtcgatctgtcctcggtccgggcaggtgatgcgccttttcatgggatcatccccgagaaacacgtccaacccctcggacaactcgatctacccctctgctttgggacgccctccaacttccgaagggagaccctcatgttcgaggtggtcgggttccgaggaacctaccacgcagtactggggaggccatgctacgccaagttcatggccgtccccaactacacctacctcaagctcaagatgccgggccccaacggggtcatcaccgtcggccccacgtaccgacacgcgtacgaatgcgacgtggagtgcgtggagtacgccgaggccctcgccgaatccgaggccatcatcgccgacctggagagcctctctaaggaggtgccagacgtgaagcgccacgccggcaacttcgagccagcggagacggttaaatccgtccctctcgaccccagcaacgacgcctccaagcaaatccggattggctccgagctcgatcccaaatag

SEQ ID NO: 19073 - DNA, 495 bp, Zea mays
  Peptide Sequence Number=SeqID_60852
atgggcgacccgcaccccctctcctccgcccacctcaccgctgctgcctcctcggctcgagaacaccgtggccccaccaacgagcgcctcgccgcgtccgatccttccacgtccttcgctaagcgtcctagggttgcggcggagccgtccgattccggcggctgcgttccatgcgtcgaggcggacgtacgagctcttgtgtcggtgtccggaggaatttacccgctggcgcgggcaggagcgctccgtggactcaccgcggtccttgagaaggtcgacaccagcagctgtgtcagcgcagcgatcacggactgttgctacaaatgcgcggtggagctcatgagggacgacgacaatggcgtcaggcaacatttgatgtttttgtatttgcttatgtccgtcctacaaagaaagacattaaaagatttgtatcgcaaattaaggatcagacaaaatgacttggatacccctcaaagtactggtggacaatggtag

SEQ ID NO: 19074 - DNA, 342 bp, Zea mays
  Peptide Sequence Number=SeqID_60853
atggcgcagactgcaacgcccgcctgctcgtcagtcgtcaaccccgtccctgtccggctgcgccgctgccgtcttccagaaatgaaaatggtggaccacgggtaccgccggtgtcaattccaaccagatcaaagagagagactggggcctcgcgccctcgccggagacgtctacactacaccttcgtcccggggttcacggaagtatgagatgattgcattgagtagggatggacatggcaccatggtcgtaccgccccgaggccatcttgacctagaggctttgactgctgaggctgcttttgtcttggggggcatcctgaaggatgcccaagaggcctag

SEQ ID NO: 19075 - DNA, 696 bp, Zea mays
  Peptide Sequence Number=SeqID_60854
atgttcttcgatgggtcgctgatgaagacaggagcaggcgcaggcctgctcttcatctcacccctcggaaagcacctacgctacgtgctacgcctccacttcccggcgtccaacaatgtggctgagtatgaggctctggtcaacggtttgcgcatcgccatcgagctaggggttcgacgcctcgacgctcgcggtgactcgcagctcgtcatcgaccaagtcatgaagaactcccgctgccgcgacccgaagatggaagcaactgcgatgaggttcggcgcctggaagacaagccaagagctcctacaagagatacactcgggggcttgcggccatcacgcagcacctcgagcccttgttggaaacgccttccaacaaggtttctactggtcgacggcggtggccgacgccaccagaattgtccgcacctgcgaagggtgtccgttctacgcaaggcagacccacctgcccgctcaggccctgcagacgatacccatcacctggccttttgctgtgcagggtctggacctcgtcagccccttgcagaaggcacccgggggctacacgcacccctgggaagggccgttcgtcatcgccaaagttctgaagcccggaacaaacaagctggccgacagtcagggcgaggtctacaccaacactcggaatatccaacagctacgtcgcttctacccttaa

SEQ ID NO: 19076 - DNA, 591 bp, Zea mays
  Peptide Sequence Number=SeqID_60855
atggagagggatcgccaggatgcggcgcagaagcgccgggcggtcactaggattggggaccctttccgcgaagcgaagaaggcgcggggaggcacaaagtctgctgcccctggcaacagcaaaccaccgccggccgcgaagccggccgcccccgggcccagcaagtgttcggcgggtgcgagggctgctacttccggcgcgagcaaggagccctcggccgaggccgcgaaggaacaaaggccggcgtcgctggcgctcactaaggtggcagtggcatgtgttgccgactttgacacggacatatgcgtggcggattatcttgttggtaagttttttttcgaggacgaggcggccgccttcgccgaccatgttgcggctggtgccttgacttcggagtttgctgccgaagtcgagcgtctccgggcacagcatacggatgctgtttgggagaagtcggccgcggaaaacaaaagccacaggctgacagagaggttggtcgctacggaggccgagaaggaggaactccgacgccagttggcggaggagaggagggacgcgaacaaggccatcgccgacgtgcaggctgcttaa

SEQ ID NO: 19077 - DNA, 243 bp, Zea mays
  Peptide Sequence Number=SeqID_60856
atgaggccaacgggcccagtgcccgtttacattcgccgggaccccgcccccaaaagggagcaatgcccgagttgtgagcaagccccttgtccagtcacgatccatcgctacacccaattcccattcatcccgagggcggattctggcaccaagttttctccgctcttctggagcggagggaaaccctcaagaaatgtggtcagttgtgtttcgcatgagttaggggtcttagataaaagctag

SEQ ID NO: 19078 - DNA, 1041 bp, Zea mays
  Peptide Sequence Number=SeqID_60857
atgaggatggccggtttgtggatcgccgccttcagcttgctgctctgctcgtccttgtcaggagttgaaggcattggcgtgaactacggcacgatcgccagcaacctgccatcccccgacaaggtgatcgcgctgtgcaaggccaagggcatcaccgacgtccggctcttccacccggacaccgccgtcctggcggcgctccgaggctcgggcctgggcgtcgtgctcggcaccctgaacgaggacctggcccgcctggcctccgacccctcgttcgccgcgtcgtgggtgcaggcctacgtgcggcccttcgccggcgccgtccgcttccgctacgtggccgcgggcaacgaggtcgtcccgggggacctcgcctcgcacgtccttccggccatgcagaacctcgagtccgcgctccgtgccgctgggctcggcggcgtgcgggtcaccaccgccgtgtcgacgtccgtgctgggaacctcgtacccgccgtcgcagggcgccttctccgacgcggcgctgccgtccatggggcccatcgcgtcgttcctggcgcccaggtccacgccgctgctcgtcaacgtgtacccttacttcgcctactcggccgacccggcgtcggtgtcgctggactacgcgctgctgcggtccgactcgggcggcggggccgtcgtcgtggcggacggcggggcgtcgtacggcaacatgttcgacgccatcgtggacgccgtgtacgcggcgctggagagggccggcgcgcggggcctggagctggtggtctcggagaccgggtggccgtcgggcggaggcggcgccggcgcaagcgtgggtaacgcgtcggcgtacgtcaacaacgtggtgcgccacgtcgggagcggccgcggcacgccgcggcggcccgggaagcccgtggaggcgttcatcttcgccatgttcaatgagaaccagaagcccgagggcgtggagcagcacttcggcatgttccagccggacatgaccgaggtgtaccacgtcgacttcacggcagcatcttcctcgtag

SEQ ID NO: 19079 - DNA, 393 bp, Zea mays
  Peptide Sequence Number=SeqID_60858
atgttcgtcgtcctcaacagaacctcctccgtggccacctccctgcgtcgcagaccgccgctgccgccgcctcctctcggattttctccctcttacgcctcctcccctccgccacttttcccgggacaacggaggtggggacaaatggggcgcctcctccttcctcagaggaggcggcgagggtgggaggtgggggacgaatggggctccacctggtccaccggcctcaccaaggaccactttgacggatcctctgtcagcaaaccagtatcagcagaggtaactgaagtgttgggccatgaagataaggctgaaagtgtccatgggctgaaaaggagtgacagaattaggaggaagaacgtgcggctgtctgggccagagtggatggcgtga

SEQ ID NO: 19080 - DNA, 1656 bp, Zea mays
  Peptide Sequence Number=SeqID_60859
atgatggctttcttcgtcgtccagcgaggctccagccaactcacgccgctcctcgcgctcgcgctcctcggcctgctgcgctgcgccgccgtctcgtgctcggcggcggcggcggcgacgacgctgctgcaccgcgagagctacgcgggcaagtcggagttcaggacggtgaaccgcaagccgctgggctcctgcgtcgacccgagcccctacctggccatcgatgtcggcgccgcaggcccgatccccgacgaggcgttcctccaggtcaccgtctccggcgtgcaaaggcccgacccctccgactgggtcgccatgatcacgccttccaactccagcgttgctgggtgtcctctgagtgaaagtgaactacgtggagaccggcgacctggcgaatctcccgctcctctgccactatcctgtcaagcttcgaatcttcctgacgcgaaagtgcaggcccaatacctgacaagcgaccccggatacctgggctgcaagaacgccgggtgcgggaagcgcgacgcgtccggcgcatgcacggcccggacctgcgccgccacgctcaccttccacgtcgtcaacttccgcaccgatgtcgagttcgtgctcttctccggcggcttcaaggcgccgtgcctcctcaagcggtccggcgcgcgccggttcgccaaccccgccagcccgctctacggccacctctccagcaccgactccaaggccacctcgatgaggctcacctgggtgagtggagacgggaatcctcagcgcgtgcagtatggagacggaaagtcatctacttctgaagtcgcaacgttcacgcaggatgacatgtgcagtatatccgtgctgccgagccctgccaaggattttggctggcatgaccccggctatatccactcggccgtcatgactgggcttcagccatctcagtcctacacttaccgctacggaagtgattctgtgggctggagtgacacagttaaatttagaactgcaccagccgctggttcagatgagctatcctttgtgatctatggtgatatggggaaggctccactggacccgtctgtggaacactacattcaggagacatcagctatgccacaggattcctgggtcgagtgggacttcttccttcacctcatcacgccactggcctctcaagttccctacatgacagctattggtaatcacgaaagacatagacccatgtattcctcccatggtggtatactgcccaacgtggattccaactttgttgcctctgttgagccactcctgctcaactaccaggtggatctggttttcttcggccatgtacacaactacgagaggacttgtgcggtataccaaggcaattgcaaaggcatgccaacgacggacaaaagtggaattgacgtttatgacaacagcaactacaccgcacctgttcatgtcattgttggagcaggagggttcagcttggacagcttccctaacaaaggggaggcctggagcttatcaagggtttcggagtttggctatggcaaggtgcatgctacaagaaccgatatgctggttcagtttgtaaactcaagttcgatggaggtacgagaccaatttaggattgtgaagggagctccggcaaacaagtcactgagcctgataattcaataa

SEQ ID NO: 19081 - DNA, 1086 bp, Zea mays
  Peptide Sequence Number=SeqID_60860
atgcggctcggggcagatgctattgttttcagtcgctgctgcaccaggagcagtgggcctacacaatccattggtctcctctcttacactttcttggtggaaacaggacatacaaatgttgtagttccaatgcggttggagcgtcatggttcgaaacagttcttctcaaatttgtcggcgttgttgaaatggtccccttttgcaacagaagaagagctgatgcagaatttctgtgacattggtccacatggcaccaagattatagtgttcaatctgtggtccaacgacgatggtaatttggagctcgacttcgacacgaatccggaggatattatgatcagtggagcgccaaacccagaacaaatcagcaactctgttaggagggctaacgagaaccatctggcaaatcgactacgctattctcttagggtctatgcttctgtactgtatctacagctaccagattactttaggatcatgcttcgagggcgagaagttgagcgtcatcacattgcctctgacttgatatatcctgaacgcatcagttatagaccacaaagttgcggaataataagagaggctgaggttcttacaacaattgggttcttaaagggtgccccaaccattagcgtgcacggattcaacatctatcacaaaaaccgccttatcttgccattccatagagtgctgagtaccgcgagcagcaaaggcagaagcgtctctggagtgttggaggtagacttcatcaagcccacccatgacaaacaggactttgagaagtcgcagctgtttcagcggctgatgaaccgcctcaaggagatgactaacgagtactgggatctttacagtaacaagatcggatacgtgaaagtgccacgcgtgagagcagctcccactcctgctcctccagtgatgctggcaatagagaatggccccgccgaaccatcagaaaggagcgcgcctgctccgacgcaacccttgagatggcagcacggcaactccagctgcgtgaacgcagttccaatcgccatggcgccccctgcttttcacccagctcctgtcaaaacagagactgatgcaccatga

SEQ ID NO: 19082 - DNA, 1041 bp, Zea mays
  Peptide Sequence Number=SeqID_60861
atggcgccccgggtggcggacaagtcgccattgccgctggccaccggcctgaagcttggcgttggcggaggagtcggaggcatgggcttgggtccacactaccgaggcgtgaggaagcggccgtggggacgctacgccgcggagatccgcgacccagccaagaagagtcgcgtgtggctgggcacgtacgacacggccgaggaggccgccaaggcctacgacgtcgccgcccgcgagttccgtggcgccaaggccaagactaacttcccgttccccctcgccgtcgccgtcgccggcggtgctggtagccccagcagcgacagcaccaccttggaatcgagctgtggcggcagcgggtgtggcgtcgaagcgcctgtgcaggcggccatgccgctgaccccggccctcgacctcgatctcttccaccgggcggccgccgtcagcgcggtcaccaccggcggcatgccctttccgttcaaggccttccccgtcgtgcgcccgaccccacatcagtacttcctctacaaccaggccgcggcggccgcggcagccgggtacaggatgttcaaggtcgcctcagctccagtcaccgtagccgccgtcgcgcagagcgactccgactcctcgtctgtggttgatcgcacctgttcgcctcccgcggtgacggcaaagaaggagggggggtcccgcgcgacacgtgtgcccgcagccaaggcaggccccgtcgtcgtcgttgccggctgcggagggatcccctgcgcgcgccccgctgtggctgggcgcctcgctgggaccgcgggcgtgttccgtgttcggggcggccgcgtactccggatgcggcgcgaggaccgggccgggcgtggtctctctcggccgacagctgtgggcctggcgcagctggaggagcggcatcagggggcagtgattcgcgcggcggcagccggcagcttctcctcgccgtggggcccgcgcgccgcgccgcgcctcgcctccggatcactgccgctttactacatgcgttggctttcttggtgcgcctaa

SEQ ID NO: 19083 - DNA, 138 bp, Zea mays
  Peptide Sequence Number=SeqID_60862
atgggggtcgcctccgcgctgcagcggtggcgacgacggctgctggagagggtttggctgcggcgggttactaaatggactgacgccggcgtgcatgtgagcttgaacacaaaaatgtcaagatcagattcaggatga

SEQ ID NO: 19084 - DNA, 357 bp, Zea mays
  Peptide Sequence Number=SeqID_60863
atgggcccattgccccgcctcgccgactcgctgcttcatcggctcgggggctacaccgtcgtgcgtctcgcagattcttgcttcgccgactcagagactgggccatcgctcgcctcgtcggcttactgcttgaccggctcaggggctaggccatcgcctgcctcgccgacttgctgcttcgtcgactatgttaggttacaccatcgcctcgtcagctcgggtgctgttgtccacctcaccaagaccactcggaggaataagttgcttgatcctcaaagcatggaggataccatcagaaaattttcgaagactacaaggccaagcattctgaaagcagattttggaccttcaagttga

SEQ ID NO: 19085 - DNA, 1590 bp, Zea mays
  Peptide Sequence Number=SeqID_60864
atgaagcacaccaaggtggtcgccgactacatgatgacggagcacgagtcgggccacgtcttcgacgccaccaacatgcaaggatacaggtacatattccacggggaagacctcaccctcccttacctgtccaagccggactacaggacggccctcgccgcgtgcgcgttcaccacggtcgacaccgtctggcagtggatcgacagccagagcgtgagcgtcttcagcagggagcacggcggcatcctcaaggacatcgctctgtccttcactctgttcaagctgctcaagcggaggttcgggaagtacgatcacggggaggccggccgtcccaagacgcggacgctcatcgtgtctgggctcctccgggaagaggctggctacagccgcgccttccgggtgatcgagatggagctcacgttcctgtacgatttcttctacacgaggcaccaatcgcacacccagtacgtaggaatgacggtggtgttcgtgctccccgtgattgtttggaacgccatctctggagccttcagcagacactaccaccgtaccagcctggagcagaccgtcaacgggacagacgtcattcactgcattaccatcgtgttgatggtggtcgttgtcgtcgtgctggtcgtggaatcgcgcatcaacgaccagaagtggagggtggtcgacgatctgcatacattgactggcgcgagcaagatcacctggaagggagaagccgttccgttcgacgacggcagcaggaagcaggcgacgaaagggatcaagaagaggaagcaccggaagctgacgggcaggaactgggacaggaagctggggcagtactcactgctccacagcttcgactaccacccgaggaatgtagcctccattctgtcactcggcctgatcgagccaaccagggacgggcagaaggcttccaagaaggtcgagctgcccgaggaagtcgtgatgcacgtcctgtcgcggttcaaggcgaacgacggccgcctagcagatgggcgcgcagctctcgccgtcgccgggaacgacgcgagccggctcacctgggcgtgcgagttgcccacgagtgtccacacggtcctcgtgtggcacatcgcgacgaccatctgcgacacgacgacgccgcggcagcagaccggcgaccgcctcgtggccaagtgcacgtcggagtactgcgcctacctggtggcgttcgttccggacatgctgccggggcacgcctacgacacgaggcgtatcttcaacgccgtggtcatggaggctcgggactacctcgccgggtgtgacaccatgagagacaggtgcgtcaagcttctagagctgcagtgcaatgagctgactatattggggatgggagcaaagcttgggagtgagctcaggtacagagttcacgacaggtcgcggcggtggaaggtgcttgcagacttctgggcggagctcgtcctcttcctcgcgccgtcaagcaacgccgacatccacgcagagaagctcgcggccggcggggagttcatgacccatttgtggaccctgctcattcacgccggcattctggagcgcccctcttcttcctctccctag

SEQ ID NO: 19086 - DNA, 1377 bp, Zea mays
  Peptide Sequence Number=SeqID_60865
atggtccctacattcgggtcggaccaggttcgtgctaccgacgagcagacacggcagcgcatggccaccctgccgttccataaggtgcatggccatgcattgtgcccgccctgttctattggatttggatacccgtggtggctgactaccgagaacgtggccttctttatccggtccccgttggaggacattgagaaccagccagctaaccaaccaaccaaccggcggagccaaagccaagaaggaaggcaacgtgcccatccagtcaggatgtgcaactccaacgtcaagtccgcgggggtggcccagatcgacggccgcccggtgctgcagccggcgggcaaccgcgtggcggcgccggagccggacgcctcccgcccgctcaagaagtccctccagaagtcgctctccatgccggtctactacgacagcaacgccaccgcgggcgcccgtcctgcgccggccgagaacaccacccgtgccgcggctaattcgtctccgctgcctcccgcgaaggcggcgacgaaggcagcgggcgctttccccgcggagaagagcggcaggaggccaggcgccgtgccgccgccggtggtggcgttcgcggcgctggaggcgttggagccggcggggagcatcgccgcggcgcagcgggagcacgccgcgcaggcgcaggcgcagcgcaagctgcggatcgcgcactacggccgcaccgcgtccttctcccgggtggaggggcgagtagtcggcgccgcggccgcggccgccgagcgggccgtccccgcctcccccaccgggcacgacgagaagcgctgcagcttcatcacgccctactcagaccccctgtatgtcgcgtatcacgacgaggagtggggagtgcccgtgcacgacgacgagttgctattcgagatgctcacactgtctggcgtgcaagtcggggccgactggacttccatcctcaagaaaagacacgtctacagggaggcgttctccggcttcaacgtggatgcggtcgccaagtacaccgagaagcagatggcgtcgctgagcgccgactacgggctggatttgggcaccgtcagaggaaccgtcaacaacgcctgccggattatcgaggtgcggagggacttgggctcgctggacaggtacgtgtgggcgttcgtgaacaacaggccgctgtcgccgagctacaagtacagccggaagatcccggcgaagacgtccaagtcggagtgcatcagcaaggacatggtccggcgcaggttccgcttcgtcggccccaccgtcgtccactccttcatgcaggcggtcggcctcaccaacgaccacctcgtctcgtgcccgcgccaccgcgcctgctccgccgccgccgttaactga

SEQ ID NO: 19087 - DNA, 747 bp, Zea mays
  Peptide Sequence Number=SeqID_60866
atgtccggagcggcgcccgacgccgagcccggccgagagggcttcacctgcagcgcgctgctcatgtgcctctacctgccgggcctcctctccaagaagaaaccggaggaggcgatcagcacgagcccgccgccgacagcacacgcggcaccggcaccggaccagccagccgagcatattcaagagaccccaccgcacgcgccgagccgccgtgccgcgtcgctggacaagtccgagtgcgcgtcgctctgctcccgcagcaacatcgtcttcgacttcgtcgcggaggaatgggaccagggccaggcgtcagcccaggcgatcctccacgggtactgcccgtcgccgtgcttcgacctgcccgtggagctgataagggccggcgaacggtttggcgccgtcgccgctgtcagcgagccgacgaagccggtgccggtcacggcggcgttcgtgtccgtcgacgacggccagcgaggggccactttgaagaaggtggcgtcgtgcctggcgcccggggtcgacgacggcaggagcgagccgcggccgccgcgcctcgcgaggttcttgtctgcgtccggccgtcgttctagcgtgccgcggcctctcgtcatgccttcccgagctgcgccgccgggtcaggcagttggcggggactgcgaactcggtggatcggcggtggtgccagcgtgcaatgcaatgcaatataacgagcgacggcagcctgtcgggacagcgtcgtgtgactga

SEQ ID NO: 19088 - DNA, 237 bp, Zea mays
  Peptide Sequence Number=SeqID_60867
atgaagtggaaggcgacttccaggagttccaagattacgacgagttctaggtgtgggttagcggcaacccccagtcggctgcctgtgaaggccgcggttatctacgtttcttttccgcactttgatttattgtacaaacagaatatgcaaagggagaatccacttgccttgctcaagcgagtcatgtggttcgtcttcgaacgagttgggttcgtctaccacacagtcagcttctaa

SEQ ID NO: 19089 - DNA, 417 bp, Zea mays
  Peptide Sequence Number=SeqID_60868
atggctcctccactgcacccctcctccccaacgctggtgccctccctcagcaggctggtcggtgtgccctgtccctccctcagtagtgtgccgcgaccctctctgctcatgcgcggggttgctggcagaagtcatgccatggccagaccgccccctccagcttggcgtcctggtccccatggattcatggcgtttctgtccttgctcttgcagatggccatggcccctaggacccacgccctccctctagtcggagcgtcggtcaaggagcctcagccggcatggaccttcacttgtgaacgatggccagcctccccctcccctgctattgccatggctgagccaccactctcccagccagagccctctactcctctccatgcttcagcgcttagagccaacccctgccacgcttga

SEQ ID NO: 19090 - DNA, 273 bp, Zea mays
  Peptide Sequence Number=SeqID_60869
atgggtcagggagcttcaccaaggatcaaggaaggcgggcgaccgaagtccgacgaggatgatcttggttctccggtgaggtcctgtcgggtccgggcgcttggaaagcttcacgggccactggcgaaagctaaccgagaggccggcacaacttgcacgcgactggagcgggctggccgtggtggccgaggcttgggcagtgatggcgggcggaggaaaggctcgccgaagctaaggaggggtgtctggcaagtgagggtgagcacggggtga

SEQ ID NO: 19091 - DNA, 321 bp, Zea mays
  Peptide Sequence Number=SeqID_60870
atgggacgagctcagggcagggaggaccagcaagctccgtggtcgaaggctaagggcgccgagcgaattccatggcagagggcggagagggacgaggtgagctggagcaaggtccagggcacgacggccatggcgagcagcaggagggtggccgagctggagctagaggaagggagcagtgttcctatgtactgcacacatagagagaagggggcactagaagccaataccaggatgcggcctggggaagtgctagggagaggggcgcgacgctggaggaagaagctccacggcttggagaagataaagacagggagatga

SEQ ID NO: 19092 - DNA, 417 bp, Zea mays
  Peptide Sequence Number=SeqID_60871
atggccgaagttggcacaagcggcaagggcgagtgcagggacacaatagacgacacccaggcaagcacgcaggaggagcgcggtgatcatggagggactgatgagggcttgttggggaagatggactgcatctgggcatcagagaggagcttggaggccgcggcgcatagggaactcggcacggtgagatctgagcagaggccaggggcgcacgcacgggagatgggagaaagtcgagcgccatggaggagagatggaggaagagagagaagcaggaaccagggcgcacgcccgtgggagctccatagccgagaggatggggcggctgggcagagcgcagggagaagccgggaaggagcgcgtgacagggggagaagacgaggcaggaagagctcggtggggcgcgatggagcttga

SEQ ID NO: 19093 - DNA, 264 bp, Zea mays
  Peptide Sequence Number=SeqID_60872
atggctgggacacgagcgttggcgaggaggagccacacgcgcatggagagcgcgcagctccagggagaggggtgcgcttcaacggtggttggaaatatcaagccagaacttcaacggtggtggaagataagtgttgacgccttttcggagcgccaaatactcaagaagaaccggcggcggtgctctctggtcaggcgcggacggtccgcggccgggggccggacggtccgcgacctggcgcaggggctagggtttcctgcctga

SEQ ID NO: 19094 - DNA, 240 bp, Zea mays
  Peptide Sequence Number=SeqID_60873
atggcggaccaaatagtcagcgacttggataggagacacacgtgttgtgagggacacgccacagacgtgcgggcgggatatgagacacggcccaacgcgcaggagtggtggctgacagggctgacccacctgtcggtgagaggccagggtgcgcgactggagaaggaatgggccgaatggtggctggtgccggcccagaaccaggtagagtatcttttatatattgtcacccttgcttag

SEQ ID NO: 19095 - DNA, 438 bp, Zea mays
  Peptide Sequence Number=SeqID_60874
atgggcaagaacaacaagcgcaagcgtgagccgactcctccatcagaggacttcgatgattcggagtactcagaggaggagttctcctctgagtccgaggggtctccggctcccatccctctgcgtgagtcgtctgacgattcagacgactcccaggggcttgcggcggaggtctggacttacatccgggccgtcgagcgctccgggctcgagggctcggatgagtcggagtactcctcggacgaggaggactcgtccgagggcgatggcggtgatggcgacgacgacgacgatgacgacgatgacggcggtggcggcaatgacggtgacggcggtggcaggggcggtagcggcggcagcaaggatggcgacggcggcagcagcaggggcagcaacaggggcggcagcggcagaggcagcaacagggccagtggctag

SEQ ID NO: 19096 - DNA, 309 bp, Zea mays
  Peptide Sequence Number=SeqID_60875
atgccttgtcttgcagatcccactgctaagacacctcgagttcacgggggtgctacttcatggctgaaactttcagaactcacgcgcatggaagctgtaccagcagctcccaattcaagacctggcatacatgctctctttcctgctatactactggcgagcaatgcagctttatttaagcctgagcctgacgaagcctctgtaaccacacacttgaatatgtctagtttgcaattgccactctgttacttgttagctcatggtgctgaactgcatctgcttgctagccatataataccaaacatatag

SEQ ID NO: 19097 - DNA, 309 bp, Zea mays
  Peptide Sequence Number=SeqID_60876
atggcagtgaggtcgctgacaaggtcacggggtgcgattgggtggtgggatgcggtgttccgtgttcgtggtgatgtagtgaagtttgtgagccaatttgatttgtcactgggccacaggagaggggagggaaagctcatcagagcgaagggggcggcactagctcgattgagcccaggggatggggaggggcgtggccgaggccggtgtgaggagaaagggagctcgaggaggcctttttataggtgcccgagggtggggagcggtaggggctggctggcgccggtgaggagcatagctgtagcttaa

SEQ ID NO: 19098 - DNA, 285 bp, Zea mays
  Peptide Sequence Number=SeqID_60877
atggggaggcctggatgggccagaatgcgccttctccacggcgtccacggccaggaaccggatagtgttcaccgactgctccaccagctcgggctccgccggctgggttcttgcgcggagcacggtgatcagccacgtgcctgtcctaggcgaggcagccaaaggaaggaggcagcggggcgggatagcggaggaggcggagtaccgcgactacctccgactgggccaccgacggcgggacggcttcctgacggcgactaccgcgactacttccgactaccgtga

SEQ ID NO: 19099 - DNA, 390 bp, Zea mays
  Peptide Sequence Number=SeqID_60878
atgggggactctggcggctccgttgtgtcggtcgacgtcgagcgcatctccttcggcggcaagcgctgggtctcggcctctcgggggcggtatggtatccggtggtggtttgggcggagaaggagggattggtgtggtgggcccttgaattcggtgacctctggtcgtaatcggatttcccgggttgcattgcttttgcgtttcttgctcaggttccgcaggttgttccggtctgttgcgttcttcttgctcatgtggataccgaattaccgattcggttcccgaccgttatccactcggattacgaggcccggcttgaatccggtggcccctgctcgactcgtaaccggatttcctgggctgcatttcttggtcagctccgcaagttaa

SEQ ID NO: 19100 - DNA, 1221 bp, Zea mays
  Peptide Sequence Number=SeqID_60879
atggagtcactactccagtcgcaaggcgtagccgccgccctgctcccggcctcgcgcccgcgcccgcgccgcggcaaccggctccggcggcgcacgcgggcccaggctaacatccggcatctggtcagcgtcgacgacctgcggcaggtcgcccgggacgccgccaccgtgggctgcggcggcgccgacgaccacgccttgaacggccgcgcgccagttgaaacgccgacgccggagcgggacaactggaaccacctgctgctccacgccaccaactccctggcgctcacggcgtccctggcgtccgcgctcgcgccggcctccccgacgctcccagcgctcagggcctcggccggggtcctcctggccacggcggccgtcaccatggccgccgtcaacaggatgcagccgtcgcagctcgccgaggagcagcgcaacgctacgcgcctctggaggcagctcgagcgcgacgtccgcgccgcgctcgaccaccggacggccaccacagccgaggccgacgacgacgtccaagaggccatggacagggtgctcgccctcgacgcggcgtacccgctgccgctgttccccggcatgctcgacaagttccccagcgccgtcgagcccacccggtggtggcccagacggcagccgaggaagaggccggctcagtcggccgccaagaccgtcaacggcgccacggccagcaactgcaacggctggacgcgggagctggaggacgagatgcgcggcatcgtgcgggtgctcagggccaaggacgagcaggagtacgtgtctaacgccaagctggctctgcgtctcaaccgtggcctcgccgtcgccggcccggcgctcgcgggcacggccgcgctggccacggccttcatcggctcctccggcgaggccggctccttggcccccggtgccgccgtcctgtgcggcgcgctggcggcggcggtgaacacgctggagcacggctggcagctgggcatgctattcgacttgttccgcaacgtcgccggcttctaccgcaagatccaggaggacattgaggcgtgcctcgacgaggttgacgtcgagcgcagggagaacggcgaggtgttccagaccaaggtcgccctgctgctcggccggagcacgtctgaccttagccacttcagggagatggcgtcgccgtcgttcaaggacgaggacatcaaggatttcgccgggaaactgttttag

SEQ ID NO: 19101 - DNA, 411 bp, Zea mays
  Peptide Sequence Number=SeqID_60880
atgggcaagagcaacaaacgcaagcgcgagccgactcctccctcggaggatttcggcgactcggaatactcggaggaggagttctcctccgagtccgaggggtctctggctcctgtctctcccccagcgtcgtctgacgattcagacgactcccaggggcttgccgcggaggtctggacttatatccgggccatcgagcgctccgggctcgagggctcggatgagtcggagtactcctcggacgaggaggactcgtccgaggagggcggtggcggcgatggcgaagacgacgacgacgacgacggaggcgacggcggcgatgacggtgacggcggcggcaggggcggcaacggcggcagcaagggcggcaacggcggcagcagcaggggcagcaacaaggccagtggctag

SEQ ID NO: 19102 - DNA, 231 bp, Zea mays
  Peptide Sequence Number=SeqID_60881
atggcgtgctccgtcgacgttggaccctcggttcctattcgcgaagctttgccaggtcaccagcaatgtgttcgagactgtgccgggcagaatttgaaggcggtggtcgggaaatttctcatcgacgattgcgaccgcccctatggcgccgaggtaacacatctcggcgccataggctatggcgccgaggtatgtgctaacccggacgacgtgacgccgatgtggcactga

SEQ ID NO: 19103 - DNA, 264 bp, Zea mays
  Peptide Sequence Number=SeqID_60882
atggagcaaatgcaaactctctgttggctgtctggtgcgccaactgtgtgccaactgtgcgctaacgcgcagaaaagacgtcgattgaaccgcgtttttgatgctattggcttcttttatcctgactaccctcatgcagttcaggagtcaaaaaagaggaagaagagggctatgcccgaagctacgagtatacccgctatcgaggaaacattcttgattattacaactttggagactcatgaggctactgcttcaaagacctag

SEQ ID NO: 19104 - DNA, 1188 bp, Zea mays
  Peptide Sequence Number=SeqID_60883
atgtccctgatcagcacaggtggcgccgtggcgcttgactggtcatggtacatacactatgcctcagccagagaattctcgcttcgcaagtggtgggctaaagttaataagggagcttcgaaggagatgaggaaggatctaaactctctgattattctggtattgacaatggagacttttgagcaccttggattttttttgcagctctctgaaggaactccattaagccaagcagctaccttttttgcgaattcggatccagacatgcccgctgctcctgtacctgctgctttgaagactgtggcaaaagaaaacagccaacataatgcatttgatcctgatgtcacaatgtctgatgctgtcacgaatacaagaattcatagcagttcaccaactggcagttctgcaccaaactatcctggatactaccgaaatgcatcatttgtggagggttgctcgaaaacttcagttgtcaaacaagcatcggatctgaaagggcattcaataaaggttttgaactgccatgattctgtaatttacattttagccccacttaagtatgcaactgtctatggatgttctgacactaccattattcttggtgctattggtaaggttgttaaagtggagcattgtgaacgtgtacaaattattgcagcttcgaaacgaatttgtattgccaattgtcgtgaatgtatcttctacttgggagtaaatcaccaaccacttattgtaggggataaccataaattacaagttgccccatttaatacttattatccacaactcggggaacatttggcacaagttggtgtggatcctaatgtcaacaagtgggaccaaccttttgtgttgggagttgttgatctgcatgactcattatctcatcctgccggggtttctgatgtccaggctgagtccaccacttgtctagatcctgatctatttacgaactttttgattcctagttggtttgaagtagaaggacctaccaaatacaatccatttaccctgcctgaagtttattgggcgtcccaaaggaaaaagcatgcttctctggaagatattcaaaagaatatccgggagctggagatcgatgatatccggaagaaagaattggcatgtgcccttcatgctcaattcaaagattggttatatgttagttcatgtaaccttggctcaagttaa

SEQ ID NO: 19105 - DNA, 765 bp, Zea mays
  Peptide Sequence Number=SeqID_60884
atggcggaggcacagggacgcgacggggcaacggtggcggagctccggctatgcaagaaccactccgagggcgcaaatggaagaggggaggtgggcgagcagggcgcggggttcaaaaggggcgtggggctcggtcatggtcggagaacgcgcggtcgtgggtgcgtccacggcggggagatcgtgggcgagagcccaccgcgcccctgccccgcccatgcgccctcgcggtgccctagcgcccgcgtctgggagcgccgccgctgcctgtgcgcgctctctgccgcctcacgcgcgcctgcccagccgcgctccccggcccacttcgcccaaccgcgcgcgcagccgcggtctcacgcagccgcccgcccagctgagtccgtgacatgctattcatcttccccaactgcccacgcccacaatctcccactcaagcaccgggacgcgcttatctcctcctcctccttccccaaaccgtcggccccgctcccttcgcccctccctgttggccgagctgcgtcgtcgtacgtctccaactcgcagccgcgtgcagcaccttcttcctccctctctcttccccatgtctgcgtctcgcctcgcatggtcgctcggatcgtcgctgttccctgcgtcggcctagcggtgccccagcgccggcgcccctccgcggcgtgcagccatggctgccagcccacagccgtcgcggcccgtggccctgctcggccggccctagcccttgcgcgcggttggcctgccagcgcgtag

SEQ ID NO: 19106 - DNA, 789 bp, Zea mays
  Peptide Sequence Number=SeqID_60885
atgccggtcaagtgggagccgccgtcgtcgcagatgctggagtacagccccaacgacgaggcgatgcggggcgggccgatgaaggccctgcggcgatccagcacctcctcggcgccatcgccaagggacgcgggtgacggcgacgccacgactgtcgccgccagtagtgcaggcaagaggtcgttcgcgctctgccgatcgttcagcagggcgaagcgttcccgcgtgacgagcctgatcgtgggcggcgacgggggcaccgagaggctggccgccgtggccgaggagctggagggcctgacgcgcgactacatgcgcgagttcatcctgctggtgcaggggtacccgcggaaggtgcaccgaccggagcggacgacgatgtacatggaccgctgcgtgttcgggcgccacgtcgagaaggagcgcgtggtggacttcctgctgcagcgcgcgccgtacctgagcgcgctcgccgtggtgggcgccaagaaggtgggcaagacgacgctggtgaagcacgcatgcgacgacgagcgcgtgcgcggccacttcgtgtgcatcgagtggttcgagacgcccgacgtggtgcgggcggggagcctgccggggcagtacctgtgggagagcggcgggccggagtatctcgccggcgtgcgccgcatcctcggcgagccgcggttcgcgaacgcagcggggccgtcgctgctcgtgttcgaagacgcctggcccatggatgagtcagcgtgggccgcgctggcgtcgtccccgaccccgctcggcgacctctga

SEQ ID NO: 19107 - DNA, 504 bp, Zea mays
  Peptide Sequence Number=SeqID_60886
atggaaataccaagagatgtgtatgaccttaacattaattttaggtatcttaggatgattctggatgttcaggctgctctgaaatattcatgtgtagatacaactggttgtctaggccaatttcttgcacttggtgcaaaggtgtatgcagctgaagcctgtgaaattgttgtcctgaaggaggacgccagggtgaagctcgtgcagcgtgtgattgcgcaggaggaggaggaggacttgaactgggaggtcgatgacgacgaagaggaagagcagcagagagacaacacggaggagctagcagaacataggcaagagccgatcaaagaaaaagtcagacaggatatggctgagaaagaaaatgtggagagaattgtagaagaaagtggagttgagacggtggaagaggcgcctggtttggtgaaggaagagaagaatgatgatacagacggtgtaatgcaggagtactatctacttgcgtgtgctggagggttttcagactga

SEQ ID NO: 19108 - DNA, 1935 bp, Zea mays
  Peptide Sequence Number=SeqID_60887
gaaaaaacacaaacccaagagaccttaaagggattcttgagacgggctcaaaatgagatcggcttaaggatcaaaaagattagaagcgacaacggaacggagttcaagaactcacaaatagaaggctttcttgaggatgagggcatcaagcatgagttctcttctccctacatgccacaacaaaatggtgtagtggagaagaagaatagaactctacttgacatggcgaggaccatgcttgatgagtacaagacttcagaccggttttgggcggaagcaatcaacaccgcttgctacgccatcaaccgtctctatcttcaccgaatcctcaagaagacatcatatgaactcctcaccagtaaaaaggccaatgtttcatattttagagtctttggtagcaaatgctttattcttattaaaagaggcagaaaatctaaatttgctcctaaggctgtagaaggttttttacttggttatgattcaaacacaagggcatatagagtctttaacaagtccactggactagttgaagtttcttgtgacattgtgtttgatgagactaacggctctcaagtagagcaagttgatcttgatgagctagatgaggaggaggctccttgcgtcgcgctaaggaacatgtccattggggatgtgtgtcctaaggaatccgaagagcctccacatgcacaagatcaaccatcttcctccatgcaagcatctccaccaacccaagatgaggatcaagctcaagatgatgaaaatgaagatcaagaagagccacctcaagaggaggacaatgatcaagggggagatgtcaatgatcaagacaaggaagatgatgatagaccatctcacccaagagtccaccaagcaatacaaagagatcacctcgtgaacaccatcctcggtgatattcaaaaaggggtaaccactcgatctcgtgttgctcatttttgtgaacattactcctttgtgtcttctattgagccatacagggtggaagacacattaagggattcagattgggtgttagcaatgcaagaggaactcaacaatttcacgaggaatgaagtatggcatttggttccacgtcctaaccaaaatgttgtaggaaccaagtgggtcttccgcaacaagcaagatgagcatggtgtggtgacaaggaacaaagcccgacttgtggccaagggttattcacaagtcgaaggtttggatttcggtgaaacctatgcacccgtagctaggcttgagtcaattcgtatattactttcctatgctacttaccatggctttaagctttaccaaatggacgtgaaaagtgccttcctcaatggaccaatcaaggaggtctatgttgagcaacctcccgtctttgaagatagtgagtaccctaaccatgtctataaactctctaaggcgctttatgggctcaagcaagccccaagagcatggtatgaatgcctaagagattttcttatcgctaatgccttcaaagtcggaaaagccgatcctactctctttactaaaacaattgctaatgatttttttgtatgccaaatttatgttgatgatattatatttgggtctactaacaaatctacttgtgaagaatttagtaggataatggttcaaaaattcgagatgtcaatgatgggggagttgaagtatttcttaggatttcaagtcaagcaactccaagagggcaccttcattagacaaacgaagtacattcaagacatactcaccaagtttggaatgaaggatgccaaacccatcaagacacccataggaactaatgggcatctcgtcctcgacatgggaggtaaatccgtagatcaaaagggtgtaagattgatagaaagagcacatcaggaacttgccagttcttgggaagatctctggtgtcttgggcttctaagaaacaaaattctgtag

SEQ ID NO: 19109 - DNA, 534 bp, Zea mays
  Peptide Sequence Number=SeqID_60888
atggcggataatcctgttgaatacagtcgcactaagcacatagacatccggcatcacttcctgagagaccaccagcaaaagggggatatcgaggtgtaccatattaacaccgagaaccagctagctgatatctttaccaagcctttagatgagaaaaggttttgtaggttgcgtagatcacctattcacccccctctaggtgctctcacatggttccttctaaaaggtctcgtgccgccgtattcctcgcacaacattctgtctcatccatttgtcgtgcgagtccctgtagcttgctctatgctcgcaccgtcgtaccagatgagtcccacagaacgtgttctcggtaaggttgaggtatccgacaacagccccgagccttcgtgcaactccttggagttggtcagtggctttcttgctagggtcgaaagccccgaatgcgcgcaagcgcatcagtatgatgtagcccccgagccccgagtaatctgtgaggattgcttgggggtttacttagttcatggccgaagcccatag

SEQ ID NO: 19110 - DNA, 357 bp, Zea mays
  Peptide Sequence Number=SeqID_60889
atgggaaagaggaagaagttgaagcaaaaagtgtcgaagctggtaaatattcaggatttgaaaagggggctcgaaaagctaagcactgctctaaagccagacaaggttggacatgctcgctcttctggcaaagaattggatgaagaaaatgacttttttgttagacatcttgccagtggtgatctaaacgaggaagatgcttcgaagctaaaagagcaagctaaagctattggttacaactccagggctatgatctttggtggaggaaaagatgtcttggtgtgcatcccgaagctagagaagctaaaattgttaagaacgttgctcgaagctttgggttcccagagatcgagatga

SEQ ID NO: 19111 - DNA, 285 bp, Zea mays
  Peptide Sequence Number=SeqID_60890
atggagagtcatgatctccgggcagaaagggaatcacgtcttgtgggtaaagtgacaacgagattgatggatttggtagtgactctggtgatgatggctcgtcttatacacactgcacggaagtctgtcatccccttcttaccctcccgtgtcgtggagcgtccgcttcgccgtccagtgaccggtcagtccggccatttggagaggatgcaccaccgcctgcatgaggagcaggagcgtcaacgacaggagcaggagcagcagggctcttctttctcgctctag

SEQ ID NO: 19112 - DNA, 264 bp, Zea mays
  Peptide Sequence Number=SeqID_60891
atggagagctcgacatttgtgcgggtgtcctcgtcgtacatgacgagcgtgaggaggaagaaggtggtggcgagcatggcgaccggggttcgccgcgacgatgagaggagggagcgcccaaatgtggcgagcgagttgaggagcatcgcgggggcggggtgggatgacgacttgggaaccgagatggtggtcgtggggagcaagggggcggaggtggaggtgcctgatgatggcttgggcatggctgcggccggaggctgctga

SEQ ID NO: 19113 - DNA, 397 bp, Zea mays
  Peptide Sequence Number=SeqID_60892
atgtcgcctggatggacaaatcccggaatccaccatcagatcgatgcaccatcgggtgattcctctcacaatcgaagatgggatgcgagaggatgtgcgaaatggaagccaattcgatggaacctgataatttatagcattccttattataaatctctggctggtgctatggattctgggtattacactaatctcctagtcaatggtgttcaagaatctcaagcacctcctagtgatgcaagagcagcagtgaaagggaaatgtgcctttgggccatttctaaatattttggtgattgagtgccaacacaagtgcttaaatgtgaatctatgcccacggatgaacaaagtgcaaatcacaagtaaagagacaaatggtaagttaggtcgcatgacag

SEQ ID NO: 19114 - DNA, 2853 bp, Zea mays
  Peptide Sequence Number=SeqID_60893
atggccatggccaggttcctctcgtggttgttcacatgcttcgcagctctcgccgtcctggaggccacggtccctgctcgttcatggcgcgctccgagtcccaccccgaggcacgaagcgaggaggttcgagcagaagacggacaggttctgggagtaccaggagcagagcaatacctgggtacaagtacgcgcgccgttcgacctcatgtcctgcatcaacggcacctgcacaaaggtaggatcgatcgggcggctggcgagggagcctggacgacacggccttcctcccgtccagagccaggaggaggaggaggaagacacgcggcgggttcagggagatggtgcagaagaagaccctgtcctgcctgtaaggaggagaatttccttgacaagaatgtcagagtcgtcagtctgggtgacagggcagagcggctccatctacgagaggttctggaacggggtggtgtgggtgattgctcctcatgagctccctgcctcggctgggtatgccaccgcaactttcattgtcaatacaactatccttgctctgtctgaagctggaaccctctaccagttgcagctaaatgagcatgcccagcctatctggacagagatggcattcaactcaagccagcagtcagcgaatcttggattaaaaacacaaagtcaagctatgcgtataagaaatgggattgtatccaatgatggaaggaaacttttcctgtctatcatgaatggatccctgcttgaggtaacagaaattcagcctctaaggtggaattaccatgggcgtcctccaggtgcagacgtgtcgtatatatctgatgctggaaatctgcggccagggaccctgttcacagtaagattggatatgcagtgcagttccactggagacctctatgagtttgacaaagaaacaaagccatcatggaaaaagcatatatggagtgaagaactggcgaaaaatatctcattaaaatcatcggctggctttgctttgcatggtttgtcagggtctaactcagtgtctcttttcctgataagcaaggtggttatagattggcaggatggccttttagtggagcggcgcttgcatagaaggaagtggaagtgggacaaacatggagctcctacgggtcagagacttagttcaattgcagaagttcagaaggatgaacttaatgatgcgacttcaatgtttttaacgacaaccacaggaaaagtatatgagtatcagtttccaaaatatacaggtggggcccagagcaataagataagaggacaatggataaatcacatgtcccctgagcatgcaaaggttgcaagaaacgtcccaggtgtacatgttcaagtcggcagaatggtattcccactagatgatggtaggcttggggaactacattttcctgggatggggggtactgattttggtccgagtgcccaaagtaccataagaagaaaactatcaaacaagtacgagtggtccatcctagacgcaccagaaacagaaggttggaatgcagaatattgcaccgaagagcacggtccgacaaattgtattagtggagcaaagaatatagctgcagacacagaatcaaatgacttgagcaataacccaccttccaggaggcgtaaagtagaagagaagcagcactacctaaatgttaacagataccagcagagtgatgaaactgaatcatacaactttctatcaaggaccattgatcttaacttccacatgcgggtgatgcatgcagacagatcgcttttccttatagcagacaatggattgacttttgaatatctaaacagcaatggtgtttggttgtggttaagacatgaacatgttacagccatgaaaggaacactaggaagctacaatggcagtttgtatcttgtcgacgtgcatgggaacttacacattagagaaagaaatggagatgaactgttgtggattaactgcacagcgatgaagaagggaagacaggttgcaagtgggtctccatgggatggcatccctggtttattgcgcagagtgacaacagatgatgcactcttctttgtcaacaagcgaggcaggctgctacagttcacggttgcgctgcggaaattcaagtggaaggactgccacagtcctcctgacaccaagattgctttcatagtggaccaggaggtcttcagaagaaacatcatcttcgtggtaggccgcaacggtcgcctctaccagtacaacaggatcacggagctctggcacaggcactaccaatcacctcacctgttcctatcgtgctccccagggacggccatgcggccatcgccgctgtccctggccggctccctgttcatggtgtccgagcacggggggctggtggagtaccacttcagcccacaggacgggtgggagtgggtagagcacgggacgccccaccggggcgtgaccctcgtcggcgcccctggcccgtgcttcgacggctcccagctgttcgtggtcggctccgacgggcacgtgtaccggcggcacatggaggggaggacgtggaggtggacgagccacgggcacccgccgtcggagccggccgccgttgacgaacagagctgcgccacaccggacacgggcgccggcgcgcactacgccgacgggttcagggggagctgcgacgggaaggtggcagccgtgcggccggtgccgttctcggaggacgccgtggtcttcgagctgcgagatggccggctggcggagctgcggcggccgccctccgcggacgggtgcggcgggtgggagtgggcgcggattatcggcacgccggccagcgcctgtatgaccagctactggacggccgtcgccacgtag

SEQ ID NO: 19115 - DNA, 126 bp, Zea mays
  Peptide Sequence Number=SeqID_60894
atggcggctcttcttgtgtacagatgcaaacgatgtaaatccacctgctccaccaagtgcccgcccggctctatccattccattcgtcaacatgcaggttcagactggcccgtgctggaccagtga

SEQ ID NO: 19116 - DNA, 168 bp, Zea mays
  Peptide Sequence Number=SeqID_60895
atggccgcacctccctggcatccctcatcatgtagcaacagcggcggcaagctcgctctggccgaccaaggatcccctgcgagttcttcacatccggcaagcctcgccgttcgccgtcgtcacaagcaagtagaggaaaaagaaaccgtcttcccctcccactcgtga

SEQ ID NO: 19117 - DNA, 294 bp, Zea mays
  Peptide Sequence Number=SeqID_60896
atgggatacccgaattatcccccaaagaacgcacccatagagataaggatgaaacccccgaggggagacaaccgagagcagactggcccgcaatctcttcgcctcgcccaaagcacggttcagaccgcgggcgcaacttctctgcctcgcccgatcccgggcctagccttcgggcgcaagatctccgtctcgcccgacctcgagcctagccttcgagcgcaagatctccgctttcgcccgaacccgggcccagccttcgggcgcaagatctccgcctcgcccttgggcacatga

SEQ ID NO: 19118 - DNA, 1866 bp, Zea mays
  Peptide Sequence Number=SeqID_60897
atgcctggcataccgagggaggtcgccgagcactcgctggacatccgagctggagctcgacccatgaagcagcctctgcgccgattcgacgaagaaaagcgcagagccataggcgaggagatccacaagctgatggctacagggttcatcaaagaggtattccatcccgaatggcttgccaaccctgtgcttgtgagaaagaaagaagggaaatggcggatgtgtgtagactacactggtctaaacaaagcatgtccgaaggttccctaccctatgcctcgcatcgatcaaatcgtggattccactgctgggtgcgaaaccctgtctttcctcgatgcctactcagggtatcaccaaatcaggatgaaagagtccgaccagctcgcgacttctttcatcacgccttttggcatgtactgctacgttactatgccatttggtttgaggaatgcaggtgcgacgtaccaaaggtgcatgaaccatgtgttcggcgaacacattggtcgaacggtcgaggcttacgtcgatgacatcgtagtcaagacgagaaaagcctccgacctcctttccgacctcgaaacgacattccggtgtctcaaggcgaaaggcgtaaaactcaatcccgagaagtgcgtcttcggagtcccccgaggcatgctcttggggttcatcgtctccgagcggggcatcgaggccaacccggagaaaattgcggccattaccaacatgggccccatcaaggagttgaaaggcatacagagggtcatgggatgccttgcggctctgagccgcttcatctcgcgcctcggcgaaagaggcctacctctgtaccgcctcttgagaaaggccgagtgcttcacttggacccccgaggccgaggaagccctcgggaacctgaaggcgctcctcacgaacgcgcccatcttggtgccccctgctgtcggagaagccctcttgatctacgtcgccgctaccactcaggtggtcagcgccgcgatcgtggttgagagacgagaagaagggcatgcattgcctgtccagaggccggtctacttcatcagtgaggtactgtccgagaccaagatccgctacccacaaattcagaagctgctgtacgcggtgattctgacacagcagaagttgcggcactacttcgagtctcatccggtgattgtggtgtcatccttccccctgggggagatcattcagccccgagaggcctcgggtagaattgcaaagtgggcggtggaaatcatgggcgagacaatctcgttcgcccctcggaaggccatcaagtcccaaatcttggcggactttgtggctgaatgggtcgacacccagcttccagcagctccgatccaaccggaactctggaccatgtttttcgacgggtcgctgatgaaaacaggagcgggcgcgggcctgctcttaatctcacccctcggaaagcacctccgctacgtgctgcgcctccatttcccggcgtccaacaacgtggctgagtacgaagctctggtcaacgggttgcgcattgcaatcgagctaggggtccgacgcctcgacgctcgcggtgactcgcagcttgtcattgaccaagtcatgaagaactcccactgccgtgacccgaagatggaagcctactgcgacgaggttcggcgcctggaagacaagttctacgggctcgagctcaaccacgtcgcccaacgatacaacgagactgtggccgagctggctaagatagcctcggggcgaacaacggttcccccggacgtcttctcccgagacctacatcaacccttagtcaagaccgacgacacgcccgagcctgagaaggcctcggcccagcccgaggcgccctcggcttag

SEQ ID NO: 19119 - DNA, 438 bp, Zea mays
  Peptide Sequence Number=SeqID_60898
atggcggcggccctcaccctcattcaagccgcgacggtggctccctgttccgcacttccctcccgctctcgttccactgcttcgctggtagttcggtgcgcacggataatggcgagggaaaatcacgacacaagcatttatagagcaggggaagagccgaaggcagggtcggtccgcagagcagatttcggggagttcggcgcagcagtaacaaccttccggggaagacgctccaatggaagcggacccaccattcagttgacgggtgagcctggttcgactccggtgctggcccccacccgtcaagggacgaagtcgccacgcgcggagggcctgctggcgagcgagcgagtcatgcgggggaaagaagaacaccccccgggtgtggacccacagagcagtgactgggaaacgagaccgtgcctgcgcggacactag

SEQ ID NO: 19120 - DNA, 582 bp, Zea mays
  Peptide Sequence Number=SeqID_60899
atgctcgtcggatgcatctcgtccgccgcatctcaacaaactccccatcagatctccgctggcaggaatcataatctcccttccttctcaagcataaatacaggcgttgcgcggctcctcggcaatcccgcgcatcgtatgcccatgcaatggtggctgggagcagagagcagtttgctgcctccctcctgcatcctagccttctctgcctcccactcactcgccgccgccgccaccgggacgaagaaccctgacctcgctgcagacaaagcgctcgccagggacttcctgtccaacttcgttggccctcacggcgaccccaagtacctgagcgtcctgcaagatgtcgctaacaggaagatacgcgcggtccagatcgaactagacgacccgtttcatcacaaggacgtcgatgtggtgttcctgctgcgtgttattgagaacgcgcggcgctacatcgacatcttcgcggaccgtggccatggcattggcgctgctagtatcacgctgagaaacccttccatgctattcatcgtgtcctcccctacgtattgctctgtggaatcgtggtatggagcatag

SEQ ID NO: 19121 - DNA, 381 bp, Zea mays
  Peptide Sequence Number=SeqID_60900
atggcgtcgagctcctgctacgccttcctaagcacgtctgcatgctggatcagctcggccaacgcccactccactgtgctggatgtcgtgtccgtcctagttgagattaagagaaccataccaaaaggatcagtgtattctacctctaaggatttcaagactaaaaagatatttgctggtgggcttccctcaacactaacagaagaagatttcaatagattctttgcaagatatgggactgtggtggagatcaagaaagcggcaccaaataaatcctccaatgcaccaccaccaccagtgtatggtagaaatgctaggtcatcatatggtagtgcctctagggaccacccttcagctgataactatggtgcattggtataa

SEQ ID NO: 19122 - DNA, 1329 bp, Zea mays
  Peptide Sequence Number=SeqID_60901
atgggccgcacggcaggatttagcaactgggccgaaaggaacgaaattagcccaagcgcagatcccagtctcctccgctatccacggaaggtcgccgaggatctcctccccccctcctccgcaatccccgtcatccgcgccgccatcaacgccccctcgcgccctccgttacctttgctccgcgatccgccacctcaatcggttccgctgagctcgctccctccgaacgcgtacccgtcgcggcagttttcgcccccaccacgcccaagctcatcgtcgtcgtgcaccgcgcctcctcccctcaaccaacgtcgaggccgctggccacgagcgcgcgcacgccatctgggcgctagattcactacgcacccgcgcttgccctgcctcctcctcctccaccagctgaccctgctccagatctggatcccgagttcgagtcctcgctcgaggccgtggtgctactgcagcgctccgtcgcagatctccctctacgccacgtcctaccgcgtccgcgtccacagaattcacgcctccgcctccgcagaacgcgcctccatcatcaccatcgcacgcctgcgctctcccgcaccgcgtgtccgcgtccgcaatccacgcctccgccgatggaaggcacatcctcgcctaaatccacatgcacccgatgggatctatagctgccttgccgcaatccaagtctcgcacatggaaggaatcatcgttggaagaaatcctcgccaaaatccacgctggatgggatctatcgccctgcctccccatccttctctgcatcccatctacgggcccggcgatcctcgtaggataaacatcgcctcagccaggcgtgacttcccaacacgtgcggagctcctcctcaacctccacccgcacggtacgctctctgcaagttcctccgctgagccacaactcctatgtcatgacgggggaccactcgctcacggtagagcaccgacgggggatccgacgcctgctcctgcatccctgcagcgaggcctcctcgtcctcgcccttggcggcaccgtgaggtatggctacaagtcggtgacggcggtgcagccgtatgcgccgagagcggccgcggtggtggtcgtccagtcatcggctgtctggcaagggccatggcgtaggaggtggaagggcatcaggaaggagcagggcgaaggcttcgtcacctgtgggatcgatgccgatgtgtggtgtgcactcgggatacccttcgctgcagagacattgtcggtgtccacggcttccttgcttctgtcggaacatgatctcatatggatatttattcgttttctggttcatctgtag

SEQ ID NO: 19123 - DNA, 750 bp, Zea mays
  Peptide Sequence Number=SeqID_60902
atgcctgctattaaattgttgaatgaacacacttgtaaaacaacaattccggtgactattggaggactctacaagggcacactcgtcacttgtccctttcagcaagccatgttcggctacgccgcacatcgtaagtacgtatgtcccttgttagacgatgagaaattggatttcaatggttcaaggaagaatttgacactcatgatccaaaggagaacactttgctaccccttacttgaggaaaagggaactcaattgcacactcggtgtgataatgggataattctagattttaataatgcgacaattgatcatgaatcattagaaaggttgcttttcattagtcatataactgaagactttgaggaggtgcaggctgttgaactcatgctcgtgaatgcccttgttgaggctaatgattacttggggacatcattgcatgcacatgacccagaagatttttggaagttggatgacacaatcattaaaacaattgagactgctcctaacaatgaactgaagaaagcaaaagaaatcattcaacgtattcgccgaagagaactctacaagggttcagtacaactattccacttaattagaatttatgagctctgtttaagtcctggattcctgattccgtcttctgttcatttcttacaactattatccattgcaaaccaactattatccaattgtacagctgggattggactattggaaactccaccattgggacttgggaactcttaa

SEQ ID NO: 19124 - DNA, 483 bp, Zea mays
  Peptide Sequence Number=SeqID_60903
atggattacggcgatgagaccactaccccgacaaggagcactccgtggcagagccggatccacggtggtcagttggcgccaattccccgctccctgcgcacgacaatgtccccgtacgagaccgactccactcaaggacctccctcagctccttcacgcggttggcgtcacgactttgcccaactccgaccgcggcgacacacaacattctctctctatttctcggttcacggagatggcagtggaatggaggaacgcgttgcgcccgagacgctgggagggtatttatcctccacgtggacgagtcgggaggagggccgcggactccgcgggcgagatccacgcgcgagatgtggcggtgacgcccgctatgtgcgcgattccgttgaaggagcagctgacaagcgaatcccacgcgtcagtggtaacggtgaggcgctggggacctgtcaagcgggcccgcgacgcagtgagtgcaactga

SEQ ID NO: 19125 - DNA, 279 bp, Zea mays
  Peptide Sequence Number=SeqID_60904
atggcgtgcggcaatggtcggcgcgagcggttcgcggaggtcgtgtcggatgcagaggcgtgtggggcgtgtgggattgcggcgggcttgcggcgcggcgtggggatggtggtagggcggcatcgcagatttcgcggcggactgaggcgggactgcggcttgggatcgaggcgagcggaggtgggcggatttggcggcgacgtttccgacgtgcgcagagagaccggtaaatctgtttacaacggagtcatgccgatggcggcttccgggcggtggtag

SEQ ID NO: 19126 - DNA, 264 bp, Zea mays
  Peptide Sequence Number=SeqID_60905
atgatggttcagatcatcgagcaccgcgacttgccttccaaggacgtcccgatggaggaaggggcagcatcttccgtgccacgaggctctaaccgccttgtgcctgatgttgatcctagggcaatagatcttgccatgagaatcgctgaaaggatgttcctcaaaatgaaggaagtgacagtgaaagcgaaagtgaggatgaggaggagcaagaaagtgatagtgaagatgaggatgatcttcaacaattcttcgctcagctaa

SEQ ID NO: 19127 - DNA, 660 bp, Zea mays
  Peptide Sequence Number=SeqID_60906
atggccggctcaaccaaggtgctggccgccatcctgctcgtcgacctcgtcgccttcggcctcgccatcggcgcggtgcagagccgcccctcggtacattcctactgccgccgtctttcttccctgcctgctttttctttctcccgttctctgacgcgggcgccgccaccactcttctccctgtttgccgtcccggttccacaggcgaggctggagacggacgagaggcaggagtggacctactgcgtgtaccgcacggacgccgccacggcgctgggcggcgccgcgctcgcgctggtgttcgtgggacaggcggtggccgccgccgccagtcgctgcttctgctgcgggtccgtgctgcggcccggcggcgccagggcctgcgcgctcgtcctcttcatctcctcctgggtgacattcgtcatcgctgaggcgtgcttgctagctggtcttttgcaatccgcctaccacactggctaccggaaggtgtttttccagaacccgccggactgcgagacggtgcggaggggcacgttcggagccggcgctgcgtttgcccttttcacctgcgtgctcacctcggcctactactactgcttctccaaggcgcggatctactaccaccgcccggaagccgccatcggcatgactccgttgtaa

SEQ ID NO: 19128 - DNA, 414 bp, Zea mays
  Peptide Sequence Number=SeqID_60907
atgaggggcaacgcgattaggggaggtggtggcgaagcaggaaaaagtgatgatgctgtgacgctcattccagaaccagtggctcctaagactatgggttcagcggtggtcatcgctatcatctactcctcgcatatcattgtctcgaattatggagattcatgggcagtgatctgtcgtggcaagcaaacatatgttctcgttcttcagcctaacagtgactatgagtatgcaaggattgagggagagggtggtaagttcaacctcaagtttagtgacaaggaatgtaacagtaacaacaaagatattacctgtttcaagcactacacgtctaaattcaaggaagccatgaaagtggttaatctagcttataaccagctttatccattgacaaaatttgttagatggtattga

SEQ ID NO: 19129 - DNA, 204 bp, Zea mays
  Peptide Sequence Number=SeqID_60908
atggcggtaacgtacacctgcaggaactccgacgggtttgatgttccgtcgtatttttctggcagcgaagtcttgatcgaggtcgcgccaattgatgttttggcggcgcttgcgcgccctttccagagatacccgggcatctactcccgcacgcctgcggttgagttctgcccggagatcattggtctacgtgcccctcactga

SEQ ID NO: 19130 - DNA, 174 bp, Zea mays
  Peptide Sequence Number=SeqID_60909
atgggtgttacacttatgcccattgaagaaccactactagaattagaaaggccgccaattttttcagcacaggtatattcggactcggatcagaaccacaatatgaagaagcacaaagaacacgaaggtgggcgtagagccgaagctatgtgcaggagagcttcagcacgttaa

SEQ ID NO: 19131 - DNA, 273 bp, Zea mays
  Peptide Sequence Number=SeqID_60910
atggtggtagacctcaccttgcccccactccatctcgtagtggagcagttccatcgtcggagaaggcaaagatctagccaccaagttctaccaccactacatccagagacaaccgatcaagccaaggatggaggcaagaagagcttcgaggtaccaagtgcacgggagaaggtcaaggagaccaggaacccaaaggcaggggtgaagaagaagacttgcaaagtcaaggttgatcgagttaagagttatggtgcatcaaggatcactacataa

SEQ ID NO: 19132 - DNA, 1170 bp, Zea mays
  Peptide Sequence Number=SeqID_60911
atgggggaagctcgcggcgaggctgcgggccttctccaggaaccgatgggctggtgctggtggccgcaatgtgggtgcagtccatggccggcatcggctacctcttcggcgccatctcgccggtgctcaaggccccgcctcgggtacaaccagcggcagctggccgcgctggccgtcgccaagaacgtcggcggctacgtcggcgtcgtcgctggcacgctctccgccgcgctgccggcgtgggcgatgctgctcatgggcgcggcgcagaacctcctcggctacggatggctctggctcatcgtcaccggacaggcgccgccgctgccgctctggatgatgtgcgtccttatattcgtcgggaacaacagcgccacgtacttcaacacggcgtcgctggtgacatgcgtccagaacttcccggcgagcaggggcccgatggtgggcatcctgaaggggttcctgggcctgacaagcgccatcctgacgcaagtctacgcggtgacgcgcgcgacagaccaggcctcgctcatcctgatcatcgccgtcggcccgtcgctggtcgccgttgccgtgatgctcgtcgtccggccggtcggaggccacctgcaggcgcgtgcatccgacagggtcagcttcgtgttcgtctacgccgtgtgcctgctcctcgcctcgtacctcgccggcgtcaagctggtccaagacttcctgcagctgtctgacggcgtggtcgtttctctcaccgtggttctgctcgtcctccttgtctcgccggttgcggtccctgtggccttgacgctgacgccggaagccgagtgtccgatccgggaggccctcctgtcgtcgtctgaaccactgacgggagaggggaacgcttcgcaagaatcgcctccatgcgcatctgagagcgggggcaggccggcaccgtacctgggggagaacttcaccatgatggaggcactggtgaaggctgacttttggctgatctgggtgtcgtttttgcttgggtcgggatcagggctgacggtgatggacaatctgggccagatgagccaggctcttgggttcgaggatgcgcatatcttcgtgtcgttgacgagcatatggaacttccttggtcgtattggaggtggctacttctctgagatcattgccacgtatcgaccctaa

SEQ ID NO: 19133 - DNA, 493 bp, Zea mays
  Peptide Sequence Number=SeqID_60912
cccgagtccgagccctgggtcgggcggagcggagttcgccgtcttccggggcttagcccgagtccgagccctgggtcaggcggagcggagttcgccgtcttctgggactaagcccgagtccgagccctgggtcgggcggagcgaagttcgccgtcttccgggacttagcccgagtccgagccctgggtcgggcggagcggagcttcctgtggtgccttcggccgggcctgactgcctgtcagtctcactctgtcaagtggcaccgcagtcggagtggcacaggcggcgctgtccttctgtcaggccgctttgtgctgatgggggttaccagttgagaattaggagccttgagggggcccagaggcacgcccaaaagtacctgcgggtgatctgccggacctggtcccctagcgacggggtccgagggctcgatgcctccctccgatgggattccgttacaagatcgttcccgctggtctcggaaatgtcctag

SEQ ID NO: 19134 - DNA, 432 bp, Zea mays
  Peptide Sequence Number=SeqID_60913
atggaggggagtactttgtcatgctcgcctactactgtttttttacattgttcaaaatacaaagctggcgtgccaaaccttgatatggttgagagtgtcgatgatgagaagattgctaaccgtcttgatcgagtggtagctgacttggggagaaaacctcttaaggttttggtccaagtcaacactagtggagaagaatcgaaatttggagtagatccctcaggatgcatggaactagcaaagcatgtcaaactgaactgcccgaaccttgtgttctctggtctgatgacaattgggatgcttgattactcctcaacccctgagaatttcaaggcgctggctaactgccgggaagagattgaaatgggaagcacaaatgtaagagttgggtcaaccatatttggtgcaagagaatacccaaagaagaactag

SEQ ID NO: 19135 - DNA, 1548 bp, Zea mays
  Peptide Sequence Number=SeqID_60914
atgggccgcggcggcgcgcgcgcggcccccgccgccgcggtgccgccctggcacgcgctcccggacgaggtctgggagcacgccttctccttcctccccgcggactcggaccggggcgccgccgcgtgcgcctgccacgcctggctccgcttcgagcgccgctcgcgccgccgccttgccgtcgccaactgctacgccgcgtccccgcgcgacgccgtcgagcgcttccccgccgtccgcgccgtcgaggtcaagggcaagccccacttcgccgacttcggcctcgttccgcccgcctggggcgccgacgccgcgccctgggtcgccgccgccgccgccggctggccgctgctcgaggagattagctttaagcgcatggtcgtcaccgacgactgcctcgagatgatcgcggcctccttcaggaacttccaggtgctgcgcctcgtctcctgcgagggcttcagtacagccggcctcgctgccattgccgctgcttgcagcaacctcaagactctcaagctcaacaatgctatacctcttgacaagcttgctaacctccttcgcaaggctcctcagattgtagaactcggaacaggaagattctctgcagattaccatccggatctcttttcgaagcttgaagcagcatttgctggctgtaaaagcttaagaaggctctctggggcttgggatgccgttccagaatacctgccagcattttattgtgtatgcgaaggcctcacatcactaaatctgagctatgctactgtgatggacttgattgaagaccatggtcttgctgttgtggcatcgtcttgtaacaaactgcaggagttgcgggttttcccttctgctcctttcgaagcagctgagcaggtctctttgactgaaagaggtcttgttgatgtatctgccagttgcccaatgctggagtcagtcctctacttttgcagacggatgaccaacgaggcccttattaccatcgcgaagaaccggcccaacttcacttgcttccgcctatgcatcattgagcctcacacaccagattacattacacaccagcctcttgatgcaggttttagtgccattgtggaatcatgcaagggcctcaggcggctttctgtttcaggccttctcacggacagtgtatttaaatccatcggggcacatgctgaccgtcttgagatgctctcgattgccttcgccgggaacagtgatttgggcctccattacatcctatcgggctgcaagagcttgaagaagctagagattagggactgcccatttggtgacaagcccttgctggcaaacgctgccaagctggagacaatgcgatccctttggatgtcgacgtgctcaatgaccttgggcgcatgccggcagcttgcgcgcaagatgccccgtcttagtgtggaggtcatgaatgatcctcgacggggattccccttggactctctaacagatgagagccctgttgagacgttgtatgtctaccggacaatttcaggtccaaggtccgacacaccagcttgtgtccagattctctaa

SEQ ID NO: 19136 - DNA, 213 bp, Zea mays
  Peptide Sequence Number=SeqID_60915
atggcttggaagaggctagaggaactgaagaacgctgctgaacgtgctagagtgatagctaagctgtctccccctccagagccatacaatcctgaagttgatccttctctgaagggggcgctagacataattagggtagcaaacgaagctgttgatgaaggtgtccaaaggcaattagacgaagctgctgagaaagttttgaaagatgactag

SEQ ID NO: 19137 - DNA, 357 bp, Zea mays
  Peptide Sequence Number=SeqID_60916
atgtccatgtattccagcgttaatgaccctgaccgtggctccatcgagccgctcacgctgtccgagatcaaggcgagggttaaggttatcagtgtgctgccgtcagagcccttcatggatgaggatttactgcacccccctttcttggggcatgctggtgatctggcaagcccttctttccattcctctctcttttcattttgcttcgttcgtgatgttgagtcatggttcctgcaggggattagtcctctggcgcccagccttccaccactccctgagggggggggcacagtccaactggagcacaagcgcaaaaggagcgacagggaaaccctggggcgcatgagtcacctttaa

SEQ ID NO: 19138 - DNA, 408 bp, Zea mays
  Peptide Sequence Number=SeqID_60917
atggcgacgcagccaaccgaggctgccgcgatggtgtgccaagggaaggggagaggggctacgcgggtgagaaggaagaagagcatggctatcggaggtagaattggaggagaagatttctcaactagacacggagacgcggaggctcgccggcgaggatggaacgtggatagtggcagagaactccgacgcacgggggaggagattggttgcagcagcaaggtgagggcagcgaggggcttcatcggctgctatgcgattgcgcgcagggagttgttcttgggcttaagaactgagcgacgtgggggcgagttcctcagcgcgggcgcgtatagagcggaggtagttgcgcggctgaccgggtcggtgggcacttgcgcgtctacgcagccgagcaggcgcagctag

SEQ ID NO: 19139 - DNA, 1419 bp, Zea mays
  Peptide Sequence Number=SeqID_60918
atggagagccacaacccatcgcactctcagatcgccgaagtgacgatggacatcgcagcgtcagcttctggagcggcagggagcaagttctgcaagggcgcagcctgcgacttctccgacgccagcaactcctcgaaggacgccagggagaggtcggcgtcgatgaggaagctgatagtcgcggtggtcctctgcgtcgtattcatggcggtggaggtggtggggggcatcaaggcgaacagcctggccatcctgaccgacgcggcgcacctcctgtcggacgtggcggcgttcgccatctcgctgttctcgctctgggccgccgggtgggaggcgacgccgcggcagtcgtacgggttcttccgggtggagatcctcggcgccctcgtctccatccagctcatctggctgctcgccggcatactggtgtacgaggccgtcgtgaggctcgtcggcgagagcggcgacgtgcgggggtcgctcatgttcgccgtgtcggcgttcgggctggccgtcaacgttctcatggccgtgttgctgggccatgaccacgggcacggccacggccatggacatggacattcgcatgaccatggccacggccatggggattcggacgatggccattcccaccacgacgacgaggagcaagaacagggccgtgtccatcaccacgagcacggccatggaggcgctatcactgtcacaacccaccaccaccaccatcatcacgatcacgatgttgaggaggcgctgatcaagcatgagggtacccagtctgctggcagagctggtaagaagcctcggcggaacatcaacgtgcacagcgcatacctccacgtgctcggggactccgtccagagcgtcggggtcatggtgggcggggcgatcatctggtacaagccggagtggaaggtcatcgacctcatctgcacgctcgtcttctcggtggtggtgctgttcaccacgatccggatgctgcgcagcatcctcgaagtgttgatggagagcacgccccgcgagatcgacgccaccaggctggagagcgggctctgcgggatggagggcgtggtggccgtccacgagctgcacatctgggccatcacggtgggcaaggtgctgctggcgtgccatgtgaccatcgccagggatgcggacgctgatgagatccttgacaaggtgatcgggtacatcaagacggagtacaacatcagccatgtgaccatccaggtcgagcgcgatcgaatggacttgtgggaaaaaaaactcggccagatggtggcgtggaggcgctgcttacggggaggcgacggcacgctgctcgcagggaggcgtggcgccggcacctacacagggaggagggaggcgatggcgcgctgctcgcaacaaggaggaaggcgcgacacgccacctgcgtag

SEQ ID NO: 19140 - DNA, 405 bp, Zea mays
  Peptide Sequence Number=SeqID_60919
atgaggtccctccccgcgcctcgccgagatgtcacccccgtcgaccacgcgagctgttggatcccttcccttcttcgtaaccctagcccccacccacgtccgcctccaccgcctgagatagcgggcctccctcacctcattcctcttctcgcatgggctgctccacgcagccgacgcggccgcaggacacgaaaggctgtgaagctagtgaccctgaccgagttcaccttcgacggacacgaaggcctggacttctacgacgtgagcctggtggacaggtacaacctgtcgatgatggtggagccgcatgactatcgtatcctcacctttcgtctcctcggctcctcgcactcctccttggtccccggctccccgcaacctgcacccggtagtcgagatggctga

SEQ ID NO: 19141 - DNA, 375 bp, Zea mays
  Peptide Sequence Number=SeqID_60920
atgaagacgagggcggcctgctccctcagatttgagttcggtgacaaagtgctcccctccaccggcaacggggtgctcaagatcgtcatcgcccagttcctcaccgagctcccacgtggccatgttgagccatgtccatgttgcgcccatgtggccttcttggaaactggaatgaaccctcgagttttaatggccttcaatttttgctactccgtagtctccgccactgcgtcacaccaccgtgtcacagcaatgccgccgccacggcgaaagcggaaggcggccccatccgagccacggcggcacccaccgtcccgcctggaatttcatgccatagtggacggcgcgtggtacgaggcacgcgtggctatgtga

SEQ ID NO: 19142 - DNA, 207 bp, Zea mays
  Peptide Sequence Number=SeqID_60921
atggaggatgttgaggacctgacggtgtcggagtcggtggagggtgttgaggagctgacggcgtcgtattcgggggacagaggtgggcggtgggggaaccgtgggtgcggcggcgggatgaggggtcatcgcgcggggagcgggcgcggtttgggtgctaggtgtggcgggggcggaggtaggtggaggcatggtgaagcattgtga

SEQ ID NO: 19143 - DNA, 462 bp, Zea mays
  Peptide Sequence Number=SeqID_60922
atggggattagctctccctgggtagaaagggaatcatggctcatgggtaaagttgtccgcattgtaaccactgctcaggagaaggcgaagccgtggaaggagacttccaggagttccaagactacgacgaattctagagccctggggtcgggcggagcggagttcgccgtcttccgggacttagcccgagtccgagccctggggtcgggcggagcggagcttcctatggtgcctttggcaggacctgactgcctgtcagtctcactctgtcaagtggcactgcagtcggagtggcgcaggcggcgctgtccttctgtcaggccgctttatgctgatgggggttaccagctgagaattaggagtcttgagggtacccctaattatggtccccgacacttttataggcgtaaggagtggatccaggtgtacaatggggggtatagcagagtgctacgtgtctag

SEQ ID NO: 19144 - DNA, 375 bp, Zea mays
  Peptide Sequence Number=SeqID_60923
atgggcatgcacaggggtagacggacgtcgcggagtcttggcgacgtgctgcacgcacgtgaaaagctagggcggctgcaagggagctatctggggctgatgtgtgcacggttcgacgtatgccagactggaaatggagagggtgaactggccaagggtgcggccacgcaggggcaccgggagccgcggccagggcccgcgccggcagggagctgggatgcggctgcccactggagacgcaagaggagaagagagagagaagcctaccccgacggtgaggcacgatggtgcagacgacgggctctggtggtggttaagcctaccccaaagtcgaacctaaggatgccacctaagggccatgaaaaggatctttag

SEQ ID NO: 19145 - DNA, 1065 bp, Zea mays
  Peptide Sequence Number=SeqID_60924
atggacgcctactgcatcatggtctacgctttagaagcacttctatgggatggttttccaccatgtgcgctccgctcccacagacggacagcttgggctcgacggatgaacatgtgtgagaaagatcagaatttgccatggggatacgacctgttccgcgacccttttgctcctcccaacgggtactacgggcctcctcccggttactgtgatggccactgttgtgacctccatcattacggtagaggaagcacccatgagcacgagcacgagcacgagacagtatatgtagaaccgtctagttcctctccagacacaggtggtgacggttgttttgagatggaggaggaagtagggaagaggttttaccccatggtcccagttccccatgtccccaaaattaatggagaaatcccatcaattgatgaagccactatggaccatgaaaggctgacagaaaggttgaggctgtatgagctggttgaaaacaaggtgaaaggagatggcaactgtcagttccgagcactatcagatcagctttaccaaagtccggatcaccatgaatttgtgaggtcgcagataattaaccagcttaaaactaaccgtgacgcctatgatggatacgttcccatggcatatgatgattacttggagaaagttgcacggaacggtgaatggggtgaccatgtgacgctgcaggctgctgctgacaagtatggagtaaaaatcttcgtgatgacatcgttcaaggatacttgctacatcgagatcctgcctaaggttcagaagtccaacaaagtgatactgttgagcttctgggcggaggtgcactacaactccatacatccgcagaacgtggtaggaatcatgtgcaagcacaaccaaacaagctctgtctattgtgttggtgaagacgattctgtggatcaggtggtggtcccggtcccggccatcgtccagatgatactacaagggacgtacgacattatgattaatatatatatacccagagcggagcagaaagacctgataagggaattagttgggatgaatgaaatggaataa

SEQ ID NO: 19146 - DNA, 1014 bp, Zea mays
  Peptide Sequence Number=SeqID_60925
atggatgaactaacatgtagcagtcagatgtcccttccgctcccgccccttggcctcccccaggccgacgcctcagctcctcctccccacagcctcacgccggtctatcttccaaggtcgccggccaccacccttgctccccgtcgtcagcctcctctcctccttttcccacccacccctctgctgctcttcctggaggctgctcgaaggctcagcgatggtgtgaagacgaaggccctgacgcttcatctgctgcttctttggggtagcagtggatcgcgtcgttcttataaggaggtgctgatcgcagaaaagcccccagacccccgcgttggcgatggtggctgggtgagggttgtgggacaacgggatcatcgtcggagatcctgtctttcaaagccttcttctagtcctgtccctgttgacctgcgtggaaaggaaccctcaccagtggaggcttccatctgtgctatggagggtaactctagggtcggcggtgctggcaatggtggaggactaaagaagcgcactcgccggggacaaagacgccggaagaaggtcctaggtggaggtcaggatgttcatggctcttctagtcgtgcttcgcctcttccatcatcttcctccccctcgaaggattctgcccctcttgtgagaatcttcgggcgttcaaggatggttgatcgggctgaagatgaccttcattgtgcgctggtcgtaaccgttcttggccaggagagttctgactgcgccgcggaggtcctgtatgcgctcgcctcgaggcttggccttgcagctgatgagctccagctccggcgtgctgcatccaattctttcatggtcttcttcccctttgaggatcatgttgttcacgcctacaatggaggacaatctcttttcatcccatctcggttgcatcttaaaaggtggtctcgtcaggcattggtcgctaacggcggcgtcctgcatgtgctcctcgacgttgagcttagtggtcttcctacgcatctctag

SEQ ID NO: 19147 - DNA, 687 bp, Zea mays
  Peptide Sequence Number=SeqID_60926
atgatcccgttgtcccacaaccctcacccagccaccatcgccaacgcgggggtctgggggcttttctgcgatcagcacctccttataagaacgacgcgatccactgctaccccaaagaagcagcagatgaagcgtcagggccttcgtcttcacaccatcgctgagccttcgagcagcctccaggaagagcagcagaggggtgggtgggaaaaggaggagaggaggctgacgacggggagcaagggtggtggccggcgaccttggaagatagaccggcgtgaggctcatgtcctgcagcatgggaaaccagaagagcgttctacaataattacacaactcgctggacagatagtgaaaatgagccagcagaaatttgcttctaatgttgttgaaaagtgtcttacttttggtaatcctgagcaacgtcagattctgatcactgaaatgcttggcacaactgatgagaatgagccgttacaggcaatgatgaaagaccagttcgcaaactatgtggtgcagaaggttctggagatatgtgatgaccagaaccgtgaattgattctttcccgtatcaaggtccacttgaatgcactgaaaagatacacctatgggaagcatatcgtggcacgtgttgagaagcttattgctgcaggagaacggcgcattggtgccccatcctcttgctga

SEQ ID NO: 19148 - DNA, 206 bp, Zea mays
  Peptide Sequence Number=SeqID_60927
gcttggaggtcagcgacgagcacgaggccgaggagtgcaggcggccgacggtggtggggaacgtaggccgcgaccgacaaacagagggtgtggccgacggtggcggcgggcagcagaggagggcgctggcggcctcaccggcggaggaggacgcgggcgggctcaccggcggtggagggcacaagcggtgttggataatgggctag

SEQ ID NO: 19149 - DNA, 1746 bp, Zea mays
  Peptide Sequence Number=SeqID_60928
atggtcgacggcaagaccgccattgacaagaacatgtgcttcgtcaatgttgtggccagccaccctagccttggtagatgtttccctgccctcaccacaacccatccatcccagttcacgcacgccggcgaaagcgagagacagacagcgaaaaaggaccaagcttccttctctgtatcgactagcaagcacgccccggactcacgagggcctcccatggccggccccaagcccaggaagccggatcggatgtgcaaatccaagagcgacatcgccgcctccacctcctcctccgccatggcggcatccacaccgcggcaccaccggtctccgcgcacgacctcgacctccttccccgaggtgtcctcctactccacctcctcctccttcacggcgtcgtccctcgccgcgttccgcgactccctcccggagctgcccctcctcttcaccttccaggacctcgccgccgccaccgccaacttctccgccgcgcaccgcctcgtcccggccgcgccctcctccaactccttccgctgcgcgctgcgcggccacccggccgccgttttccgccgcccactccgccgcgacgcgcgggacgtggccgcgcgcctcgccgcgctgggccactgccaccacgccgccatcgcgcgcctcctcggcgccgccgcgtcgcccgatcgcaccacgctgttcctcgcctacgagctggtccccaacgcgtccccgctgtccgtgctcctccggaaccccaagaacccgtccttcaccccgctcgcgtcctggcactcgcgcctccagctcgccgtcgacgtctgcgacgcgctatactacgtccacctccaggccgacaccgtccacaaccgcctctccgcgtcctccgtcctcgtctgcggagacgggcccctcccgcgcgccaagatcgcgcatttcggcgcggccgacctcgccggcgagctcccggtcgagcacaaggacgacgacgacgacggaggaggaggagggtcaaggggctcctccggctccggggacaaccgccgcaccagaagccgggggaggcggatcgagggcacgcgcgggtacatggcgccggagctcgtggccggcggcccgccgtcgcgccgctccgacgtgttcgcgctcggcgtcgtgctgctggagctggtgtctgggcaggagccggtgcggtacgagctgctgaaccggggcacgggcgagtacgagaggacgtcgctgatcgacaccgcggcggccgcagtcgcggaggggatgcggaggtgggtggaccgcaggctcagggactcgttccccgtcgacgcagcgcagtcgctcaccacgctggcgctgctctgcgtcgccaaggaccccctggcgcggccggacatgtcgcgggtggccgccaaggtgtccaagctcttcctggaggcgcaggagtgggccgccaagttcaaagtcccgaccgacatctccatttccatcgcccccagattgccacggcttgtatttcttgctgttgatgatgtggatgtgtctgaattctggtggtcagttcaactcttgctgttgatgatgtggatgtgtctgaattctgatgcgtcagcgtccatggaaccaggtcgcctagtgcggcttgcgcctgtcgtagacggcacgcacgacagccgcccaagactcatcagatttctcttcttccatctcatccccatccccatcccctatgctatgcatcagagaggaggaacattgtag

SEQ ID NO: 19150 - DNA, 1263 bp, Zea mays
  Peptide Sequence Number=SeqID_60929
atggtgtttacgggggtatttataggtaaccgagggacagctctaccctatcaaggacgattgtgcccttggctacctacgttatccccggaatattcccccttgggcggttatggcgggccattacaacttcctgagaaacgtcttcggttcagaacaaccgttgatgcttcagaaacacaagtgattgaggctatgcagaagatagcttcacacatagggaacgcttcaaaattcagcaaggcatcaaaactagctttgcaactcatcgaggctggaagcgtcaagcctggaacaatcggtcatttctttgctatactagaagctgcgatgtcttcaccgggagtgtgcaacgagccttctgtacgagcagactaccacaaattgttcgatgctgctcagggtgtaacagaggtgaagtttctgatgtacctgaagcggatagttgctcggttgtgtcagcttgctactttcactaataacttgcgattaaacgtgcagttactcaaccaagagcagaaaaatcgattcaacatatgggtgctgcatgcagtggtggctaacgatcttttcactgatgacagctttgtgttctcaaaggctgtaggaaagatcaaagatgccatctcagccctgccagtggcaacggtggatgacgacaacgacgaagctgcggcccttgctgctgcgagcaaaactgatgtggcgacggataacgaagcaggtcatggcgtcccagccgcagcttctgactctgtggtggatgatggcgcgcatgccgtggccttggagccggaagaagaatcctccgaccctttcggtttagatgggcttcttgagcacaggcctaagaagacgtctgggagagctcgagagaaggcagtcgcggctctgaacagaaagacggtcgaggaggaagcaaagagggttctcaagtcgcagcgggaggcccttctgaaatgcctggaaatagccgctcggcgctacagaatcccgtggacacagaccgccattgacattttggcgaagcaggcgtacgacgacgcggcccggttcacacggcggcagcgggacgcgatcgctaagctgtggaactcgatcaaggagcagcagatccggcggaagcaaggcaagtcggtgagcgggaagctggacgtgaacgccttcgagtacctccaggagaagtactcccgcgagaagatgagcatccggcacagcgtgggcggcggcggcgatcgtcgcgcgacgcagtggctgggctag

SEQ ID NO: 19151 - DNA, 2436 bp, Zea mays
  Peptide Sequence Number=SeqID_60930
atgcccggcataccgagggatgtcgccgagcactcgctggatattcgggccggagcccgacccgtcaagcagcctctgcgccgattcgacgaggagaagcgcagagcgataggcgaggagatccacaagctaatggcagcagggttcatcaaagaggtattccatcccgaatggcttgccaaccctgtgcttgtgagaaagaaaggggggaaatggcggatgtgtgtagactacactggtctcaacaaagcatgtccgaaggttccctaccctctgcctcgcatcgatcaaatcgtggattccactgctgggtgcgaaaccctgtctttcctcgatgcctactcagggtatcaccaaatcaggatgaaagagtccgaccagctcgcgacttctttcatcacgcccttcggcatgtactgctatgtcaccatgccgttcggtttgaggaatgcgggcgcgacgtaccagcggtgcatgaaccatgtgttcggcgaacacatcggccgcacggtcaaggcctacgtcgatgacatcgtagtcaagacaaggaaagcctccgacctcctctgcgaccttgaagtgacattccgatgtctcaaagcaaaaggcgtcaagctcaatcccgagaagtgtgtcttcggggtgccccggggcatgctcttggggttcatcgtctccgagcgaggcatcgaagccaacccagagaagatcgcagccatcaccagcatggggcccatcaaggacttaaaaggtgtacagagggtcatgggatgtctcgcagccctgagccgcttcatctcacgcctcggcgaaagaggtctgcctctgtaccgcctcttaaggaagaccgagtgcttcgcttggacccctgaggccgaggaagctctcgggaacctgaaggtgctcctcacaaaggcgcctatcttggtgcctccagctgatggagaagccctcttggtctacgtcgccgcgaccactcaggtggttagcgccgcgattgtggtcgagaggcaagaagaggggcatgcattgcccgttcagaggccagtttacttcgtcagcgaggtactctccgagaccaagatccgctacccacaagtccagaagctgctgtatgcggtgatcctgacgaggcggaagttgcgacactactttgagtctcatccggtaattgtggtgtcatccttccccctgggggagatcatccagtgccgagaggcctcgggcaggattgcaaagtgggcggtggaaatcaagggcgagacaatctcgttcgccccttggaaggccatcaagtcccaggtattggcggacttcgtagccgaatgggtcgacacccagctgccgacggctccgatccaaccggagctctggaccatgttttttgacgggtcgctgatgaagacgggagccggcgcgggcctgctcttcatctcgcccctcgggaaacacctacgctgtgtgctacgcctccatttcccggagtccaacaatgtggctgagtacgaagctctggtcaacgggttgcggatcgccatcgagctaggggtcaggcgcctcgacgcccgcggcgactcgcagctcgtcatcgaccaagtcatgaaaaactcccactgccgcgacccgaagatggaggcctactgcgatgaggttcggcgcctggaagacaagttctacgggctcgagcttaaccacatcgctcggcgttacaacgagacgacggacgagctggcaaaaatagcctcggggcgaacaacggttcccccggacgtcttctcccgggatctgcatcaaccctccgtcaagatcgacgactcgtccgagcccgaggtaccctcggcacagcccgaggcaccctcggctcggcccgaggcgccctcggttcagcccgaggtaccctcggcctccgagggcgaggcactgcacgtcgaggaggaacggagcgaggccacacctgatcgaaattggcagaccccgtacctgcaatatctccgccaaggagagctgcccctcgaccgagccgaggctcggcgggtagcgcgacgcgccaagtcgttcgtcttgctgggcgatgagaaggagctctaccaccgcagcccctcgggcatcctccagcgatgcatctccatcgccgaaggtcaggaactcctgcaagagatacactcgagggcttgcggccatcacgcagcgcctcgagcccttgtcgggaatgctttccggcaaggcttctactggccaacggcggtggctgacgccactagaattgtccgcacctgcgaagggtgccaattctatgcgaagcagacccacctgcccgctcaggctctgcagacgatacccatcacatggccctttgctgtgtggggtctggacctcgtcggccccttgcagaaggcgcccgggggctacacgcacctgctggtcgccatcgactaa

SEQ ID NO: 19152 - DNA, 2928 bp, Zea mays
  Peptide Sequence Number=SeqID_60931
atgaggttctacttcgacagcctgatgggcggcgacgacacggcggaggccaactacgtgaggcccaacgtcaactgcaaccggtcgtcgtggatcgacgggtgcgagcccggctgggcgtgcagcgccggggccgaccagaagatcaacctgcaggacaccaagaacatgccctacaggccgctcaagtgccagtcctgctgcccaggattcttctgcccgcatggcctcacctgcatgatcccttgccctctgggtgcctactgtccacggtccagcctgaatacctccacaggcatctgtgacccctacaactaccagccgccgcccgggaaccctaaccacacctgcggagccgccgacatctgggccgatgtggtcacgacagatgacatcttctgccccgctggattctactgccccagcactatacagaagctcccttgtagtagtgggtattattgcaggaagggatcaacctcacagactagatgctacaagaagagctcttgcccaccaaactctgctactcaggacatcacaatcttcggcgcgctgcttgtggtcgcgtcctgcttagtcctcctcatcatctacaacttctccggccaaatcctgaccaaccgcgagaagcggcaggccaagtcccgggaggccgccgcgaggcacgcgcgggagacagcgcaggcccgggagaggtggaagtcggccaagggcgtggccaagaaggccggcgtgggcctgcagtcgcagctgtcccgcaccttctcgcgcaagaagggcggtggcggtggcggtgggcagtcgtcgcagctgcaggccggagcgtccacaaaggtaggtgatgacgcgggcgggaagaagcacagcaacctcgccgacatggtgcggtccatcgacgacaacccggagagcgacgaagggttcaacctggaggtaggggacaaggcgctgaagaagccgacgggcaaggagatgcacacccggagccagatcttcaagtacgcgtacggccagatcgagagggagaaggcgatgcagcaggagaaccacaacatgaccttctcgggcgtcatctccatggcgcaggaccacgacgtgagcacgcgcctgtccgtcgagatcgccttcaaggacctgaccctcacgctcaagggcagcaagaagaagctcctgcggtccgtcacggggaagctctcgcccgggaaggtggcggccgtcatgggcccgtccggcgccgggaagaccaccttcctcagcgccatcgccggcaaggccacagggtgcgacacgtcgggcctggtgctgataaacggcaggatcgagccgatccgagggtacaagaagatcatcggcttcgtaccccaggacgacatcgtccacggcaacctgaccgtggaggagaacctgtggttcaacgcgaggtgcaggctgtcggcggagatgtcgaaagccgacaaggtgctcgtcgtggagagggtcatcgagtcccttgggctgcagccggtccgggactccctggtggggacggtggagcagcgcggcatctccggcgggcagcggaagagggtcaacgtcggcctggagatggtgatggagccgtcggtgctgatcctggacgagccgacgtctggactggacagcgcatcctcgctgctcctgctccgcgccctccgccgcgaggctctcgagggcgtcaacatctccatggtggtccaccagcccagctacacactgtacaggatgttcgacgacctgatcctactggccaaggggggcatgacggtgtaccacgggccggtgaagaaggtggaggagtacttcacagggctgggcatcgtggtgccggagcgcgtgaacccgccggactactacatcgacatcctggagggcatcgtgaagccgagcctgagctcgggaggcagcgtcaaggacctgcccatcaggtggatggtgcacaacggctacgacgtgccgcgggacatgctgcagagctcgtcggaatcggagtccacgtccaggggcgacgcgggacacgctccggacgagccgtcgtccgtggtctcgctgctctggggcaacctcagggacatcctcgggcagaagaaggacgagtacgactacaacaagacgtcggaggacctgtccaagcgcaagactccaggcatactcaggcagtacagatacttcctaggaaggtgcggcaagcagaggctccgtgacgccaggatacagggagtggactacctgatcctctgtctcgccggcatatgcctgggaacgctggccaaagtgagcgacgagacgttcggggcgctggggtacacctacaccgtcatcgctgtctccttggtcgcagctctgctgtgcaagatcggagccctgcgttccttcacgctggacaagataaactactggagggagcgagcctccgggatgagctcgctggcctacttcctgtccaaggacagcatcgaccacttcaacacggtggtgaagcccatcgtctacctctccatgttctacttcttcaacaacccgcggtcctccatctgggagaactacatcgtcctcctcgcgctcgtctactgcgtcaccggcatcggatacaccttcgcagtcttcttccagccaggttccgcgcagctgtggtcggccttgcttccggtggttttgactctgatagccactcagcagaaggacactatccttgccgacctgtgctacaccaagtgggctctggaagccttcgtcattgccaacgctcagaactattccggcgtgtggctcataacccggtgtggctcgctggtcaggagcggctacgatatcgagcacgaggctctctgtatagcggtcctcatcgccaacggggtactcttccgctgtgtagccttcttctgcatggtcaccttccagaagaactga

SEQ ID NO: 19153 - DNA, 513 bp, Zea mays
  Peptide Sequence Number=SeqID_60932
atggccaccacccgcttgctgccgctgctccgacgccgcctcgccgccgcaatcgccggatcgcctgctccctactccctccgaggaccctcatttcctgcaccagcagctgcagggctaaggtccctcctaaaagctgctggagcgagcgatactgcaacagaaccccaggaccaacagcattccgaaacaactcccccgccggcttctgtcccgacaccggagtccggtctcaaagtcagggacacctccaacctgaagatctcaccaaggcatgacctcgccatgatctttacgtgcaaggtgtgcgagaccaggtccatgaagatggccagcagggactcgtacgagaacggagtcgtggtcgtgcggtgcggtggctgcaacaacctccacctcatggcggacaggcttggctggtttggggagccagggagcattgaggacttcctagcgacgcaaggggaggaggtgaagaaagctttcgagcccatcaaatacgcgatgttgtga

SEQ ID NO: 19154 - DNA, 225 bp, Zea mays
  Peptide Sequence Number=SeqID_60933
atggcggccaccctcaggctcaggatcctcgccgcggccgccaccgccgccgtcgtggcctcgtcgctcgtcggcgtggccaccgcgtccgaggcaccggggcccatcccccgccagctccaccggggccgccgccgccgccgtcaccgggccccggcgctccgtttgctggaacgctcgttgtggccccccgttgggtaccctcttccacttgaactccccccg

SEQ ID NO: 19155 - DNA, 2334 bp, Zea mays
  Peptide Sequence Number=SeqID_60934
atgggtggcagtgaggcgatatgcgaggcgagcactgaaccccaaggcaaaggtagatatgaactcttatgtttgttaattgtgaaatttgctgtacttatctatgctctgcatataccgttcaggtttaatcaagttatggccactatagttgaagggtgtgttggtcccagtgagcttcacctgaagaaggaacttattgccttgagaaaggcacgtttcttgcgtgatcccgaaacatgctcatcctggaggtccccgttaagctctaaatcattcttgtcaacttctggtgttataaatcataatgaggtaggcagtagtttgtcagaaaagcgcacagagccagctgcagcaccagtcaaaagtgaaaagaaaagaaaaaacgtttatctctacaactggagacatcattctaacaaatctagtgaaagtggagtgaagttagatgtggacgatagacaagcctcagtagactgtagtctggaaagcccgtgtatttctaacggtatggactctaggagtgacacatgtcttgaagttcctgtcagcatatacagtgttcaaggttctaattcatgcactcctgttaaaagaactgttagaagggtaaggaggagttcattctcaaagaaaggagctatgagaaattctactgtttcaaagttgctagatctccatgtgaattctgctgagcagtctgaggatactgagaactacaactcagagactcatgagcaccttcagaaagtagggtatttttctcactctacatcaccactgtttgctgcatcagggtgttttagctcaacaaatccttctaagctgttgagagtgccaagaagagaaggatcttccttctcttgtactccggtctccactagctcctattacaggtacaaagggaggaatcctagtactgtaggttcatgggatggaacaactgctgcttcacttgatgacgatgggctgaaccaaccagaactgttgacaaatcagaggtgtggtattccttgttattggtcaaagaggagtaaacacaagggatctgaaaggagttgttctccttcactttctgatacacttagaagaaaaggcaccagtctattgtgtgggagtcaaactatgcatgggagaaagaaatcatcaggctccaataaatatggatatcttaaaaaatcttcccaaggtgtaccactgttgggtgatagtagtcattttgcttattcgtcatttgattcagctagtgatgaagtttcaaccatctttggagaattagatctggaagctttgagccgtttggatggcagaaggtggtcaagctgtaaaagccaggatgggattgcactgtctgtgagtggagctgatcatgtagtttcagatcacagaagcttgagccaaaaatatcgaccaaggtcatttctagaaattgttggtcaaaactttgttgtacagtcacttagtaatgctatcgcaagggaaagaatagctccagcatatctgttccatgggccccgcgggacagggaaaacatcttctgcaagaatactttcagcagctttaagttgtactgctactggagagaccaagccctgtggagtttgtactgagtgcagtgactttttcactggaaatggaactaatctaattgaggttgatgctaccaacagaaaaggtataaacagagtacgccatttgattgaaaatataccagcatctgcaacttcttcacggtacaaagtatttgtcgtggatgaatgccatatggtatcttctaaagtctggtcggcatttatgaaatttcttgatgaaccattacctcgcgttgtcttcatatttataacaatagaccctgaaaatcttccccgttctgtcgtatcacgttgtcaaaagtacatgttctccaagatcaaagacattgacatagtatgccggctgaggaagattgctatgaaggaaaaccttgacgttgaattggctgctctagatttaatagcactaaattcagatggatcattgagagatgcggagacaatgttagatcagttgtgtttactagggaagaagataacaccatcacttgtaaatgatctggttggggttgtgtctgaggagaaactccttgacctattggagatagccatgtcatcaaacactgctgaaacagtcaaaaggtcgagagagctgatggattctggtgttgatccaatggcattaatgtcacaattagctgggctcataatggacatcattgctgggacctatagattggcagaccctacatgcggtggagatggaattggtggtcgaaatagtgagtctttaactttctga

SEQ ID NO: 19156 - DNA, 234 bp, Zea mays
  Peptide Sequence Number=SeqID_60935
atggggtggcttcgctcccgtgctctcccccgctcaggaagctctggtgccgcgtcaacgcggtgcagcgcaagagtacgtcccgtttgccccaagagagggatctacatcctgtacgacgacgtcaagtcgtgccaatgcgaggacgtgcacgtgctgtgggcgatcctcgttgagtcccacggcctgccgacgccgacgccgacgccgcctctgctgagcctgaagcgatga

SEQ ID NO: 19157 - DNA, 297 bp, Zea mays
  Peptide Sequence Number=SeqID_60936
atgcatcgccgcacctacctcttcgccttcttccagcacaaccttgttgccagcatcgccatctcatccctcgactacttcgtctactccactctgacaactgtgtggcaaacctggaccacgcctcgttcacggcggtttgacaacatcgtcatcagcatagacttcatcctctacgaatgcctcgactgcgtcgccgtcttcgtctatggcgccctccttctgtgccaccatcaacctggcacctcctggcgcgccgcgggccttctcgtgtgctgcgtctatgcccgcaactag

SEQ ID NO: 19158 - DNA, 1098 bp, Zea mays
  Peptide Sequence Number=SeqID_60937
atggggcgccggaagatgtccgcggcggcaccgccgtctcggagctggtccaacgttggcggaagcgtcatcccggaacttcgagctaaacacaaaacagacttgcagaatttgacgctgaccaaacagccactcagaacattgcattttttcctgttagccatgttacaatacttgaaaagattagcaacatatatcctgagtaagggtggtttcttctttctcctaattgttttattggtagcttctggaatcttgctcgtcgtttcggatggtctgcataagaaggttctggtttgcatacatttgtgctgtatctgggtcctcatattgctctgttcactattaaggctgttcaatgtggtcgaaattgatctaaaaattgctccatatgataccatacagctaaaggttgggccatcatggcttgacaagaaatgttcagaatttggaccacctgtgtatccagcatcagctcattcagttaggatcccagtcttcgacctactacctcagatacagctggaggcagttctttggggaattgggactgcgcttggtgagctccctccttattttatatcacgagcagctcgcttatcaggaagcgagtcaaaagctgttcaggagcttgatgcagctacttccaaagaagatgggccagtagcatcatcccttaatcgaaccaagcgttggcttctctctcactcccaacatctcaacttcttctctatcttgattcttgcttcggttccaaatccactctttgaccttgctggtattatgtgtgggcaatttggtgtgcctttctgggagttcttgtttgctactttgattgggaaagccatcatcaagactcatattcaggtttattcggtatccgcaacactatttatcgtgtccctgtgcaacaatcagctcttgtatcttattgaaaaggagttaatctggatatttggtcacgttcctgggttttctgccacccttccgtctgtgattgccagactccatgctgccaaggacaagtatctatcaccaccagccccagtctcaccgtcatcacaaatgggggtcagtaccttcggtttcaatctgtga

SEQ ID NO: 19159 - DNA, 735 bp, Zea mays
  Peptide Sequence Number=SeqID_60938
atgggcgcccgccgggatctgactcgaagctccaagggctcgcgtgctgacgcagggaggaaccggaccgcgctcgaggtcggagaggctatcgtcgcggaggcgccgagaccggtcaccggtgaattgtctatgcatgatcacgacaaacgggtggaacatgagaaaggagtaggagcagtgttcataccattgtgcgggagtcaactcagtaaagacatacttaggccccctcccgacgaagacgcgacagcccgggacacatcggaatgtagagcgtcgtcgatggttgaacaaatgccacccataaaatgctcgagggaaggtcaccatgtttcaaatgacgttgtagccgactctagagccgccacccgcgtggcatcgatacactcccaagtggacgactcaaactccaccacttgcgcatcaacatgtgcccgcagggaattggccatgtcggactggcttgctgatatgacaatgtcatcaacccgcagcgctggaacaccgatggagcgagcgttgccagatattgtcccttcaagcgccttccgtcgcctcaacggactgggcccgcacccctcgccggagccgaaccccgccgtcccgcccgcactgaaagcgcccgcgccgagcccctgcccagccgtgcctcgtcggactgtccgccaccatctgtcctcggttgtgcctcgtcgttcgtccaagattgaagacaacccagattttgattaa

SEQ ID NO: 19160 - DNA, 1245 bp, Zea mays
  Peptide Sequence Number=SeqID_60939
atggactcgcacaagggggcagtagtttggggcgggggcgaggtgaggcggatcaacgtggtctacttcctgagccgcggcggccggtccgaccacccgcacctcttccgcgtcaaccacctcagccgcgccggcgtccgcctccgcgatgtgaagaggtggctctccgacctgcgcggcaaggacatgccggacaattactcctggtcctacaaaaggaagtacaaggccggttacgtgtggcaggacctgaaggacgacgacctcgtcacgcccgtctccgacaacgagtacgtgctcaagggctgcgacgtccgaggaacacctcctccccgcagccaaacgccgaaaagaacttgttcgttaggcgagaacgatcagaaccaccccgtggaggtggtgctgacgccggactccgacgagagctcgccgaagccgccgccgcacgcggaccaggactcgcccggaggctgcgagtcggggcgccgcagcacggtgccgttcaaggtcgagaagccgcagggccttaataacgagcaaaagcaggaggaggagcaagtggtgatcaagatcgaggtgtcgcggtcacagaaccaccagcagcacaaacacgaggaggaggagaacaacgacgaagaagaagaggaagaagaagcggcgaccaagaaggccgacgacaccaaggctgctgcggaggagcagcagcagccgcagggagcggggggcgtcaggagcagccacgcgcacgcggtggggaagcaggcgcggaggatgcgcgtggcgcgggcgctccacaacatgctgacgtgcgcgcgcgctgacgccgtcgacgacgccgcgctccgccccctggcgcggcggcaggccggtggcggcgacggctgtccaccgccgcccacgccgacgtgccccggcatggaaggctgcggcctaggcgtgagccggaagaagacgtcgaggccgcggaggggcggcggcggcaaggacaagcagcgcaagcgagacggggagaagaagcacgacgcgcacaggccggccaccctgccgcgttgctcgcagtgcgggaaggagttcaagccgcaggagctgcactcgcacatgcagtcgtgccggggcttcaaggaacggatgaggaggagcaccagcgcggacaggaggcgcaactggaccgccgccggccgctaccccgcggagtcggagcggccgtcctcagcctccgccgtgttcctgctcacggaatcctga

SEQ ID NO: 19161 - DNA, 321 bp, Zea mays
  Peptide Sequence Number=SeqID_60940
atggaacctgaacttcgaccttacttcgagaggaagaagaaagagctcgtggacggcggcgcttcgggctcggggactgtgacggcggtgcttgagctcggggactcggcgctcgggctcagggatggtggacgctcgggctcggtgaaggggacggcggcgctcgggctcggtgaaggggacggcggcgctcgggcgctcggggacggcggcgctcgggctcggggacagggacggcggcgctcgggctcgtgctcggggacggggacatggcggcagcctgggcggcgcaactgtgtcagctcgggcgggaagagttag

SEQ ID NO: 19162 - DNA, 348 bp, Zea mays
  Peptide Sequence Number=SeqID_60941
atgtcgctagggttctgcttcttcctcggagcgtttgcgtcggaggcgtccgcggcaaggctagcgccgcggaccggcggcggcggctaccgccactcggcggctctccttatggcgcctgccgctgctgctatgtcgtcgtcgacgacggcggtcttacagccaccaacgggcgacgacgtcggcgtgctctctcggccactggcggcggcggcggcttcgattacggtgtcgagcagctgtcacgttggtggtcgacgggcactgacgtcaggcagcggcgcggcgaacccgcggcggctgctacggctgccgccgtccggcccgagcaagagggggcacgtgtag

SEQ ID NO: 19163 - DNA, 240 bp, Zea mays
  Peptide Sequence Number=SeqID_60942
atgggcatagctcccactctgcactacactgaacttgatgactacatcgattgggcattatgcctaccacgtgtgcaaacgcaggtcccagaggcacggagcgacgcgccgctggatgagaactgcaacgaaacgaccgctcgcccggacgtcgcgtcaggctctgggcttgggccatttctcacgcgggaacccaaccccgcggcagccgcaaaaggctggcttggctgtcatgtttga

SEQ ID NO: 19164 - DNA, 327 bp, Zea mays
  Peptide Sequence Number=SeqID_60943
atggccagaccacatgcgcggggcgattcctatggctatccttcaatccaccctatgttctccgcgcacgcggcccaaccagctgaagtctacgccgacacccggggcccacttgccatccgcgagtgccccgcctgttatgctgtcgcgcgggcccgcgttgtcatctcccagctccgcgcaaatgtcgcgcgattcaatgacctctgccgtgctcaccgtagaaattggccgccgtggccacgttcttgcatggtctcgcgcacgctttggccacaaatgtggctgtctctgttaccgtcgcagaccgcttacatgcttggataa

SEQ ID NO: 19165 - DNA, 156 bp, Zea mays
  Peptide Sequence Number=SeqID_60944
atggaggtcattgaatcgcgcgacatttgcgcggagctgggagatgacaacgcgggcccgcgcgacagcgtaacaggcagggcactcacggatggcaagaacacggagacacttcttaagctgagacacgtggaacacattgtgcacatcagatag

SEQ ID NO: 19166 - DNA, 303 bp, Zea mays
  Peptide Sequence Number=SeqID_60945
cgaaacccgcagcgggcgtgccccgagctcgaagaggcccctacccggacgagcccgcccctgttcatgacccctcggcaccgcgagcccctaccccggaggcccttcaccgcgcggcccccccacgtcgtgtccccggccccggtgagcccctccccagccctccccggcgagacccctccccgagatgttcggattataggtggcaatgagaatgatggttttggcattgactctggtgatggagaagatgaagccttggaaggagacttccaggagttccaagattacgacgagttctag

SEQ ID NO: 19167 - DNA, 273 bp, Zea mays
  Peptide Sequence Number=SeqID_60946
atggggggaattggggatcggggagattgcggcttacacgtgcctcagatcttctcctcgcggcaccaagtggtgccactgatcttgatcgtcggggcgcagctgcccaagccaagaggtgtgaatcgtgatcccgccacgcactcctcccagtcagtcttgagcggcacggcacagctagcgccaagggcccaagggaaggcgccagttgccaagactgttggcgcgtgggccggcggatggggagaacctgacgcgggcccgtccagctag

SEQ ID NO: 19168 - DNA, 903 bp, Zea mays
  Peptide Sequence Number=SeqID_60947
atggcgttcgcgcgtgagcttgtgaatttgaacttcgaaacgttgcaacacttcaatgacaaaatcgatgcacggacaagcgaagttctgcatgacaagacagtcctggcgaggtcgaaggctcggcttcgcagtgaagggcactgcgcatgggcgaaggctacgccgctctacggtgggtcccaagatgcgctccgtcgccatctgggcccatttgtaagcccctcttccagaattctgatgaccaatatgttcgttcgtttgtttattcagaagtctgttggccacttgttctgtgtgtttgtgttcgaagccatgcatatatggctcgccgcggaggcgtcatatatgatgtatacacacgtggagcgccggcgcaggtcaatcatctgccggccagctgcccagggggatcaccggggagggaaggctggcagtgcagggagggcgagggccgcgccgctatgggtgtacagcagggtccgtccgcccgcccgcgcccgccgtggcgtgcgtgcggcggcaccgacaggccgcggtcgcgacagctgtgggctgtgggcgtggcgggggctggcgcgcaccgcctcgctgtcgcggaactccaacggcggccaaccccacccccaacgcgtggcgggggctcaagctgaaccaccgcgcgggctgccgactgcgcgtgtggaccagccagccagccagccaaaccaaaccaaagcaaggcatggcaaccaccggacccggctgctctactcggtgccgcccgccgaccgcgcgtgccccgcctggggcctcttctcgcctccacagcgtttgtactttgcggattcgctgtacatacaggaccacacatgcgacgtgtcttgtcgtgtcgcggatgttctctctgcgtctgtacagtag

SEQ ID NO: 19169 - DNA, 513 bp, Zea mays
  Peptide Sequence Number=SeqID_60948
atggccgaggcgcgcgaacgcaccgtgctgctcagcatccaccagccgggagcgcgcatcgtcaagatgttcgactccgtcctcctgctagccgccgggtccatcctccaccatggcaccgtcgaccagctccgcgccctgctatcactggtatggaagtcttcagatgcgaacaaagaagtgcgcaggggaggccatgaacagggacagcgcggggagatggtcgccgcggccggcgaggagagcctgcgccgcacgggcctgcgcgagcgcgacggcgcccggagcacgcagctcgggaggtcggaccggtggccgtcgttcatcacccggacgttgtcgtcgcgggtcccgttctggtccgcgtcgaggagggcgcccgacctggaggcgtcgtccattgcagcggggaccacgggaggggcagctgcgaggaccaggcgtgagaagatgggcgacgcgtcagacggctcggtgacccctgctaaaggcagcgtgcgcgaggagaaatag

SEQ ID NO: 19170 - DNA, 1353 bp, Zea mays
  Peptide Sequence Number=SeqID_60949
atggcggccgaggaccagactccttgtaccaagctccgccccggcaaggcaaagacgcggaagaagacgaagagggacaagtggggccagcctatctccgccgccgccgccgatgaggagccgtcggtggagccggagcaagagcacccggcgggggtagttgaggcggcagtacaggtggagaaggaggaggaggaagaggcgactgcggcggcggaaggctatgagcccgggaaggtggtggcgagcggcttgccctacacgaccaccgaggcggacatccggaagctgttcgagttctacgggcccatccagtcgatgcagctctctcgcttcccggactccggcaacttccgcggccttgccttcctctgcttcgagttctgcttccttcttgatgctgaagtggtaatttcttgctggataatctttagatgggatcatctactgcagtccttgaatttctatgcagcaagggtctattcagaagaagatgcaataaagtctcttgagcttgatggattcaaaattggcagcagatacatgagggttgaaaggtgcagggtgacggccacctcaaacaagaagaggaaggcagagttcgaaaccgaccccaagaagtccgaaggctgcctctcggcatatgttggcaacctctcatggaacgtggacgaaaacgacttgcgaggtttcttcgggccgtcgaagattgcatcggtaaggtttgccgtcgacaaaagaaccgggggttcccgtggcttctgccatgtcgaatttcaagacgacgagtcgctcgagaagggccatagcgatgaaccagtcgaaactgcagggcaggcctgtcaaagtggcgtattcagtcagcaaccggggctgaagagcgccgccccgtcgccagcggaccgcaagagagcgcgatctggtccaaagcggaggcctcagccctggcctgaccttggcgggtcgccgccggcgacgtcctatgtgttagcagctctcgacagtctcattgtcctgtgctcggctgcaggcggatgccaaccctgctgggcatcattgcgttgggccgatctgagcaagagacaaaggcgcgcgacgacggctcggcacgtcataatgctggagtgcacggccggcaacccttcgttcgacggagtccagcacgagcgggttcactcgcggtcattgatgagcggtgtggcccgcgacagagcgagcgacgcgctggcgctgcgctgcgctgcgctggttgccgtcgctgacccattcggaaggccaggcaggacgagggacggccggccggaaccgggagaacacacgccaccaagtcactcgtggtggtgtggtgtctag

SEQ ID NO: 19171 - DNA, 932 bp, Zea mays
  Peptide Sequence Number=SeqID_60950
atggatggagatcacaggaggcaagccgccgccgcggtcaccgtcacgcaagtcagcccggcgcggcgcctgatcgcctggctgaggcttctcttccgggcgttcgttcatagatacggcaaggtcgcgagctggaacgcggcggggcgccctgtcttcgtcgtcctcgcggtcttcttcctccagaggagcctgcgccgccggtacctgtcatggaaggagtcgtcgcgtcttccgctgatggccgccgccgccgtcaccgtgcagacgaccgtcagggcgatggcggcgcagcgcgagctctctgtccggaagcagaccagagctgccacacgcatccaggttctagcttattacactgatcaatcaactgtagctgtactggcggtgtggagctacctgacgacgaagagagccgccgtcatctgccaacgtgcttggaggcaaagcgttgcacgcaaggagctcaggaagctcagactggagaatctggagagggaaatgctggaggaggtgtgcaggctgcgtgagatggtggacgtgctccagcaggctgtcaatgacgccgagacgagggccgtcaacgagagggaggcggcgaaggatgcgatggcgcagttggaagcagcctcggcgatcgaagagaccgtggtgatggttgaggacactgagaaggtcaagtcgctgagtgccgaagttgaccgcctcaaggatttgctgggagctgaaatgagtgaaacttttgccgccaagaaggcgctttctgaagccgagctgaggaacgagaagctggccaggctgcttggagttgaggaagttaagaacaaacggcttcaagacaccctgaaaaggatggaggagaaggcttctagtctggacgaggaaaacagaatgctgcgacaggctgtggcgtcaaaccctgctattgtcag

SEQ ID NO: 19172 - DNA, 1170 bp, Zea mays
  Peptide Sequence Number=SeqID_60951
atggccacctcgctctccaccccgtcgcagctccgcacctcacactgccacgcccgccgctacggccgcctcctcggcctccacccgcgcgtctcctgcgcgcgctgcccggctccccgccgcgccgccgccctctccgtgcgcgccaacgccgcctcgactgatggcgacgctgccgtcacggtgcgccgcttcccggccgcgccgaccaaggctgggcggctcgcgggcgtcaagaagatcatgatcctcggcgcggggcccatcgtcatcggtcaggcgtgcgagttcgactactccggcacgcaggcgtgcaaagcgcttgccgaggagggctacgaggtggtgctcgtcaactccaacccggcaaccatcatgaccgacccgggactcgcccaccgcacctacatcgggcccatgacgccgccgctcgtcgagcgcatcatcgacgccgagcgccccgacgcgctgctccccaccatgggcggccagaccgcgctcaacctcgcggtctcgctcgcggactcgggcgcgctcgaccgcctcgggggacatcggggagctaccgctcattgtgcgccccggccttcactctcgggggcacggggcggtggcatcgcttacaacaaggccgagtttgaggacatctgcagggccggcctcgccgcgtcgcacactcagcaggtgctcgtcgagaagtcgctcctgggctggaaggagtacgagctggaggtcatgcgcgacatggctgacaatgtcgtcatcatctgctccatcgagaacatcgatcccatgggagtgcacacgggggactccattaccgtggctcctgcgcagacactcactgacaaggagtaccagaggctcagggactactcggtggccatcattagggagattggtgtggagtgtggtggttccaatgtgcaatttgcagtcaatcctgctgatggggaggtgatggtcatcgagatgaatcccagggtgtccaggtcgtctgcacttgcctcaaaggcgacagggttccccatagccaagatggctgcgaagctctcagtaggctacactctagatcagattcccaatgatattaccaagaagactccagctagcttcgagccttccattgattatgtggttacaaaggtattattccaatctgtctcttag

SEQ ID NO: 19173 - DNA, 222 bp, Zea mays
  Peptide Sequence Number=SeqID_60952
atggctggagctaggcgctgggcgctggacctcggcgacgacagcgactcgggcactcggctacgacggacggtgactcggcgagcgggtgaggggccgacggccgaggcccgaggggcgagggcgactggccgcaagacgggagggagtgcggcacggcgggcctccggcggctgcggactgcggtgcgccgtgcgccggtgtggcggctccaaaccctag

SEQ ID NO: 19174 - DNA, 1506 bp, Zea mays
  Peptide Sequence Number=SeqID_60953
atggtggccgttgcggcgggaaggcgggccggcggcgttggtggccgccggcgctcgggctgcggcccggggcaggcacagcagaagctactagcgatcgccgtcgccgcgcgcttcgctgaggccgtggcgccgccgtctgcggaggcctcccgtgccggctccggcggctgttgcgtagagctcctcgagtgcctcctcggggctctgagcgtcaacgcggccccgccgcccgcgcagcacaggcgggccgtgcactcgatccgccgccgccgcccccgtggcggggggtccgccgacgaccgccacgccgacgctccctcgggccgcatcgcgggaaacggcgcatccgcatccgcagccgcgtcgctctacaccatgcagggcaggaagggtgtcaatcaggacgccatggtggtctgggagaattttggttcaaaggatgataccattttttgtggagtttttgatggccatggaccaaacggccatttggttgccaagagggtcagagatcttctccctgtaaagttgagtgcaaatttagggaagggtgaattcaaagagatttctactagcgatgtcaagagtgggactactaaaggagttgcaaccgaacacagggttgaagatactgatgcttcccctggaaatgaagagaatggcgagtacccagaatttttcacagcactgagggcttcattcttgcaggcgttttatgtgatggacagggatctgaaggcacatagaaatattgattgtgaattcagtggtacaacagcagtcacagtaatcaagcagggacaaaatcttataattggcaacttgggagattctagagctgtcttgggcacaagaggtgaacataatcagctagttgctcttcagctgacagtggacctcaaacctagtatcccgagtatgtttcattttcatatactaccgaaaataaagaaaaatgaatcatttacaggtgaagcagaacgaattaggcaacaaagtggcagagtattttctcttccagatgaaccagacgttgttcgtgtgtggcttccaactttcaacttgccagggttggccatggcaagatcatttggagacttctgtctgaagaaatatggaataatttctatgcctgatgttttctaccatcgcatcacggataaggatgaatttgttgtgctggcgactgacggggtgtgggatgtgctttccaatgctgaagctgttagcatcatcagcaatgctccttcacaggcctcagcagctcgatttctggttgaatcggctcacagggcatggaggacacggtaccccacatcaaaaactgatgattgtgctgttgtttgcctctttctgaaaacagaagcagcaacacccaaggttcctgaaaatcttgttactgcaaaagatgagtggtcttttgttgatggttcctctgggtgtgtcgcgctgccaactttaccagagcccacttcagttgtgaaggatagctcaaaagattga

SEQ ID NO: 19175 - DNA, 546 bp, Zea mays
  Peptide Sequence Number=SeqID_60954
atggctatagttgctatagaggagcaacctgataataagccagaagatcagggctttacaccagaagaaaatattgatcatgagcctatggttaattcacctcctacagaaaatgctagtgttgatgaacaacctgtttttactgaggatatctatgatccaataaattgggataatcttgataacaagtcaagggacatattagtagagaagggacccattagagatgaaaatattgcaaacactttctcttttgatggctcatcagatgttgatctaaatgatctaatttcagagcttagtgttttgcagttgactttatcagataaaccaatgtctgccatggatatttttgagtatgttagagaagtggattcttatcctaatactgctattgcttatcgacttttatttactgtgtccgtgaccgttgcatcagctgaaagaagtttttcaaagttgaagttgctgaagaattatttgaggtccaaaatgtctcaagaaagactaaatggtttggctatttatgcatcgagaaaatattag

SEQ ID NO: 19176 - DNA, 297 bp, Zea mays
  Peptide Sequence Number=SeqID_60955
atgtcgggaggatccaccaagggggagatggaaacaggcacaagccacgtgaaggctcaatcaaaggaatccggcaccaaaggaagggaggaatcacctccacgattcaagtcgcatcggagtggcaacaagaagaaggagatgaagaaagtggtctactacgagaccgattcttcgtcgccatccacctccggctctgacccaccgtccgtcacttctaagcgccatgagcacaagaagtttagcaaaccaccggtttttatggtgaagattattgtatgtggagtgataaaatga

SEQ ID NO: 19177 - DNA, 297 bp, Zea mays
  Peptide Sequence Number=SeqID_60956
atgtacgttcgctccctctcgcgcccgtgctctctgcgcccccgcctcgctgatcccgccatccccgccgctccagtccgtcgcccgcgcggctgttccaaggaaggaaattctgatcccgccatcaacgcccacgctctctgcgcccccgcctcggtgatccccatcaacgccctccccgccatcaacgccgctccagtccgccgcccgcgctgctgctccaaggaaagtctgctccagtccgccatccccgaaccttccatcaacgccctcctctactccgcccgtctccaatag

SEQ ID NO: 19178 - DNA, 849 bp, Zea mays
  Peptide Sequence Number=SeqID_60957
atgaccgcaggagcatctaaacgcacgcagcggatcgatggtgctaaaactgcggagtctgcatcctacgacgtggtctttgaaaagaaaggccccggggcgcacaacagaggcgagccacggcgcggcgcccgcttcggctctccccgtctgccgtccaccacgcatcgccaagcgccatatctgcaggaagcaccgggccaggcacgtcgcttcaccaccccaccccaccccaccttccccttacaccacaccaccaccgcaagccaagaggcacggccacgcatgggtttcccggcgggctactcggagctggtgctcccgaagcagctgctccacctgctgctgctgctggggtacgtccgccgcttcctcctctgggcgttcgacgccgtgggcctcggcgacctgctggatctcggggacgaccaccaagcgccgcagccgcagccgcagcaccggcgggcggagttccgggcggccatgccggcgatggtcatcgaggaggccctccccgtggcgcggttcgacgagctggaggcgcgcgtcgtcgttggcggggactgcgcggtgtgcctcggcggcatcggcggcggcgacgaggtgcggcggctcggcaactgccgccacgccttccaccgcgcctgcctcgaccgctggatggagcacgaccagcgcacctgcccgctctgccgcgcgccgctcatccccggcgcggcgctctggcccgccgacgcctccgacctggacttctcctaccccggcgcgccgctgacgcccgtcgtgccctccccgacgctgctgcggccgcacgagctgctgctgctcgcgggcctgggcggatactga

SEQ ID NO: 19179 - DNA, 333 bp, Zea mays
  Peptide Sequence Number=SeqID_60958
atggtgaagaacgaccatcctggccgccgggtggcgttgcgcatgacgtcgaacagcgactgcgcgaggtgtgacctgaaggatcgccggtcgcaaagagacgtcgacaagtgtgtgggtcccccggatcggactgagttgccatctcattggtcgtcgcacacatgccggcacgggtacggcggtcgcccgattcatgtttggaacatgcttgaattcacgagtcctggacagtttcacgacatccttgcgcaggcagaggcagcagcgttcgacgaccccaaatgtgatgacgacagctacgagtacgtgtgtcaacaagaagtgtactaa

SEQ ID NO: 19180 - DNA, 570 bp, Zea mays
  Peptide Sequence Number=SeqID_60959
atgaaacctcaggtcgagtgcgggtttcacccgcggattaaaatcttcgcccatacccgcgccccaacgggtcgaacagtgtccggtgcaccagaggcagtacagtctgaactcttcaccttcgagtttctgaggccgcgctccgctataatacaccggattgtccagaagccaggccctgccaaaggcaccataggaagctccgcccgacccagggctcggactcgggctcagccccggaagacggcgaactccgctccgcccgacccagggctcggactcgggctcagccccggaagacggcgaactccgctccgcccgacccagggctcggactcgggctcagccccggaagacggcgaactccgctccgcccgacccagggctcggactcgggctaagacccggaagacgacgaactccgcttcgcccgaccccagggctcgggctcgggctcagccccagaagacgacgaactccgctccgcccgacccagggctcggactcgggctcagccccggaagacgacgaactccgctccgcccgacccagggctcggactcgggctaa

SEQ ID NO: 19181 - DNA, 192 bp, Zea mays
  Peptide Sequence Number=SeqID_60960
atgcagatcttactcgcgaaaggatcgacagtacattttgacgaccttggaacttgctgcctcgtcgcagcacctctgctcgttgcggcgggttcagaaattatgatgacactcttcacagagataaatttaaaatatgtgacggataatgaatgggatagaggatctgctgaagattgccttgtgcactag

SEQ ID NO: 19182 - DNA, 945 bp, Zea mays
  Peptide Sequence Number=SeqID_60961
atggaggcagcggccgatcagcagcagcagtgccaggacttcctcatccgctccaagggccagcgcctcggccccgccgccttcccctactcccccaccggctccctcccaggctcgccctccgccgctagcaagtgcctcagcttcctgctgcagcaacaacagcagcaacacgacagagccgcggcggccgcgtctctgatgctgggcggcagcgacgaggcgcacaagttcatggcccgaccgcgcctggaccgtgccgacttcgccagcctgatgatctactactattataatcctaccgtaggcgtccacaccggcggcgcggtgcacgttctgcctcccaccacccgccccgcccacggccgcatccctcccgcggcagcaccatcaacgaccgcatccagtccctcccgcatcaacagcgtcgcagttcgcacaatccatggtccacagttcgcatcccagttcgcgcaatccatggccggagacgcgctcctggacgacttgcagctgcaggagcagctcgcgttcctcaacgagggcggcgggtacccggcccaccagctccaggggttcgacggcgtggagtgccggagccccgaccccggtgatgccgatgggatgttcgcgttcggcctcgggtggcacaacgggggccagcgcaccgcaggagctcacgcgaggatgctgcagcattcgaacagcgccaacgagctgctcttgcgccggaagctggaggaggagcagcaggctgccgaacttcagcacgccattgagctccagagccgccgcctcatgggtctccagctgctcgacctcaaggctcgcgcagctgcgacagcagcagcggcatcggcactgccaacaccagttgccaatgccttcgcgtccagccatcctttgagcaccatggcagttgagtcgccactagagtccgaatag

SEQ ID NO: 19183 - DNA, 210 bp, Zea mays
  Peptide Sequence Number=SeqID_60962
atggcttatgcccttgagtacaatgacaagaaaggaataagcttcttcactgacctccttgtcgtcggtgagaaccgccaaacatttgatctagaaggtgatagtggaagcctcattatcctgactggccaagacagtagtgataaaatggtattgatcaccttctcttttctaccattatcggtggagttgtatgatctcagtttctag

SEQ ID NO: 19184 - DNA, 624 bp, Zea mays
  Peptide Sequence Number=SeqID_60963
atggccggcgggggcagctccggcgagtggagcgcgtggaaggcggccagcatcgtgttccgcatcgcgacggtggccctgtcgctggcttcagcgatcatgacagcgacctcgacgcagtgcttgtaccgggaggatggcagccccgacggcaccatctcctacagcgactacggctccttgaagtactcggcgttcgccaacctgccgacggcggtgctccagggcgtggccatctacctggaggtgacagggcacgagaaagcggccaagaccgtggagctcatcgacaagctagtgctggccctcacgtccacgtcggcgccgctgctgttcgccgtcgacgacatcacgtcctgtggcgggccacctcgcgccggcggccgggcccgagggcagccgtccaaaggattcacgaagaagatccagacggcgtcgttcgctagcctcggcacgctggcctcggccgccggcgctgcgtacaccgcgcgagtcgagaggatcgtcgcggcagcgcccacgctgccaacaccgacactgccgtctccggacttagatgtcaacattttatataaaaataatattatggctggtttgcccgagtggttaagggggaagacttaa

SEQ ID NO: 19185 - DNA, 1221 bp, Zea mays
  Peptide Sequence Number=SeqID_60964
atgccggccacggcgagcggcggcgcgcggccggaggaggaggaggaggaggcggcggccgcggcggggagcttcgcgtgcggcgtggacgatggcgcgcgcgccgtgctggccgccggcgctgtcggccacctcactcgcctcctcgctcaccccgacgagaaggttgtggatgcaagcgcacgtgctcttagaatgatatatcaatcaagattagctccaaagtttgatgttaatagtggggaaaacgtggattttgttctttcccttttggacagtgagaacgagaatgtcacagagctggctgctgctattgtatctcactcttgtgagagtagtgcagaacaattgtcgctatgcagtgctggagttccacagaaacttgttagtctttttggatgttctatgaatctacgagatgcttgtttaggttctatcattgcagttattcaaaataaccaagatgttgcttcaagatttgcatcaacggaccatggaaaaggttttcgttcagtagttgggttaatacatgatcggagtccacgcacaagattacttgcttgcctctgcttgattgcacttgggcatgcttctcctgatcattttcaggacaatcagattaagaccaagttgattatggttttacttgagctaattgaagaacctggtcatgtaggagatgaagctcccttggcattaaccaccctgattaaagacagcttcgaactgcagagacaagctcttacaacgaacgcagttgagaagctcagcagccatctactagcaaatccattggggacaaggcgagcagtgaccatattacttgcgctatctgaactttgctcaaaacttgaagagtcaagatctcaactgatgtcggttgaggggggcgtggggttcgagtgctcgctctgcactattttttgcacggtgtgggtagctgcgcgagcagggtcgagtgctggacagacgcaggtatcaaccttactccttgaggcattgaaacatgattgggctgatatccgtgttgcagcatgttcatgtctgaagaatatctccaggtcaccaaagatactcagtggaggtcgattatcctgcgatacagttatcggtcccctggtccagcttttaaatgactcatctacttcagtccagccggaggttgaagacgagggcaaaaaagttatttctcccacctctccccgtgaacatgagaaatga

SEQ ID NO: 19186 - DNA, 606 bp, Zea mays
  Peptide Sequence Number=SeqID_60965
atgcaagcacaggcaggcaagggcagctgcatcggcgctgtcctgcacaacggccgctcagctcgccagctcggtggcggtgccgatgctcgcgcaaaagttataagccccacgccacgcctctgcacgtcctctccgtctccggctctcccacacactctctcgctgtctcacaggctgtctcaccgccgcacagagcagagcacaatggccgctcctcacctcgccgtgttctccgtgctcgccctcctcgccgtggccgccacggcgcaggcgcccagcggcgctccagcggcggcgcccaaggcccccgcgaccccgcctccggcgatgccgcccccgacaccggcaccggtcgccccgcccaaggcggccccggcaccggcccccaaggtcgcgcccaccccagcccccacgccgtccgcgtccgcgccggcgcccgaggcccccaccgcctcccctccggcgcccagcccagacgcgtcctcgccctcgccctccgccgagcccccggcgtcctccaccccggccggcgccgccgccggcctccgccccaccgtcgccttcgccgtatttgccgttgccgcggctgtctactccttctag

SEQ ID NO: 19187 - DNA, 441 bp, Zea mays
  Peptide Sequence Number=SeqID_60966
atggagcaactgagcaagagcttctcgcctatgattctgaggttgctggaagatgctgtgctggtgaacgccgttgattctgagagcagggcaccatctgatcgtcgcgcctccgagcagtcaccgtcacatttgccgttgcctgggccagctgccggtcgacttccatctgttcttgagggaactcgatcagcggaacctccgaggccttcctcggttccaccgttcatggtggtggcccttgatgcttcctccagccgccacatttccgacagggcttcttgcagcttggctttggccgcgtctagctcgactaatcggggagaggatagttggagcccagctcaattcctgcggctcgcagcatggaaacagacagttaagagaggaaaaaggctaacttttgtcatagctgacctaaagtcactctatgcttcataa

SEQ ID NO: 19188 - DNA, 147 bp, Zea mays
  Peptide Sequence Number=SeqID_60967
atgggagccagcggctccaagcttgagaaggccctcggagaccagttcccggaaggcgagcgctacttcggcctcgagaacttcggcaacacctgctactgcaacagtgtccttcaggactttaggtgtgaggtgtgtatacgctag

SEQ ID NO: 19189 - DNA, 348 bp, Zea mays
  Peptide Sequence Number=SeqID_60968
atggattccacggaatggagcgcatgtggtgccaatggaaggacacaaacaagagaagcaagtttgccagagccaggctcccctagccttcctgctgttgcttctctcgccaatgagatggtgcgctggaggggggcctctacagactacagtcgccgcgtgatggagggggcgcagctgacgctcgagcagagggccgccggagcacagcaaggcggcaggagagtagggcggcggcgatggagaaggtgtggcggcgatggagaaggtgcggcagcgctggagaagggtgcacgcgcgagcgcgactgtgcgctgcgtaatgcgtgtaccgtatcggtacaagtag

SEQ ID NO: 19190 - DNA, 1560 bp, Zea mays
  Peptide Sequence Number=SeqID_60969
atgctgtccgccaggccgagatccggctccttcgaggccgggctcaggggtaccgccaccgcctcgtccgtttccagagaccgcaagccgtcccctcgcctccagcgcagccgctcacccgccgccggcggttccaacaaggcgttcccgtcaccggagaggcggcgcggcgttggcggcgtgggcgccatgcagcagcgggtggcgcagctggaggaggagctccggcgggagcgggaggagaaggcgcgggccgtgagggagctcgaggagctgaggcagcacagcgaggacggcgccgccaagggtgtcgcggagaaggtgcagcttctggagcgggaggtggacaagtccaaggagtcggagcgcaagatgctggagtcgctgatataccagaccaagcagctggagcagaccaagatctcgctcgaggaggccaggctggagatcgccacgctgcagcaggctaacaagaccctcgagtccgcgtccgcgtcctcccggcgtggcggcggcggcggcggcgcggagcagccgcggagcgtcaaggacctcatgttcggcggcgcggacgacgagatcagggccctgcgcggcgagctgcgggcggcgacgcagggcgaggagaggagccgcaaggcgctggaggacgtctccgtggcgctcgccgacgtgaccatggaggccaagcaggtgaaggcctggctctccgaggcgcaggccgaggtggaggcggccagcgccgaggtccggcggctgcgcgcggccctggccgccgcgtccgccgagcgcgaccggtccaggctcgaggccgacgagtgcgcggcggcgtggggcgacaaggagcgcgtgctcctcgactgcgtgcgcgcggccgaggaggaggcagggcgggcgcggcgggacaacaccaagctggtcgagtcgcagcgcgtcatccgcgacgagaacgcgcgcctccgggacgtcctcaagcaggccgtggccgaggccagcgctgtccgggactcgctcgagctcgccagggccgacaacgcgcgcctcaacgacgccgtcgcggataaggagagcgcgctgcggagcctccgccaggagtacgactgcgtcagggtcagcgaggccgccgcgcagggcagcctcaaggagctcaacaccctcctcgccgccaccacgacgacgacggcgtgcagcacgcccgcgtccgccgccgcgccggaccgcggcttcgaccagcgcgtgctaaacggcagcagcaacgggccgacgccgccgcagcggttggtgcatgcagacaagccgcggacgccggcgggcagccggaggttctcgcagtcggcgcggatggggagccagaaccccaaggagcgggtgttcgcgtcgctcagcaacgtcgccgacctcaagtccgcggcggacgcggcggcggtggacctggacgacgagttggacttcgaccacgtgaagcgcaagaagaggccgatactccgcaagttcggcgatctgttccggaggaaaagcttctacaagccgaataatttagcgccagtgcacacactctaa

SEQ ID NO: 19191 - DNA, 1200 bp, Zea mays
  Peptide Sequence Number=SeqID_60970
atggcggcaggacatggcgtccctggtgttcctacgtgcagacccccgaagctaaggagctgggggggtgaggtgggaacaagtgggcggaaatggcagaggtgcggcgttggggacgtcagccatgtccacgaggtgtcagagacggcagccgggagggagcagttactggaatattatgcaaataacaaaactccaggagacgctgaggaaaatcttctgacttgtttggccgacctttttatgcagtgttactgcatagtgttttgtatgtcacttgaaacttctgcagtctgcatgatattacaattggccatgataaagaaaaaagagataagccaagcaaagaaaaagaccggtgttattgctccaaaacgttttgttcagagagtgaagaaacagaatgagttgtttcgcagctacatgcaccaggatgcacatgagttcttaaatttccttttgaatgaacttgttgatattctggaaaaagagtcaagtgctgctaaggactcaccccaatcgtcgtctcctgaaaaagctccaaatggcccagttcaacctttagccaatggagttaaaaaagaaccaccagttaccctggtccataaaagttttcagggcatattgaccaacgaaacaagatgcttaagatgtgaaacagtaactgcaagggatgaaacatttcttgatcttagtgttgacattgaacaaaatagttcaatcacaagctgcctgaaaaatttctgttctacagagactttaaatgcagaggataaattcttctgtgacaaatgctgcagtttgcaagaagcacagaagagaatgaagattaagaaggctccccacatattggtgatccatctaaagcgtttcaagtacattgagcagcttggccggtataagaagctttcatacagggttgtattccccatggaactgaagctcagtaattcatccgacgatgtagacactgagtactccctctttgctgtcgtggtccatgtcggaagtggcccgaaccatgggcattatgtaagccttgtcaaaagccacaaccactggttgttcttcgacgatgaaaatgtcgagatggttgaagagcagaccctacaaacattcttcggtacttcacatgaatactcaggcaacacggaccatgggtatatcttgttttacgaggggcttggtgggaagagttag

SEQ ID NO: 19192 - DNA, 207 bp, Zea mays
  Peptide Sequence Number=SeqID_60971
atgaaggacccaacgggccttgtactgatcttgggtgtcgttggccttgagcttatgtcgaaagacccatttgctggtgaccacgttggtgctagggggcgtgtggggtcggcgagcgtgctacggatcgaggatgacacatgtgagaggcagaatggcgggggccgtgagcaccagccgatcgacgggatgaagaacgccggctga

SEQ ID NO: 19193 - DNA, 339 bp, Zea mays
  Peptide Sequence Number=SeqID_60972
atggatcatcacatcgacagtcaagattataatgcacgggcgaaggggtgctcggtgattggggccattggatgggagatctgtgactcaaatttaatgaatccggccttaggatttgagatgggcgatggagatcaggtgaccgagttcagcctccgtctttggtcaactgaggaggcaatgccctcggagcatggtgatggctcaccggagttgaggcatgtgggtgttccagagagtttgacgcatgtaaggtgggctagggaggtggagggtggtccgaggagctcgacggtgagggtcccagtcatggcggggtgcccgagatcgtgtggatga

SEQ ID NO: 19194 - DNA, 456 bp, Zea mays
  Peptide Sequence Number=SeqID_60973
atgcacgcagcatgcaaccgcaccaagggggcgcaccctttcaacttcgacgcgtccaacatggaggcccaggcccacacgtcatgtaaccagcgcgtcggttgctacgtgcaagaaactgcaccgccactcgcaccactaccgtgcctcctcgactgcggaaccagtaccgcgactcgaggcaaccctgcgaatgacccaacagtgccaatcaggcacatcggtcacgaggaccgggaaaggggataccccgaaagggatccttctcggcaaaggaaacgggccctgagcccccctactgatcagaggttcgaaggctggcccctcggaggagttcaacagccgcctcagagcgctcgggcttcgcgcccactattggtcagaggttcgaaggccggcccctcggaagggttcaacggccacctcaggccactcgggctccgcgcccactactga

SEQ ID NO: 19195 - DNA, 108 bp, Zea mays
  Peptide Sequence Number=SeqID_60974
atgatgaatggtcggatgctgctggattcctcaccggagctcaagatgcatcccggatccacccgcgacgtagtcagcaccgccgacgtcttcaccgccgattattaa

SEQ ID NO: 19196 - DNA, 177 bp, Zea mays
  Peptide Sequence Number=SeqID_60975
atggcgcgcccgtcgcaaaggccccgcctactatggggcgccgtcgcgaccgccctcttccccagtatcccgcgcagtcgatggatggccttcgactctccacttccttatgacttggatcagtcgagcgatctgttggtcgactgcagtggatttcctcttgatttggcggcttag

SEQ ID NO: 19197 - DNA, 1824 bp, Zea mays
  Peptide Sequence Number=SeqID_60976
atgagggtcgtgcacacagtgacgaaaagcgagagtgcaattctgatgaagagaactcagaaggaagaaagaaagcccaaaaaggattccttcaagaagagagcagttactacagggtatagatttaggcattccttaaggagaaagagtaaaacaaagaatgataaccatatagcctcaatagaagacataagagatgttcaagagctggagattgttgaaaggtttcgccagtgtttacttgatgatggtctgttgccagaacatcacgatgattatcacacgatgttgaggttcctgaaagcaagaaaatttaatattgacaaagcaaaacatatgtggtcagagatgcttagatggaggaaggaatttggtgctgacaatatagaggaatttgactacactgaattagatgaagttgtgaagtactatccgcagttttaccatggtgtggacaaagatggaagacccgtttacatagaactaattgggaaagttgataccaacaaactagtgcagatcacaactattgaccgctatttaaaatatcatgtcaaggagttcgagagatgtctccagatgaggtttccagcttgttctattgctgcgaaaaaggcacatagactcgtctactacgatattggatgtgaaaggcgtgtgaactcccagaatttcttgggtggcaagtgcaggtgtgaagaatatggaggttgtccaaaatcagacaaaggcccttggaaggaccctgaaattttcaagagggttatcaatggtgaggcaaactatggtcgacaagttcttgctgtatcaagcataaatcagaaggaagttggttgtactgaacacacaactttaaaatttcaaggacatgcttcctcatctgatgctcctcccattataggggatagcatccctgctgctggcaaggtcatggatgcatgctccaatccaagaaacagctcgacaccttccagctcaggttctttctctttgagaaatataccggcaacattgggaggacttaaaactcgaattgttgcatggtcaacattcgtaatcctgaccttgtcagcattcctctgttctgtgctgagcatagtgaccaaaaggctctcaaaccaggccatcacatgtgaccactatagtgctgacttccatcaaggatatatgggaaatggcacccttacatccgtattgacacggcttggtgagctggaggagaaggtacaagcacttgaagcaaagccaccccaagtgccatttgaaaaggaggaattgttacatactgctgtttaccgcgtggatgtgttggaagctgaactaatttctatgaagaaggccttgtatgagacattgattcggcaggatgagctgcttgcatatattgaccaacaacagacagccaaattttgtaatattaataaaccactagctggagtgttaaagacctacatccgaacaagggacagagcattcagtgcacctaatagcctaggccctaggcaagcaatctcaagacatgtcattgatagggcactcactgcacctaatagcgtaggcaagcgatatcaggttagttcagaatgcaggggagtttgtggttactttcccgggagcgtaccacagcgggttcagtcatggccgttttgttgcgctgttgtgcacgcggttgtagggagggcgtattgtggcggctacgagggaccgatgttcctgtgtggcggtgacaacgacaccgtggagccaaggcaatgtcagcaagctgatttttcagattggaatctatggttctttttaaagattgaatatgttctagcatcttaa

SEQ ID NO: 19198 - DNA, 426 bp, Zea mays
  Peptide Sequence Number=SeqID_60977
atggattgctacaattgtggacagcttggccatctttcccatcaatacaccaaactcaagaaaaacaaattcaagggcaagaagaaagatgaaaatgaagatgagaagaaggaaaagaaattgttcaagaaaaaggatggcaaacaaaagatattccacatgagaaaaggtgggaaagcatacatcattggtgattggctcaccgacattgaatccacaagtggcttttcctcaagtgaagaggatgatgaaaaggtcgcctcctcgtcgtggatttctctttaccgtcaccatcgccatcatccactacacacctataacttatggctaaaggagatcagaaggtaccgaatgatgatcctagtgatgttgattgtggaaatgatagtgatgatgagtatgcttcccctatctatgatgagctag

SEQ ID NO: 19199 - DNA, 336 bp, Zea mays
  Peptide Sequence Number=SeqID_60978
atggaggagctagagcgcaggaggaatgaactgaaggaatcccaggatgaggcattgacggagttggaagctgctcatcgagatatcaaggtcttagaaaacgaccgtgaggtcatgaaagtgtggtgtgataaggagatggacaaggcggtccaggctggccatattttgatgaagaggtccggcgtcgtggttcctgaagaaaccattgttgatgttcttaccgcatcagcggagcaccaggtctcctactgcaaatgttcggtgatgtacaactttgtcatggtagcacctcagggtctgttgatatctggccaactaaataacaacatttaa

SEQ ID NO: 19200 - DNA, 672 bp, Zea mays
  Peptide Sequence Number=SeqID_60979
atggcgagcggcagaactacctgggcatgtgcacagggcgagagagagggcgagggtgctcggctgagggcgcaaatgagcagggggaagtgggcgagcggggtgcgggctctaaagggggccgaggcgtgcggaggtggccgggaatgcgcgaacgtgggcgcgtccacggcggggggtgtgggcgagaggttagggaagcagagggggctgaggggtgggagcggactggctctcgggcgcaatctctccgcctcacctgaccctgggtccaacctttgggtgatttctccgcctcgcccgagctcgcccacggccacctactacgccgtgaatcctgcagacggccactctgctcaactgtggtgcatgtcaagggacggcttggccaacacctcgagaagactttcgcctcgcccgagaaaggcttcgacctcgataagcaccgcagggaatttcgacgtcatcctgtgcaaggacgctgacgcacaccgtagacagcctttagcccatacccaggcgctgttacaacaactacgaaaggggcagccactccctcgggggctcagatgtacgaatgatccctcgacatctgcctcgtctctcagtgggaaaccagtggacgcaagtcaacaacacagtgtaccgtcacatcagcttgtcgggcgctaa

SEQ ID NO: 19201 - DNA, 225 bp, Zea mays
  Peptide Sequence Number=SeqID_60980
atggcgaggagcttatgtgatggagtcgtaggtgttgatatccccccaaactttgatcccttcttactattgccatcaatagtgtctaccaatccatttgttggtggaattgtggagctccaatgcgaggagatcagttcaaagcagtatttgtgggagatggatatcccccaggtcatcaagacatggactcgcttcatgggctgcctaaaggactctcgataa

SEQ ID NO: 19202 - DNA, 1575 bp, Zea mays
  Peptide Sequence Number=SeqID_60981
atgggggtcgtgcgcccgtgccgacggggatgggacgcgaggaggatgggagcgggggcaccagagacatccgcgggcacgcgtgcatctagacgcggggcgagagaggatgcggcggcgcggatcgtggtgtatccatccatggaagcacggcgcgaggggcagatcggcgtagggaggctgcgatctcgggaaccttccaagctgggatcgagaggtgagatcattggcgatgacactgtgtactactatcatgacatgatagtggaaatgattaaatggggatatcaagaaggaaaaactctctttggatttggttatgatttccgtcaaagcaacaggctctcagagacacttgacagattttccaaaaagctggagtcagtgtacacagcttctggtggaaaaaagatcaatctcattactcattcaatggggggattacttgtgaagtgtttcatctctctgcacagtgatgttagtacttcttgtattttggatctttggttgagatttgccatttttaatgtcctgcgcagccgcgctatcttaaagacatttgaaaaatatgtcaagagttggatcgcaattgctgcaccattccaaggtgcccctgggtacataactactagtctgctcaatggaatgtcttttgtcgaaggatgggaatcaagattctttatttccaaatggtgtatgcagcaattgctacttgagtgcccatcaatctatgagttgctggcaaaccctaacttccagtggaaagacatcccactgctacagatttggagagagaatttggataacagtggcaagaaaagtgccctgttagagtcgtatgagcctgaggaagcaataatgatgattaaagaggctctttccagtaatgagatcattgctgatggcatgcatattccggtgccccttaatttggatatattgaattgggcaaaggaaacttatgatcttttatgcagtacaaagcttccggaatcagtgaaattctacaacatttatgggattgattatgatactccacatactgtctgctatggcagtgaacagcatccggtttcaagtcttagtagcctcttatatgctcagggaaaatacgtctatgttgatggcgacggatctgttcccgcagaatcagcaaaggctgacggatttaatgcagtggcaagggttggggtggctgctgaccaccggggaatcgtgtgcagtcgccgcgtgttccggatcgttcagcactggctgcacgctggagaacctgacccgttctacgacccgctgagcgactatgtcatactcccaacactctacgaaatcgagaagcatcgtgagaaacacggggatgtcacgtccgtagcggaggactgggagatcatctccccgaatgacggcaagaccttgaggccaggcgagcttcctcctatggtcagcacactgaccacgagccgggaaggcaaggagggtgcactggaagaggcgcaggccactgtggtcgttcacccggagaagaaggggcggcagcatgtgcaagttagggctgtgggtgtcagccatggtggctaa

SEQ ID NO: 19203 - DNA, 1404 bp, Zea mays
  Peptide Sequence Number=SeqID_60982
atgcaggctgttgcggaccaggcgacggggccctccgcgtcccgccgtaccggctcctcccgcgcttcctcgccacgccgctgcacctggaggcgaatggtggtgacggtcagcagacggaggtggagggagaacggagaaggacgcatccgggcggtgcatacaaccggcaacagtggccagatgccgacgggacccggtggtggggtggcggaggtggagcggcgatggctggagacagcagggcccgacggtggcaaggcggaggtgcttctccggccgacggtggaaggcgtcaggacccagaggcgaggaggaagaagtggaggcgagcgagaaccggaggggagggagttggggcgccggccgcgcgaggggagagagaccggggtgagagatggaggtgataaggaagaagggcaaaccaaacaccccatcagtctgcagggcacgatttccgtctgcatcgctgtcagtgccgtagccgccactcctatctccggtgagctctctccttctctcttcttcctcaacaatggcatcatgatagacagctcgccgaggcaggccatggcgaaggggtgcgacagcacgctgcggcacgtgtcgagcaccttgttgaaatggcgcacggcctcgtcggggaggccggcgtccagtgccgccaccgcggcggtggaggacgagcttcacgtgcgccggcagctgcgacacggactccgcccttgtattggcgggcgccagcaggttcgacgggggcgggaacctgtcctccgaccagcacacgctctcgcgccggaacatcacggaggcgaggcggtggtcggtttggagaagcaccaacgcgtcctccatcaggccgaggtggaagcaagcctggcccaggaccaagtacctccattggtgggcgtggatgctggagaaggtggcgaccaggcgacgcttgaggctggacacgtcgaggcagcacaggaagcggccagcgtcggggcggtcgtgtcggccaacaacatccatgttctgctcgaacgcctctgctcccagtgctactgggccaatcttggcggcgtccagcctcttgacaatgaccacgagccgccgtcgagcacactcaggttctccagtgtccaacgctctgcaagggggagcggcggtaccgtttgcgccgccctcgtggaagaagaggaggtgggagccgcggcggaccacctcgccgcagaggttggcgtcgagacggaggagggtgaggtgcaggaaggcggcctcgagcgggagaatcgagaaggtgttgttcgactgcgtcctcttcttcgtccagctagaaggggtgctcgggtgtcggcgtcggtggggcagggcaagggcagtagtgtgaacggcgacccgagcagtaatgggcgctga

SEQ ID NO: 19204 - DNA, 1269 bp, Zea mays
  Peptide Sequence Number=SeqID_60983
atggagattgtgaacagtgtttccttcagctcaattggagtcggaagaattgtaataaacaagacagtgaaggtaggatgccaaacacaccggattggctggaagctaacaaggacatgttgcgagtactctcctggtgcttctagaaagaagcaagagaagtatgagcaacaaccacagaacgtcgatcttccagaattacacccaaaaaacaaaaagaaacccttccctgttccgattaaaaagatgctgcaagcttctcggcgagagaagaggcttgcacaaatgcatatagagaagcctcttgaacccccaaagaacggtttgcttgtgccagagcttgttccagttgcacatgaagtccttgataactggaaagtgctaatcagagggctctctcaacttctgaatgttgtttcagtttatggttgcagaaagtgtcctcaagtccatgttggtccagttggccaccagatccaagactgttacggttccggaagccagcgtcggaacagtcatcactcttgggctagaggttccatcaatgatgttctcatcccaattgagtcttaccatctttttgacccatttggtcggagagtgaagcatgataccaggtttgattatgataggataccagcaattgttgagctatgcattcaggctggtgttgacttaccacaatacccctcgaggcgacggactgctcctgtccggatgataggcaagaaggtgattgaccgcggtgagtttgttgatgagcccaagccacaacgttcagaacactgtgtatctctgcttgctgagctcgacacattcagcaaccaacaagtccagtcaccttcaccatcaaatatgaaagagcttgccaagaggacactgaaagcataccttaatgtccggcgaggcgtcgagcagctgatgagcaagtacactgtgaaagcatgtgggtactgctctgaggtccatgttggtccgtggggccacaatgtgaagctctgcggggctttcaagcaccagtggcgggatggcaagcatgggtggcaggacgcggtggttgatgaggtcatcccgcccaactacgtgtggcatgtccctgaccccagtggctctcctctcagatcctctctcaggagtttctatggcaaagctccagctgtcgtagagctgtgtgtgcaggctggggctgaaatacctgacgagtatcgggccatgatgaggactgacattgtcatcccggactctgtggaagctcggatggctgcataa

SEQ ID NO: 19205 - DNA, 837 bp, Zea mays
  Peptide Sequence Number=SeqID_60984
atggctagggaagaagagctcaagaggattgacctgaaggtgaacgtgagctgctgcgacggctgcaggaggaaggtgatgaaggcgatgagcctcaaaggcgtgctgaggacggagatccagccgtcgcacgaccgggtgaccgtcgtgggcgacgtggacgtcaacgtcctggtgaagaagctggccaaggtgggcaagatcgccgaggcgctgcctcccgcgcctgctgagcagggcaagaagcagcgcgatgacggcgtcagagcggtggcggcgcaggcgcaaccgcaggcggaggagaagtgcaagggcaaggacgacgccggtggcaaggcggcggctaaggcagcgccgggcaagcatgaggggtgcaagaagtgcgcgcgcgaggccgccgcgcgcgccgtgggcgacagtggcgaccactgcagcgggaagaaggcgccgtccaaaaaggacaacaacgccggcggcggctggggcggcgaggaaggcggcgacgccgacgccgacggactcgacgccgagcccttggcggtggcgccccaccaccactatgcgcaagcccagacgcagcagcactaccaccgcgcggagccggcgatggtggtgccggtgcacgtgccgccgacctacttctacccgactccggccgccgcggcgatcccgtactacggctattactgcatgcccccgcccccgccgccgacgatggcgatgacgatgggggtggcaccgccgtcccagcggcacccgcaggcccggccgcagccttcccgcttcgacgaggacttcttcgacgacgacaacacggtcggctgcagcgtcatgtga

SEQ ID NO: 19206 - DNA, 2647 bp, Zea mays
  Peptide Sequence Number=SeqID_60985
atggacagccgagcaagactaagaccaaggggaagcgatcatgctcaatgcggtaagcttggtcattttattgctaactgtcctgataatgatagtgaccaggaaaaggggaacaagagggaaaagaagaagcattacaagaaggcaaagggcgaggcgcatctaggcaaggagtgggactcggattgctcctcgtccgactccgacaatgaaggactcgccgccaccgccttcaacaaatcaaccctcttccccaacgagcgtcacacatgccttatggcaagagagaagaaggtttatgcatccgggggttcaagctggattatcgacagcggatgcacaaaccatatgacgggggaaaagaagatgttcacctcctacgtcaaaaataaggattcccaagattcaattgtattcggtgatgggaatcaaggcaaggataagtctgaaacccaagggaccctcaagcgcttcctcaggagggctcaaaatgagtttgagctcaaagtgaaaaagataaggagcgacaacgggtccgagttcaagaaccttcaagtggaggagttccttgaagaagaagggatcaagcacgagttctccgctccctacacaccacagcaaaatggtgtggtagagaggaagaacaggacgctcatcgacatggcgaggacgatgctaggagagttcaagacccccgagtgcttttggacggaagccgtgaacacggcttgccacgccatcaacagggtctaccttcatcgcctcctcaagaagacgtcatatgagctactaaccggtaacaaacccaatgtatcgtactttcgtgtatttgggagtaaatgctacattctagtaaagaagggtagaaattctaagtttgctcccaaagctgtagaagggtttttgttaggttatgactcaaatacaaaggcgtatagagtcttcaacaaatcatcgggtttggttgaagtctctagcgacgttgtatttgatgagactaatggctcttcaagagagcaagttgttgattgtgatgatgtagatgaagaagatgttccgacagccgctatacgaaccatggcgattggagaagtgcggccacaggaacaagatgagcaagatcaaccctcttcctcaattatggtgcatcccccgactcaagacgatgaacaggttcatcataaggaggcgtgtgatcaagggggagcacaagatgataacgtaatggaggaagaagcgcaaccggcacctccaacccaagttcgagcgatgattcaaagggatcatcccgtcgaccaaattctgggtgacattagcaagggagtaactactcgatctcgattagttaatttttgtgagcattactcctttgtctcttctattgagcctttcagggtagaagaggccttgctagatccagactgggtgttggccatgcaagaggagttaaacaacttcaagcgcaatgaagtttggacactggtgcctcgtccgaagcaaaatgttgtgggaaccaagtgggtgttccgcaacaaacaggacgagcacggggtggtgacgaggaacaaggctcgacttgtggcaaaaggttatgcccaagtcgcaggtttggatttcgaggagacctttgctcctgtggctaggctagagtcaattcgaatcttgctagcatatgccgctcaccattctttcaggttgtttcaaatggatgtgaagagcgctttcctcaacgggccaatcaaggaggaggtgtacgtggagcaaccccctggcttcgaggatgaacggtaccccgaccatgtgtgtaagctctctaaggcgctctatggacttaagcaagccccaagagcatggtatgaatgccttagagactttttaattgctaatgctttcaaggttgggaaagccgatccaactctttttacaaagacatgtgatggtgatttgtttgtgtgccaaatttatgtcgatgacataatatttggttctactaaccaaaagtcttgtgaagagtttagcagggtgatgacgcagaaattcgagatgtcgatgatgggcgagttgaactacttccttgggttccaagtgaagcaactcaaggacggcaccttcatctcccaaacgaagtacacgcaagatctgctaaagcggtttgggatgaaggacgccaagcccgcaaagactccgatggggaccgacggacacaccgacctcaacaaaggagactccgactatgctggatgtaaggtcgataggaagagtacatcggggacgtgccaattcttaggaaggtccctggtgtcatggaactctaagaaacaaacttccgttgccctatccaccgctgaggccgagtatgttgccgcaggtcagtgttgcgcgcaactactttggatgaggcaaaccctccgggactttggctacaatctgagcaaagtcccactcctatgtgacaatgagagtgctatccgcatggcggagaatcctgttgagcacagccgcacaaagcacatagacatccggcatcactttttgagagaccaccagcaaaagggagatatcgaagtgtttcatgttagcaccgagaaccagctagccgatatcttcactaagcctctagatgagaagaccttttgcaggttgcgta

SEQ ID NO: 19207 - DNA, 1767 bp, Zea mays
  Peptide Sequence Number=SeqID_60986
atgaggccttcagatggcaggacgcagctttcaggctttgcacaatcagatgaatcaacacttgatgtggaggggcattgctaccaccagcagtcattcccttcctctccatcgatgcaaccgattgcttctggctgcacacacacagagaacagcgctgcgtacttcttatggccaacatcaaacctgcagcattgtgcagccgagggacgcgcaaactacttcgccaacctttcaaagggactgttgcccaagtctggccggttgcccaagggccagcaagcaaatagcttgcttgacttgatgactataagagctttccatagcaaggtgttgcgttgctttagccttggaacggcggtgggcttccgcatcaggaaaggggctctgacagatatccccgcgattctttgctttgttgctcgcaaagttcacaagaagtggcttaatccggaccaatgccttcctgccattgttgagggtccaggaggtatttggtgtgatgttgacgttgttgagttctcgtactacggtgcaccagctcaaaatccaaaagtgcaaatgttcactgagcttgttgataagttgtgtggcagtgatgaatgtattggctctggctctcaggttgcaagtcaggacacttttggaactttgggcgccattgtaaaacggcgaactggcaacaagcagataggtttcctcaccaaccgacatgttgctgttgacttggactacccaaaccagaagatgtatcacccattgccacccaaccttgggcctggtgtttatcttggagctgtcgaaagggcaacatctttcatcacagatgatgtttggtatggaatctatgctggaacaaacccagagacatttgtacgcgccgacggggcattcatcccatttgctcacgacttcgacatctccacagtcacaactacagttaggggtgttggtgacattggggatgttaaggttatagatctgcagagtccacttaatagcctcatagggaggcaagtatgcaaaatcggcagaagttctggtcacacaactggaactgtggtggcttatgcccttgagtacaatgacgagaaaggaataagcttcttcactgacctccttgttgtcggcgaaaaccgccaaacttttgatctagaaggtgatagtggaagccttattatcctgactggccaggataatgagaagccgtgtcccattgggataatatggggtggcacagcaaaccgtgggaggctaaagcttaggtgtgaccatggccctgaaaattggaccagtggagttgatcttggccgccttctggatcgtcttgaacttgaccttatcataaccaatgaatcactcaaagaatttatcctcgataaagatgccgtgcagcagcaaaggctcgcgttggtggctgcagctaactctgctgttggggagtcgtcgacagcagctgttcctgccccagaagaaaaggtggagatcttcgagcctctggggatcaaaatcgagcagctgcctcggcacgacgtttcggcgacgacggaaggggatgaggcagctgtgatcaatgtggaagagcgccagttcatctcaaactttgtcggcatgtcccctgtacgcgacgaccaggatgctccgaggcaaatcgcgaacctgaacaatccgtcagaggaagaactcgccatgtcgcttcacctaggtgaccgggaggccaagcggcttcgcactgacacagaatccgagcttgacctggagaagtga

SEQ ID NO: 19208 - DNA, 249 bp, Zea mays
  Peptide Sequence Number=SeqID_60987
atggagtacgtgaaccccctcaccggcttccgcgtcgacggccgccgccccaacgaggtgatgcatcctcgcccgctttcccctacgcgcggttcacgcgaacagccctatctcacccggtgctggacatcacgcagatgcggcaactcaagggcgaggtcggcgtcgttgcgcgcgcagacgggtcggcgctgttcgagatgggcaacaccagagtcatcgccgccgtctacggcccgcgagaggtga

SEQ ID NO: 19209 - DNA, 483 bp, Zea mays
  Peptide Sequence Number=SeqID_60988
atgacaatttacgacggctggaacggaagacttggtcgaggcggggtccgagcgtccagagtttttgtcgaggccgaacttggcaagctacacgcaggcacgcgtcgaccacggcaagggagcagagaaaattgtgcggatggccgaaatagagacggcgagcacgcgcgcacaaaaagcaaagcacgcagaggagcgtcgacggcggcggcttgggagctctacgacgaggagacgcaggggcaagctatggaaagggacgccgcgacaaaatccccggagcgatgcagggaactcgacagcggcgacatggacgagatccgcgcacggcgagatgggcacgaccaagcgcgacgcaggaagcagtcgggcgcggcagcaggagcttgcaccaggacggcaagcgacgctgggggaagggagctctgcgagcggaattcgagcggggagtttcggtcggcagaggaagcagggaggagatga

SEQ ID NO: 19210 - DNA, 267 bp, Zea mays
  Peptide Sequence Number=SeqID_60989
atggagtggggacggggaaggtccaccaccaggacgaagggcaagagaggcggcggcggctccgacaagccgaggcagccgcagcgagggctcggcgttgcgcagctggagaagatcaggatccagagcgagatggcggagtacttgcaccaccctcttgcccagcagccgcctcatccgatccacagaactggtagcttcaactcggagagcattgtctacaaagttgctatattttctttgttcgagaaagttgttgttgtttaa

SEQ ID NO: 19211 - DNA, 504 bp, Zea mays
  Peptide Sequence Number=SeqID_60990
tatttacaacatgtaccatcccttaccttgcctatcggaacccagggcgctataaacttgctgcaaaatattgaggaacttggccgtttcatctgtaacattataacagtcgtgcctgagggagttgttatgtttttttcttcatatgattatgaaaggcgtgtatatgatgcatggatgacaacaggcacaatttccaggatttctaaaaagaaacatgttttcagagagccaaggaacagtgctgatgtcgaggctgtcctcaacaaatacaaggaggcaattgaatcctgtagtaatttttcccaagacacaggtgtcaatggggcacttctattagctgttgttggtgggaagatttctgatggcataaatttcagcaacgggatgggtcgttgtgtcataatggttggcttgccttatccaagtccatctgatgttgagctgatatattacggaagtgcactagaggtggaagagagtattatgcgaatttatgcatga

SEQ ID NO: 19212 - DNA, 804 bp, Zea mays
  Peptide Sequence Number=SeqID_60991
atgttgggccagccctcggtgtcactggtgtcgtcgaccaagcccacggtgaccaggccactaaaggtcggtgtcgtgctctctggtggacagacgccgggcggccacaatgtcatctacgacatctttagtgaggaaaaacaatttgggattgagatgagccggatacaaggtctacctggtggggagagaaacaagactgctaccgccatccccaacctcccgcagatcccccgcgcgcgcgcccgcccgctcccacccagccgtgattccccgcagcgatgcgcccgccaaactaaccccgtggaggatcccctacctcccgatccctacctcccaaggatcccgcgcgcgcccggcaaactacccctgctgaggatccgccgccgaggatcccctacctcccgcgcacgccagcgcgccccgacagccgccatcctgcaaggcgcgacaccacccgctagccctacgccaaccgcaaggcgcggccgccactatccgcccgacccgtacgccgcgaaccccgccatccgccgcgaaccccaccccccgtcgcgaaccccgcacgccctccgcgatacgccagccgagaacgccgccgcgaaccccgccacgaaccccgccgcgaaccgcctaaaaccccgcccgcactccaatagccatgccctgacagctctgcgaaatccaccttcgccgcaaacgcccgcacgccccgcacgcccgcgcgcgattcgccacgacctccatacacagcgcgcagccccgagcagcccgcaaacaactgtcacgatcttggcggcatga

SEQ ID NO: 19213 - DNA, 942 bp, Zea mays
  Peptide Sequence Number=SeqID_60992
atggtccgctcagctgaccttgtagtccttccttatcaatctttgttactcaagtctgctagagaatcacgtgtccttattctgaagaacagtgttgtcatcatagatgaagctcacaacttagctgattccttgagtaacatgtacaactcaaagatcacgtcttctcagttgaagacagtcctttcctgcctggatgaataccttgatagattttacaatgttttgggagctgggaatcgacgatacatccagaccttgacagttttaacaaggtctttcatacgtgttttgatcaacaatcaagatggtgccagcactatgtcttctatgaccataaaccaattcttgttttcccttgacattgataacataaacatagtaaaactttgtcagtttgtgaaagaaagcaatataatccataaggattgtggatatgcaaacaagttaagtagcatccaaaatcagtttgatctccagctccatgatgaaggaagcagtatagcatgctttcaggcattggttgactttctacgctcccttctgaacagcaatgatgatggaagaatcatagttgcaaagcaaaagctaggtggacaacctgatgaagcatatcttaaatttgtgatgctttgtgcggaaaaaatattttctaaggttacgcaggatgcttatgttgttatcctggctggtggaaccctccagcctattgaagaaactaggttccgcttgtgtccaagcttaccaccaactgatataaaattcttcacttgcaaccatattgttcctcctgagagtattcttccaatagcagttacacgtggaccctcaggcatggcatttgatttcagctacaattcaaggagctctccttccatggtttgcactttctacctcatatctaacgtccccgacccattcgcttctgctactcaagcatag

SEQ ID NO: 19214 - DNA, 751 bp, Zea mays
  Peptide Sequence Number=SeqID_60993
atgaccatctgtcctttacaagcctgtgtctggttagttagagtatcttcgctggaacaggaaattgttaaaagtgtattgcaacaggttacaaggtggctctttgagccaattatcacagcagaaacaatagatgagcaacctgtgactacattgcatgagttatgccaaaaacatggcaaagttgcacagttcaagacatggcagaaggatgggatgatcgtggtaaatgtatttgttggtggggagatggttggacttggttcctcggagcagaaggtaattgctaagctgaatgctgcacgagatgcactgggcaagcttattggtgaagtagttgttgatggagagatcaccctgaacgaagttttggaaggcagcgtcaaggtagagagcacattgctcgttgttgccaaggaagtgttgttcccgggcaagctagacgtagcaggcggtatggtcgatggcgttagcgagaacatggtgttggaggaagaacttcccaagaaccagaatcatctggtggttgacgatggcagcggcctcatgagccactgggacatcttggagcggttggtgagaaccaccattgttgggaagcaatcggaagttgtcgaggtcactggcaaaggaggggtgctagaaggtgggtgggacatcggtcccaggcatggttgcggcaacagggaagagatccgcacgtggggcgtgttcacgggtggcggcaagttggtggcgatggagaaggcgg

SEQ ID NO: 19215 - DNA, 366 bp, Zea mays
  Peptide Sequence Number=SeqID_60994
atggttgcagcacggcagcgcaccgcgagcagggcccaaggggctcctcgccggggccatggcccgggcgggctgcaggggggagctcggtcggccgcgcgccatgagccgctggccgcgcccagcagggaccacgccaggccgcgcgccgcgagccgcaaaccgcgcatgggtgcctgctgcaggggcaagagcgccaacaaggctgcccgctggggcgtcgggccctcgcgccggggaagagacggttcaaagggaaaaggggagaggggaggggcgcgcaacgtgcagcagggcggaaacgagaaagtggagattggggaagatgagaagagaggtgtaacacctgaatttggtggatattag

SEQ ID NO: 19216 - DNA, 783 bp, Zea mays
  Peptide Sequence Number=SeqID_60995
atgataaagcatgatcataattcagttgtaaacattaatcccaaaatcagaggtgggatacaggttaatgtttataaattccgagggctcttttgcaagaccaacctcggatgccggtttagggacatgtggctctccacgactggctggaaccgagccatacccaggcctacgttcatccgcatctggaagaaggggtcggtggagcagtactcgccgatcccgtacgtggcgacgctgctgaactgcatgatgtgggtgttgtacgggctgccgctggtgcacccgcacagcatgctggtgatcaccatcaacggcaccggcatgctcatccagctgacctacgtggcgctcttcctcgtctactccgcgggggcggcgcgccgcaaggtgtccctcctgctggccgccgaggtcgccttcgtcggcgccgtcgccgcgctggtgctcgccctggcgcacacccacgagcgcaggtccatggtggtcggcatcctctgcgtcctcttcggcaccggcatgtacgccgcgccgctctccgtcatggcattgctggacgcctacgcgctcatccgcttcgacctctacatcaccatccccaacgggctgggcgtgctgttcgcgctggcgcagctgctcctgtacgccatctactacaagaacacccagaagatcgtggaggcacgcaagcgcaaggcgggccaggtcgccatgacggaggtggtcgtcgacggcagcagggcctccaacaacaacaacaacggcggcagcggcacctactga

SEQ ID NO: 19217 - DNA, 459 bp, Zea mays
  Peptide Sequence Number=SeqID_60996
atgagctggggaggtacggcgagcgtagccgcgaccggactcaaactgatccagatgccaagatttttacctacccgtgcttatcttctgaccacagtgcacgaattgcgacaatcagcgctcatcgcggcgcattgtgtgatgatgtccaattatgtaatcgttgtgtacggagtttctgatcctggcacatacatgatggcccatatcaggtgcactgcacgtaagtccatgatcccctttttgccttctcgcctagcggagcgtccactgcgtcgcacagtgccagttcagtccaatcacctggagagactgtatcgtcgcctgcacgaggagcaggagctccgacgacaggagcaggagcagcaggactcctacccctcgcctcagcaggaggtggagtctaagaggccgccttcccctgcacctcagctagagatgccccctgcaccaccatag

SEQ ID NO: 19218 - DNA, 282 bp, Zea mays
  Peptide Sequence Number=SeqID_60997
atgctggctgctactgagctgctttctttggacaatgattcaccaaatggccctgttccccatagtggaaacacacacgacttcctctttgcgctggcgctgcttggttgtcctagttggttgctggggcaggaagacgggctgcctggttgcgttgacgctggtattgatttcctccctgctggttattctgacggtactgctgctgctgctgagaaaactgcctctggtactgctgctgctggttctgacattgatgctggtgctggtgaccttgcttga

SEQ ID NO: 19219 - DNA, 420 bp, Zea mays
  Peptide Sequence Number=SeqID_60998
atggcgcaacagacccgaccatcaatttataggattgttaagcggcggctgatgaatttgggcgagacgcgtggcggccggaggggaaaaggagctctgtgcttggaacaggtggctttcaccgtggcagtcactccggtgatcaccggacatgcaccccaaggttcaccacgattaggactagcacttaagaacgtggcacgcaacggtgacagatcgacggcggtgaaggttatccgatcgaccgatgagctgggcaggtacggcgagcgtagccgcgaccagactcaaactgatccagatgccaagatttttacctgcccatgcttatcttctgaccacggtgcacgaatcgcgacgatcagcgctcatcgcgactgcgagtcaccggcgacggtgaacggctggcagtcgatctga

SEQ ID NO: 19220 - DNA, 495 bp, Zea mays
  Peptide Sequence Number=SeqID_60999
atgtccggtgcacaccggacagtccggtgccctctcccgaccgttggctcggccacgtgtctcgcgcagatcgcgcggccgaccgttggcccggccgaccgttggctcaccggacagtccgggtcgtactcccgcctgtccgtgccgccgggatcatcctccgacacctacgacggcggcgagttggagtccttctccgccgctgggatcgtcctccggcggcaagttgaagtcctcctccgcgtcacgttccccagcacctggtccggcggcgtctgcctccggccgccgctcagatccggctcccacctattcccgctgccggagccatcccccgacatctacgacggcggcgagtcagggtcgtccttcgatatctgcgacgacgacagcgagtcgaagtcaaggctgtccttcgacatctacgacgacgtcggctcccacctgtccggcttgtgggaacgaaggaggtgggggcgagtggggagcgcgtga

SEQ ID NO: 19221 - DNA, 558 bp, Zea mays
  Peptide Sequence Number=SeqID_61000
atggaccggcgtaggctatcgcggacaggcagcgggacttcttctcctcatgggccgttcgactccggcctatttttcgtcgtcagcgacagcgtcagggggataagaacgctcgagcaaggtatcatcccgacatcatcccgcgccgcggccggggaccgcaccttggggctctggagctccattatatacagaggcaagtgggagccgtttgttcagcaccgctacttgtgctcccccaacgctactaccgccgctagctggttcaagtgcggcgagcggagccggagaccggtagaggaaattaagaggcgtcgatcgggcatggggtgcgacgacaagtgcgggtgcgccgtgccgtgccccggcggcaaagactgcaggtgcacgtcggggagcggcgggcagcgggagcacacgacttgcggctgcggggagcactgcgagtgcagcccgtgcacgtgtggccgggccacgatgccgtccggccgcgagaacaggagggctaactgctcctgcggggcgtcctgcaactgcgcatcctgcgcctcggcctga

SEQ ID NO: 19222 - DNA, 351 bp, Zea mays
  Peptide Sequence Number=SeqID_61001
atggcaagcggaggcgagggcgcagggagcggcgagtcccctcccgctgcctcagtggaggcggcagcgggggaggcgacgctgcacatccggtgcgcgaacggctctaagttcacggtgcagacggacctgggcgccacggtgggcgggttcaaggaggtcgtagccgggagctgcgacgtgccggcgccgcagcagcgtctgatctacaagggccgcatcctcaaggacgagcaaaccctagaaagctacgatgacattaattacagcctagaagtagctgaaggtctgaagcagacgacagctttgtcacagactcacagttctcatataatttcaaatgttatgtag

SEQ ID NO: 19223 - DNA, 819 bp, Zea mays
  Peptide Sequence Number=SeqID_61002
atggagtccgccgacggggcggtgtggatgctcatcggtgcgaatgttgctgtcttcctgctgtggcgtgtggccgatccagggttcatgaggaagcatttcatgatttcactggacaatttcaagagtggacggttgcacaccttgctcacgagtgctttcagccatgcagagtttaatcacctctttgccaatatgtttggcctcttcttctttgggagcagtaaatttgaaggacctgctccatcccagttggttccactgccacctcttctacatgggcatgttgttccagctccagagaaggttctaagggccagactcaacagaggagtgtgggaagtgttggtcaaatggattgggtgttcagaagcagatacttcatgggaacaggcactccacttttcactcactaccatcactgaaagagcatcttttatagcaataaatctcttcaacatcacaacagcagagattacgaatgtgtttggtcctgcctttctattgaagttgtatgttggtggagcacttactggatcagtattcttcttgctggagaaggcttttctagcctatcggaaacaggattatgtaggatgggatacttcaagagctgctgaacttggtgcaagtgctgcagttaatgcaactatgcttcttcaaatttttctgtatcccaagggactagtgtatatttactttgtcattcctgttccagctgcacttatgggcgcaggtttgattggtgctgatttagtgaggttgaagaggactaccaactggcaacaacagttgacaggaccaactgcatatctttag

SEQ ID NO: 19224 - DNA, 645 bp, Zea mays
  Peptide Sequence Number=SeqID_61003
atggaaatcactgtccgcaatgcgacgatcctctgcagttacttctggcgaagtagctccagcagtagcattaagtttagatggtggattaccgtactggtggtttgcggcgtaatccaaacttgtaggctcgcgggaagtgctctcgattttggagaatttgacacctcttctacaaatcttgtaggtccacctggctctggaaagggaactcagtctcctattatcaaggatgaatattgcttgtgccatttagccactggtgacatgctgagggctgctgtggcggccaagacacctctaggtatcaaagctaaagaagctatgaataggggagagcttgtttcagatgatttggttgtgggcattattgatgaagctatgaagaaaccctcatgccagaaaggtttcattcttgatggctttcctagaattgtgactcaagcacagaagcttgatgagatgttggcaaagcaaggtgccaatgttgacaaagtcctgaactttgcaattgatgatgttgtattggaagaacggattactggtcgttggatccactcagccagtggtaggacttaccactcaaaatttgcacctccaaagtctccaggagttgatgatcaataccgacacagatgtgattag

SEQ ID NO: 19225 - DNA, 585 bp, Zea mays
  Peptide Sequence Number=SeqID_61004
atgcgccagctgcggctcgcgcgtgcccagacaggccgcgggggtgcaggcagacgcgagcgcctctccgacgagcagtgcgcggggatcaaccacttcgtggcgctgtacgccgtgccggtgctcatcttccacatggtgtccaccaaagacccgtaccacatgaacgagcgcctcatcgccgccgacacgctgcagaaggccgtcatgctgctggcgctcacggcctgggcgttctggtcccacctcagcaggcgccgcgacggaggccgagggaagcggcaggtcgttcagggagcggagtcgccgatcaagtgggtggtgaccaacttctcggtggcgtcgctgcccagggtgccaggcgggccccgcatcggccactgctccaccgcagatgcgaccgcctccggatgccgggcgggccccgcatcgcccgctgctacacggtgtacgacgctggagttcgcctacctcccatccgcggtcgtcagcgcctcgtcgtcggatgacgctgcttatgtggtccgtgacgccgtgcgggtccacctgcagcctgtaataaggaaagagcgggtgggcgcgtag

SEQ ID NO: 19226 - DNA, 204 bp, Zea mays
  Peptide Sequence Number=SeqID_61005
atggcaacagctattatgcggaccgttgccttcacaacgcaaggggagtgtccagttggctcagcccatgccttggcatggaggatccaattccgtcacagaaaagaggtcggcacggaggcgcagaagcggatcgatgtgatttttgggcaagaatttgatttcaggccgcccaaaatgagcccgttgtcagctcacagctaa

SEQ ID NO: 19227 - DNA, 192 bp, Zea mays
  Peptide Sequence Number=SeqID_61006
atgtccctggcaggctgcgcacctctttttcttctgctactattacatttggcatttgctagacctctctttcctctaccgagtaagacaaagaatgaagagaagaagcccatacagacgtttcggccatataacattgctcatcgtggatcaaatggggaaattcccgaggaaacagctgctgcatacatg

SEQ ID NO: 19228 - DNA, 1236 bp, Zea mays
  Peptide Sequence Number=SeqID_61007
atgaggaagctgtgcccgaacctggaccgcgacgactccctggacaccgtgctcgaggtgcccatccccgatgagatgctcatcaacgcccccggcgccgacaagcgccgcggcgccgggggcgccaacatgcgcgcctggctcaagaaccaggccttcgatcgcgccaccgtcgacgggcctgcctccgccaccgcggagctccagctgttcctcaacgtcgtcgggtcgccgctcatcccctgccccgtcccgcacgaccgcgctttcagccgctccatccgcgactcctctatccaagcatcgacagccaagtacatcatccagcagtacatcgcggccacgggcgggcaggcggcgctgcagggggtgcggagcatgtacgccgtggggaaggtgcggatgtgcgcttccgagttccacctcggcgaccagacggtcaccgccgcgcagggccgcgccgaggtcggcggcttcgtgctctggcagaagacgcccgaggtctggttcttcgagctcataatggccggccacaagatgagcgccggcagcgacggcaaggtcgcgtggcggcagtctgccgccgagcactcccgcgtctcgcgcggcccgccccgccccctccgccgctctctccaggtaacggaaagcgccgaggcacacgtgcgggcacgcatagcgttcagccagaggcgtcttccatcgtgctcctttggttatttgcagggcctggatccacgctccatcgcgaacctcttctccgacgcggtgtgcataggcgagaagatcctcaacaacgaggagtgcttcatcctgaagctggaggctggcgccgcgacgctgcgggcgcggagcgctccggcgttcgacatcatccaccacacggtttggggctacttcagccagcgcacggggctgctcatccagctcgaagactcgcacctgctccgcatgaagtccggcaagggcgctcgccgcagcgagaacatcttctgggagaccagcatggagtccgtcatctccgactaccgctacatcgacggcatcaacatcgcgcacggcggccacaccaacgtcacgctcttccgctacggcgagggatccgtcaaccacaagcggaagctggaggagacatggacggtggaggaggccgatttcaacgtgcacggcctcaccacggactacttcctgccgccggccgacctcaagaaggacgacgaggatcacaataagtga

SEQ ID NO: 19229 - DNA, 1673 bp, Zea mays
  Peptide Sequence Number=SeqID_61008
tggacttcacactggaggaacttaaaacacttagagtgaagcagagatactcgtttagagatcaacaatacaatgacagaactgtcggcatatatcccgagattaaagatccagtttttatcaacaagcatgtcaagtgggctgatgggaagaagtttgaggacaaatttgtggataccttgcttaaatatggatacaaaggtcaatatatgtcagagaattggctgaagcagccattgtttatacaatcctttgctcccacctccattgtacatgtatcagattttattgactctcccaagtcatactgggaaattacttcagatgactaccttgcatacattagtaaatatgtcgttggccttggtccatggaaggacactattgttccagcttcaggaaactacttgatgccacctagtgatcttgtcgcacgggcacatgctcataatctccaggtacatccatacacgtacaggaacgagaaccagttcctgcacttcaacttttttcaagatccctacaatgaatacgacttctggataaacactgtgggggttgatggactgtttacagatttcaccggaacccttcacagtaacacgctgtttgttggttcatcagtcactgcctaccagggccaggtgcccaacatgccaattgccatagcacaggatggtagtgtggaagacttttcaagcaggagcagctcatttaatgaggaacaattggaagggaaggcaacaccaaataatatcagtggaggaccagaatattttgtgcctgatttaattcaacctggtgcactctctgctgtcaagttcattgctaaattcatgttcctgtatggctatgataaggagtgttgccaggcttatataaactcaagacagagtgcaacagatgagtactttgggtctcttggtctggaaaacctcagtatagaggagcttatgaacacaagttggaacagaatgaattcattaataaagagatggaactgggcaattatggtttttcttcgggtgtaccttcaattggtcccccaaaaacagaaaaagctttttagattgcttgatatgtatgaagtccttgctgatcttctccctgaagctgaatccttgtttgaatcaggatacaatgatatgatcctgaatgagtaccatgaagcactactgcaactgggagaatctgcaaggaagacatttgcagaattcaagtatgccatccaatcatacacttcatccagtgcagtagctcgtggagaagtgcatccacttacaaagtatgttatgaactacataaaggctctcacagcatacaacaaaactctcgattcacttctcaaggacacggatcgaagatgcctggtttctgacattcagctgatggcaaacccatatcctaatttcaccgcaacagctttcaatctacaatctgttactgcagttctggaggcaaatcttgaagctgggtctagactgtacagagatgatcgattgcagtacatcttcatgatgaacaacatccactacatggttcagaaagtgaagaactcggatctcaaaagctttcttggcgatgaatggatccggatccataacaggaaacttcagcagcaagctacgagatatgagagggcgtcatggaataatgttctcttacctcagtga

SEQ ID NO: 19230 - DNA, 552 bp, Zea mays
  Peptide Sequence Number=SeqID_61009
atgggttttgtttcacggcaaactgggggtttaggatttaaggctgcggtttcgcggagggaatccaaaattgacaaatcagggaatctgttccatactgtaaatgaatcacgagcaatctgcaagtacgctgctcgcaaaaacaagccagagctgttgagggaaggaaacctcgaggaggcagcaatggtggatgtttggatcgaggtggaggctaaccagtacaccgctgcactgaatcccatcctcttccaggtcctcatcagtcctatgcttgggggaaccaccgaccagaaagttgtggatgagaaccttgagaagctgaagaaggtgctagaggtgtacgaggcacgcctgaccaagtgcaagtaccttgctggagacttcctcagcctcgccgacctgaaccatgtgtctgtcactctctgcctgttcgctacgccctacgcatctgtgctcgacgcctacccgcatgtgaaggcctggtggtctggtctgatggagaggccgtctgtccagaaggtcgctgccctgatgaagccatctgcttga

SEQ ID NO: 19231 - DNA, 540 bp, Zea mays
  Peptide Sequence Number=SeqID_61010
atgaagaattctagtcgcaacacagtcgagggtaaagagattggcaggcggcgaggtcccggtgatgaagacgcagacggcaaggcaggaataggcggggcgcggtcatgggagtggcaacagcgaccagttaggaaggagctttggcgagggaagaaggccgcattgggaaacctggagaggaaagagaacgtgtctggtcttcatggcggtggcgcccgacgacttggtttactggtttcctgccagctcgatggcgctctgctccctcttgtctgtgcccggcggctttctggtgatggacaggggcggcggtcgggttttataggcagtcctgcgaggatcaagtccaggggggtcgcgggttccacggcgaggagatcggcaggagacagttgcgccaagctcgtggattctgttgcgcacccacggaatccacgtggctggtccagtgtccagaggttgaagggagcactgacgcggcggacccacacgtcagcgcgaagagaggtggatgggattcgcgttgtaagaggctga

SEQ ID NO: 19232 - DNA, 564 bp, Zea mays
  Peptide Sequence Number=SeqID_61011
atgaagaattctagtcgcaacacagtcaagggtaaagagattggcagatatcttacaggtgatgaagtaatcgagttttccagccgcggcgccgagcgcacaggcggcgaggtcccggggcggcggccgggttttataggcagtcctgcgaggatcaagtccagggggggtcgcgggttccacggcgaggagatcggcaggagacagttgcgccaagctcgcgaattctgttgcgcacccacggaatccacgcggctggtccagtgtccagaggttgaagggagcactgacgcggcggacccacacgtcagcgcaaagagaggtggatgggattcgcgttgtaagaggctgacaaaggccttaacaaatatgatatccgctccactgcctatgtcaaccaaaacgaggggcgaccaccatattgaaaatcctggtaaaaccaaggataaaagggaagctaccaaggactacaaaaagaagttggaggagataggatcaaaagtgccaaaagctcaatggtttgggtactatcggaccggtctggtgatgcaccagatcatctag

SEQ ID NO: 19233 - DNA, 396 bp, Zea mays
  Peptide Sequence Number=SeqID_61012
atgggaagagagaggaaggaagccgagcaagcaagaagcctgcgcgcgcgagaagaagcgagcaggggcaagtgcgcagcggccagggaagcagggaaggagctcgggcgagctggagggagctccgtgtgggcgctagaggacatgggcgccgagcgagcagagggaaggggacgcgacgctgggagctccgcatgggcacaggagcgcgcgcagggagagaaatccagcgccagggaagagctcgcaacagggacacggcgagcagggaggggcaccgtggccatggcgagggagcttggcagggcacgacccgagcagtgggatgagcgcacaggagctctggagcgaccggtgagcgctgcaagtgacagagagaaggatccagcagtttga

SEQ ID NO: 19234 - DNA, 312 bp, Zea mays
  Peptide Sequence Number=SeqID_61013
atggaagcagggaaggagctcgggcgagctggagggagcttcgtgtgggcgccggaggagatgggcgccgagcgagcagagggaaggggacacgacgctgggagctccgcatgggcacaggagcgcgcgcagggagagaaatccagcgctagggaagagctcgcaacagggacatggcgagcagggaggggcaccgcggccatggcgagggagctcagcagggcacggctcgagcagagggatgagcgcacaggagctctagagcgaccggtgagcgctgcaagtgacagagagaaggatccagcggtttga

SEQ ID NO: 19235 - DNA, 348 bp, Zea mays
  Peptide Sequence Number=SeqID_61014
atgctgtccgaatccccgctcctgctctggctcatctgcgccaccaccgcatcacttctctcctatggcgcccggatctccactccccttcctccctgccctctgctccagcttgcagtcgctgcgtcgctcagtccctggccacgtctgtgtggttgtgttctttcgtcggaatgctcaatttgccgtggtcctgcgctctctgctcgaagacgaccccaagtcgacctaggacgatgcagagattggacatctccgcaagacgacgttgtcagtcggacgaacctgaagatggataatctgacgaatgtcaagacaaaagatggtcgtcaagcggacatcgtctaa

SEQ ID NO: 19236 - DNA, 285 bp, Zea mays
  Peptide Sequence Number=SeqID_61015
atggcgcctccgtgtgccggcgtggtgccaccgctcgggatgtccggatgtgtacgggggacgacgccgttggatcctccatcgacggtgcagattagaagttgggcaccggttggtgtagaaccgaagcagatggtagcttcggcatttggcatcgttgcttctgcgcaaggtcttcgtcttgagaaccttcagtggaagaagggaggacttctgtatcattttgccgaaggtgtttttgtcttgaggacctttggcggagaagaccccctgaaagtcgcctag

SEQ ID NO: 19237 - DNA, 141 bp, Zea mays
  Peptide Sequence Number=SeqID_61016
atggccatgatgggttcaacattggaaaagatgtacctcttccaggtgaggaagcagcaaacttttgttgcttctgttccaaggtggtaccgaaagaagagaatcaagactaaagccgcgggaggaaaggccctccgttaa

SEQ ID NO: 19238 - DNA, 123 bp, Zea mays
  Peptide Sequence Number=SeqID_61017
atgggcaccgccgggggaaatctgcgcgccgccgagtttggaccgtgggaggaggatgactcctggccatctgatccctatcgggtggttgcgattgatgaggaattgtgtggattagcataa

SEQ ID NO: 19239 - DNA, 336 bp, Zea mays
  Peptide Sequence Number=SeqID_61018
atggtggaggggtcaatttggtcagagggtgctcgagacggctggtccacgagagaggaagtggggaagctcaccggagatgaagatgacggcgacgctggctcaatcgagctcgaggaagggggggaagtggtggccgaggccagggtgaggaagggtggagcttgggcggtcctttttataggcaccggggggaggaggaaggggaggtggcgagcaccggcgacgcttgccgcgatgacgatgatggcgcacagtggtggcgacgggatggctcgggcagacggggtgacgggatggctcgggcagacgcatggcgccaaactgagctggtga

SEQ ID NO: 19240 - DNA, 177 bp, Zea mays
  Peptide Sequence Number=SeqID_61019
atggcgagagtagcatgtacccttcgtggcaagaggctggacggtggtgtatctatgctctcagttggcgtgaacccggtgaggaaacaacagacttttgttgtttttgctctaaggtggtgcccaaagaagaacctcagcagtgaagccgtgggaggatgttggcctcccacttga

SEQ ID NO: 19241 - DNA, 243 bp, Zea mays
  Peptide Sequence Number=SeqID_61020
atgagctcgagatgtgcaaaagctgacaggaaggctcacggcattgaacatattcatctcgcgctctgtggaatgaacacttcgcactgccgtgtggggcccttcgccagtgcatgcgtgggtgtttgctcctgggcactggatgacaagtggggccttggtcctgttgatcttctccccaccgtcgccaaccagggtgagcttcaacagatgcgggtgagaatcgcgccagtcgtgcggtag

SEQ ID NO: 19242 - DNA, 630 bp, Zea mays
  Peptide Sequence Number=SeqID_61021
atggcctatgcttccctcgttacctacgaggacgatgtcaatgctctattccacaaaggctaccaacatttcaagagatttgagcagtgtagtctggacttcgaccaagaagtttttcaagttgaggaactgtctaagaagcgatcttctagtgccctattttaccatatgtggggtgttgagggaaattttggttttccagacaatgggaagggtatgcttgactttgtcgtttgtgttatgctgctatcctattggagtctgtcatctttgagtgatgtggatagcctttttgattcagagccgtcgaacagtgaggagggtttagattttttcgcggagatggacaatgggtcctctaaggaggacttggatttttttgttgcgttagaaattgcgtccatggtggaggctaagaatggcgagggggctttaagtggggctccactagctgtggtaaaagggagaacgagacagggggtcactgaggtagacatgatcccttgttgttctgtgttgacgggggtactgagtgggattcccaatctttgttgtgttgagaagtcggagcttaggacactctttgaaggcgacgaacttgaactgatgttgtataactaccaggagtga

SEQ ID NO: 19243 - DNA, 585 bp, Zea mays
  Peptide Sequence Number=SeqID_61022
atgggattcctgttgggaccagctgacacatggataggtggtcccaaacactcaggaaatggaagagctcagccttctctgacggccatcgttgaggacttcgacgctggagcgggatggagtcctccgtcgttgttgaccctactctcaaacatggttaatgatagccatataggtttgatcaaggtcagagttgctacattgtcaagcgcaccgtcatcagagaagacatgtagcgaagattgttggcaagcactcaacgaagatggagttgccgaggagctagcatattcgaggccaaatgttcggttgaattgtgtgtttgagttgaatggtatgccctacgggccttatccggaggagggctccacagacgttggagatgccgccgaaggcaggaagaaaagtaggggcaagcatggtgctgcagacgaaggattctcaaagggaaaggtcgtggcttcgtcattgaagaaattaaagaaagttgagactagggcgagagacctggcaaagggggtgaaggtgtctaacagttttactgaagagatggctgagatgtgtgctgagccgaggaggttatga

SEQ ID NO: 19244 - DNA, 561 bp, Zea mays
  Peptide Sequence Number=SeqID_61023
atgatgaccgcgtcaaaaaagggaccgggaaaggggatatttcaaaaaaggatccttcccagcgaaggaaacgggccccgagccctcctactgatcaggggttcgaaggttgcgccctccggggttcggcaaccgccccagagcactcgggctccgagcccattactgatcaggggttcgaaggctagcccctcggaagggttcgacagccgccccagagcacgcagagtcagggatgaccctgggtacgtctgttacatggctgaggctcgggctacgctcccgagggagctccgcctcgcccgacctcaggcctcggcctcagcctcggcctcggcagaaggtctccgcctcgcccgacctcaggcctcggcctcagccccggcctcgggagaaggtctctgcctcgcccgaccccaggcctcggcctcagcctcagcctcgggaggagtcacatcctcgcccgaccttggcctcggcctcaggagaagactccgcctcgcccgacctcagcctcggaccaactacgctacaggggatgcatcattaccctactcctag

SEQ ID NO: 19245 - DNA, 234 bp, Zea mays
  Peptide Sequence Number=SeqID_61024
atggaaggtgcagccggccaaatgatcatcctgatcctcggcatcgttgtcgcagcacccatgaccttctacaccatcaacttcatggagatgcgagatggtccaatcctgtcagcgcgcaagacattggcggccgccaagttagttgaagtggtagaggagaacaagccaaagggggaggctcagaaggagaagcgagtgattacacgaattgtttggctaatggccaattag

SEQ ID NO: 19246 - DNA, 2340 bp, Zea mays
  Peptide Sequence Number=SeqID_61025
atgaagttcatgaagctgggctccaagcccgatgctttccagtccgacggcgccgacgtccggcccagtgcgcagtgcggtgatctttgctgcctcacagtctgtcctatggcatctacccgacgctgctccctaggatcgccgcatcctcttgatcttgtaagaaaaaaaaccatgcgcttttctttgtcggacgctcgagtccggctgattaccaacagcctgctcggcctcgtccccgtgcggcggtcgaatgatgcaacagtaccattcactccattaactgtggtggtggtggtggtggtggtggtggtggtggtggtggtggtggtgtttcccctcatttccaagagcagcaggcttcaaaggttagttcttaaggccaccgaggagacgaccgatgaggtccgcatagatgaccttccagggggagcaaaatcgtttgaaatatgtgccaagttctgctacgggatggtggtcaccctcagtccacacaacgttgtagcagcaagatgcgcagcggagtatcttgaaatgaccgaggagatggagaaggggaatctgatatttaaaatcgaggtcttcatgaactctagcatacttcgcagctggaaggattctatcatcgtcctccagagaacgaaggccctgtcgccgtggtctgaggagctgaaggttgtgggcagatgcatcgatgccatcgcttccaagacatctgtggatcctgccaatgtgacctggtcatacagccataataacagcaagaagggaggagcttgtgctgaaatagtcgagtcggcaggaaaaccatcgatagctcccaaagattggtgggttgaggacttgtgtgaattggatgttgacctgtataggagagtcatggttgctatcaaatccaaggggagaatgtcacctgaactgataggagaggcacttaaggcatatgcggttagatggctgccagactcctacgatgcactggttgccgagggtcacatgaggaggaaccaatgtctggtcgagacactaatatggttgttgccttctgataagagctcaggctgttcttgcaggtttctcttgaaactgctgaaggtggctatactagtgggaggcggggagcacgtgaaggaagaactcatcagaaggatcagcttccagttgcacaaagctactgtgaaggatctcttgctacctgctacctcgccgcctaatgatggtacatatgatgttcggttggtgcatgatcttgtgcagagatttgttgcgagaaccgcgctgtctcataatggcggtttcattgagaagtctgatgagaagatgatcgagctcaactttgagcaagaatcaaccttggcggtgggagagcttgttgatggctacctgtctgaagtagcttcagatcaagccccttcactgcctatgtttgttgaactagcgacagccgtgcccgaagcggctaggccagttcatgacaccctttactatgcagttgatgcatatctcaagcaacacccggacataaataaatccgagaagaagaagatctgcagtctggtggatgtgaagaagctcagcacggacgcgtccatgcacgccacgcaaaacgaccgcctgcctctccggttggtggttcaggtcctcttcttccagcagctgagggccggctcgggcaaagaactcgccctggttgacaacggagaacacgcttgcacacggcctacgcaggatcagtgcgaaccctgcgaaaggcggataccgaagcatccagagtcactagataagcaggtgacgagcctgagcgcgagggagagccgccagcaccaccggaccagcgacagcgagcacaggggcggcggcaggaacagcttcaaagaccagctcgggggcctcctgccgcagtcgcggtccaggaggatcttcgacaagctgtggagcagcaaggggcaaggcgagcatggcggcaaaggctcggagacgtctggcagctcccagagcccaccgttgtcagcaaagcctgcagaagtgaagccctcccctcttcccgctgttaggaacaggagggagctccgcctcgcccgacctcaggcctcggcctcagcctcggcctcgggagaaggtctccgcctcgcccgacctcaggcctcggccttagccccggcctcgggagaaggtctccgcctcgcccgaccccaggcctcggcctccgcctcagcctcggcctcgggaggagtcacatcctcgcccaaacctcggcctcaggagaagactccgcctcggcccgacctcagcctcggaccaaactacgctacaggggatgcatcattaccctactcctag

SEQ ID NO: 19247 - DNA, 2292 bp, Zea mays
  Peptide Sequence Number=SeqID_61026
atgccggaggacggtgatccccctaggccgatgccccgcgttgacatcccacgggagctagttgtggtccccgttccggcggggggtcacggcccacggctcgagcaaatccgtggggtgcaggccaggctcgacgagggagcaggagcgcttgagccgatccgctgggacgttgggcaggcatgggcgaaccaacccccggccggagaaatacgtcatctgccccagggtctccagcaccgtgtcgccgacgacgtcagggtcaggccaccacccgcgtcaagtggggtcggccagaacctggctgcagcagcgatgctcctccgcgcgatgccggagccatccaccaccgagggtcggcgaatccagggggagctcaagaatctcctggaaggcgccgcggtccgacgggccgagagctctgcctcccgaaggcagggatacccctcggaaacccatgccgcgacttcccgattcatgcgggaagcctcggtctacaccgggcgcacgctcaacaccgcgcctgcagccccgggccgcctcggcaacgagcaccatcatcgcgaccgtcgggcccacctcgatgagagggccttcagccgggccatccgacgggcaccgttcccgacccggttccgacccccgactactatcgcaaagtactcgggggagacgagaccggaactgtggctcgcggactaccgtctggcctgccaacggggtggaacggacgacgacaacctcatcatccgcaacctccccctgttcctctccgacaccgctcgcgcctggttggagcacctgcctccggggcagatctccaactgggatgacctagtccaagctttcgccggcaatttccagggcacgtacgtgcgccccgggaattcctgggacctccgaagctgccggcagcagccgggagagtccctccgggactacatccggcgattctcgaagcagcgcaccgagctgcccaacatcaccgactcggatgtcatcggcgcgttcctcgccggcaccacctgccgcgacctggtgagcaagttgggtcgcaagacccccaccaggccgagcgagctgatggacatcgccaccaagttcgtctctggccaggaggcggtcgaggcaatcttccgaaaggacaagcaaccccagggccgcccatcggaagacgctcctgaggcgtctactcagcgtggcgccaagaagaaaggcaggaagaagtcgcaagcgaaacgcgacgccgccgacgcggaccttgtcgctgccgccgagtacaagaaccctcggaagccccccggaggtgccaatctcttcgacaagatgctcaaggagccgtgcccctatcatcaggggcccgtcaagcacacccttgaggagtgcgtcatgcttcggcgccacttccatagggccgggccacccgcggagggtggcagggcccgcgacgacgacaagaaggaagatcaccaagcaggagagttctccaaggtctgcgattgcttcatgatctacggtgggcatgcggcgaatgcctcggctcggcatcgcaagcaagagcgccgggaggtctgctcggtgaaggtggcgacgccagtctacctagactggtccgacaagcccatcaccttcgaccaagccgaccaccccgaccacgtgccgagcccggggaaatacccgctcgtcgtcgaccccgtcatcggcgacgtcaggctcaccaaggtccttatggacgggggcagcagcctcaacatcatctacgccgagaccctcgggctcttgtgtgtcgatctgtcctccgtccgggtaggcgctgcgcccttccatgggatcattcccgggaagcgcgtccagcccctcggacgactcgaccttcccgtctgcttcggaacgccctccaacttccgaagggagactctgacgttcgaggtggtcaggtttcgaggaacctaccacgcggtactgggaagtccatgctacgcgaagttcatggccgtccccaactacacctacctgaagctcaagatgccgggccccaacggggtcatcaccgttggccccacgtacaagcacgcattcgaatgcgacgtggagtgcgtggagtacgccgaggccctcgccgagtccgaggccctcatcgccgacctggaaagcctctccaaagaggtgccagacgtgaagcgtcacgccggcaacttcgagccagcggagacggttaaggccgtccccctcgaccccagtggcgacacctccaagcagatccggatcggctccgggctcgaccccaaatag

SEQ ID NO: 19248 - DNA, 177 bp, Zea mays
  Peptide Sequence Number=SeqID_61027
atggctaaaaatcacaagactgcctggtggtgcaccggactgtccagatcacctattcaccccccctctctaggtgctctcggtgtaacccatctagccagggtttccaaggcccttaaacacttccaaggagaacagctagagatccactacgaggcctttacaaagttccactag

SEQ ID NO: 19249 - DNA, 132 bp, Zea mays
  Peptide Sequence Number=SeqID_61028
atggttgacacctgggacacgcactcccatgaggacatggcagagcggttcgtattgccggcgcgattgaggataggcgggacacgtgtctatgacatggggatgcgtacacggttcgactggagggtatga

SEQ ID NO: 19250 - DNA, 318 bp, Zea mays
  Peptide Sequence Number=SeqID_61029
atggtggctgacacctgggacacgcactcgtgcgaggacgtggtggagtggaccgtgttgctagtgtggttgaggactggtggaacacacgtctggtcgtggaggacccacacgcggtgcggtactcacgatgggtttggtggtttgggcctcaaacctccagcgctacggatgatagtttttgctgagtttgtgcctcaaaacatggtggtggtggttctagagagaaccggtggcggcatgtggcgtgatcggggagggtgcgttaagacgaagcaactccgtgtgaaggacatggtcattggatcaaaaacctag

SEQ ID NO: 19251 - DNA, 360 bp, Zea mays
  Peptide Sequence Number=SeqID_61030
ccccagccgctgaaagctttcttcggcgccatagcgaaggtctatagcttccgaaggtgttcaacgaagactcgaagtggaaagaagccttggctcaccgccgttctacagcatggcggctgcaggatctctatctggttctccgctggcttcgaagacaggtggagcaggtccaagctactgtcgagctccggtgaaggtcccttcaaagtaagcatcttcagcctgaatccattcagactctgtagaagaggcaagattccttacgagaccctaaactgggctatcaaggagatggaagaccatgcactcgaggtttggaagcttgttatgaacccacctgaggctttgtttggataa

SEQ ID NO: 19252 - DNA, 258 bp, Zea mays
  Peptide Sequence Number=SeqID_61031
atggagaacaatttttatggtattggttctagttcaatgcctgatattgggaactctactgttggatttgatttcggtgactcatacaactgtcctgagctgacgaaacaagttgatgtcgaccaggtgatgccgcaatatgctcccaaagaaatcatgggacacaagaaaggggttgtgaagaagatccctatctgtagcaagaacttcagcatacaggaggatgagctacttttctctacttatccatgttggtaa

SEQ ID NO: 19253 - DNA, 336 bp, Zea mays
  Peptide Sequence Number=SeqID_61032
atggcgctcggcacccagtgtccctgcccctcatccttggcgtccgaacgggtgaaccacccaccgatttccgccgccctcgatgggccatccggttgcatctatgcgcgggctctcccttcaacactccagtgcccgagcttcctccccagcggcctccgctcggtgcactctgctcgaccatcaccagattcatggtatggactattccctgtagatccacctttatcaagcattgcatcgcgtcatagtacacatgatgggttgcgtctgggccagtgggactgctcaacgatctccgatggagatcaacgttggttgtctgtcgagaggtag

SEQ ID NO: 19254 - DNA, 462 bp, Zea mays
  Peptide Sequence Number=SeqID_61033
atgacgggagcgggggcacgggttgcgcagctcccgctccccggcggcgccgaagattacgtgcgcgactccatccacgcctccctgggcctccccgtctccgatcgctccctccgcctcaagctcctcgcctccgaggagcagcgccaccgcctccaggaccacgtcttctcgctcgaggaagacctccgcgcagcccagcgccgcatcgacctcctcaaggccgaggccgccatgaacgccgccggcctccgccgctgcgtcgaggaaaaggaagccgtggccgccgcatacgccgacctctccgacaagagcagcaaggagtgtcggctctacgagcgggacctcgagcgcgccatggagtcctgtgacgacctcgccagggagaacgacgacctccgcgcacgcctaaaccagaacacagatgtcagttgcctccttttttttcaaacggattcctaa

SEQ ID NO: 19255 - DNA, 267 bp, Zea mays
  Peptide Sequence Number=SeqID_61034
atggctgaggtggtggatggcgcaggagtaacgggagcaggtgaagtgggaggtggagtggtagcagtggtgggagtggtaggtgcggaggagcgaagccgagaggcgagacgtcgaacgaggaacctttggactcggaataaatctgtacacaatttgaaaagcatggacaggacgaaggttgaaccagttccgaagctacgcgcaaggaagcttcggctcaacggcagaaaaaggaaccgacttaaaggggaaaatgttatttag

SEQ ID NO: 19256 - DNA, 156 bp, Zea mays
  Peptide Sequence Number=SeqID_61035
atgacatgcttcggtctgaagaggcataagtgtgacatgggcgaagctgctaaaagttgttacaaggctttcaataatgttaccgagaagatcggctctcgagacttaattcaagaatttcttgcatataacattttccccactcgcattgggtag

SEQ ID NO: 19257 - DNA, 435 bp, Zea mays
  Peptide Sequence Number=SeqID_61036
atgaagaactatggcttggttacataccatgaaacagcattgctatttgatgagatgcactctgcagctgccaataagcagcgggttgcagttgttgtagctcatgaattagctcatcaatggtttggaaattttgtcacaatggaatggtgggcacatctgtggcttaatgagggctttgcgacttgggtgtcttacttagctgctgatcagttctttcctgaatggaatgtttggactcagtttctagaggaatctacaataggtttcaagttggatgctcttgcaggttcacatccaattgagggcattgaagcggttatgttcatgccggatgacagcgagaccgtacagagtgctggccctaacaggaagcctcccgccatcgtcacccactggaagaagctgaagtgcacacagttcaagcttttttag

SEQ ID NO: 19258 - DNA, 282 bp, Zea mays
  Peptide Sequence Number=SeqID_61037
atgaggctactaggaaaatttgttgagaatgaatgtgaaaagatagaccgccttatggagttatacacaaggtattcagacagagtgaaagaagagactgaaagacttgatagtcttgatttggaagatttagagatggacgatgatgagcggtataaccgaaaactcgaagctgggctttacacactgcaggagtaccatgacaacattggagatttggatggacctgaagagaaggaaagagcacaagtgcggaccaaggaaattattgacgcgttgtga

SEQ ID NO: 19259 - DNA, 381 bp, Zea mays
  Peptide Sequence Number=SeqID_61038
atggcgccccgcatgctctatgacgacggtggctctcagcccccttacggaagcaggggacgaaggtctagggccctcttagagagggttggccgcgcggggaaggacgggacggcgctcgcgcaaggccgctcgctccctcccgcgtggacgcttgtaaccccctactgcaagcgcacccgacctgggtgcgggacaaacacgaaggtcgcgggtttcacctcttacgcctgtctccctccggcttcttcccccttcgcgctccgtctcgcgccgacccatctgggctggggcacgctgcgacaatttactcgtcggtccagggacccccgggttcgaaacgccgacaaacacctcattccaacagactctccaaaatga

SEQ ID NO: 19260 - DNA, 684 bp, Zea mays
  Peptide Sequence Number=SeqID_61039
atggatcctcaggcgccaacgaactcggatggtgaccaaggaagtcatcctttaattggggatggggacccattggggactcgaaacccgaatggagatgagtatgtgatgagttttgcacccatgattgccgaccccgaaggattcacgtctcgcccgagggccccctcaagcgacggacacaccttcggctcgcccgaggcccagtcttcaccaagaagcaaccttggccaaatcgccacgccaaccgaccgtatcgcaagagcatttaatgcaaaggcctcggactcaggctcgaccccggaagacgacgaactccgcctcgcccgacccagggctcggactcgggcttggccccagaagacgacgaactccgcctcgcccgacccagggctcggactcgggctcggccccggaagacgacgaactccgcctcgcccgacccagggctcggactcgggctcggccccggaagacgacggactccgcctcgcccgaccccagggctcggactcggccctggcctcagccgacggtctccgcctcacccgacccaagggctcggactcgacctcgacctcggaagacagactcgacctcgacctcagaggagcctctgcctcgccctacccagggctcagaccgaccacgtcacaggaagggccatcattaccctacccctag

SEQ ID NO: 19261 - DNA, 753 bp, Zea mays
  Peptide Sequence Number=SeqID_61040
atggagcgcgaaggggggaagaagccggagggagacaggcgtgagagtgacgtggtcggtccgagccctgggttgggcgaggtggaggctcctccgaggtcgaggtcgagtctgtcttccaaggccgaggtcgagtctgagcccctgggtcgggcgaggtggagaccgtcgactgaggccagggctgagcccgagccctgcggtcgggcgaagcggagttcgtcgtcttccggggctgagcccgagttcgagccctggggtcgggcgaagcggagttcgtcgtcttccggggctgagcccgagtccgagccctggggtcgggcgaagcggagttcgtcgtcttccggggctgagcccgagttcgagccctggggtcgggcgatgcagagttcgtcgtcttccggggctgagcccgagtccgagccctggggtcgggcgatgcggagttcgtcgtcttccggggctgagcccgagtccgagccctggggtcgggcgatgcggagttcgtcgtcttccggggctgagcccgagtccaagccctggtgtcgggcgaagcggagtatcctatggcgcctgaggccggacttggctgctctttgtgctgatgggggttaccagctgagatttaggagtcttgagggtacccctaattatggtccccgacaattgccattttctgaggatctagtcacatggatcaggccagatggagtgcttgcattgcacattggcaagggtgagcagagttgttag

SEQ ID NO: 19262 - DNA, 180 bp, Zea mays
  Peptide Sequence Number=SeqID_61041
atggggagggagcaggcgacagggattgcctccgcagcaacaaagctgatcctggaacctaatcttgcatcccgggaggaccccgtctgggaggagagattcagggcttgtcttggtgttagcaggctacccaagacgcctctagacaacgtcgagccacgaagagaggtgaagaaatag

SEQ ID NO: 19263 - DNA, 1572 bp, Zea mays
  Peptide Sequence Number=SeqID_61042
atggaccccgaggtccgtgagcgggtcctacaagggaacaccaacctcctcatcaacaccttccaagagatgaagctgttcgcgctgaatgtgatgtccatcttcggcgagaaggagatgcggtacatcgaggagttgaagcagtgttatatgtcactggagaaggggttccactcgatgacgccagtaccagcgcgggcagccgtgagagtgcgacctcctgttcctggcctccatcctggacagcgcaagacgctcaccgacgcccagatctccgacaacgtgatcgacgtcatgttcgtcgcccgcgaagccaccgccaccgtgctcacctggatgttcaagttcctcgatgaccacactgcgttcctcaaggccatcatcgagggcgtcaaggcgttcgagcgtgacctgatcgccaaggccaacagcttcgtccacgacaacggtgtttccgagctgtaccacctcgcgcccatcgtctgtgctagcgtcaacgggaagccgtgcatgtgggtgtgcacaatgacgagcatggtggacgagttggtggtgtccgaggaggtggacgaggttctcaacgccttgcccaacaggcaaccatggccgccacctatgcactccaactgcgttgcgagcattgccgacatccataccgaggagatcagtccagagcgcaagcttgttgctgaaggtcttggtcatgatcaacggacaagcgaggtcgatttgcttccaggtggtttgaaggcacaaacaattagcatactagtaggagatgagcttggagactatgcacgtgcacgaggatttgagatatttgataaatttccaagagcactcgacatggcggccgctaatgttggggaatcaacaagcggcggcagcagcagcagcggcgccgacgccgggggcggattcgagtgcaacatatgcttcgagctgccgcaggagccgatcgtgacgctgtgcgggcacctcttctgctggccgtgcctctacaagtggctgcgcatccactcgcactcgcccgagtgcccggtgtgcaaggccgtggtcgaggaggagaagctcgtgcccctgtacggccgcggcaaggaccgcgtcgacccgaggtccaagaacgtccccggggcggccgacatccccagccgtccggctgggcagaggccggccacggctccgcaggcggaccccaacaacgcccacttccccaacgccgccaacccggcgaacccgtggttcatgggcggcggcggcggaggcatcccgctggccaacgcgcgctgggggaactacaccttctcggcggcgttcggtgggctgttcccgctgctcagcttccaggtgcacgggttcccggacgccacggcctatggccagccagctgggttcccgtacgggtacggccacggccacgcttttcatggcgggcacgctggagcacatgcccacgccgcagctgcagctcctcggcacgcgcagcaccagcagcagcaggcggatgtgtaccttaaggcgctgctcatcctagtcggcgttctggttatcgcgagcctcgtcacgttctag

SEQ ID NO: 19264 - DNA, 537 bp, Zea mays
  Peptide Sequence Number=SeqID_61043
atggcggggctcgggcaaataacatcgtggggaggcgggcaggcggggcatggtgtggacgccctcacggggtgtgtgggagagggagggcggcgccatggatgtcgcggtgagatttgcggtggtgcgcgctgggagttgcgcgagatccacgcttggcgtgctggcggtcgtggatgtggctccccatcgtgggaggcagggtggacgaggtcgcggatgtggcggtcgctgatggcgctccccatcgtgggaggcagggtgggcgaggtcgacggcgagacaaatggggtagcggatgggagcgcgagggcggcgcgggatgcagggaaggaacggcgcgggtgggggcgggatggagggaagggacgacacgggcgggatgcagggaagggacgacacgggcggggacgggattggagggaagggatagcgcgggcgagggctggagcgggggcacgcttttcgaaaaaggcgatcgagttgccatacttaggcattgtcaccgtctatatgctactttgctctcacctttaa

SEQ ID NO: 19265 - DNA, 2007 bp, Zea mays
  Peptide Sequence Number=SeqID_61044
atggctacctactactcgagccagggcagtgaaagggagccgtcgcagaacatgtactccagagaccccggcaatggcaccgcgtcctaccctcctctgccgtcggctctggggaacttgctctacttgaacagcccggcttctggcgggccgtacacggatttcggcggcgtccagcaggactgcatcgagatgcctgaacctggacatccttcggtgatgtcccatgactcgtctgccagggagatcgagcccgacatgctggggcagcagcggcgctcgttcggcctagccagaggcatgaaggacgaggtgctgatgcgcatgatggatggatcaggatcacatagcagcgcagccgatgccatccatgacgacgccccgaatggcatacagctcgatttcggcgttctgggcagccacggcccgccggcgcagggcggccaaggctccttgtctctgagcctcaacacgcacatcatggcgcctgccttgccgtactggcctgtcgtcaaggcagacatgctgtcgccgcactcctacgaccatggctgcggcggcggcagcggcggccttggctcggagccgtcgcgggcgatccggaactcgaggtatctgaaggcggcacaggagctgcttgacgaggtcgtcaacgtctggaacagcatcaagcagaaggcccagaaagagcaggtggaggcagggaagacggaagggaaggagaacgagggaggagggcccaagagtgagggtccgcaggagtctggcgccaacgctgcaccggagctttctactgccgagaagcaggagcttcagaacaagatggcgaagctgatggcgatgctggacgaggtggaccggaagtacaagcactactaccaccaaatgcagagcgtggtctcgtccttcgacatggtagcgggggctggagccgccaagccatacaccgcggtggctctgcagacgatctcgcgccacttccggtgcctcaaggacgccatcaacgaccagatcagcgtcatcaggaagaagctcggggaggaggagagctcgtccggcagggagggcaggctgacccgtctccgctacatcgaccagcagctcaggcagcagcgggcgttccagcagtacggcatgatcccgcagaacgcttggcggccacagaggggccttcctgagaactccgtcaccattcttcgtgcttggctcttcgagcacttccttcacccgtaccctaaggattctgaaaagctgatgctggcaaggcaaacaggcctgacgaggagtcagatttcgaactggttcatcaacgcccgcgtccgcctctggaaacccatgatcgaggacatgtacaaggaagagaccggagacatcgagcaagactccaactcctcctccgacaacgcgccagcaggaagcaaggccaagacggcgtcttcgcgagacaaggaggaccacctggcgagaagctgctgcacgccgcgggccgtctgcgagagcagcagccagctgagcgagccaccaggaggagccagcatgagggccatgagcgtcgccgccgccgccgctggagcgcccatggggttattccagaacgagcctggccacgaccacgaccacgacgacagcttcatgagcctgatgctcaaggagcagcgaccgaacgacggcggcggcggcctcctcctccaccacagcgccgtggcgcagcaccaggacgagaacgcccggttcatggcgtaccacctggcggagctgggcaggtacggcaacggcaacgtgtcgctcaccctggggctgcagcgctccagcagcagcctctcggttccgcacgctcagcagagcttccccggtgtcggaatcggtgtcggagacgacgacatctacaatgccaccgccgctcctctcggtgtcagcgtggcgtcgccggactacgagtccatgagccagatggatcagcggcaacggttcgagcagtcgccccttctccatgattttgtggcgtga

SEQ ID NO: 19266 - DNA, 810 bp, Zea mays
  Peptide Sequence Number=SeqID_61045
atgccgcgccgggaggtgtcgctgcccgacgccttcaatctcgtcctcggcaaagatcgggacaactggcctcccgcagcgggcctcctcgtggccgcctactacggcgacatccgccgcctcaaggcccaacgagctttgattgataaagttacaccattaagcatggcattaaaacactcttatgtgtcttgtttgaaacttttggttcaacgtaatctaatacacatatgcaatgctggtaacacaaaatatgatgccatacaagaatgttcttatgacagtacaaggctgccaatagaattggctgctgagtatggtacatgggaagatgttgaacttctattccctgtcacttccaaaattccaacagtggcagattggagtgttaatggagtaattagtaatgtacacatggaagtcacacaactagaggatgacgaaattgtcaataagaaaaagtccgagctgaaacgacaaggagctgatgcgtttagcaaggaggattatctaaacgcgtcagtattctacacacaggccctgaaggttgatcagttcgacgcaacactgttctcaaacaggagcctttgctggcttcgcctgggtgatggaaagaaggctttgctcgatgctatagagtgcaaacatctgcgtccgaattggggaaaagcctactaccggcaaggagctgccctgatgtctctggaggattacagcagtgcttatgatgcgttctctcatggcttggagttggacccagaaagcgaagagatggagaaaatgctttgggaggcgatggacctgaagtag

SEQ ID NO: 19267 - DNA, 390 bp, Zea mays
  Peptide Sequence Number=SeqID_61046
atgggggcccaggcccacgtgtcattcaactggcgcgccggttgctacgtgcgaacgactgcaccgccacttgcaccactaccatgcctcctcgactgcagaaccagtaccgcgactcgaggcaaccctgcgtacggcccagcagtgccagccaggcgcgacgggaccgggaaagggggataccccgaaaaggatccttccccgcgaaggaaacaggccccgagcctccctactgatcagaggttcgaaggctggcccctcggaggggttcaacagccgcctcagagcgcatgggttccacggccactactagtcagaggttcgaaggccggcccctcggaagggttcaacggctgcctcaggccactcgggctccatgcccactactga

SEQ ID NO: 19268 - DNA, 558 bp, Zea mays
  Peptide Sequence Number=SeqID_61047
atgggaaatgccttccgacaaggtttctactggccaaccgcggtggccgacgccactaggattgtacgctcctaccggaggtgtcaattctatgcaaagcagacgcatcagcccgctcaggccttacagacgatacccatcgccaagccgtttgctgtgtggggtctagacctcgtcggtcccttgcagaatgcacccgggggcttctcgcacctgctagtcgccatcgacaaattctccaagtggatcgaggtccgacccttgaccagcatcaggtccgagcaggcagtggcgttcttcaccaacatcatccatcgattcgaggtcccaaactccatcatcaccgacaatggcacgcagttcaccggaaaaaagttcctagacttctgcgatgaccaccacatccgtgtggactgggccgccatagctcatcccatgacgaatgggcacgtggagcgtgccaacggtatgattttgcagggactcaaaccgaggatctacaacgacctcaacaagttcggcaaacggtggataaaagagctaccctcagtagtctag

SEQ ID NO: 19269 - DNA, 792 bp, Zea mays
  Peptide Sequence Number=SeqID_61048
atggcgcccgccttctcggtctcgtgcgcgcccggatcctcgcgcccgctggccgccagccccggccccagcgtcgtcgtcgtcgcctcctcccaacttcccgcgtcgtcgcggagcagcgaacgcaggagagcaccaggcctcgcgctcgccgcggccccgggtgtcggcggtagggatggcggtggcaggtggagagcaggcatctcgtccttccccttcctgccgccgttcttcacagggaacaagggggagaaggacgctgagaaggcgatgaggctcaaggaggagctcctcgacgccattgcaccgctggaccgtggcgccgaggccacgcccgaggacaaggagcgcgtcgagcagattgttcagcaactggaggcggtgaaccaggtgaaggagccgctcaagtccgatctcctaaacggcaaatgggagcttctctataccacctccacaagtatactgcagccacagaggccaaagtatctgaggccgtttgggaagatttaccaatcaatcaacgccgacaatttgagagcccaaaacatggaaacttggccctactttaatcaggttactgccaacttggtacctctgaattctagaagagtggcagttaaatttgactacttcaagatatttggtttggtgtactacctcgctgatgagtccggggtgcgcttcgtctggcagccaagccaagagttgtcgggactcgccatgttgtgtgtgtttgatgactactatatcaaggactgtggcgtcatctcggcgccggaggagacatag

SEQ ID NO: 19270 - DNA, 1434 bp, Zea mays
  Peptide Sequence Number=SeqID_61049
atgggcaccgggggagacgggagcaaggcgggcccggcgctgccgctcgaggcgctgctggcgctcggcctcgaccagcgcaccgccgagaacgcgctcgtcaacgccaaggtcaccgccaacctcgcctccgtcatagccgaggctggtataaaggaatgcgacaagtcagtcggcaatcttctgtatgcagtcgccaccaagtacccaactaatgcacttgttcaccgtcctgtccttattagctatgtcttgtcaacaaagataaagaaccccgcacagctagatgctgctctgtcatttcttactaatactggtcctgattctctagatgtggtcaaatttgaagaagcatgtggtgtaggtgtggttgtttctattgaggaaattaaatctactgttactgatgtgcttgaggagaatatggaagctataaaggagcagcgatatcacataaatgttggtacactatgcggacaggtcaggaagagacacccctggggtgatgctaaggcgataaaggaggaaattgacaagaggcttgcagaaatcctaggtcccaagacagaagctgacaatataaaaccagtgaaaaagaagaaggaaaaaccagcaaaagttgaggagaaaaaagttgcagttgccactgctgccccaccatctgaggaggaattgaacccgtacactatatttccccaaccagaggaaaacttcaaggttcatacagaaatatttttcagtgatgggaacatatggagagcgcataacacaaaggaaattttagaaaaacatcttaaagcaactggaggaaaagtgatgacccgttttccaccagaacctaatggatatcttcatattggtcatgccaaggctatgtttattgattttggtctggctaaggagcgaaatggccattgctaccttagatttgatgacacaaatccagaagctgaaaagaaagaatccatagatcacattcaggaaatcgtccattggatgggatgggagccctacaaagtaacatacacgagtgactatttccaagctttgtatgaacatgccgttgagttaatacagaaagggctagcatatgtggatcaccagactgcagaagaaatcaaggaatacagggaaaagaagatggatagtccatggaggggtaggccaattgaagagtctctgaaattatttgaagacatgaggcgtgggttgattgcagagggtgcagcaactctccgtatgaagcaggatatgcaaaatgagaacaaaaatatgtctgacttaatagcatatagaataaaactgtgcacacttgagtttgacatacgtcgcccttcatactactggctacttgttgccttgggcctttatcaaccatatgtgtgggaatattcgaggctaaacatatcaaatactgtgatgtctaaaagaaag

SEQ ID NO: 19271 - DNA, 357 bp, Zea mays
  Peptide Sequence Number=SeqID_61050
atgacgctggagaagaaacaaaggccggtgcacaagagaagatcggaggacggcgtccacaccccgacggatggtgcacggttctgccctgcgacaccacccacgcccgtctctccgaagccgccagcgtctccacccgagaccccgacccaccccgcctcccccgccgccgcgctcgcgctcccccgcgacagccgccatacgccctatctccgccgtgcctgcgcctcctcccccgcccgcccgagacccgccaagtttcccttccttgcaaggcgagatccaccatcggcgcccccttccctggcgagccacagccgtccatgttcctggccaccggcgacctcccttctctag

SEQ ID NO: 19272 - DNA, 1086 bp, Zea mays
  Peptide Sequence Number=SeqID_61051
atggctggggtaagcatgtcatgtcgtctgctactgtgcgctgctgattacgagaaaaatgagctaacttttctttcaatcaccggaaatcttatagtggaattaagtttttctaaattaggacctacaagctctactcgtgtgaggtgtatgtttagttaccttcgtgcagatgtgaagtcaggctcgcacgatactcaaagcaccctggaccagtctctgcagacgtatatcgataaggtagaaaacaggaaaattacaacatcttacaccgtcaacaggttccatgccaatttcgttctatccgaggcgcccgcgaagcgccggcgcggggggcggtcgtgcccgttcagctgctgctgctgcttctgctggacgctcctcgtcgtcgtcctcctcgccgtcctggccgccgtggccgggggcgccttctacctgctgtaccggccgcaccggccggccttcacgctgaccgcggcgcgcgtgacgaggctgagcctgtcgtcgtccgccaccgcgcccgcgctgagcgacgccatcgacgtgacgctgaccgccaggaaccccaacaagaagctggtgtacgtctacgacgacttcgccgtgacggccgccacggccgccaacgccgtgccgctgggcgcggccaccgcgcccgggttcgcgcacgaggccggcaacgtcaccgtcatccgggccaccgtctccgcgtccgcgctcgcggtcgaccccgccgcggccggctccgacgtcaagaggtccggcgagttccccatcgtcctggacctggagaccagggccggcgtccgggttggcgcggtcaggaccaagaagatcggcatcctggtgcactgcgacggcgtcaagcacgccccaaatgaccaaaagcaaaaggctgtgcagcgatctgcaaagactgtcggggacgcccctcactgcatcatcagatcagacaccagtgttgcattgcatggctgcaagcccagtgctaatcatgtgaggcctggagagacggaggagacgagcacagcggacagcggtggtagctggggatggatgcttggagtggtcgccatcactagctag

SEQ ID NO: 19273 - DNA, 903 bp, Zea mays
  Peptide Sequence Number=SeqID_61052
atgtcggcggagaagccggctcccgtgcgcgtgctctactgcggcgtctgcggcctcccggccgagtactgcgagttcggccccgacttcgagcgctgcaagccctggctgcgcgcgcacgcgcccggcgtctaccccgacgaccttgtcgccgcctcctcctcacccggcggcggcgacaaggacgtcgacaagatcggggatagactccagggcgtcgggatctccgacggctccaccagcgccgcaggggatgcttccgcgtctaagccccaagaggcgaaacgcctgcctggtggtaagctcaagaaaaaggagaagcaagaagtggtcattgagaagattgtccgtaacaagcgcaaatgtgttactgtggtgaaagggcttgaattgtttggtgtaaagcttagtgatgcttcgaagaagcttgggaagaagtttgcaaccggagcttctgttgttaagggccctacggagaaggagcaaatcgacgtacaaggggacatctcatatgatattgtggagttcattacagatacatggcctgatatttctgatactgtatccgcacaaaccatttggtgtcacagcacacagcacagtcaccatgtgctggagttggttaagaatgttatagcttccatcagaggcaggtacctgagtcggccattttcttcattgaagatggaaggaaggttcctgctgcttgatgccatatggtttataaggcacgagaccaatggatttacaaatataatacagagtttggggcagattgcatacacaaacgcatacaagaacagtcaccatgcatacacggcatacaagaatgcatacataagcaaccaggttttaaacaagaatgcatacagaatgcatacaagaaagtcaccatggttttaa

SEQ ID NO: 19274 - DNA, 297 bp, Zea mays
  Peptide Sequence Number=SeqID_61053
atgtccagctgcagctcgctcattgcaatccgctacctcttggacccggacatctacaccgacggcaggatctccgtgcagggcatcgacgccgtgctcttcgcgccggacgacgccaaggccacgcagaccgtcgacccgaacaggaagcctcctaccatcgtcacccacaagaagaagatcaagctccggcgagacaactgcagttctgttatggtgaatggtgattgtagttcagtttcagctctaacctatgaaaaattgaatggcagttgcactaatctgttggtggaatga

SEQ ID NO: 19275 - DNA, 2376 bp, Zea mays
  Peptide Sequence Number=SeqID_61054
atggtggtggggacgaatgagatccaagggagtgtggtgtccgcggaagaacagacaaaagagcgttcagatccaaagaagcaacaagccttttccgctgagagctcagaatcttccctgagaatgatgggtggagggctaataaacacctggaagaaatgggagatccaagtactggtgctccttagcttcacgctgcagctcatcctcctggcgttcgcaaggatccgccgccgcaaaggctccgctccgctgagggtcctcctctggttggcctacctcatggccgactccacagccatctacaccctcggccacctctccctccgcgccagttcaggcgagaagcaggtcgtcgcgctctgggcgcccttgctgctcctgcacctcggcggcccggacaccatcacggcctacgccttcgaggacaaccagctctggctgcgccatctgctgaacctcgcggtgcaggccatgggggcagcctatgtcctgtaccagtctgtggctacccaaacccaccagagggccttggtcaccgcctccatgctgatgttcgtcaccggccttgtcaagtacggggagaggacatgggcgctgaagcgtgctaacatcgacagcatccgaggcggtctcgatctgcaggacgacagagaccgtcgccagccgtacgatgggagggctggaacggcggagctggagctggactcggaggaggttctgctgggcgctcactacgtgttcaacgcctgcaagagcttcttcaccgacgacctgatcacgtcgggagcagagcgcgaagctatcagcaggggcatacagttcaatggcggcaggtacacgcacgagctgatcgagatgcagctgtccctgatgtacgacatcatgtacaccaaggcggcggtcatctacacgtggtatggcatatgcatccgtctaatgtcaccggcggccacctgggcgtcgttcttcttgttccgactgagcagcagccgcggccatggtggacctggtggttacagcagagtcgatgtcgtcgtcacttacgttctcctggccggggccttcgtcctggaaatcgcgtcgttggtcagggtgctagggtcttcctgggcatgcgccttcttgcacgctcgcagatgggaccggatccatggcgcagtccggtgccttcgtctgctcgtccgggccgcgaggagccgaaggtggctggactcggttgggcagtacaacctcctggacttctgcactcgtgacaggacggagataaggagctgggtcgccaagaaagtggggctggagaagtggtgggacaagctccattactcgggcaccgtcagcatttcagacagcttcagggacctcctgctggaagagataccgaggaggcagctaggcgacatgagggacgcgcggggccggtggacgctccagcaaataacttacccaccggggagcagcggcagattatacgatgagatcagctggagcgtcaacgaaacggacttcgaccagagcatcctcatctggcatgtcgccatcgacgtctacctctgctgccgccgcaaaccagggctggccgcggccgcggccgcggaggaccgcctagccaaagccgtcaaggagctctccgactacatgttcttcctcttcgtcgtccagccccacatgcttccgggcccggttcggagcacccggtacgacaacaactgcgatggcctggtcgcgctctggcaacggctctcagccgaccacgacagcatggaccctacgctgacaccaagggaaaacctagctagactgctttaccgcgagtatagagacaaggacgacgacgaccccgaccccgactctgacggtcgccgtgctagtccagccgcagcagacttttccgttcagatgacgatggaggaggaagataacaacccccatggcctggcttacatcgacgcggccgggctcaccggactgctcctcagcgagcgctcgggtatacccgacgtgctggaaatgatcgccggagtgtgggtcgagatgctgtgctacgccgcgcgccactgcaccgaggtttcccacgccaagcagctgagcagcggtggcgaactggtgactgcgatggggatgctggtggaatacaccgccaggtatgacctccatcctcatggtcgtcttggatcagaggatgattcgtctatggagaatggagaacctagcggagcgccggctgaggtatctgtcgtcgatatcgacagtatcagtgaagacctacacatggacccttcggatccctggagggccccggatgccataagaaagggactcttctctagtaccaggatcgattctgcatccccggagtggtcccagatcccataa

SEQ ID NO: 19276 - DNA, 351 bp, Zea mays
  Peptide Sequence Number=SeqID_61055
atggtgggtggcgccggcgtgcgggacccgctcgtcgcctccgagatccacggcttcctcacctgcgcagcgacctcgtttcaggtcctgggccacatgaagaccgtgtgtgtgctgatcctcggctggatcctgtttgactcgaccctcaccgtgaagaacatcctcgggatgctgctcgccgtgatgggcatggtggtctacagctgggccatggaagcagagaagaaggcggtagcccctgtcccccggatcaagagcaaaatgctcgacggcgaggacgtacccctcaaggccagggtgagcggcatgcccgcggtcgacctcgaggacgacgagatgaagagctag

SEQ ID NO: 19277 - DNA, 1329 bp, Zea mays
  Peptide Sequence Number=SeqID_61056
atgcagatcagcatgcgcatgaacatggacgacgaagcagcagtcgtctaccacatgtcttccaacggcggtgccaccgccatcgacatgcacgaccctatcgtggacggcctcctcgacgacccgcaccacggcgccggcggccgcgcctgcagcagcttcccttcgtcgtcgtcgtgctcctcgctctcgctgcctgctgcctctgcatccctctcctgcagccccgacgaccccgacagctcctcggcgcatcatatcctcgccgcgccggccgcgggcggcggcaaccagcagtacccggaggtctcctcacacgtgccgttattaccaccaccaccaccaccacccgtcgtgccatcttacgaccaccaccaccagtacaccgaccttcacgcgccggcgccggccaaacccaccggtgcgttcaagcactacgcgcggcaccttgggccgaagaggccgcctaagcccggcgcgtgcgggcagcggatgttcaagacggccatgtcggtgctgtccaagatgcacgtggcggcgaggtacagccaacagcagtactactaccaggcggccgctgccgctgaggcggcgcagccgccgccgtcggtgaaccagctgcagcacatgttctcggagcgcaagcggcgagagaagctcaacgacagcttccacgccctcaaggcagcccttccgcccggcgccaaaaaggacaagacgtcgatactgatcagggcaagggactacgtgaggtcactggaggccaaggtggccgagctggaggagaagaacaagtcgctcgagtcgcggctgacccgccgcacggacggcagcagtgacgacgacgacaacggctccggcgagacgacgaaggtggaggtcgagataaccaggacggcgaacgaagaactctgcacggtgaagatagaggtgagatcgccgccggcggcggcggcgtcgccgtgcaataggactgacgtggtggtcaggacgctccagtgcctgaaagagcagatcggagatggcgtcagcctggtggcaatgagcaccagcggcggcgctgagccggcggctaccggagtgaagaacgcctttccacgagctgtcctgacgatgcagatcaagtcgccaggaaccgactgggaggagcagccggtcaaggacgccgtggccaaggtcgtcgccgacgcgctgacgacgacgacgacgccgccactgccacccgcggcggccaccaccgtaccgccagctgcttcgccggggcttctcatcaacgactcgtcatcagctaataattcattaacaatccggccggccataatgaaatag

SEQ ID NO: 19278 - DNA, 597 bp, Zea mays
  Peptide Sequence Number=SeqID_61057
atggcggcgccgcttaggccaacggcggcgttctcaccggagatcggccatccggcgctgcggaggtccatttcttaccccgactggggctacgcgaaacgaagccacccgcggcgtacggcggatcggggccgaggtgaagactccggcgaggaattacttgcgccccggttgcctatcccgcacggagatgtcccaaaccccctcggcaagcccaagggaagctccacgacgaaacccggcgcccagggagcacgaattcggtgtcacggctgcggcgcgtcgccgacgatttctgtcggtggtgaactggatgcggaggcgctagtctacgattgcaaggtccgcggagctgcgacatggaaggaggcaagggagactggggttttatcgccctacgtggtcaaacggttcacgcggtcacgccatgccgagaagctcggcggcagctgcgccaaccgtgtgcgagtgaaggtcgaggaaatagctgacagcaagcccccacccattagtgagaatgagaggcaggtgtggtaccggctgacagtgttatttcttctctttctcaaattcttgaattttcctttgagaatttaa

SEQ ID NO: 19279 - DNA, 303 bp, Zea mays
  Peptide Sequence Number=SeqID_61058
atggcgcttcccgatagagaagagggagaagagaggaacgaccaaggcggagggaacaaggactacaagggtaggaaggggacaagagactgtggaggcagtggcaggggctctggtggtggtggaggcgacttctccttcgacgaagagggcgccgtagatggcgtcgcgccaaggggtcagtcggttcactggaaaaccgcatggggaggcagagagtctgcttccatcgtcctcactcgattcttgttttttctgaagcatcagttctaccctagtatctttgatggcttgactaagtaa

SEQ ID NO: 19280 - DNA, 177 bp, Zea mays
  Peptide Sequence Number=SeqID_61059
atggagaaggtggtggtcaggcagaagggggaggagtggcaattctccaagcttagaacattgtcgttccagatcgtgaccacccctccacgcttgccacaggagtggaggtcatcgagcattgctttgcattctgaggcttttgaggcagtacgagtaaagttgcttgcattctag

SEQ ID NO: 19281 - DNA, 327 bp, Zea mays
  Peptide Sequence Number=SeqID_61060
atgaaaggcttagagaagaaatcaagaaactcaaacttgagaaagaacatcttgccactagtgtgcaaaagttcaacaaagaatcaagaaaataacaagaatggtattggatacaattcttttgtgcaaaagaaagcaacaaaccaaaacaaggctaagcaaaatcctaagcccatcaagtgctatgagtttggaaaagaaggacactttgccctcaattgcaaagccacactaccaactcccttgctaaagcactcaagaccttttgctttcaatgctcactatgtacttagaaaagttgcaaatgggaagatgttccctttgtga

SEQ ID NO: 19282 - DNA, 1326 bp, Zea mays
  Peptide Sequence Number=SeqID_61061
atggagaggttaagcaccaaccagctctacagttctggtgttcctgtaaccgtaccaacatctctgccttgtataccagtctctctggatgagagcttcccgaggcttcccgatgcacagagtgttttgatggagagagaattgaggagcactccactaccacctcaccagacaactgttgctcctatccgtggtctgtttcactccaatactggatctgttggtcctttgtgctcacctccgtctgtaaggttctcttcgcattcaaatcctgagcaataccccaaccacaattcatacaattctcaagtaccaagcactgcaagttcctcaacgctgaattatgggtcacaatatggaggctttgaaccatccataaccgatttcccaagagacattgaaccaacttggtgccccgatccagttgagagcattcttggatactctggtgatgtccctgctgggaataatttgactgggaccacttctattggagcttcagatgatcttactaagcaaactgaatggtggacagagtttatgaatgaggattggaaggacatggttgataacccgacttccacagaaactcaaccggttgggcaacctgtgcaatcatccaactcagttcaccaatcagctacccaacaaacagtttcatctcaatctgttgaaccgttggcagttgtggcaccctcacccactgctggctccaatactggcaaggcacgcatgagatggactcctgagcttcacgagcgctttgtggatgctgtcaatatacttggtggcagtgaaaaagcaactcctaagggtgtcctgaagctaatgaaggcagacaatttgaccatttatcatgtaaaaagtcatcttcagaaatacagaacagctagatacagaccagagttatctgaaggctcttctgaaaagaaagtggcatcaaaagaagatataccatctattgacttgaaagggagttttgatctcactgaagcacttaggctccagttggaacttcaaaagcggcttcatgaacagcttgagatacaaagaagtttgcagctaagaatcgaggaacaagggaagtgtcttcagatgatgctagagcagcagtgcatacccggggcagaaaaggcgcaggatgcttcaaccgctgcagatgaattgaggtcaccttctgagattccagaatcttctaccgtcaaggaagttccagaaaacagtcaaaatggatcaaccaagcaaacaagcttaaatcaagttgtttttgtccttccgtgggaacagatgaacgctatagttaacttccttgcaaagcctggctag

SEQ ID NO: 19283 - DNA, 681 bp, Zea mays
  Peptide Sequence Number=SeqID_61062
atggactcctccgactcttctgaggagtggagcggtggcgacggtgacggtggtgaggacgacggcagcagcggcgacgatgacggcgagggtggtggcagcggtgacggcgagggcgacggcacgggcaacggcgacggcagcaagggcgacgacgatggcagcaagggcgacagcgacggtgacaagggccaaactcctgaacgaaatgtgaggggcatttttaagaggcccatcaagtctaacttcggcatcaagaggtcagcatgctatatgaaccatgaagctcatgccacattagttgcttttaatgctatctacaaccacattggtacaaggaatctggtggagaaggtcgtaagagaggccaaagcgattaaagaggtcaaaaggataaaggaactcaaagggataattgaagagtacaatcacgaagaggatgaagagctgaaagattccttgtctcttattgatattatgaacaagacgatagatgaagttgtgcttaaaatttgtaacgatgttgctgacgaagacagaaaaaatgtaagaatgtatgatgttgaagatattatgacaaaggattttggagtcttatcactattattgggtgattctctttctgactctaccttctacttgaaggactttgaagtcttgtcaccattaatgggtgactaa

SEQ ID NO: 19284 - DNA, 120 bp, Zea mays
  Peptide Sequence Number=SeqID_61063
atggcgacggaatcaaggattaccggcaacgactccctttcacccttcctgacctctcggttttcccacggtggtggcactctcacagctacttctgccatagaaattgccaaccattag

SEQ ID NO: 19285 - DNA, 186 bp, Zea mays
  Peptide Sequence Number=SeqID_61064
atggcgaggtgtatgggagtcgcgatcctttggcagatgggtaacatgacttgtgggtacagggcacaacctctgcagagtgtaaaactgccttacacatcatatgaactcccacctttgccccccacaggagaagaacaggtggttcaggaggagccacaaagcgaggagtttgatctaatctag

SEQ ID NO: 19286 - DNA, 156 bp, Zea mays
  Peptide Sequence Number=SeqID_61065
atggagacgaagctctcaggttcgctatgcatagcacctgctcatgctaaagaaggtgaacttgaggatatcttggctgatcttggagaagagtctgatgaagaaagtgaagactttgactttgaagaggacaacaacgttaatgatattcaatag

SEQ ID NO: 19287 - DNA, 1559 bp, Zea mays
  Peptide Sequence Number=SeqID_61066
tgtcatctgccgctaatgcttacaatctctacgcaggcgtcatatcaggagctctcttgtacatcagagacgatttcgagcaggtcgagaaaagcaccgtgctgcaggagacgattgtgagcatggcagtggccggggcaattgttggcgctggcgcaggcggttggatgaatgaccggttcgggcggcgaccgtcgatcctcatcgctgacctgctcttcctggctggctctatcgtcatggcttttgcgcctacgcccgcggtcatcatcgtgggcagagtcctggtcggccttggcgtcgggatggcctccatgacgtcgccgctctacatctccgaggcgtcgccggcgaggatccggggcgcgctggtcagcaccaatgggttgctcatcacggcggggcagttcctctcctacctcataaacctggccttcaccaaggtgagcgggacgtggcgatggatgctcggggtggccggcctaccagcgctcctccagttcgtgctcatgctggcgctgccggagtcaccgcggtggctctacaggaaggaccgaaaaagggaggccgaggagatcatgcgcaaggtgtacccgccggaggaggttgagggggagattgaggcgctgcgtacgtcggtggaggacgacatggcccaggaacggtccctcggcggcgcggggctcgccggcacactcaggaaggcgttcggcagcgtggtggttcggcgcggcctcactgcgggcgtgctttgccaggtggcgcagcagttcgtcggcatcaacaccgtcatgtactacagcccgaccatcgtgcagctcgccggggtcgcgtccaacagcacggcgatggcgctgtcgctcgtcacctcgggactcaacgccgtccggtcctggggaaaaagccaattcgtcgacaaggcgggacggcggaggctgatgctgctcagcctcatgggcgtcgtcgtgtgtctcgcgctcttcggcgccaacggcacgtgcccagagtttgacctcgccgccgtggccggggtggagtggacctgcgcccagtgcatcaaggctccctcaggctgtggcttctgcgcggacaccgaaaagctcctgcccggcgcctgccttaggacgtcggacgcgtcgcggcgcgcgtgtcgggcggggcggcgcgagtggtacatgcggggttgcccgagctcatttggctggctggcgctggtggcgctgggcgcgtacatcgtgtcctactccccgggcatgggcagcgtgccgtggctcatcaactcggaggtgtacccactccggttccggggcgtctgcggcggcatcgcggcggtggccaactggacgtccaacctgctggtgacgcagacgtttctcagcctcacacaggcgctggggacagcgggcacgttcctgctcttttgtggtgtgtcggcgatggcgttcctgctcatattccttctggtgccggagactaaggggatgcacttcgaggaggtagagcaaatgctagggagcaaggactacaaggcctggaagaagttcaattccaaggcctaa

SEQ ID NO: 19288 - DNA, 336 bp, Zea mays
  Peptide Sequence Number=SeqID_61067
atggataaaggaaaaacagttttgcggtggggtccctggcaaaagatcttaaatgaattacagacagtggccgtggaggaagaaaggggcggagggtcttaccgacagcgagactgctctggtaaggtggtcgagggcgggcgaccgaagtctggcgaggatgatcttgggtctccggtgaggttctaccgggtccgagagcttagaaggctccataggccactggcgaagctaaccgaggggcaggtgcaacatggacacgactggagcgggcaggccgtggtggccgaggcttgggcagtggtggtgggtggaggaaaagctcgccggagctaa

SEQ ID NO: 19289 - DNA, 141 bp, Zea mays
  Peptide Sequence Number=SeqID_61068
atggctattgtggaggccgacacatcaaaggatgccttgacagtcttaggcatttttttcaagggcgaagagcttgaattgcttttattcgattatagggagctttgccttattgtgaagctggagcttcctagtccatga

SEQ ID NO: 19290 - DNA, 183 bp, Zea mays
  Peptide Sequence Number=SeqID_61069
atggagggtggctgcaatgtgatgagaggggtggccagccaagggggaaaagggaggggcggccaagccaagatcgagacttatgatggctacactgatgcaattgagtggctagaaatctaccaactattcaatatggatgctagaggggaacataatggtgcttggcaccatgaggtttag

SEQ ID NO: 19291 - DNA, 321 bp, Zea mays
  Peptide Sequence Number=SeqID_61070
atggtgcgcacgaagaatgtgtcagcactagggggaggagacgacgaggaccctcctcgccccttcaggcaggtcaagggcaagaccatgtacttagagcagcaagaaggccgcaagaagcggcatatggatagagcagcccgagcagctcttgcagcagcaacagagcaggcagagcaagcccgcttccgggagcgagacgagactgaggtgagactgttagccgctgatcctcatttgattgatcttcagcgtgccactgcagcccggctgatccggctgcctcagttccagggcaccctcgaggcctcatgcctctag

SEQ ID NO: 19292 - DNA, 636 bp, Zea mays
  Peptide Sequence Number=SeqID_61071
atgccagtaccatacaaggaatttcggcataaacccacttttgcaaaggtaaaggccctaaacccacccaagagtgtaggtcgatgggggcttgtcgatcctgctgagatcagtggtaccgggaaggccaagagctgcatcgtgggcaatcgggttcatggattcattaccatgatcgccaagaaacagcacatagtggagactcgcctgtcacagcacttggcccagcacttctccattttcagtgacgtccgactccgcgcctccgagaagatccgagatttcctgcaagttctccccaaacagtaccacttttcccggctcaaggtgctagatctagaaggctgcaagtgtgttggtacgaagaacacgagttacctcaaggacgtctgctgcaacctgctactgctcaagtacctgaacctaaggagcacaaatgttacgcagctgccaggagaaatcaaccgcctccacgagctggaagtactggatatccgccacaacaatgtgcacaagactgcaacgagatacctccggctcctaaagctgaagcggctgctggctggttgcattgacgacccaactctaccaagtgtcgagcttcctgaaaagattgggaaaatggaaggcatggag

SEQ ID NO: 19293 - DNA, 222 bp, Zea mays
  Peptide Sequence Number=SeqID_61072
atggcggcgcactccgcgccgttcgttgcggaggggaagagaaggttgatgcgggtggcccacaggcagtggaagaaggagcggattcgaggcgcatatagggtgactgccccaagggcccacgaatcagcgagccgaccaagtatgcacgcgaggaagttagtgaatgacgatgcggcccaccagccaatgacttggagcgggcgcaggatggcgggatga

SEQ ID NO: 19294 - DNA, 147 bp, Zea mays
  Peptide Sequence Number=SeqID_61073
atggggggctgcttcgatagccctcaccaaaataaaggaaacagcattctgagagtgctctctgtcattggctcgttgattcttctcaataatggaattgagatccctgggccctggggtggcgatggatgggcgacgaatctctag

SEQ ID NO: 19295 - DNA, 441 bp, Zea mays
  Peptide Sequence Number=SeqID_61074
atggcgaatgttgaatctaggcctagcaaggccacccagacgtcgaggatcgcgatgggcggcttagtgagctccagcaccatcaccaaaaagggcaaggccggaaaccccaaccttgctagaaggtacatgttgaagacaatgtatgtcctcggcgtggtgcccttcactggccaggtggctggctccaccttgccgctcatcatcgggtttgtccatcccagcatcgaacgatacaccaccagtgacttgagaagcacagtcttcttcacaatgggtgtcatggccaccatcggggaagacaaacaacaagaggaagtagagttcttgaagaaggcgaagtgtgcttgggaaggcaagtggaggcctaggcaggaggaaagcttggttcttaggaacttaagtacttttgtccaaatgaccatatgcttattcttataa

SEQ ID NO: 19296 - DNA, 1221 bp, Zea mays
  Peptide Sequence Number=SeqID_61075
atgtttttcgacgggtcgttgatgaaaacaggagcgggcgcgggcctgctcttcatctcacccctcgggaagcacctccgctacgtgttgcgcctccatttcccggtgtccaacaacgtggccgagtacgaggctctggttaacgggttgcgcatcgccatcgagctaggggcccgatgcctcgacactcgtggcgactcgcagcttgtcatcgaccaagtcatgaagaactcccattgccgcgacccgaagatggaagcctactgcgatgaggttcgacgcctggaggacaagttctatgggctcgagctcaaccacatcgcccgacgatacaacgagactgcggacgagctggctaagatagcctcggggcggacaacggttcccctggatgtcttctcccgagacctacatcaaccctcagtcaagaccgacgacacgcccgagcccgagaaggtctcggccctgcccgaggcgccctcggctcagcccgaggcaccctcggcccccgagggtgaggcactgcacgtcgaggaagagcagaatggggtcacgcctaatcgaaactggcagaccccgtacctgcaatatctccaccgaggagagctacccctcgacagagccgaagctcggcgactggcgcggcgcgccaagtcgttcgtcttgctgggtgacgggaagaagctctaccaccgcagcccctcaggcatcctccagcgatgcatatccatcgccgaaggtcaggagttattacaagaaatacactcggggggttgcggtcaccacgcagcacctcaggccctcgttggaaacgccttccgacagggttcctactggccaaccgcggtggccgacgccactaggattgtacgcacctgccaagggtgtcaattctacgcaaagcagacccacctgcccgctcaggatctgcaaacgatacccatcacctggccatttgttgtgtggggtccggacctcgtcggtcccttgcagaaggcacccgggggctacacgcacctgctggtcgctgtcgacaaattctccaagtggatcgaggtccgacccctaaacagcatcaggtctgaacaggcggtggcgttcttcaccaacatcatccatcgctttggggtcccgaactccatcatcaccgacaacggcacccagttcactggcagaaagttcctggacttctgcgaggaccaccacatccgagtggactag

SEQ ID NO: 19297 - DNA, 1182 bp, Zea mays
  Peptide Sequence Number=SeqID_61076
atgacggagcactggacagtctggacaggacctccaattgttggtaaagtatgtgctgcgcctgcgctggccaatttcttggagcccagccgtgacgtgagaaatgattccaacgacaaagctagtcacatcatgagaaagagtgcagaagattggaacaaggatagcctttcttcctgtgcagccactccagtgcacgccgccgcagcttgctacacgtgccgggcaagggcaatggattccagcagcagagtgatcgccttcgattgcagctccttcaaactctacatggacggccaagtcgagcgtgcggcccaacgcatggaaaccgtgcccgccggcttcgacgcggacacgggcgtggcatccaaagacgtcgtcatcgacgtcgccaccggcgccaccgtgcggctctacctaccaccagtccagggagccacgacgaagctcccagtcgtcgtcttcttccatggcggctacttcatcgtcggctcagcccgcgagcctatgtaccatcgctatgtcaactcgctggtcgccagagcacgcgtcgtcgctgtctccgccgactaccgcctcgcgccagagcacccgctcccggcagcctacgacgactcctgggccgcgctcaagtgggcggtctccggcgcggaccagtggctgtccgaccacggcgacctcggccgcgtcttcctggtcggcatcagcgccggcggtaacattgcccacaacatggccatctctgtgggcgtgagcggcttgccggccgctgaaccaccgcgcatagaaggcgtgatcctgctccacccttccttttccggcgaacagaagatggatgtagaagaagaggagttctggcgatctaacaatagcaggtgggcggtcatcttcccgggcgcgaccggcggggcggacgatccaaggattaacccgatggcggacggcgcgccgagcctggagaagctagtgggtgaaaggctgctcgtctgcacggcgtctttggacccgagggcgccgagggggcccggatactgcgaggccgtacgggccagcgggtggcgcgggaaggtggagtggttcgagacggaaggtgaggaccacggtttcttcgtcctcaaccccggcagccacaaggcggttgaggtcatggatcgagtggttgctttccttgcggaccagtga

SEQ ID NO: 19298 - DNA, 387 bp, Zea mays
  Peptide Sequence Number=SeqID_61077
atgggggcgctgacgtggctggaggaggtgctggcactggagaagctgtgggtggcaagggtgcaaatcaagtgccagatcccgctcgaggagcactgggccttcgcctactccatgctccaaaaggtctcctatagcttccctctcgtcattcagcagctcagacccaaactctacaatgtcgtcagcaactcgcttctgtttcgtccgctgttaatgcgtacggtttccagtcctctagccaggctaggcaagttgtttggtagttcttactttacagttgtttccaaacatgcttccatcaactttccaggacaaaatgaaacacgagatttggaaaagcaacaaactgacttggttattgaaaaagaactcttttatacttaa

SEQ ID NO: 19299 - DNA, 330 bp, Zea mays
  Peptide Sequence Number=SeqID_61078
atggagtggtcggcggtgaactgctcctacggcacgcggaaggcgatcacctcggcaccgatgggggaggaagagacggtgctttggcaacaagattgcaatcagagcctcacagtgcctagctacaaggcagagcacaatgataaaggaggcatcgacccgggcacatggggtgtacgcagtactgttcctcctttccttcgtgctgcattttatttgtccccttggcattgtccctatcatagcagctggagcctgcagctagcatcttcgaaagatctctgtctaatctccagctgtgggatcatcatattatgtactgatatgtga

SEQ ID NO: 19300 - DNA, 576 bp, Zea mays
  Peptide Sequence Number=SeqID_61079
atgcaggtcacagcttgtcgcctccgccacacatgtcggcgacgacgacgaccaccaccaccgggtacccagagcagtacacgccggcgggcggccgtgtacggcgccaccgctaccggcctcgagcacctccaggactacgtgctgtccccgccgggcggcgactgcggcggcgcggcggcggcgcacgcggggtcgacgttgccgacgtcggcggacgcgatgcgggaggcgattttccacatcgccgcgctgcagccggtggagatcgacccggaggcggtgcgtcccccgaagcggcgcaacgtgcgcatctccaaggacccgcagagcgtggcggcgcggctgcggcgggagcgcatcagcgagcgcatccgcaccctgcagcgcctcgtcccgggcggcaccaagatggacacggcgtccatgctggacgaggccatccactacgtcaagttcctcaagtcccagccgcatacggcatacgacgtggctgctccaattttttgttggagtcgcagcccgtgcatgcgcgtgatcgatgagtacgtgtacgtgctggtctaccctacgtag

SEQ ID NO: 19301 - DNA, 366 bp, Zea mays
  Peptide Sequence Number=SeqID_61080
atgcagcgagactctatgcagtggagcaaagggaacacagatgacatggtcaccatcctcggctccttcgaccacctcctctccacactcgaggccgtcatgcgccccattcttgggccaagatatcactatcccccgggccaggatatcacaccccatgaggtgagtacgcacgcgatccgaacgacacacgagaacatcaatcagaccattaaggtcgtcgacaacctcctctcccagttcgacctcgcccaccgggtcgtttgctattcctctctcaatcaacatgctagacgtttagcccaaaatcagggtgaattggatgaagtttccttgtggcattatgtgggtctaagggcatcctaa

SEQ ID NO: 19302 - DNA, 2412 bp, Zea mays
  Peptide Sequence Number=SeqID_61081
atggcgtcggcgggaggagaaggtgcagttttggtacccctggcgcggcgctgcggcgggtgcgacggccgtgaggaagccgtggtggaggcgatgctgcagtggcagaaggtgagcgacctgctcatcgcggcgtcgctgctgtccatcccgctggagctgctctacttcgccacgtgcgccgccctggcgcctctccggcgggtgctcctccagctgggcaccttcattgtcatgtgcggcgtgacccacctgctgaacgtcctcgcctacgaccacccgggctcccaccgcatcctcgtcgccctcaccaccgccaagattctgggcgcgctcgccacctccgccgccgccgtctccctcccggtcctgttcccgcgcctgctccgcctcaaggtccgcgaatcgttcctccgcaccaaggcgcgccagcttgaccgcgacctcgccaccgtcaggcaccgcgaggagaccgtctggcgcgtcgtccgcgcggtcacgcaccacatccgcgactccatcgacgcgcgcaccatcctgcgcaccaccatgctccagcttgccgccgccctcggcctcagcaactgcgccatctggatgccccagcccggcgggagcgaccgcggcgtgctccagctcatggaccagctgctgccagaccgagacgacgaaggcgacaaggtgcttcatcacagcggcggcacacgcgccatctccgttcgtgaccctgacgtggccgccgtattggccagcaaggacgccaaggtgcttagccggccaggctcggcgctcaaggcggcgagctgccggagcgtgccgctggcaggagccgcggccgccatacggattccaaatttccacggagaagtgggcagcaggaacacatcagagccgttgagctacgccatcctagtcctggttcttcgggctcatgaagatcaacacagggcacctacaggctggagcaacctggacctggagattgtccaggccgtcgccgaccaggtcaccgtcgcgctgtcccacgcggcagccctggaggagtcacagctgatccggcacaggctggcggagcagcacggggcactgctgcgcgcaaggagcgagctcgcggctgcgaccaaggcgaggaacaacgctcacagcgcgatgcgaagcgccatgggcaggccgatgcactccgtcgtcggcctgatatccgtgatgcagcaggaggccgccgcgatgcgcccggagcagaggctcatcgtcgacgccatcgctaggacaaacgctgtgtcctccactctcatggacgacgtcatggagacgctgcagaggatggtggacatccgtgacccgccgctgtcgactcctactcctaccctggtgtcaaggcggccgttcgagctccgctcgctgatcagggacgcggccttcgtcgcccgatgcttgtccggctgccaggagctcggcttctcgcaccagctgcaggccaattccctgcccgaatgggttgtcggcgacgacaagagagtcttccatctcgtgctgcacatggtgggcgctcagctgagccgatgccatggccagcatgtcacagcagcaggccgtaccctctcgttttctgtctgcagctgcaacagcatcgccagtgagcaccaggactggatcccgtcgccactgcgacccgtcagcttcaccagtggcaaccaagtatttgtcaggatccagattgggctgacgaagagcggtcctgggagctcgccggcatcgcgcccaccccagtgtggcctctcctccgattccggcggtgccaacatgcggctaaccttcgctatgtgcaaaaagattgtggagatgatgaatgatgacatgtggtgggcatcagagtcggaaggccagggagaaaccatgacgtgcatccttcggttccaacagcagcagccaccgaatccgcacgtgcctggatcaggcacgtaccggattggagcctcgtctgcgacggcggcgcctcaccttcacttcaacggcctaagaatcctgcttgccgacagcgacgccatgagcatggaggtcacccggaagctcatcgagcggctaggctgccaagtcctgccagtgtcgtcgggcgccgactgcctcagtttgctgcgaggcgctgagccgtcgttcgaactcgtggttcttgatctcgatgggcatggcggagccggcacggcaggcgccatggatgggctcgaggtagccctcaggatacgggagctcagtaacacctgctggctgctggtcctcgtcgccgtggaagccagcggcgtcgatgacaccgtgcgtgatatgtgccggcgagcgggagtggacgggctcatccacaagcccatcacgctgccggcgctcggagctcagctccagagagtccttcagaacaactga

SEQ ID NO: 19303 - DNA, 177 bp, Zea mays
  Peptide Sequence Number=SeqID_61082
atgccatctgtcgtgccattttgtcctcagttcgaccgccattaccgtgagctcaacctttgcgcatggttggccgcttccatcacccttattccgtttcctcgtgttggtcttgccccaaggctatggctctttggtgttgtcgtgtctactttcgacaaggatgagatcacttaa

SEQ ID NO: 19304 - DNA, 117 bp, Zea mays
  Peptide Sequence Number=SeqID_61083
atggatgttttgatgattaggaaccttggggaggaccaacaaggaattggtaaaggccaagatgggataagccttcatggtggggtcactcgtgtggcacgagtgataaccaactga

SEQ ID NO: 19305 - DNA, 369 bp, Zea mays
  Peptide Sequence Number=SeqID_61084
atggcgcgcctaggggtgattattattatgtattttgtttacatgtttgtagaagagccagtggctgaggatcctggtgcccagcagatagaagttgctgagcaggagctcattgaagagatatacattactcatgttcacacttttgttatcagtttattatttactgttcatgataagatcattatgttaatgggaacatggagaaccacccgagaaaatagtgccaccacaagggtggcccaatcaatcatagagtcccaagctcaaggggagtcaaagtcaagtttattcgcggatctggttcggactacaggagcgggttccacaaaaatggacgcccaggccacatatggactccatttttga

SEQ ID NO: 19306 - DNA, 303 bp, Zea mays
  Peptide Sequence Number=SeqID_61085
atgaaggccgcgggatttccacctctctcacgctcgtctccggccacctcacttccccccttcgcgctcggcctcacgccgacccatctaagctggggcacgcggcgacattcactcgtcggcccagggaccccccggtctcgaaacgccgacaattttgtttacatgtttggtgtgatgttaattttctctatatactatgcttgtgtgtattgtgatcattatgttaatgggaacatggagaatcacctcgggaaaatagtgccaccacaagggtggtatgggacgcccttggctgactaa

SEQ ID NO: 19307 - DNA, 546 bp, Zea mays
  Peptide Sequence Number=SeqID_61086
atgccgatgctcccggctgccgagcggccgcggctgacgctcgaggactacatcgtcttcttcaccacccgcagcggcggaggcctcaacctccaccacctcaaccacatcatctacatgcacgggttcgccaggctccaccgcgcgcccaagccggcgatggtggacgcgctccggtcggtggagctcatgcgcccgcgccgctccaccgtccccttcaacgccaccgcgccgccgccgggcgccgccccggtcgcgcccgccgtgctctcgcttgacgaggtcacgcgcgacatcgaggacatcggctggcgcgagtgccccgtcggctccctcctctccgtccgcgccgggatgcggtcgcccgccgccgaagcggccgaaacccccatccccctgccgatcctggccagggcctcctcgtccctgccgcccgctgcggccaagaggaagcgttcccggacgggcaaagcggaggccgcgatgcggaggcgcgtgctggagctgctcacgctcccgtccgtcgagacggttacctcggcctag

SEQ ID NO: 19308 - DNA, 1095 bp, Zea mays
  Peptide Sequence Number=SeqID_61087
atgccgagaagggccctgacgctggagacgtacctccgcttcttcctcgacccatggaacacccgcatcaccgtcgaccaactcaaccagatcctcttcatgcatggcttcgtcaagctccaccgcaccaaaaagaccccgtttacgtcttccctccgccgctgtgctcgtaacgcacacggagctgtgtttcggcgaggggggcgcttcggccaggccaagatcatggagcgcctggtggggcaagtggacctgctgccgccgcggcgttccacgctgcaccgcgcgtcgctgccttccgcggccgccatcaccgcggcgcaggctagggacgacgtcgaggcgatcgggtgggccgagtgccccatcggccgcgtcgccgcgttcgccgcgccgagtgccgacgcgccggagcccgtggagcgcgtgcctcagcctgccgacttcgtcctcaccgggcgccgcccgcggtccaagcggacgcgcggctctgcgtacgggccaagtgacgtcgccgccgcgtccaagaagctgaaggctggcgcgcctcagaaacatgcgaacgtgatcgtcaaggaggaggagaatgatcacgagctggtgtcaccgcctcctccgccaccggatgtggcgctgcctccaccgcgcaagcttcaacctacgttggcgaggatccccgcgcctccagcctggggcacgcccatggtgctgccttatccttcgcatcagctgttctggggcgtccctttgccctcacggccaaccgctcagccgtgccctgcaacgccaccgccgggatggagcgtacctacgccgccgccgtcttacccagcgccattctgtggcgcgccagtaatgctgccgccactgccacggcatgtggcctggcgatcaccacctcccctcctgctgaaacggccaccaccgcatttgcaggggaagccgctgcccgcgctgcttccagtccaacaccaccacctcctgatccaccggtcatgcagctgcagcagtgcagcggccgctgtcgcattgacagggccagtaggcagtagccacctcctgcgcttcttcagattgaggaatttgtcaaaatga

SEQ ID NO: 19309 - DNA, 3444 bp, Zea mays
  Peptide Sequence Number=SeqID_61088
atggggcaaatcgatcggcatgtgtttcggcgtgattataattttttcttgtcaagaaacagcacaattttcgacatagacattgaagcgtttcaactgaagccttggagacagcaaggagcggatcttactgactactttaattttagtctggatgaagaaggctggagaaagtattggtgtagcatgaagcaattaaggttaggggctagatcacttgtaaatgaaacatcaggattggagcaggaatcatacaaattgaaatctgcgaaagcaatgtccaacgtagcaaatgattctggatctgaaggaagaaatgacattggcaagccaaaaggtagagcaatccatgttgaaggcagtgcgtgcgaacgtgttccttcagcagacttgtggcgtccaatacaaagggattcagatgttgtgattcaagtaaacatgacactttcaccatcaaatcagtccacttcggatgacagctcaaagttaaatcacaagggtgtggctactgaaagggtgtttgataaggaagtttatgatggaggttcctcagagggtgttgggagcaaactggacagaagagattcttattttgcacgtgaccaatctcctagccctgattattctgatgtactttctggagaatcaaaagaaaatcactattttaagagatccaatagacattcagatttcagggacttctttgaagccaccaaacttcaggatgagcatgtcaaatctgatttttattgctatccaagtaagccagacagagaaaatagtgaaagctgcagacgtggttataccccttctactgatgatagaaacatggcatctaaacttctgtggatgggtgaagctcctttcactgggcgaggcaagtctggtgatctttttttgggtcacaacagcgaccgtgacttcaaatctcgacataaagcaagaaaaggacagaggagacagagtttagatgacagaaggaatgctatatttgttgaaaaagaaaaaccaacagatagctatcatagtacgtgtgataggaagttcgtgaagagaagatctagctcatcttccctgaggaccaactatcacaattccgtttgcaatcaatcttatgagcagcgttattcacctcttgaaaaaaaagctctgaaaaacgatgagcattactttagcgatgagtctaattaccaccataggcagtctttgtcatgtgacatcaatgaaggagatattgacaagtgcttctcttcagcgaaggagtggcaacgagatggtgaccatatataccattcaatggtaaaaactgatatgcctgatgctaatgatggacgcatgtacagagataggtatagtccggaaaagaaaatagccagacatgaccatagcatggatgttgaattttcccattacactgattacagattttgcgagtggcggagtctggaggtaagaggcagatacagagataaaggaaaatttgccaaaagcaatgatgggcatttcagacatgctaaccatctcgagttgtattctggcctcaacaattttgagagggacaaacctgctactggcttccctgttatgagctcaagaaacagatgcatcgataacaaagaagtctgcaatgctaagatgacacaaaataattgccatgggtatcatcaaaagaacaagcaacatgattcatcattttgtattggcaacattcctcgatatgctttgcgcactgatacttatgctgaaaagggccattttgttctgccaattaagaggaagctttattctgatctgggttccatggaccaaaggactcttgctgatttgccacttctgaaaggaagattgatgcatggccaatccattgccagtgacaggaggatttatgctttgaagctgcataagtcgacaaagaaaattaatacagaagccatttgtagttccagtgatatgagaaatattaatactctttcaaacatttgtgttggcagaagacatgagctggataatgctgataacatccacttgaatgatagaaaaataaagtttgagagggaaggtaatgagttaagacgtgtaattgaagataaccaaaagggaagccatcctgtggataaggatttgcacacttctagacataagcatgtacatcagaagctgtggaaacagaatctgagtcaccgtcactcaggcaatcaggatttggagaaatcagcagaccagaattgtctaaataaagatgtggagatcgaggaaggagaattgattgaagaggaccataataatatcatttataaaagcaagcttaagcaggaaaatgttgtactgaaatcagttattgaaacaagttcagcagagcagttacaggtgaataatgcaacgtcgaaggatgctacctgcaacaacagagctacaagagaatctgatgagaaacacattcttgagatttcatccagaatcaacggcctgctaggaaacggcggtggggtggtaattgttggatgctggaaatgccttgagagtttgtccgtgatggtttcttcaacaagaaggcgaacacgcgagcagctccattgccaagagaatttggagaacgctgagacgacacgatcgtgcccactgcccacgagaggagttgccgcctgtcaaaggctggaagcggggacttgtggggaagatgggaagccgccttcaactcctgcagacagaataacagaaatatcgaacgacgtacacactccagctccgacaccgtcatccgtcaagtcgtcaactgacagtgcactcggcggtggttcgaacgccgaaccgacgtggcgcgctgacgacctccaaccgtgccctcatcccagcctcccgcttccgtccctgcaaggtccaagcccggtacggcaccgcatccgagagggcagacccgtcagtccaggcccctcgtccttcactcctccttcgcctctcaaaggcgcgcctcgctccaccattcccactggcgatttgcaacagacaagctccactagagctcggccggcatccatggcgatgcggctcctgtccccgtccacgccgcccccacgcttcccgagccccggccagaaggcacccgcctccatctccgcatcgtcttcctcgtacttctctgtccgcttgcgccgcgcgcgcgcggcggctgcagcggctgcaggcgcggccgcggcgggcgggtccgaccggcgcagcggacgcttcgagggggaggcgatgagcggggcattcgacaggggcctcgcggagatcgcgaggaaggtgccgctctttgagcccacagcggacggggagctcgccgctgcggctggcgagcggccgttgcctatcaatctcgagctctggctctaccgcgtcaaagtgcacaccagaaagttcgagttccctgaagcagaaaaacttctggacaaggtgagcacgtag

SEQ ID NO: 19310 - DNA, 549 bp, Zea mays
  Peptide Sequence Number=SeqID_61089
atggcgcctcctgttgacgtgactggcctgcgccctaggttgggcgatgtggaggctcctccgaagccgaggtcgagtctgtcttccgtggccgaggccgagtccgagcccctgggtcgggcgaggcggaggtcgtcggctgaagccagggcggagtccgagccctgggatgatgacaagaaatatcgtgattctattcaagggcatcgagtccttcgacgagacagaatagcagggcatcataagctatatcaagattatttttcagagaatcctacatacggacattgctattttcgacgtcggtttcgaatgaggcgtatattgtttgaacgcttatggaaagaggttaccgcgacattttggatgctaacttatggagttgcagctgatgctacggatgattatattcgtattggggagagtacgactattgaaagtttaagaagatttgtaagtggtgttgtggccgtatttggtggtgagtacttgcgatcacctaatgaagatgacactgctagattacttgccattggtgaaagcagatga

SEQ ID NO: 19311 - DNA, 408 bp, Zea mays
  Peptide Sequence Number=SeqID_61090
atggaggtcgcgcgtccatgtcccgggacggatggctggcagctcgttgaaagtcgaagtgcacgactgcggcgatgtgctctcaggaatcggctcggtcatctcccctatgtctctgggtgtgagtctaaggctgggcaggctcgcaagtcggtgtggcgcatgatcacgccgtcaactgccacggcgccctcatctctgtcggtggccatggagtccttcccggcttcgacgtctgacaagaggcgacgacactggtctcgggttaggaggcttaagggctttgctaaccctggcgttctcgtgaaggtgggagagtcttcggtgttgcggtcggccggcgagcaggtcggggtggccgatggcagagctgctcttgctttgtctcctctgacgtgctttgcttag

SEQ ID NO: 19312 - DNA, 2688 bp, Zea mays
  Peptide Sequence Number=SeqID_61091
atggcgcttcctgttgacgtggcggtctgtgccctaggaagggcgacgtggggggcggagtccgagccctggggtcgggcgaggcggagtttcgtcgtcttccgggtcttagcccgagtccgagccctggggtcgggcggagcggagttcgccgtcttccgggtcttagcccgagtccgagccctggggtcgggcggagcggagttcgccgtcttccgggtcttagcccgagtccgagccctggggtcgggcggagcggagttcgccgtctttcgggtcttagcccgagtccgagccctggggtcgggcggagcggagttcgccgtcttccgggtcttagcccgagtccgagccctggggtcgggcggagcggagttcgccgtcttccgggtcttagcccgagtccgagccctggggtcgggcggagcggagttcgccgtggcgcctttggcaaggcctgactgcctcatcccgcggcccacctcctacaacttcgagcgctcgcagtccgtgcagcggctctaccgtccgaccgatgacccagacctcgacgacatcgccttctccgacgacgccccctcagatgcccaagccagcaccgcggtagaaggaaaggccgagaatgaggaggagatggacccgctcgacgccttcatggccgagatccaggaggagatccgtgcgccgcccccgccgcccaagcccgaggcgcttcgccgcacggattccgacgatgacgaggatgaccccgtcgagagcttcctgcgggccaagaaggacgctggcctcacgctggccgccgacgtcatgcgcgctggttacgactccgatgaggaggtctacgccgctgccaaggccgtcgacgccggcatgatggaatacgactctgatgacaaccccatagtcatcgacaagaagaaaatagagcccataccagcactcgatcactcgaccattgagtatgacgccttcacaaaagatttctacgaggagaagccatcgatttcaggtatgagtgaccaagaggtaacagattatatgaaaagtttgtcaattcgtgtttctggttttgatgtgccgaggccaataaaaaactttgaggattgtgggtttcatgtacctctaatgaatgctattgccaaacaagcttatgaaaaaccaactacaattcagtgccaggctttacctattgtactttcagggagagatatcattggtattgcaaaaactggctctggtaaaactgcagcttttgtgctccctatgattgttcatattatggatcagcctgagcttgagaaagaagaaggtccaataggagtcatttgtgctccaacaagagaattggcacatcagatatatctcgaagctaagaagtttgcaaagccttacaaccttcgagttgctgctatatatggtggtgtttccaaatttgaccagtttaaagaactgaaagcaggttgtgaaatagtcattgcaactccagggagattaatagacttgctgaagatgaaggcattgaagatgttcagggcaacttatctggttcttgatgaagctgatcgaatgttcgatcttggatttgagccacaaatacgatccattgttggtcaaattagaccagatcgacaaactttacttttttctgcaacaatgccatacaaagtagagcgtttggcaagagaaatattaactgatcctattagagttacagttggtcaagttggcggtgctaatgaagacattaaacaagttgttaatgtactcccttctgatgttgagaaaatgccttggcttttggggaaattgcctggaatgattgatgatggagatgttcttgtatttgcatctaaaaaggctagagtggacgagatagagaaagagttgaatcagagaggattcagaattgctgcgcttcatggcgacaaggatcaagcttctcgtatggagaccctgcagaagttcaaatctgggacatttcatgttctggttgcaactgatgttgctgcacgaggtcttgacatcaaatcgattaaaacagttgtcaactttgatattgcaaaagagatggatatgcatattcaccgaattggaagaactggtcgtgctggcgataaagatggcactgcatatactctgattacacagaaggaggcacattttgctggtgaactggttcacagtttgattgctgctggccaggatgtacccaatgaactcatggatctggctatgaaggatggaagattcagagcaaaacgagactccaggaaaggtgggaagaaaggtggcaaaggaaaaggtggtgttggcggtgctgggcgcgggcgcggtgtgcgtggagttgattttggcctcggcataggttacaatgccgaatctggttcacaagtgcctgctgcaagatctgctgctgtaaattctctgaagacagggatgttgcaacgatttaagagcagctttgtctctggatcttcaaatacaccaagcagcagtgcaccttcctttgtaagaccagcactccgtggctttgtgtctggcggcaccattggaggagacacacggcctgcacaggcagcccccactttcatccctgcatcccggcctgcacagcctgcccccgcggtccctgcatcccagcctgcaggaaataacaacgaaaatgggaacccgaatccagaaaggtag

SEQ ID NO: 19313 - DNA, 201 bp, Zea mays
  Peptide Sequence Number=SeqID_61092
atggaggtgccattgaacgggcagctgtgtctgtggagggttcctgtcttcgtgggcggtcaatattgggtcctcatggaccgggaggcccaagttgaggcccacctggaggaggccgtgcaggctggggcccgccgctcggtgggcctggttcctggggacctgggctcggagtcggcggcttgctgggggtcttggtga

SEQ ID NO: 19314 - DNA, 2238 bp, Zea mays
  Peptide Sequence Number=SeqID_61093
atgggctgcggtggctccaaagaagcggtggccaccggcaactccggcagcagcagatgcaaccgattcaagaggaaatccagcgtcgtcgacgccacccagccatcgtcccgtgtgcttcagccatccctcgacaatgcgtccgccgccgccgctgcaaaggctagtaacggcgaggtgacaaaggacaaggcagccacgttgaaacagaaagccgtcgaggagaagaaagaggaagccgtcgctgtgaagaacagcaaagaagccgtctctgtgaaggagggcaacgcggcgtcgtcgaaggcgagtgccatccgggaggagaagccgcaggtcgagaccaagacggatgaagcagccgccgtcacggatgccgctagcgaagcggccgccgccgccgttgaaaaggcgggcaaagaagcgttggccggtaaggccgccagggagaaggaaggcgatgaggtcgtcgtcgtcgtcaaggacaaagcggtgatcgccggtcagggactgaggataaagcattcgtcgaggacaaaacagtcgtcatcaaccggcggggacgtgaatgccatcaccgtcaccgcggggaaagaagaacacatcatcaggaaggacgacgtggtcaaaatatcgaccaccgaggcagccgtcgacaaggggaataatggcggtgacgaacctgacggtacaccatacatggcggcgatcgaggagaacgacgacgaggctgcgtcgtcgaccgaggacgtcggcgacgccgtcgaggaggaggacaagaaggaggtagacgacggcagcgtcacgttcccggtctccatggtggcagaggaggacggcagcgtcaccttcaaggtacgagtcaatgacgccgaggccaaggacgacgacgggagcgttaagttcgcgactgccgccgccggcgccgcccccacgaccagcagcaacgtggttgccgtggtggccgaggaggatgggagcgtcacgttcgcagtgccagtttcccctgtgatcaaggacgacgacgagagcgttacctccgcggctgcaccggcagccaaggtccaggacgtcgtgggcgccgtggtggcagaggacgatggcagtgtcaccttggcgaaaccgctagcccctgtgagtgtgaccaagggtggccacagcgtttcctttgtgcctgcccggcctgcaacgaccaaggacgacgacgacagtgttgcctccgcagcttccccgatgaccatggacgacgaatttgtcagcttaccggttgcactggaggaggaggaggaggaagaagaaaatgagcattggaaggacaatgatgaggcggaaaatgagcctgctgtttctgatgacgaggagggcacggccgaagctgatggcgcaacagaagccgaagaggatgaggaggaggcagggcagtccgaaccttctgaagataatgatgaggtagacgatgacgcggacctgcccgatcctactgctgtcgagcagctgctaaccaaagctgtcgaggagatcaaagcggaggaggagaggagtgcggcggacacagttggggagaacgtctccagcaaagagccagacgaggggaaacccattgcaccttcgagaccgagagacgaggacggcggggaaccggatgggaaagaacccatggatttggaggaggaggaggccagaaccaccgaggagaagacaccggatgatcacccaggcatcccagctgagaagaagagcggcagtgatgacaaggattccgctctacctcagacggaccaactgctgcaggctgcagcacaggaaaagcggacagcgatggctcaacaactaaccccacacagccacaacacccccccccaccccaccccccaaaaaaaaacaaagaagcctgaaagcacccagaagattcatatcaatcggacataccatgtctaccagagaatagaaagaccttccttccatccatcccacagtcagtcgttgacacaaagagaaattccacagccggggggcaaggctttaattgccccctctccctccctcgcctccttcaccatcccaccgagctttgcaacagctagtagcatgggcaagctgtgctgcagccaggaagacgacgagccggcgttcaacctcctggggctgctcgtcaccgtcgtcctcgccctgctcctgctcatgctgtgcacgccgccccgccgcaggcgctgcgtcgcctactacccccgttactgctag

SEQ ID NO: 19315 - DNA, 276 bp, Zea mays
  Peptide Sequence Number=SeqID_61094
atggacgatcttcgcccagcaactcgcttaggtgcagagagccggaggttggtgagggtggatgtggcggtgttgaagcttttggctgggggtcatactgttggggctctgaccatttctccttcgccgtcgatgacaaagtcgatgctcctgaagcggatggttgccccgggggctcaggcggcatcgtggtcgaccattcagagcttggaggggaggatcgagaatgtgcaaaggcccctacctaacgtgtcaattgttggtgtttcgaattag

SEQ ID NO: 19316 - DNA, 690 bp, Zea mays
  Peptide Sequence Number=SeqID_61095
atggcaatgatggccgacacacaacactcaggacaagtgcagcatgttcgagatttcgaaggacgggacgacgcgacgcctgcgggagtcgggagacgggcggggggaggggccgagggggttaccttggatctggatcgaggagcgctcggccttgcgtcgcccctgcagcgcggtggagagggagtgccgactgccaagccgaggcgagagccttttgatctgcagcgccagcctacgttactacctgccccttcccaatggccaaatcccaagtctgcagggctgcacagatcgcgttggtgtgcgatgctcccgatctgtggtatggtcagcgctgaatcgccgccgcggccgccacccatgttcggggatggtgcgatgccggcggccgcctccgggtgtcttgacgcgtgcagagaccagtcgtctgcacctacacggattggccattggcggacaggggggcacatcatggtcatattgttcagggaagcgtcgccgtacaacatggaagggctcctcctgaggctcccagtcgccagaggcatgacacacacaggtcgcattggcaaggaatgggcgccaggagaattgcattcgccacaggagggcaagaaaagccttattcacagacacttggaccgacgccatgtcccaagatcggatctgactggtgctgatgaatga

SEQ ID NO: 19317 - DNA, 1065 bp, Zea mays
  Peptide Sequence Number=SeqID_61096
atggggcgccgcgggttgctcaaggctgcgcttctgctgtgcttccttgctgcttgctccgggagagaacttacgatcaaacagaacccttccactaccatatacaactcgactcttgccaagatactcgtggaatatgcttctgcaatctatactgccgatttgacgcaattgtttacttggacatgtgccagatgcggtgacttgatcgaggggttcgagatgatagagatcattgtggatgtcgagaactgcttgcagatgtattttgaccttcagttgacagtttatatctgtgtgcaatgtgtaaaatgtactttgttacccccaactgtattgattatccaatttctcagcatccagaattggatagaggacttgttatggaaacaacttgatcttgactaccctggcatgcctgaagcaatggttcaccgagggttttattctgcatatcacaacacgacactacgtgatggagtagtcagtggtattcagaggactaggaaagcttacggagacattccaatcatgatcacgggtcattcaatgggtggagctatggcttcattctgtgcgctcgatcttgttgttaactacggactggatggcgtaaacctgatgacatttgggcagcctcgtattggcaatgctgcatttgcttcttatttcaagacatacttgcctcaagcgatccgagttactcatgcccatgatattgtgcctcacctgccaccatatttctcattcttcccacagaagacctaccatcacttcccaagagaggtatggacccacaatattggactaggaaccctagtgtaccccgtagaaaagatctgtgacgattctggtgaagaccctacatgctgcagatcagtaagtggaagtagcgtgcgagaccatatatactatcttggcgtcagcatgcatgcagaagactggagcagctgcagaatcgtcatggactacagcaaattgcagtatcagatggacctcaacggtaatctcgtattgtcgaagcagcccggtttgtcaaacgccagaggattcagtgctcagtga

SEQ ID NO: 19318 - DNA, 441 bp, Zea mays
  Peptide Sequence Number=SeqID_61097
atgaccggatgcgcccccgccacctccttcctcttctggtgtgtaggttcgggttcctttttggtgtttgacgccaaagggggagagatatctccacttttgtatgatgattttggctcacaaactccattatatactcttgatgcttatgttgactgtagacaaatgaaaagcccaattcaccctccccctcttgggcatcgtgatcctttcagtagtattggcctcccgaaagccttgagctacaactcgtcgcggctgaggctgccaacctcggcgccgcacacgaacatgatacacggcgaggggcgctggggctggagttccatcgagtcggagaggccacagataggagcctggggaaggagagcgcaagggctagagctccatcgagtaagagaggctgcagcggaatggcttgaggcgctacgcgagctgtga

SEQ ID NO: 19319 - DNA, 1074 bp, Zea mays
  Peptide Sequence Number=SeqID_61098
atggacgagcccgagaaagtgaggggcagggaggatgcggcgtcgggccacgaggctggcggcgctgaggaggccggggatgggttccagctcgtgatccatggcaagaagaagaagagggcggctagcggccaggactgcaggactgctggctctggctttggcgctggcgccgggccagtgcgggcgttgaccagggagaagggagacgcgccggcgccgggggccaaggccaaggtgccttgccacgatccaagcattccccggccgcaggacgtgtacaaaatcagagtggataactacaagccattcgagcatgtctggctggagcgcaacgaagacggcacccgacatgttcacccgctggaaaacctgcctgttgaacagttcgttgttagaaatgttcctgacagagaaccagtgaagccagctgatttagaggatacaccatttacgctggttcaagatcacaaaggcttaacagaattagctaagaagttgaagagcgtaactgaatttgctgtagatctagagcataatcaatataggtcatttcagggcttgacctgcttgatgcagatttcaacaagaacagaagactttattgtggacactcttaagctacgcatatacattggtctctatttgcaagagcctttcaaagatccaacaaagagaaaggtaatgcatggtgcggatcgtgatataatgtggctccagcgggacttccacatctatgtgtgcaatctttttgacacaggacaattatatataagtggctttacttctgcccagttgtgttctggttcattgataagccctctactccatggtggtcaaaacagctggcctctggtaatggagcttagcgtgtttcagtttgaggacttcggctattctcacataaaccattatgcaggttatataggaaataaggaaaagacgcttgaggagatcaggcaagatctttgcctattgaggggcattgaccagataaaagctatcagtattggctactatgatttctggtctgaacttttatcctcaattttgcagtccagcggaaatgtttga

SEQ ID NO: 19320 - DNA, 330 bp, Zea mays
  Peptide Sequence Number=SeqID_61099
atggaggcgtcggcggcggacggcggcgtggcgaggctggcgtcgcagcgggcggtggtgatcttcgggacgagcaactgctgcatgtgccacgcggtgaagacgctcttctcggagctcggggtggggtgggcgctgcacgagctggacacggacccgggcggcaaggacatggagaaggcgctggcgcgcatggtgggccgctccccgcccgtgccggcggtcttcatcggcggcaagctcgtcggccccaccgaccaggtcatggcgctgcacctccgcggcaagctcgtgccgctcctgcgcgaggccggcgccctctggctgtga

SEQ ID NO: 19321 - DNA, 375 bp, Zea mays
  Peptide Sequence Number=SeqID_61100
atggcccccaagagaggtaattcgaaggctgccccatccatcgacgacgcggtgaaggcagcatttctggcggacaagaaaggaaaggccctcgtggacgccaccccccaagaggccctcgaagacgatgctatcaacagcaaaaggcagcgcaaagaccaccccacccccgacggcaccgtacacacttgcagttctgaatacgcgccccaagcaccactgccagactccgctccaccagagggcgaagacaccattgaggacgaagaagtcatcagcatctcaaccgaagaccaactaaagctacgagctctgcgcatcaaaaaccaccacctccagaagcagaaagaaatcctcgaagccaagcgccaatga

SEQ ID NO: 19322 - DNA, 1050 bp, Zea mays
  Peptide Sequence Number=SeqID_61101
atgacccaccactaccccccgacgcgcatcacgcgaggggagcgtcactactgctgccgccgccaatggctctctgccctgaccgagcccatggacgacctcaccgtggggggcctcgcgctcttcgccgccgtcgctgacttcatagacgactccgctcccgcgatgccgcagccagcggcggccagcaccgcgcacgagcccgagcccgagcccgggagcccctgctcagtcgccagcgactgcagcagcgtcgccaccgccgacttcgagggatttgccgacctcggctccgcgctcgtgctcgacgacctcgtctcctccgcctccacctccgccagctctgcctccgggcccagggccgccgccgccgctcccgccaggagcgtcttcgcgctcgactgcgtgccgcgctgggggctccagtccgtgtgcggccgccgacccgagatggaggacgccgcccgcgtgctgccaaccttcttccacgtcccgctctggatgctcgccggcgacgcgcccgtcgacggcctcgaccgggcgtccttccgcctccccgcgcacttcttcggcgtctacgacggacacggcggcctccaggtcgccaactactgccgggagagaatccacgaggtactggcagaggagctcaccaaggcagaggaggccgcgtccgacgctgacctgggtggcctcgaccctaacactcagaagcactgggagaaggcctttgtgggctgcttcagccgtgttgatgcagaggtgggaggagacgcggcgaccgaagccaagcctgtggctccagacaccgtgggctcaacagcggtggttgcgcttgtctgctcatcgcatgtcatcgttgccaactgtggcgactcgcgagcggtgctctgccggggcaagcagcctgtggcgctttccgtggaccataaaccaaacagggaagatgagtatgcaaggattgaggcccagggtggcaaggtcatcaattggaatggctatcgagtcctcggtgttctcgccatgtcccggtcaattgtttcgctttag

SEQ ID NO: 19323 - DNA, 366 bp, Zea mays
  Peptide Sequence Number=SeqID_61102
atggtcgacggtggtggggacctcgtcttcaatgcaatttgctcggactcagaccctgtctctccaacaagcaggatggtcgacggcagcgaggacctcatcttcgatgcactctgctcggattcagactcggactctacctctccaatgagcggcgagggaggtgcccccaacgacgaggagaacaaaagacacacgaccatcgcaacccctgccctcccgaaaggacagggcctccagttcgattccgccttcgatatgggacgtaacaacgacgaaggcctgacagatcccccggcagaagtattcaattttgagctcccagatccgacctgcgaggctctcgaggcaggagatcaaggacat

SEQ ID NO: 19324 - DNA, 153 bp, Zea mays
  Peptide Sequence Number=SeqID_61103
atgcagctgcacacaacagctttgcagccgacagccgaaggctgtgtggtgatggtgagggctgaggaggtgagggaaagtgggagaggagaactgcacatcattatattaagagagaaaaggtccaaagtggacctaaatacaacaccctga

SEQ ID NO: 19325 - DNA, 876 bp, Zea mays
  Peptide Sequence Number=SeqID_61104
atgttctggcgcatgaccggcctctccgcggcctcgcccgtttcttgtgaaaatttagtagcatacactggggcatccccgtcccacatgcctaactttcttttcctgttgtatgtaattagcctagcagtaatgtatgcattgctctatgctgaattaattcctttaccttctagaacagctaaacacattctctttttctcaattttcttgcgagataaggcccaagtgtcgcaattacttcgttacattgtggaagaagttcctgaggattcagagaagaaacaatctttcaagtttccttttatcgcttgtgagatttttgcttgtgaaattgacattattttgagaaccttggtagaggatgttgagttaatggatttgcttttttcatttataaaacctgaccatccgcatagcacactgttagctggttacttcagtaaggtggttatatgtttgatgcttcgaaagactgctcctcttatgaattatgttcaggagcatccagatattgttgtccagcttgtcgacctcattggtatcacatcaataatggaggtgttggtgagattgattggtgctgatgaaaccatatacttgaatttcgcggatacattgcattggttagagaatacatatgtactggaaatgattgtggataaatttagctcatcagactctcctgaagtgcatgcaaatgctgctgaaattctttctgcggtaactcgatgcgcccctcctgctcttgctgcaaaaatatgcagtccaaggtgtgaggagatcttgggcaaaaggaaacccataggcaagatctcctcaaagatggaaacccccaatcaggatcctatactaagggcccgtttggcagcatga

SEQ ID NO: 19326 - DNA, 231 bp, Zea mays
  Peptide Sequence Number=SeqID_61105
atgggtgatgtttctgatcgcattggccgccctactgacaatggacagattggaatcattgaccctgactgtagactcattggtcttcatctctatgatggcttatttaaggttataccatttgacaacaaagggcagctgaaggaagctttcaatatcaggtttgcaaattgtgctgaaaaacatcagcccaagtggcctaagccatcccagatgcagcccatgtcttaa

SEQ ID NO: 19327 - DNA, 390 bp, Zea mays
  Peptide Sequence Number=SeqID_61106
atggcccttgggctttttgcctctaagttgcccgtggcttcaatgatcatcgtttcttggttcaaagatctgagaggcagagatcctgtatcagtggaaactgagaacattttcttgaataacatagaatcagcaaaacaaggcctattgtctacatcaggttacttgaaatgtgttcaggttattgaggaccagaatttgctatcgattggaaagcgttttagcagtcatagatccaggggccatacaacgtctggtggcgatgaaaggtatcagcaagaagggatcaactggcttgcattcctccgtcggtttaagttacatggaattttatgtgatgacatggggctcgtacgttggttcttctcaggacagagtgacactccgtag

SEQ ID NO: 19328 - DNA, 393 bp, Zea mays
  Peptide Sequence Number=SeqID_61107
atgactgccgcagtagctgcgaagaagccagaagaagaaaaggaaggatccttgcagggatggagcatccccaggcctgagccagaggagatgaaagcccaggattctgtgcctgcccctgatgtggatgatggcatgggaaagaaatcaaagaagaaaaagaagggagggaatggatgtggatgggaagaaatccaagaagaaaagcggaaggaggaagaggagttgaacaaggttcttgatggagtccctcttgtggaggaggacaagtcagtgtacctggaagtcaaggttgttgaaggtcatggggacccatttgtgacaactgtcagggctttgttaacaccacacccattgagagagcttcggtatctgattatgttgcagctttga

SEQ ID NO: 19329 - DNA, 1389 bp, Zea mays
  Peptide Sequence Number=SeqID_61108
atgacttggatgggagagatatttccatttgtttggaaatgtgttccacaaggcaatttgcgaccaagccattctattcttgtgtgcaggttccatgttattgggtgggttcataaaaagttcggagtagttaagtctttgtggagttatggtttgaaaatgataccactgtctcttgcaattgctaaagagggtgaactttcaattggaactatcgatgatatacagaagcttcatatccgcacaatcccccttaatgaacaagcacgtcgcatttgtcaccaggagcaatcaaggacactagcattttgcagtttcaagtacaaccagagtgtggaggaaagtgagactcatttaatacgtctgctagatcatcagacgtttgagtccctgtgtgtatatcctctagatcaatatgaatgtggctgctccatcattagctgttcgtttgcggatgatagtaatgtttattactgtgtgggaactgcatatgttatacctgaagaaaatgaaccgacgaagggccggattcttgtatttgcagttgaagatggaagcttgcaattgatcgtggagaaagaaaccaaaggagcagtttattcgctgaatgcattcaatgggaaattgttggctgctatcaaccagaagattcaattgtataagtggatgtcacgcgaggatggttcacatgagctgcagtctgagtgtggccaccatgggcacatacttgccttgtatactcaaacacgtggtgacttcattgtggttggcgatctgatgaaatcaatatccttgctggtgtataagcatgaggaaagcgcgattgaagagcgtgctagggattacaatgcaaactggatgactgcagttgagatgcttgatgatgaagtctacgttggggcggagaatagctataacctattcacggtgcgcaagaacagcgatgcggcgacagatgacgaaagggccaggcttgaggtggtgggagagtaccaccttggggagtttgtgaacagattccgccacggttcactggtgatgcgccttccagactcggatatagggcagatccctacggtcatctttggcacaataaacggggtgattggcattattgcctccctcccgcacgaccaatacatcttcctggagaagctccagtcgacccttgtgaagtacataaagggcgtcggaaacctgagccacgagcaatggcggtccttccataacgacaagaagacggcggaggctcggaacttcctcgacggtgacctgatcgagtctttccttgaccttagccggagcaagatggaggaggtgtccaaggcgatgggcgtccccgtggaggagctgtccaagagggtggaagagctgacgaggcttcactag

SEQ ID NO: 19330 - DNA, 729 bp, Zea mays
  Peptide Sequence Number=SeqID_61109
atgggctacggtgccgctgtgtatgggtgggacaggagttcgggggttttctcgacctgcgtgaggtcttcttgtctacttttatccaacataaacctaggagagaatttaagggatgagattcataaacaagaaacattgaagggcagacctgttgcagcgaccccactaatgtgggagcctccggcgctgggtcttcccttatgcaattacaatctaaaggttctgttggcaaccggtggtggccatcttgtttacctggaaattagggatgctaaacttgttgaagtgaagcatgctcagctagaacatgagatttcttgtcttgatttgaacccaattggggagaatccacaatatagttccctagctgctgttgggatgtggacagatataagtgttagaatattttcgcttccagatcttgaattgataaggaaggaaaatttgggtggagaaattgttcctcggtctgttctgctgtgcaccttggagggggtttcgtatttgctttgtgctcttgggcatggtaatttgttcagttttctactgaatgcaagtacaggtgaactgactgatagaaagaaggttaccctcgggacccaacccatcagccttcgtaccttctcatcaaagggtaccacccacgtgttcgcttcgtcagataggccaactgtcatctatagcagcaataagatgcttctctacagcaatgtcaatttgaaagag

SEQ ID NO: 19331 - DNA, 1467 bp, Zea mays
  Peptide Sequence Number=SeqID_61110
atgttcccggcggctggggctacacgaggccgtgttaggcgccgttggggaggaaggcaccgagggcccgaggctgaggcggtcgccgacgttgggggctgcagctcccgccgatgggtaggagagagcatccatcggggagaggagaatgtcgggcgcagtggcagcgccgacgacagtagattcagccacaacagcgctgacgtcagtagattgaagcgtagcagcgctgatgggggcgcacggctagagcgtcaccggggagggggtggtcgcatgtcgtgggcggcgttccaagctgcatatggaaaacccttgctagctgccaaagattctaaatgttcagcaaaggatgctgaagctggtattcttgcaatggaggcactgcataagcaggtcatgccgtttctactgagaagaacaaaggatgaagttttatctgatcttccagagaagataatccaggatagatattgtgatctcagtctattgcagctcaaactttatgacaaattttccagctccaatgcaaaagacgagatttcaactatagtaaaagcaaatgaactggaggaatctgcacctcaaccaaaggcaactcggcatgtgtttcaggcattgcagtacctattaaaactatgcagccatcccttgcttgtaactggggagaaccccccaaatcatcttgtggatcttctgaatgaaataggtctgggatctggcagtgagcttcatgagcttcaccactcacctaagcttgttgctcttcaagaaatacttcaagaatgtggtatagggtcagaaatatctagtcctgatgcttctacagctgttgggcaacacagagttttgatttttgctcagcataaggcttttcttgacatcatagagaaggacctgtttcaatctcatatgagaagtgtcacatatttgcggctggatggctctgttgatccagagaagagatttgaaatcgttaaagcattcaattcagacccaaccattgatgtacttctgctaacaacccatgtcggtgggcttggcttgaacttgacatctgccgacacattggtgttcgtggaacatgattggaacccaatgaaggaccttcaggctatggacagagcacatcgattgggtcaaaggaaagtggtgaatgttcaccgtctcatcatgcgtggcacccttgaggagaaggtgatgtctctccagaggttcaaggtgtcagtcgccaatgctgtcatcaatgctgagaactcgagcttgaagaccatgaacactgaccagctgcttgatctgttcacatcaacccctgcttcaagaaaagcaagcgacgagcagagtaagaggaaatctggtggcaaaggcttgaagtccattcttaatggtctggatgagctttgggatcagtcgcagtatgccgatgagtatgatctgaaccagttcctggcgaagctgaacggctga

SEQ ID NO: 19332 - DNA, 804 bp, Zea mays
  Peptide Sequence Number=SeqID_61111
atggcggcgcacaaaggtgaaagccgagtcgccgatagaaaagtgccggtgcagcgaccggaggtggagtcccttgccgagctcttcgccggcccaggcgtcagtgaatctgtagagtggcgcatgccgcagaaccaccacgtagactccccctttcatctcgttcgcctccctggagacgagcgcctctccgctcatgtcgccaaccgcagggatctacgagctctagggccatggcaccacctacgaggagctagagaagtcggtcaggagtaccccaacaagaggaagctaccgttccgggccctagaaagcagcttcaagatcgttatcgacaacttcagcaaggtgattagctcccaagagcagaacgagatcatacatgacgtaatttcctcaatttctattggtgctaatctcttggatgctgaatggccttacactggtctcctgcatatcgctgagatcctcacatcgttgcttcgtatttcatccacacgaatcgttctcaacggccaagagacaacctctaaattttgtgccacaaccaactatggtccaaaggtccagggtgcatatttcaatataagggttgtacgggatggacgttgccccaattgcaatgtttggagcaactttgagcagggcatagtggtcaccccgagtttaaggcatagtggtcaccccaagttaaaatacatggtcgccccggcttgttttgaaatacaggctaggggtaaaactttccggaggtgctctatgttcccaggagttccaacttctgtgccatccatctgggtgtag

SEQ ID NO: 19333 - DNA, 210 bp, Zea mays
  Peptide Sequence Number=SeqID_61112
atggttaaaaactttggcagcaaaacagtgcaaatagcagtaaatgctgtggtaacttcacacctactcgtctgtttatatagtgctgcagaagtcagctttgtcttagtttcaccatatgctttagatgttagcattctgcctctcggggtagatgattcattgggtgcacctaaggtgcacccaatgggtgtagcccctgagctttga

SEQ ID NO: 19334 - DNA, 1986 bp, Zea mays
  Peptide Sequence Number=SeqID_61113
atgagaagattctttttctttgggtcctccgctgcaaatgctggcgacgaaaacgggacaccgggcagtgatagcgggactacgcataaaaagacactggtggcagatgtgggcaacgaaagttctggttcctgcagcacaaggttgtcaagatccagaagccgtggtcaaaagcggaataaggaggaaccagccaatccgaagcagctcaggaggtccatgtcattctcgtctccggccacaaacacttgcttagacgaacgatgctttagtttctctggtgatgttccatgcactttgtatgatggatttgatgcacctcagaatgtcaaagatgttgcgtcaacaagactaagcaatctattaagcaagaatgaagtactagatcgatacattgatagagggcatgaagatgcaatggtaaatgagaaacagaggcagtatccctccgccgcatctatggtttctactttgggaaggccacctcgaccccaatcaacagtaccatccataccaaaatcaatgaaagggaatacagagtgctacccagatgtagacataaaagaagactgcctttggcaagttgctcaagagggtagaaaccacgtaagcatgccagatgcttttgagagagacagtgctacatctgttgtagatatttgtgaagatttgcaagaagtgagacctccaaatgttatttgcccctccgcttgtcctatttcaggggagcaagaaaccaatgacatgttgctgcaaagagctaaagaagttgagtcaaggttcattgttcattgtggagatgaatatgaattcaacattatcagagataagcgaatgagctcaaatgacatgtttcagttgatccagcagttgacagaagataggaaacagttaacgcatgaactgtcttcacatataagagcacacgttgcagaaagatctgctgccaaacagcaatacaaacaatcaaagaaagaactagataccagaactaggaggttggagaaggagaagagtgaaagacaaactacactggagagagagatggacagaaggtcacatgattggtctgtcaaactatcaagatttcaatctgaagaagagagactacatgaacgggtgagagaacttgcagagcagaatgtgtcatttcaaagagaagttgcctttcttgaagcaaataaggctgaagcttcaaccaaagttgctagtttggaattgcaaaacaacaaattaaatgacgatctagagaaacttagaaacgagcatgagaagctccataattcctcagtagataaggatgctcgttttgctgaggttgttgaggaaagggaccacaccagggaatacttgaaggacaaggagggagagaacaaagcattgcacaaagtgattgccagactacaaacaacatgtaatgaacaggaaagagcaatcacaagtctaagacagggatgcaaagctcaattagacaagaaatttgttgagtgtgacagtgataaaatgaggaaattgcgaatggaactgattagactgacaggggtggagcaaaagttgagatgtgaaattcgttcttgtcatcttgaagttgggtccctcagacaagagaacattgcactcttaaatcgtttacaagttgttggaaatggagcacccttctcaattcgccttgaccaagagcttcaggctagagtggacaacctgcaggtgcaaggcttgtcattgcttaataagaccagccaactttgcaccaaattgttggatttgatgaaacacaagaaacttgaaaatgagtctttcagtggcaatgatgtgttgatagtcagtaattacacttttgagtaccaaagcatcaaaggaggaattgaaagtttgaagcgaagtttgaagacaataaattctgtactgaatgaaaagcaaagtgtaaaagaaaaatctggtgagactgcagctagaggtagttcttccagggagcaaacgttgtaa

SEQ ID NO: 19335 - DNA, 210 bp, Zea mays
  Peptide Sequence Number=SeqID_61114
atgactggcagatcttcactggatgttcttcttgtggatggggaattgaagaaaccttacaatgatgttgcattcctcaacgatggcaccgggcaccagctgcccctgttcgacgtcgccgggtaccggagccctagcggcgcaaggggagacgtctgcttcttccggtacggcctcaaggcacctgggccaacgacgacaacggcatag

SEQ ID NO: 19336 - DNA, 660 bp, Zea mays
  Peptide Sequence Number=SeqID_61115
atggccaaaaagcacgaggcccgtgagctcgacacgaagcccgctttttgggcccgcccgcttttcggcccgttttttcgtgctaaacgggccgacccgctgcgggccgggcttaacagaaaattaagtccgctggctcagcaggcccggcccggtttttggccgggcttcaccgggcctgggccgggccgggcggcccgtttggccatctctacaggcattgggtcactgacttctgggctcctggcccatacaagaatagtcctctgtaccttcaactgtgaccgtcgctgccgacgtcatcgagcgaaagtcgactggagagtagagacctggacccaacgaggcccatcagctacgcgctttctcgtcttcttcgactctttcctgaagcctgctggccgtggccgccatatcaaccgccgagatgacgatgacgccaatgacggtctggcacttgcagtcaccgttgtggcctgtgagcttgtccgaagattggaaaagcacaaactgttcaggatccgaacagattcggtggtgcggctcttgttaatcgcatgtggcatcggcgtgcaatcaaagagcagaattatccgtgtcttggctctccagtcctctaagctgtttgcgcagtacccgacgtcgtgggtgctcatgtag

SEQ ID NO: 19337 - DNA, 648 bp, Zea mays
  Peptide Sequence Number=SeqID_61116
atggttggaggagctttggcagacaaatatggcgggaagaaggtgatggcaggtgctgctgcactctggtccttggccacaattctcactccttgggctgcctcccactccaccctcatgttgcttgttgtactgctctttggccttgcagaaggtgttgcgtttccgacaatgagcactttcctaccaaagtggttcccaacacatgagcgtgccactgttgttgccatttccatgggtggattccatcttggaaatgtcataagcttcctagcaacaccgatcatcatgtcacacataggcccctcgggaacattcaccttcttcgcgtcacttggttatttgtggctctctatatggatggtgaacgtagaaagtgatcctattgacagccgtactataagcaagtctgagttgcaattaattctagatgggagaattggatctaaagtccaaggcagtaaattcccatccgtaagggaattgttctcaaagactcaattcttggctgtcactttggccaatgtggtcaacaactggggctattttgtcctattgtcatggatgcccgtgtatttcaaaatggtttataacgtcaatatgaaacaagcagcgtggtttagtactatgagtagaatcaggcactga

SEQ ID NO: 19338 - DNA, 960 bp, Zea mays
  Peptide Sequence Number=SeqID_61117
atgggcatcatccaatggaagtcgtatgggaattttgctttcggaattggcacgattttctcccaaacactgagactgtacctgtcaatcgactgcccccgccatccacttcgcatgccgaaaaccccaaccgccgccccaccgccccgaaggccgcgaaccccgcgcgcgattcaccgcgaactccgcctgcacgcccgcgtgccgaaacccccagccgccatccctccggccgcgaaccccgcgcgcgattcgccgcgatccccgcctgcacgcccgcgtgccgaaaaccccagccgccatgcctccggccgcgaacgccagcgcgccccgacagccgccatccccggcgcggacaagcccgtcgcgccgcgcgccgccgccgcccgcacgctcgggatcaagaaggcgctcgtcttctatgccggcaaggcgccgcgtggggtcaagacggactggatcatgcacgagtacaggctcgctgacgccggccgccgcgccaagaaggggtcgctcaggttggatgactgggtgctgtgccggctgtacaacaagaagaacgagtgggagaagatgcggctggggaagggggcagtcgtcggcgcagccaaagaggaggaggccatggacatgagcacctcccactcgcagacccactcgtgggtcgagacgcgcacgccggagtcggagatcgtggacaacgacccgccgttccctgattcgccggcgccggcacccgcgatgatggtgcccaagaaggagcgggtggacgacggcggcagcgccaggaccagcgacctgttcgtggatctcagctacgacgacatccagggcatgtacagcggcctcgacatgctgccgccggccggcgaggacttgtactcctcgctcttcgcgtcgcccagggtcagggggaaccagcccaccggagccacggggttgggcttgggccccttctga

SEQ ID NO: 19339 - DNA, 1611 bp, Zea mays
  Peptide Sequence Number=SeqID_61118
atggggagcacgagcagcgcggcgcagcggcgtaggcggcaatggacgttagcactggtgaccgcggcggcgctgctggagctcgcggacgaggcgctgctccccgcggtgtacagggaggtaggcgaggcgctggccgcgtcgcccacagcgctgggctccctcacgctgtgccgcgcgctcgtgcaggccgtgtgctacccgctcgcgacgtgcgccgcggcgcgctacgaccgagcgcgcgtcgtcgccgcaggggcattcctctgggccgtggccacactgctcgtcggcgcctcgggcacatttctccaggtcagtgactgccgtgccagatggcgttggccaggggcttcaacggcgtcggtctggcgctcgttgtgccgggcgatctactccctggtggccgactacagcgacgacggcacgcgtggctcagcgttcgcgtgggtgttgatggcgcaatgcatgggccaagtcgcggggaactccctcggcgtgctgctagcggctacgagcttcctcggcgtcccaggctggcggctggcgttctacgccctcgcgctcgtcagcgcatcgatcgccgccctaacgtgggtcctcggcgccgacccccgccctgtctgcgtgaagtccacggttgcggccacgctggcccaactcgccggagaagccaaggacgtggtgaaggtgccgacgttccagatcatcgtggcgcagggcgtggctgggacggtgccgtcgtcggcgctcagcttcgccgccatgtggctagaactcgtcgggttcacgcactggcagaccaccgtgatcaccaacctgaacagcctcgccaacgcgctcggcgcgctgttcgcggggttcgtcggggacccactggcgctgcggttccccaacacggccaggatcgctcttgcgcaggtgtgcaccgcgtcgaccatcccgctcgccgccgtcctgctgctcgcgctccccgtcaacccctctgcgggggccgcgtacgccgccacattcttcatcttcggcttcgtcgcgccctggtgccccgtctccacaaacaactaccagaggcccccatcgcctaagtgtcggagtgtccggaaacgctacaaccaacggcagctcggattcgatgcgtgctgtttctctgcaggacaacaatatgaagacagcaactacaactctccaacaataagcccaatttttgcagagatcgtgccggagaaggcgaggacgacagtgtacgcactggacaggtgcttcgagtcggtgttcgcctcgttcgcgccgcccctcgtgggcatcctggccgagcacgtcttcgggtaccaaccggccgcggccggcacgagcgtggaggctgacagggagaacgccgccgctctcggcaaggcggtcttcgcagaaatcgccgtgccgattgccgtctgttgcctcacctacaccgcgttgtactggacttaccccgcggacagacagcgcgcgcagatggcctctctgcaggcggctgcgggggatcacgactgcgattgcgaagcaactttagttgcccatgctgcaggagtcgagggcatgaaccagacactacttgccgggacaagaacggagtaa

SEQ ID NO: 19340 - DNA, 555 bp, Zea mays
  Peptide Sequence Number=SeqID_61119
atggagtactttgacagtaaagtttttctatatgatgattttggactcaagctgaaagaagaggctatgctcagtagagtattaaaggaggcactcttgtcaaaggaacttgacaatgggcaattggagtctgatctgtcatcttcacttcgtatccaagatgttatgagaaatgagacccagagagttcaggatgaactttcttgcatcacccacaaggctaagcagttagagcttcaggtatccaagaaggatgaagcgatcaatgagctccaacaggacttgcaggaatctgccaaggagcttgcgtctctacgcggaacactgaaaacagtgactgaggagagggacctttcctggcaggaatccaagcagctcagacgaaacatcaacatcatgcagaacgaggtcgtgtcactgaagaagaagattgaagccttggacgaagacatactcctcaaggaagggcagataacaatactgcaggatagcatcgacaagccgttcgacatcatttgcagccctaggtccatgagagagtttgacatggagtga

SEQ ID NO: 19341 - DNA, 603 bp, Zea mays
  Peptide Sequence Number=SeqID_61120
atgaagtctcggcaccgcccgcttcgtgcggacctcctgcccaccgcgctggcgcggtactcgaccgcgacccgcctcgacctgaccctatgcatgcgtgtccccgacaccgccctcgcctcggccgtcgtctccgccctccacgtcgtcaacctctcctactcccacgggttcggcgccgcgggcgtctccgagctcgccatcgcctacccgggcctcatcgacctcgacctctccaatgtggtcgacctcggggacgctgcggcgaccgaggtggcgtgggccaggtcgctcaccgacatgggcctcggatgtgtcgccgtcgggtgcacggagccgagggagctctcgctcaagtggtgccttgggctcacggatctggggatccagatcctcgccctcaagtgcaggaagctcaccagcctggatctctcctacaccatggcgatttcagatcggatgaggaaagggatcgaggaaggtggtgacacgcatgctcgtcctcgccatcatggtggttttgaacatgaaatgagcgaagcagagggagcgggcgaactgtgggcgaaggtcgtcgccgcgcagctcgctcggaagttgtag

SEQ ID NO: 19342 - DNA, 264 bp, Zea mays
  Peptide Sequence Number=SeqID_61121
atggctctcagcccccttacggaagcaaggagacgtcagcaaggactcgacagccccgacaacggtccttctgcaaggctccagtgctcctccgacggccacgacatcacacgaacagggtgccaaaacctctccggctgccacgacggcatggaccccccggggtcgaatcgccgacactacagtttgagactacctagtactagactgggacctggacctgcacacatcttcggctttgaagtgttaggagtacacccatag

SEQ ID NO: 19343 - DNA, 528 bp, Zea mays
  Peptide Sequence Number=SeqID_61122
atggaaattaagtacttgaatgtgcataaaggttcaacacaaaccaataaaagatcaaaattagggttcaaaagaaaggagcaaaagaaaccgaagagaaccctggtctggtgcataggactgtctggtgtgccaccggacagtgtcttgtgcaccagggctgaacgacttcaaactcttcaccttcaggtttctgaggccgcgctccgctataattcaccggactatccggtgtgccaccggactgtccggtgcaccagcggagcaacggttccaagcgcaacggtctcctgcagagctacagtgcacggacagttcgcacagaagtcagagcagctgccaaaggcacaccggacaatgaacagtacctatctggtgaggcaccagactgtccggtcacacaagaagacaaagctccaatggtcaaaccctaacggttgggtgacgtggctggcgcaccagacagtgtccggtggcgcaccagattgtccggtgtgcccatcgacagcagcctgccccaacggttga

SEQ ID NO: 19344 - DNA, 1932 bp, Zea mays
  Peptide Sequence Number=SeqID_61123
atggattatccgaagcttgagattggtctgtctgtaatgatgagggaccaacttgcagatagcctcgcctacaacaacatgaagtccggtggaggtacacttccaattacagcaaggacactggaaaccataattcgtctatcgacagctcatgccaagatgaaactgaggcatgaggttctgaaatccgatgttgaggctgcattgcaagttctaaattttgcaatataccacaaggaattgactgagatggaagagagagaacagagagaaatggagatgaaacagcaagctgccctcccacctgccatggagaagtttgacgtcacaccatcgccggcaccggcggcagggcagccacgagcgctgccgctcacgttctacgacctcgttttcttggccatcccgcccgtacaacgcctgttcttctacgacagggccgacctgctcgacgtctccgacttcacgctgggcgagctgccacgattcagggactccctcgccgccgcgctacaccacttctacccgttggcggggaagctaacgtgcgagctggtcgacgaggaggccgccgcgccgccgaagggaccgagggaccagggagcgccgggaggaggaggagggatcgagggagcatggagcgccggccgagtgccgcgcccgacaccgagtcgccgacgccgcgagacagagagccgcggccgccgcacggagacgcaggtcccaggtgcatttgttgaacgggccggtttaaaagcccggctgataacgggccgtgctcgggctagcccaacgggctcaaattcctgtcgagcccggcacgctatccgggccgggctaagcccgggcccgcttccttccgtgccgggccgggctcgtgtcgtgctaaaaaatcgtgctttgtgccgggctaacgggccacgtgctttttggacatctatacgtggagccctcctcaagcacaaggctggtggcatgaggaagaatcacgacggtcgacggttccatgtccatgacgacaccgtcgtcgccatctgcatggagatggtcctccgtgctcttcacgcttttcctcaaagccgtgttggcaaggagaaagaggaagagctaaacaaactcatggaggccttgcacgtcgcagaccttcccaatcgggtgatgaccttctgctacagcgagctgaccacggaagagaagagctgcctgcagtacctggctgccttccgactcgaaacaagcatcagcaggacaagcttggtccggcgcattgcagcggaacggctcgtgaaagaggacaaggagcaccagctaagcatggagcagagtgccgagagatgcttcgaggagcttctctttcggggattcatctccgctgatgccaccggcgccgccggcaaagtcaagtgctgccggttcaggagtgaatcggtcaagcaattcatcgtggacatgtgcaaggccgagaactttgtgggtggcggcttgccggttcaccttcgaatccagaatgacattcgttctgcggcgttggaaggcaagcagcagcacgatgatcccgtcaacaagatgctacgagagctggacttgctcccaaaaagctatcgtctcaacgtcatggatctgggaggctccatgggaatactgaagaagagccacctggcaaacatctgcaagttacggacactcaagtacctcagcctccggtatacggatgttcgtagcctacccagtcaactccaggagctccgtctgctggagacgctggacattcggcacaccaatataccacgtggctcccgcaacactcaagcacttcttccacccagcctcaagcatcttctagccggcaacgtcgactctcagggtgacgcccccaacgccacagtgagaatgcctgacagtatccaggaaatgccatgcctggagcagtag

SEQ ID NO: 19345 - DNA, 408 bp, Zea mays
  Peptide Sequence Number=SeqID_61124
atgaatgagtttgaggttttccatgataagggtacaaatagatggactgttgtcggggctggaatccagtgttttgtccagatgactaactggcagtactcggattccttgaaaaggtttcagcatgccctagaggcatgtggcatgaaccgggctcttacgaaagagggagttaaggagggtgatacagtgataatcggcgaggcaaaacgtgacgagctgcttcagtttgctcggatgaaagggagcactgacacacaatctatttataatgttgatttgtttctcctagatgtaggggtggttatagctcagcaatgtttggaggccttggtttacttgcaccgtctaaggatcattcattgtgacctaaagccggaaaatattcttatcaagagctacaattga

SEQ ID NO: 19346 - DNA, 894 bp, Zea mays
  Peptide Sequence Number=SeqID_61125
atggctccggccgttgccgcggcggcgtcggcggcgatgaggcaggcactgcgggaccggcagatcctcgatgccgtgggcactggcgctgcggcgctctcgctggcaggctcctccttcatcgtgatctgctacctcctcttccgcgagctccgcaagttctccttcaagctcgtcttctacctagccgtctcggatatgttttgcagcttattcactatattgggggggccatcgaatgcattttactgctttgcacatgactacagtgctcatttcttctgtgtggcttcttttctatggacaaccaccatatcattcactctgcatcgcacagttgtaaaacacaaaactgatgttgaagaatttggatctattttccacttatatgtgtggggtaggcatactccatttttaacagtcctacatttaataaccttttatcttccactttggggtgccattttgtacaatgggtttacatactatgaagtaaaccgcatgctgaataatgcaacgcagatggctgctggcataagtgatcaatcaaatcagtctgacattagggcaggcaggaaggcatttaaccgatggggttattaccctctaattctaatcggttcatgggcgtttgcaactatcaatcgtctttatgactttgccaatccagggcacaggatagtctggctctcgtttcttgatgttgggttcgctggacttatgggcctattcaattccattgcttatgggctaaactcttctgtgcgccgagctattgcagagagaatcgacacgttcctacctgagagaataaaaaggagcctccctgctttgtcaaggctgaggagtcaacaggaaaatgaactcacttctcttatcgttgagggtaactga

SEQ ID NO: 19347 - DNA, 1614 bp, Zea mays
  Peptide Sequence Number=SeqID_61126
atgcagagcctcctcctgcccaccgctgccgtggccccggtggcgcctccgtgcggaaggcggaatctcccgggacgcctctccgtccgcgcctccgcgacggtggtagcggcaccgcggcgggagacggatcccaagaagcgggtggtgatcacggggatggggctggtctccgttttcgggaacgatgtagacgcttactacgaccgcctgctagtcggggagagcggcatcgggcccatcgaccgcttcgacgcttctaagttccccacccgctttgccggtcagatccggggcttctcctccgagggatacatcgacggaaagaacgaccgccgccttgatgattgcctccgatactgcatcgtcagtggcaagaaggctctcgaggcctccggtatcgcccacggctccaagcccatggaaaaggtagctagcactggaaacacacctcggattgcttttgttttaaatgctgatttttactgtcagattgacaagacccgggccggtgtgcttgtgggcactggtatgggtggcctcacggtgttttcggatggtgtccagaatctcattgagaagggatacagaaagataactcctttcttcatcccatatgctatcacaaacatgggttctgccctgcttggaatggacattggtttcatgggtccaaattactccatctcaactgcctgtgctacctcgaactactgtttctatgctgcagcaaaccatatccgtagaggcgaagctgatataatgatagctggtggcactgaagctgcaattattccaattggtgttggtggctttgttgcatgtagagcactgtcacagaggaatgatgaccctaaaacagcatccaggccttgggacaaggatcgtgatggttttgtcatgggtgaaggagctggagtcctggtcatggagagcctagagcatgcaatgaaacgtgatgcaccaataattgcggagtatttaggaggtgctgtgaactgtgatgcttaccatatgactgatccgagatctgatggtcttggtgtttcatcttgcatcaagcaaagccttaaagatgctggtgtggcgcctgaggaggtcaactatattaatgctcatgcaacatcaacccttgctggtgatctggcagaggtgaatgccatcaagcaagtcttcaaggacccatctgggattaaaataaatgcaaccaagtccatgataggacattgccttggcgcagcaggcggtttggaagccattgctactattaaagcgataactactggatgggtgcatccaagcataaaccaatttaacccagaggaagcagttgaatttgacactgtacctaatgctttgcaactcaaccttgttggtgagaggggccatcatcattatagcattcgtgctcttgtctctgatctcaatatcgcgctggtgcaccatgaaaccaaggaactagcatgcaatcagcctacattcacaattcttagggttcattttcaaaccatggagtctagttctagtgtacttggcaaagatcagctaagtgtgtcgcttgaaaatagatttcaccatgatgtcatcgatgtagacttccaccaatcaacctag

SEQ ID NO: 19348 - DNA, 330 bp, Zea mays
  Peptide Sequence Number=SeqID_61127
atgggcgtggtcgaccagaggatgagacccgctgcaggtgaaccaggactactggatctagacgagggtgcgtcgccgatgaacgaggatgaggatgaggatgaggcccgtgagtgggtgaggtgccgtcgtgtcgaagttggtcggtggatgaaccaggatgcgccgttgtcgcctagatggaatgaagctgcgtctgcgagagattacctgattagggttcgtggctgtggcttcgtgctcgtgccacagcatatgcggctggccgatgcgatgcccgctccgcggctcttatacccactccacttccaccacagcagcccagcctag

SEQ ID NO: 19349 - DNA, 507 bp, Zea mays
  Peptide Sequence Number=SeqID_61128
atgtccggtgcaccagaggactccgacttcaaagtcttcgctctcgggaatttccggaggccactccgctataattcaccggactgtccggtgtgcaccggacatgtccggtgctccaaggaagggcggcctccggaactcgccagcctcgcgttttcacttcagccgctccgctataattcaccggactgtccggtgtgcaccggactgtccggtgcatctgcggagcaacgactacttcaggcgccaacggctacctgcagcgcatttattgcgcgccagcgcgcgcagaggtcaggcacgcccatgctggcgcatcggacaccctacagtacatgtccggtgcgccaccggacatcaaggcgggcccagaagtcagaactccaacggtcgatccaacggctacttggtgacgtggctgtcgcaccggacatgtccggtgtgcaccggactgtccggtgcaccatacgacagacagctccaccaacagtcaagtttgggggttga

SEQ ID NO: 19350 - DNA, 1683 bp, Zea mays
  Peptide Sequence Number=SeqID_61129
atgtcgtcgcgagcgccagcagcgccgacgacgaccgtggttcgcgcggcgggcacggaccacctgtgggcgaaggcggccgagctggagcgggacttcgcggggtacaagcggcgtctcgccgagaggagggcgcatgacgccgtcgccgaagtcgcgcgcgcggaggaggcacgcggcggggacgacgcggccgggaggggcagaaggtacgaggagtacgtgaggaggagggacgagcggctgcgccaggagtggcgcgcgcgcatggagcgcaaggaggccgaggtgcaggcgctctgggcgcgcctcgaccgcgccggctcgcgcggccggcgtggcggggacggcgagctcgcggcagccaccgccaccggtcacgccagagaggatcaagttaagccgccgcagaagcccggcggtaacttggtggtgaaagtgaagccatccacccctatccctgtgacgccacggggcaacctgggccagccgccggccgcgaagcccgcacggccccggaccagtgtgccgtcgtcgctggcggcaggcagcccgaggctgtccacccccgaccccaggctgcgtccgtcgtcgcacctgcaacgggagctgcggcaagcgcaaccacagccacccgccacgccacggaaggagaacaggctgccgccgccgccgtccaccgcggcatcaccggccacgcccaggccgaggacgacgatgctgtcacggagcaggagcatgttcaaggaccgcggctgctcctctgtcgccgtcgccgtcggcgagagccccaggccgtcgcggttccagccccctcggtcgagctacgaaggtgccagcaacctcaagaaaccggctccttcctgttccagggaccaggcggttgtcgccgatcgcaggaaggcatcgtctgccgtcgcccccgagccgtttctcgttaaagcatcacgcgacgacatgccagcgcctctggtgttggtggcttcgaaggagagggacctaccttaccgcagcggcgcgatctcgccggccggctgtgcaaacgaggacagtaagagcaacgtccaagagcacgtcgatcgatcaccggacaagttcgggagcgaagagatcaccggagactctgacaccgagccgagctacgtgtacgtcaagaaggacagcgacgagcaaatcccggggcctcctcctcccgaaaccccagcagcagcagcagcagcagctgacgacgcggaagaagagttccgaagggagagctctgagtctctgtactcgaacgtccagtcctcattctccccgagatccgagctcgctagcgctgcatcgtcggccaccaccggctcctccccgcgccccagcgccaccgcgcagtcgccggaggccagcgtctcaccacggccaaggaagagcgcggaagcggaggagggtgccgagaagcgagtgccagctccgaccacgaccccgaggagcagtgcgcagtcaccgatggacgccgtcaacgggctcaagcggctgctaacgttcgggaagagaagcggcaacggcaaggccagcgaggcagcggcggctccacgtgctcccccggctcgtgatggtgattcctccacccttctggacaacagctacgtcatctccccgaacggtaattcctccacccttctgggcatcagattcagatgctga

SEQ ID NO: 19351 - DNA, 1683 bp, Zea mays
  Peptide Sequence Number=SeqID_61130
atggtggccggctactgccgcgcgggccagctcgaatccgcgcgccgccttgccgctgcggtccccgtcccgcccaacgcctacacctacttccccgtcgtccgcgccctctgcgcgcggggccggatcgctgacgcgctcgcggtgctcgacgagatgccccgccgcggctgcgcccccatcccgcccatgtaccacgtcatcctcgaggccgcctgcaggggtggcggcttccggagcgccgtcagggtgctcgaggatctacacgccaggggctgcgccctcgacgtcggcaactgcaacctcgtcctcaacgccatctgcgaccaagggtcggtggacgaggccctccacctgctgcgggacctgccgtccttcggctgcgagccagacgtggtgagctacaacgcggtgctcaagggcctgtgcatggccaagcgctggggctgtgtccaggaactcatggaggagatggtcaggatggcttgcccgcccaacatcgttaccttcaacaccctcatcagttacttgtgtcggaacggcttgttcgagcgggtgcatgaggtcctcgcgcagatggtggagcatgggtgcacgccggacatcaggatgtatgccactatcatcgatggtatctgcaaggaagggcatctcgaagtcgcgcatgagattttgaataggatgccttcctacgggctcaagcccaatgtggtttgctacaatactctgctgaagggcttgtgcagcgctgagaggtgggaggaaaccgaggagttgctggctgagatgtttgacaaggattgcccacttgatgatgtcacattcaacatacttgttgatttcttctgccaaaatgggctggtggaccgggtgatcgaactactcgagcagatgctggagcatggatgcatgcccgatgtcatcacatacactacagtgatcaatggcttctgcaaagaagggcttattgatgaagctgtcatgttgttgaaaagtatgactgcttgtggctgcaagccaaataccataagctatactattgtgctcaagggtttgtgcagcgcagaacgatgggtggatgctgaggacctgatgtctcagatgattcagcaaggctgtcctctgaatcctatcacattcaacacactcatcaatttcttgtgtaaaaagggattggttgagcaggccattgaacttcttaagcagatgctagtgaatggatgcagtcccgacctgattagctacagcacagtgatcgatggacttggcaaggctggcaagacggacgaagcactggagctgttaaatgtgatggtcaacaaagggatgagcccaaacacaatcatttattcgtcgatagcttctgctctctccagagaaggcagaattaacaaagtaattcaaatgtttgataacatccaagataccacaataaggtccgatgcagtgctctacaatgcagttatttcttcgctttgcaaaagaggggaaactgaacgtgctattgagtttttggcatatatggtgtccagtggatgcgtgcccaatgaatcgacctacactatacttattcgaggtttagcaagtgagggatttgtaaaggaggcacaagagatgttgactgagttgtgctccaaaggtgctctaagaaagcacttgatgaagcattttggtattgtatga

SEQ ID NO: 19352 - DNA, 270 bp, Zea mays
  Peptide Sequence Number=SeqID_61131
atggtctcccattccggttatggtgggtacaagtgcggtcactgcacgacggcagtcggggtcagtgaggcattgtacgccaaggcggtgagccctgatcagttgccagggaatcgatggggacggttgatgtgtgtggggatggagtgcccctacatgtcgtgttctctggaggacatggttgctggagtgacttggccgtccatcttgccaccgggttggactgtcgagtgggaccctacctcggctgaggaggagcatgaggagtga

SEQ ID NO: 19353 - DNA, 318 bp, Zea mays
  Peptide Sequence Number=SeqID_61132
atgcccagcctgagctaccccctacgcgccggccctcttctctctccccctcaatccagcggttcactgttcatcccctccggcactgtactatgggtccacgagccacccaaggcgcctttagtcgatgtagagccgaagagatgtgaggattcgaggtggaggaagcctaaactagggctactcctaatgcataagatggtctgtgtcgctacgacggataatctggactgtgaatcttccgacctcaaggccggaccgttcgccaggacaattttggtgctcaacatatgccccctaccttttgatgaaggttga

SEQ ID NO: 19354 - DNA, 414 bp, Zea mays
  Peptide Sequence Number=SeqID_61133
atggcaattgctctgttaatccagcctctcaagggcactgtacggggcgagattggcgaaggcatcgagcaaagggtagcgtcttcgccttcgccccaacaattagattgggcggaggcgggcggcgccacccgcgtccgcgacagtgagctcgccggagacgaggggagcgagcgctctggggtcttagggcagctagaatggcctaggaagattggggagggagcggggaacacaatggtgggggctaaaccaagcggcgtcaacagcacgacggtggctcgggtccatgacagtggcaccggggactacgtggaggacggcagggcgcgcgggcggacggttggaggggacggagctgacgggtgggtcggggtgtcagcaactggtgcgggcgcagtcaacgagcactga

SEQ ID NO: 19355 - DNA, 492 bp, Zea mays
  Peptide Sequence Number=SeqID_61134
atgagctcaaaggttgttcttccaccatgcggggaagacgtcgtcgattccaccgccgcaggcccctacctggcgcgccaactgtcggcgtttcgagaccggggggtccctgggccgacgagtgaatgtcgccgcgtgccccagctcagatgggtcgagcgcgagggcgagcgcgaaggggggagagcgaggcggccggagaccggcgtgagagaggtgggaatcccgcggccttcgtgttcgtcccacgcccaggtcagggcgatgatggcacctcctgttgacgtggctggtctgcgccctaggttgggcgatgtggaagctcctccgaagccgaggtcgagtctgtcttccgtggccgaggtcgagtccgagcccctgggtcgggcgaggcggaggccgtcggctgaggccagggcggagtccgagccctggggtcgggcgaagcggagttcgtcgtcttctggggctgagcccgagtccgagccctag

SEQ ID NO: 19356 - DNA, 1434 bp, Zea mays
  Peptide Sequence Number=SeqID_61135
atgggaaggaaaggctcagaaatgtcaccaagtaaaaggtatcccttgaggtctccacatagtagtggtagagttcttcgctctgccttagccaatgataataaggacagtgagcctctgaatgctgctgctgctacccaagccgctgtgaaaaaaagaagtggcagtcagttggatagtcctaatagcagtgtcaggttgtttcactctacatcaaaaaataagaacgaggcatgtagcgggcctctaaatgacaggatccctgataagccagctgcaaataaaagaaaacgtgccagtccttcacaggtgggaagttccagcaacagtgtcagggtgcttcgctctgcaataaaaaataaagatgaggcatgcagtaaatctctaagtgacaggaccgctggtgagccagctgcaaataaaagaaaaaacgtcaatcgctcaaagacggggagtctgagctgtggtgtcagggtgcttctatctgcttcaaaagctaaggatgagacatctaccaagcctttaaatgatagtgctgctgttgaacccagcttcagtggtgctgttgaaccagctgcaaataaaaggaaaggtgtcagtcgttcaaagaagagaagtctcaatagcagtgtcagggtgcttcgctctgcctcaaataataagattgaggtatctattaagcctctaggtaatagtactgctggccaaccagctgcgaaaagaagaaaaagcggcagttccttcgaggcaggaagccctgtgagcagtgccagggtgcttcgctctacctcagaaaggaagaatgaggcatctaagcctttaaatgaaagtactgctgctcaaccagctgcgaggaaaaaaaaagctggggtaatttcaaagaccgacaatccaaagattggtctcagggttcttcgctctgcctcaggaaagaagaatgaagcatgtattgggcatgtaaatgatagtacttctgctgaaccaactgtgacaaaaagaaaccgcaagccttcaatggatcgcagtcccaagaaggactacttaaaaatttgtcaaagagttagatatattttgaatcgaatgaactatcaacaaacctttattcaagcttatgcaagtgaagggttggaaaggccaaagggtgtacctccgggggatcaaagatggctttgccctgcatgtgtctgcaaagcagactctatagatgcactaaatgaacttcaaggaagcaagctctccattcatgactcatgggagaaagttttccctgaggcagcttcaattgccaacggttctaaacaagttgatacttctgatctgctgccagatcatataaagcacagtgacaaccctgcattggttgaagggctgatggtgaatgaagtcaggctttctgcagaggatgacagcaaaggtcagattcttatgtcttag

SEQ ID NO: 19357 - DNA, 228 bp, Zea mays
  Peptide Sequence Number=SeqID_61136
atggacaagggtttgcactcaatccctttcaagcgatccaatgatccacttgaataccacgattttcttccttatagcagatgttccctttgtgaagaatcttcacaagttggagtctctcacccttacaatattgatcacaatgaaaaccacaagagatcacctattcacccccctctaggtgctctcaattggtatcaaagcaattctcttcatctaagggactaa

SEQ ID NO: 19358 - DNA, 2325 bp, Zea mays
  Peptide Sequence Number=SeqID_61137
cttgtcaagcaggataagtctgaaacccaagggaccctcaagcgcttcctcaggagagctcaaaatgagtttgagctcaaggtgaaaaagataaggagcgacaacgggtccgagttcaagaaccttcaagtggaggagttccttgaggaggaagggatcaagcacgagttctccgctccttatacaccacagcaaaatggtgtggtagagaggaagaacaggacgctaatcgacatggcgaggactatgcttggagagttcaagacccccgagcgtttttggtcggaagccgtgaacacggcttgccacgccatcaacagggtctaccttcaccgcctcctcaagaagacatcatatgagcttctaaccggtaacaaacccaatgtatcgtactttcgtgtatttgggagcaagtgctacattctagtaaagaagggtagaaattcaaaatttgctcccaaagctgtagaagggtttttgttaggttatgactcaaatacaaaggcgtatagagtcttcaacaaatcatcaggtttggttgaagtctctagcgacgttgtatttgatgagactaatggctctccaagagagcaagttgttgattgtgatgatgtagatgaagaagatgttccgacggccgctatacgaaccatggcgattggagaagtgcggccacaggaacaagatgaacgagttcaaccatcttcctcaactatggtgctacccccaactcaagacgatgaacaggttcatcaacaggaggcgtgtgatcaagggggagcacaagatgatcatgtgatagaagaagatgcgcaaccggcacctccaacccaagttcgagcgataattcaaagggatcatcccgtcgaccaaattctgggtgacattagcaagggagtaactactcgttctcgattagttaatttttgtgagcattactcctttgtctcctctattgagcctttcagggtagaggaggccttgctagatccggactgggtgttggccatgcaggaggagctcaacaacttcaagcgcaatgaagtttggacactggtgcctcgtcccaagcaaaatgttgtgggaaccaagtgggtgtttcgcaacaaacaagacgagcacggggtggtgacaaggaacaaggctagacttgtggcaaaaggttatgcccaagtcgcaggtttggactttgaggagacctttgctcctgtggctaggctagagtctattcgtatcttgctagcatatgccgctcaccactctttcaggttgttccaaatggatgtgaagagcgctttcctcaatgggccgatcaaggaagaggtgtacgtggagcaaccccctggcttcgaggatgaacggtaccccgaccacgtgtgtaagctctctaaggcgctctatggacttaagcaagccccaagagcatggtatgaatgccttagagatttcttaattgctaatgctttcaaggttgggaaagccgatccaactctttttactaagacttgtaatggtgatttgtttgtgtgccaaatttacgtcgatgacataatatttggttcgactaaccaaaagtcctgtgaagagtttagcagggtgatgacgcagaaattcgagatgtcgatgatgggtgagttgaactacttccttgggttccaagtgaagcaactcaaggacggcactttcatctcccaaacgaagtacacgcaagacttgctaaagaggtttgggatgaaggacgccaagcctgcaaagacgccgatgggaaccgacggacacacagacctcaacaaaggagttgctacgccttgcttcgggctctggtatccaaaggggtctacctttgacttggttggatactcagactccgactatgctggatgtaaggtcgataggaaaagtacatcggggacgtgccaattcttaggaaggtccctggtgtcatggaattctaagaaacaaacctccgttgccctatccaccgctgaggccgagtatgttgccgcaggacagtgttgcgcgcaactactttggatgaggcaaaccctccgggactttggctacaatctgagaaaagtcccactcctatgtgataatgagagtgctatccgcatggcggaaaatcctgttgaacacagccgcacaaagcacatagacatccggcatcactttttgagagaccaccagcaaaagggcgatatcgaagtgtttcatgttagcaccgagaaccagctagccgatatcttcactaagcctctagatgagaagaccttttgcaggttgcgtagtgagctaaatgtcttagattcgcggaacctggattga

SEQ ID NO: 19359 - DNA, 312 bp, Zea mays
  Peptide Sequence Number=SeqID_61138
atggtttatcgtgtatgggagaggagacgtgtccggacccctatagccgcttctggtgacgttgggcgtccttttgtcgatgctatcaagggcgaggccatgctcgggcgagacgtaagtcgtaccgaggccatgaccgagcctgctctagggcatgcagtcatgcagggaacagttaaaggagtggcctcctatgggattcgtggggagttgttgccggggcagttggttgaagccaggctcaggcgagacgaagttttctctgaggctgaggctgaatgcaggcgaggcggagtttcctcccgagggtga

SEQ ID NO: 19360 - DNA, 342 bp, Zea mays
  Peptide Sequence Number=SeqID_61139
atggcccctaagagagcgaattcgaaggctgctccatccattgacgacgcggcgaaggcagcactactggcggaaaagaaaggcaaggccctcgcggacaccatcccccaagaggcctttgaagatgacgtcgtcaacagcaaaagacagcgccaagaccaccccaccctagacggcactatacgcacctgcagttcggagaggcgcaccacaagcaccaccaccagacttcgctccaccagagggcgaacacaccataggggacgaaaagtcaccgggattctcaaccgaaaaccagctaagttgcgagctctgcgctttcaaaaacgtccacctgcttaa

SEQ ID NO: 19361 - DNA, 432 bp, Zea mays
  Peptide Sequence Number=SeqID_61140
atggaggggctgaacagggggaaaggtggggatgacgtggcggcggacgcgggtatcccggcggcgggcacagtgatgtctggcatacggtggccggggagaggacctacgcgcgaggcccgcatggtagtcgccgccggcgagagccccctgatccacttctcgcgtcgctctcccgtcgcccccggcaagctcgccttctgcaattgccactccgcgctgcttacgatgtcaagccagccaccatccacccgtacatcgcctgacactaaggtgccgaggaccggggagctggccctgaggagggcgatccccgctaacccgaacatgaaggccatacaggaatcgctggaggatatttcgtacttgttgaggataccgcagaggaagccgtacggttccatggagggcgatgtgaagaagtccatgaaa

SEQ ID NO: 19362 - DNA, 156 bp, Zea mays
  Peptide Sequence Number=SeqID_61141
atggcaattgcttctgcttctggcaatcacgaaaatggagttgatggtctttcttcagtaaaaacagtgctggattttaacttccgaagtgtgaatgatctactaagggagaggacagcaaagccagctaatctcgctatccaagaaatcggctag

SEQ ID NO: 19363 - DNA, 195 bp, Zea mays
  Peptide Sequence Number=SeqID_61142
atggcagaagaccttgagaggtgcagtgtagagtgggctagagctattggatctgatgaccacgttccaggaagcgagatccttcacagaaacatcgaaagggagagctgcatttcattaaataagaaggtgaaccccaaaatggggcggtacaaaagtggggtggcattttacggcggccaacgccttacatag

SEQ ID NO: 19364 - DNA, 570 bp, Zea mays
  Peptide Sequence Number=SeqID_61143
atgtcgcaaacatgtgggaaaaatgccaacttgcattcgaaaggtggcctcagaggtgggggcaaccaaagggatacttggtcgtggaacaagagtgtggacaacatagagaagtacaatgtagcaaaaaagatcgcaaaggcgcgcgccacctatcggaggtgtgagtacccgcgcatcctgcccggattaaacgcaggtggccccatatcagaggcttacatcaggttccactcgacggcttacgtcacgtgccataggacatgtggcagcaccgggtttccacctcgagctgggggttcgaaaggtgcttggaggagtccgggtccctccggcaccggcctggacacgtggcagtcccgaaccccttttaggtcagaggtccggatgccacatgcgggtgtctgggaccgacgcacggggtccagccctcggacgttgctacaaagagtccttattctttgggacacgcgacagttccggaccccaccgtcggggatccgaagagccctcgtagagattgacccccacctggggccagtggcttcgtcggacgagcctagactctga

SEQ ID NO: 19365 - DNA, 4413 bp, Zea mays
  Peptide Sequence Number=SeqID_61144
atgggcgacgacgccgagctcgaggagggggaggcctgcgcctgcggggacgacaccgccttcgtcgaccccgatgtcgcgctctcttacattgacgaaaagcttcaagacatacttggccatttccagaaggacttcgaaggaggcgtttctgcagataatctagggtcaaaatttggtgcatatggttcatttttgcctacgtaccagcgctctcctcttcctcaaactagaagtccccctaaggcaggaaatattacctcaaaatctccctttcaccagtcgaatgaggacttgtctcagaaacctccagctgtggcagtttcatctaccccccaaagtaatggtcctgtggtgcctttttctggtgattcaattaaaaaggaaatacgcccatccacaaagtctgaaaggggttccgtctcccatgattcatatgggccatcaaaatgtagtgaccaaaacagacttaaagtccggataaaggttggctctgataatgttttggcaagaaataatgcagctatctacagtggcctgggccttgatatttcttcaccttcatcaaacgaggatagccctgatggccgtgggagcctgtcccctgaagttaacaatgtgccacatgaatctccacaaaccattcttcagatcatgacatgcttttcagttcctggaggcttcctgttatcccctctaccagccaatatcttgcagttgacaaaaaaggtcgtgtcttcatcaaagaagtgggaatcaaatgtggatgtagaaaatgtacaagaatcatatgaaggccatgtggctaaaagggtgaaatctgatggtaacaaaaagaggctgatagatgcaaaaaattcaaagaacaaaaatgatattagtgcagttatgaaaaaggagattgatatggaattagttgctggtcaaaagatagtatctgaagctcttaaaatatcattgctgtctgaccccagagctatggatgcaaaaggtgagaatcgtcttgaagaggagccagcagaaaacaacttggttggaattagagatgctcgattgaaagagcggtgcaccaagactgactccatgacagtcaaagtggaacctgccaaagcagaggtgatggaatgtttagagaacagtagttttggcagttcagaaatggatctttcagcagtgaaagggaaatcaaaacccaagacagaaaagggtgaggcaactttagaagataggaatacaactaatgacaaagacctaatatcagataggaagcaaaaaaagaaaataaaatctgggagtaaatataatgcctctaactttgaaggtagcattagcaatgttataaacgaaggagcttcagctgttttccacatgggaaaaatttctggtctagaagctttgccttatgacacaaatggggaaaataattccaagagtgaggtcaaaaaaatgcagagagaacaaaaggccaatgtttcgacgtcttctgatttcctggaggaggagaaacacattcattcttctgctgcagttaaggagagaagtgacatgcaatcaaaacctatccatactggaaagaaacccaaagcaaaatcacatagagatgttagggacaacaattttcctgaaggatcttatggaagcaaggaacaggattcattggagaataaaagtgcctttggagatccccggccaaaggaaaaaccatggaagtttgacagcgaggactctgatgcacctgggatctcgaggaaggatagttcttatgtaaagcttgacaaacacctggctactgaggagcagaagatgcatatacttccacctgccactgcttcaactgcgaatgcagcttttatacatgcagccccagtcgtaatagaggaacattggatcttcctaagaagtggaaatgtagcatgctacagtggctggcctagaaaactgggaactctaattgcaactcttaagttagaaatgtggtatactgggatacctgggatgaataggtgtgagattagtgaagaggagactacaaatgctctgaatgcactgtatgtccctgcccctgcaaatggtattccttcagttggccttcctcatgttgcttcatcaggactagtaacatccagcactcccaatatgaatggacatattgagcagagtaggaaaagaaagaatgttctaagtgatggaaattttgtggctgagggttctcaccaaacacagggttcaggtcatccaatgagcaaccaacatgctcccaataaaagtaaaactcatactgatggtatccagtatcctattgatagagattctgtaagcaaatcagttgacccaacaattaaaaagcaaaggtccaaaagcaaacatcacagtagctattctgatggagtagatcttgttgaaagacctaagaagcattctaaagtaaaaagcaagagagacttggatcgtgatgaatacaaagcttctaaaaaaatcaggaaagaagagcgccattttgatagagatcggaaccttggatccggtttagctagtcgtgatgttcccgatgaggccaaggcttttcctgtgaagtcagtaacgtcaaagggttcaggtgaaaggagtgatctttcttcatcaaagcaaaaaaatgtctcacatcataaccatttggaaaattccaagaaagcaaggcaagattatgtaggttttcctgaagacgagagcaaggaatattttcaccagtcagatgtgcaaagatcagatttgtctagtaagaagaggatagtgaagaaatgggaggagagtcagtacaatccagtagctcaggtaagcaaaggagctatcaaggaaacctatagggatcagaacttaaaggaagcaaagttgatgtcattgaattctgaagaactgttttctatgacgagctccaaaccaccgaaagctcaacatgctgatcaggttttgttttatgatggggggcgtacgaacagcgagttagttgaggataacacacactttagtggcaaaacaggtctccctgagcaagaaaatagtctttctgataaggctttagacttgggcaaacctgctagtgatgtggcctatattcagacttcagctgtaacttcaagttcttcaaaggcttcagtctcacaaaaaaagaagcagaccactcaagctatgaagacatcgtcaattgagtctctttctttgtcaccacagagaaactctaacattgacaatgtctctgcctctcatagtagagtttcaggtaaggatggatctctgaatgctaactcaagcactgtgccggccatggcaaaacaactaaatactcaagttggtgtagcagtcaatgatcaatggtctagtgaacctattttggttggttcttcccgaagaaaatctgatagagataatggacaggttcagttaactcaaggtcatgcctctgatggtattcatcctgaaaggggtttgaatgaggacctgcagcctgaatctgggagaaaggattccaatataaaaaactcccatattcctaaaagttctaaccatttgcattctggtgaaaaaaataactataatacagatggctctcctatgcaaccaggaaagcatcttgttgatccaaagacaccagtcttggataaaggtgattcaagtatgcatgaaaataagaaaagtgcaaattctcttcaagatagaaatggatcaactcattgcccaccagatggaaatcctctgctcggtttaccatctggaaaagagaaatcatatctcaaaaacaacaggcaagattcacagaagcctaaaccccagatctcacctctgaaagaaagcaaattggattcccattccactccattaaaacctaatgggtcaaaattgactccacaatcaagacaatacaatgctgaaaatggagggcgacatggcactgcaaaacaagcaattcgtagtcctgctgatacttttagtccagctaggaaggacaatacttcaactgcgtatgctctcaaagaagcccgtgatttaaagcataaggctaatcgtttgaaggaagaaggaaaagagcttgaaagtacaagactctactttgactccgccttaaaatttttgcatgttgcatcacttttggaacctcctagctttgatggtttgaaacaaggcgatgcagcccagagcatgtattcagatactgcaaaactttgcaactttgttggtcacgcgtatgaaaaatgcaagaagatggctgctgctgctttagcatacaagtgtgttgaagttgcttatctgaaggctgcatactgcaagcacccaactgcaagcaaggatagacaagtgttacaggcagttgtacagactgctccagaagttatgatcacaattcacttcaaatcatttgaatttctatacgtgaagtga

SEQ ID NO: 19366 - DNA, 900 bp, Zea mays
  Peptide Sequence Number=SeqID_61145
atgtccgggtcgggcggcggcgtgtgggtgttcaacaagaagggcgtgatgcagctggagcagctggcgccggcgagccggaaggcgctggtgtacttgccgacggacgaggtggtgcggtcggtggaggcgctggagcggaggctgggggcgctgggcgtcgtgcagctccacaggcgcggcggcggcgccgacctcatcaccatcccgcgcgacttcgccggcctccgctccacccacatgtacgacgtcgtcgtcaagaaccgccaccacttcaagacaaagaaatactactggacctgcctgccagcctgcagataccatagaaaaaccgcagccagtcgatcccgtagcggggcccactcgccgatcaaccagcaagatggccaccgagacaacgtgcgctcctcccgtaacgggacccactcgccgatcaaccagcaggatggccaccgcgccaccggacgaccctcctcatcctcctccggcggaggcgggcgccgccacgccaagccgttcgagaccgtcggggttcgagcagctagacgggcgagtcaaggtgcttcagatagagggcgcggcgccaccgggttcttcaaagcagcactgcagcagcagagttctgggctgatccttgtgcttgtgcttgcgttgcaggagctgacctcgtcgcaggcggagttgctggagaggatccagaagctgaaacatgaggtgcagaactggcgctccaatgtagagacgcaggtcaagacataccagaatgaactccaggatctcaagaaaggacttgactctgaagtggaacagctgaaatcggaaatgaaggcggttaggtctgcggtacaggaagagaaaggcaatctacctgcacaaaataccgactttagagacggttag

SEQ ID NO: 19367 - DNA, 573 bp, Zea mays
  Peptide Sequence Number=SeqID_61146
atggctttggctcagattggtcctcaaattatgatagaaccaatttggtccttgaggtggcattctgggcttaaattttgtcgagaacatgggatgacttctgcttgcaaggaatgggagcagacaattcgattctcgcatggatggtttaagggaagttcatatttaccacatctctttattaacatgacgaacatggataagcagcaaagtgggcaaacagatatatccgcggatatccgttacccgcggctacctcttatcgaactcaagctccccggcgccttcctacatgacctcagcctgaatggcaacatcttactgaagctcgacattaccatctatctcttgttgaagctcaaccccctcaacctcttgcctgaactcaacctccccaatgaccacatgcttaagtccacaccaaggttgagcaaggatggcactcatgaaggaggaggtggtggtgttagtgtcttgtcggggaccataattaggggtaccctcaaggctcctaattctcagctggtaacccccatcagcataaagctgcaaaggcctgatgggtgcgattaa

SEQ ID NO: 19368 - DNA, 657 bp, Zea mays
  Peptide Sequence Number=SeqID_61147
atggagggcggcgatggtgtcgtcgtcgagtccggaggcgtggggagcctcgggagcgaccgagggatcctcatgggtgactggtgggcgaccgaggaggtggcgctgcgcggtggccatctgggcgatcaacgtggcacccatggcacattcttgctccaaggcgagagacacgacatgttcgcgctcctgggaggcagggacggtcgcctggatggtggcgatggccacgacgagcgcggaggaagcggatggaggagcgaggactcgacggtgtcgacccacgcaggagcgacgagagtggggtggtggacgaggaatcctggcggggaagatcgggtgtgctgttgttgcgcagaggaggcaccgggaagcctgatcgcgatggggaggagactggccgccgagaagggttccatggtggggaggatgccgatggggaaggtgctgcccgcggcggcggcgtgttggccagcggcgcccgcgtcggtgaagtggtggctcagggatagacgacggagaacaagggattcctcaggaatctccagccttggtgaaatccgcgatgccacctccatatctggtccaggagctttgtttgatggcaaggataatatagctttccaaacttcctccttagagaaggggctgtcttaa

SEQ ID NO: 19369 - DNA, 531 bp, Zea mays
  Peptide Sequence Number=SeqID_61148
atggtaggcactgaaggttctgaattagatatatcaactattattgctgacttatttgaccaaaaaggtgggcatcttagtcctgaagcattgaagcattacttatctgctggggagaagctctacaaaatgtccagcaagatttacaaagaaatctgttatttcgaggcatccataaaaaggcctttttttaatgtcaagacacttgatgatgatcagcttgaaaactggcaccagtatcttgactttgttgagaagaatggggattttgactgggtattttttttggctgtaaaactttatgagaggtgtttgatcccttgcgctaattattcggaattttggatccgctattcagagtatgttgacgctaaaggtggccgagaaattgcaaaccatgctctgggtcgagcatcatcatgttttgcgaaggtttgttgtcatacaagaagggttctgagtccagaactatgcataggtgataggctaggggtagcaccaattaaaaaaaggcttgttcacactggttga

SEQ ID NO: 19370 - DNA, 324 bp, Zea mays
  Peptide Sequence Number=SeqID_61149
atgagtatgcaattactcagcaagacttacccgactaaaggaaaaaactctcaagggtatgctggatttgggactcaagggattcaggaatttccaaggaatgaaactcggccacgactccgccgcggggagctccggcgagcccatgctggattggccacggcggccgacatagtctatggcgacggcatcagcacacccatgaaccgaagcaaactcagtcacgtgctcaacccaaccgcgaagattctagacctaggttaccgacgacggttgcagaagggctggaccgacgatcctactctcgtgaccaccgcgaggtag

SEQ ID NO: 19371 - DNA, 1950 bp, Zea mays
  Peptide Sequence Number=SeqID_61150
atgaaactgaaacagacactcaaaaccgatgatttttctcttatagttgataaagagagtgagccacaagtagacaaggacattgtggattcaggaaaaagacatggggatgcgggagcgcagaaagctttagatttggtcaattcacacaaagagaccatcacgacagctcaggaatgcactgacatggtttacagtgaacatatcctggacaaaaacagaatagagaagcaaatgaattcacatgccaaagaagatattaatcaagacctaatcttgcatgaacaaaatgatgagaaaacaaattctcatgaggcggagactcctgtagctgagtcaggtgactgtgattctccttccaaagcaattgctagctctgagaacatcaattttcagggcaaggtcattgaggtatctgcaagcagccatctagaaacagtatgctcaaaatatgactcgccgtctggaccaaacatgcacaaagaaggaagttcttctggtccagctcgaatatctccagagctggaggaaaggcaccatgtggaggttcaggtaaaagtcgacacagagcatcatttttctgtcagtaatgcaaacctagagatatcttttgatggtccaaatccaactgaatgtgacaaggaaatctctgccattggtcatgggagtcaagactatattcaatcttcgcagtcacatcaactctcagcctgtgcaaaaccttggagcttggactcagcgaaaacaaaatcggatactgtcagtattcaagctcaacttcgaaaccagttggagaatgctcaaacatatcaatctaataacctttcacaaaacatgcaacaacaagagcttacaatgcctcacaatgttcaaacatctgcacaaattcaagatcaattgcttgcacagcctaatcacagaaaccaacagtatctccaaatgatgcaagggtatgcaacacaaatgggggaatattaccaacaacaactgtattacctgcaggctcagcacaatcaacagatgcagagtctgcaacagcaacagctcccgactgagcatcttcagcaaacttttatgcagcaagtacagcagctgaaccagcaattggtactttggcagcaacaagtgcaacagcagccacaagtagtactgcaacaggcactgccagttcagcaacttcctgacgaaaaacagggtcagtgtccttccggggatagcaaacacggccaaaataaacagcagcaacaagcacctcaaatggatcaacaaagccagcagttgcagcaacaacagcttctttatcttcagcagcaacaacaaatgtatcttatacagcagcagcagatgtatcaacaacagcaagctcagcagcaacagctcttacagcagcagttaatgcaacaacaacagtatgtactgcagatgccacagcaccagcaagactcagttcggcagcaacaacagcaactgtttgagcaacagcagcagcagatgatgcttcttcagcgacagcaacaacatattatgcaacaacagatccaaccgtacgtgcaacagcaacaaaaccaacaagggcccaaggatcagacttacaagtcaaatcatcaggtcaccgccgtcgttggtactggtcttctagactgcagcaggacagcagccgagcaggcagaggcgctggtggaacaggccagcaggggcaaaggtgagcagccgctggtgctctgtggccgccggagctggatgtccggtctgttgcgcaagggcagccgtcggcgaccaggtatgaaggctggaggtcgggcaagagaggaggtgtatgtgtatgctggttttggcggctgggcagctgggtatgggcagaggagagaggaggccagactaaatgatactgtagatgggctgaaaatggcccaataccaaaaccctagtcaggcgaccaggaaacactaa

SEQ ID NO: 19372 - DNA, 276 bp, Zea mays
  Peptide Sequence Number=SeqID_61151
atggagcggattacagcgctgcagcagttcaagacctcttaccctcagttccagcttgaggacgagctgttcgcggaggactggaaagatgttatgatgggcataccttatgaaagaagaccctaccccaaggaggggcttacaaatgggcccaaacgacagcggaacgcggcctgggccccgccgttgggcatcggttcctttgcccgcgtgcagcacccttcgcccatgtgcgacacccttcgccctatgaagccgggtcttcgaccttactga

SEQ ID NO: 19373 - DNA, 360 bp, Zea mays
  Peptide Sequence Number=SeqID_61152
atggaaaaacgaatgggaaatactaaagcagcttctgagatatacgagacagcaattgaggatgcaatgcagaagaacaacatagagttgcttcctgacctgtacagcaattttgctcagttcatatatgtggtaaaaacgaagtactttgccatggacttcgactctcttgcgctttcgagaaaaaattccttgcagctgttcgctggagcttttccaccattgcatggtgtccctttctcctatttgaggagtaagtccctgaaggttaacctgtccaaacagcttgaactgaaaactcctagcgaaggcacatcctacaagaaggtggtctatgttttctggttcttgatcacatag

SEQ ID NO: 19374 - DNA, 1116 bp, Zea mays
  Peptide Sequence Number=SeqID_61153
atggcgtcgaagtccagagccagggctagtgaagccaaccgtaatcctagtagtagtagcgttggtgaactagcacaaactgccgctaatatgggtgtggttgttggtgaactaggtgtggatgctggtgaactggatgtgggtgtgggttgtgtggctgctggtgaatcaacaacaatagcatttgtcgtctatgggggtgaattgggtgatgcggttgctgctgaatgtgcaccaccgtcggcatcatcaagcagtgcaaagtgtagttcgagggcagactgttggaaacatatggtgaagaaggaagtcattgaggatggttcagctgctggcacgggacatttgaaccggcactacaaagcttgtttagcaaagctaggaaagactcaaggaggaggtgtatactatcctacaacttgcttggtgattgattatatttggttaatggctgaatctttttctaagttcagatctgacaaccttctaaacactattgttgctccaatggagaaactggatggtttgcaaattgcattggagggaataggtgatgcattggacatggatttttcagatgcttttaatcatgcaaaagatgacttgtttcgtgtcttcggctactattacaaaaaatatggtgaaagtgagatagactcacatgttattgagtctggtgcagaaatttcagatacctctcttacaactcacttatggaagagagcgaaggggaaagaaaatgctgcctcatctcaaaggtggaatcctaatgctgaattaaatcactatctgtgcactaactttgtaggtactgatcgcgcactaaggggtgagaaggtaaagttacttgagtggtggagggacaagaagtattgttttcctgtcttgtctcagtttgctagagatatacttgttattcctgtctcaactatttcctttgaagcaacctttagcactgttaggagaataattgagaaacgaaggtcttctctagcacctaagatggtggaggcaatcacttgccttaaagattggaacagagccgaagagcggaagcaacatcaacttgaggatcctgagattgaatttgctgctgcagatttggacattgattag

SEQ ID NO: 19375 - DNA, 390 bp, Zea mays
  Peptide Sequence Number=SeqID_61154
atggcgaagtttcgccggaggcgagggcacgaccacgacgagggtctggggcactgggaaagggctcaggcgagatcgggacaggcctcgggtcaacggcggtggggcttcggctgcacggggagaacgccggtgagcgtgaaccgggcaaaccagaagggtttgggggcaaaccggaagatgtcccacgttgctggtgaagaggcggagctcaccgaggcagcgggcgcggcaaagactcaacggcggccgcagaatgggcggcagaactccctgggtgtacgccggtgcgaggctgacgagcggggtccacgagacagggagagcaagcgcgcgtgcgcagagaagatcgacaccgacaagtcggccccattgggcagcgagagatag

SEQ ID NO: 19376 - DNA, 165 bp, Zea mays
  Peptide Sequence Number=SeqID_61155
atgagggcacaaattagtgctagtttaggagcgttagatagcagcaccaccacttccctggctcttgactcaccggagttgggcggcaggagtcgtggacatgtccgtgtaaatgagccagaatcgaggggtgtttgtgcgagtgtcagcgagggggcacgatag

SEQ ID NO: 19377 - DNA, 648 bp, Zea mays
  Peptide Sequence Number=SeqID_61156
atggacagagtcagagggtggacagagtccgtgttctctcacacgccccatctgtgggcattctgggagctttctgcagcgaacgtggtccacgacgggattcctcagttggcgctctcattgcaaggggatgttctttcagtgaatcgctccccggcggcaccaccctccccgcgtcgattatcgtccatgagagggccgcagtaccttgtcggggatgatcatgtcctaaggactaagatggtttttacagggcgtccagggcgtgcgaccgtttcgcagtgggcaggggagcgttttattatccacgcggaggatcatgtccatggacagacatcagttatttggcggcaacccaggctttcgaggaggcatgaggctcgtgctatcgctccaggtattactaacgagggagtcatggtcgcagggtttgagcttgtgtcgaaaggaccctcgttttgcatcatgatagaaggtgaggagcgccttctagctcttaacgctgagcgctgtagtctgtctgtggccattgatctcctcggcctctcggtgaggactcaatcaagtgaaattgagaatgccttcgatgtgctggaggtcggtgacatgcagctcggcctcggccgctcactttttcgcatttcctaa

SEQ ID NO: 19378 - DNA, 159 bp, Zea mays
  Peptide Sequence Number=SeqID_61157
atgccacatcgcgcgagggtgtcaccgcagaacctatatctgtctccggcgggggagctcagcggcggcatggatttcggcctaaatcacggcgggatagctcaatccagtgagttggggagcttcacgggaagtcagggaggttgtaggcgcaagtaa

SEQ ID NO: 19379 - DNA, 807 bp, Zea mays
  Peptide Sequence Number=SeqID_61158
atgggcgattctgactcctgcgcgcgctgcgcgcgcatttattgctccgcagagagccgttggcgcggagatagccgttgctccggagttgcaccggacagtccggtgaattatagtggactagccgttggagtttcccgaagctggcgagttcctgaggccgacctcccttggcgcaccggacactgtccggtgtacaccggacagtccgaaggactgcgccgcctgcgccactccgactgcagtgccactcgacagagtgagtctgacaggcagtcaggccttgccaaaggcgccacggcgaactccgctccgcccgaccccagggctcggactcgggctaagacccggaagacggcgaactccgctccgcccgaccccagggctcggactcaggctaagacccggaagacggcgaactccgctccgcccgaccccagggctcggactcgggctaagacccggaagacggcgaactccgctccgcccgaccccagggctcggactcgggctaagacccggaagacggcgaactccgctccgcccgaccccagggctcggactcgggctaagacccggaagacggcgaactccgctccgcccgaccccagggctcggactcaggctagcacccggaagacgacgaaactccgcttcgcccgaccccagggctcggactccgccctggcctcggccgaacgacttccgcctcgcccgaccccttggctcgggctcggccacggcaacaaaaggcaaactcaacctcggcttcggaggaacccccacgtcgccctgcctagggcatag

SEQ ID NO: 19380 - DNA, 183 bp, Zea mays
  Peptide Sequence Number=SeqID_61159
atgggggaagactttgatactctagcgctggtgccccggatggtggatggggggtttctccagattgcttggagcctgggaatgtcttccggggggcgtcagggcggtggctggccgatcggcgaaggtctccgccgtgggtggggtgctgcggccgcgattgaccgtcagacgttgaagacg

SEQ ID NO: 19381 - DNA, 382 bp, Zea mays
  Peptide Sequence Number=SeqID_61160
atggcctcgtccgcctacgccgcttgggacgccgcggaggaggcggacatcgacgcctccgcatcgcaggaggagctcatcggccgcgcccgcttcatctcccgtgacaatgaggaggagggggagggggagggggaggagcgtccacctcagcagcatcatcagtttcaaaggcaagcatgtttccactgtggagagcaaggccactgggtgatgcaatgttctaagaaggcagcccagcaccagtcaggccccattgccccagcaaagcagaatgtgcctcttcctggagcaggcaatcgctctcagccgcgctataatcatggaatactgaaccacttggaggctgaagcagttcaggagacccccggcttgatattag

SEQ ID NO: 19382 - DNA, 1659 bp, Zea mays
  Peptide Sequence Number=SeqID_61161
atgggcaagaacgcggccggaggagacgtcagggacggcaagaacatcgtggagccgagcattggccgaacggttgctttcctcttcctcgtcagtttctccggcatgttcgtcctcatgccgttcaggaaggtcatgatcatccggcaccgcctcacacagcaagtggagatgctgtttaggtcactgggaggaaccatgctgtggaacatgttccagtggtttttcgctgctgcaaagggctgtggcttcggagtgttccctatctttggcctcgaggcatataaacacggattctacttcgacttctccatgtccaacatcggcatcggcatgctgtgcccgtacaccatcaccgtgtccatgttcatcgggagcgtcgtctcgtgggggctcgtctcgccgtacctcgcgaccaaggcgggcgtctggtactcttcgcacctcagccccagcagcctcagcggcatcaggggctacaaggtgttcatcggcgtctccatgatactcgccgacggcctcttcaacttcctgtccatcgtggcgtacacgctgcacaccatgcgcaagaggcgcagcaggcagcagccgataataatccaaggcggcggctgcggtggcggtagtgaagccgacgacggtgacacgcagccgctaccgttccactgcctcaacgctgctgccgagcaaccgaagaagagcttcgatgatcgccgccgggcgcaggtgtttctgcgggaccatatatccaactcggtcaacatcgcgtgctacgtcctcctgtcgatggtctccgtcgccgccataccgtacctctacccgcagatgcggcgcgcgcacgtcgccctcatctacctcgccgcgccggtcgtcgcgttctgcgacgcgtacgccttcggcgtgacggacatgaacctgtcgagcacctacggcaagctcgccatggtgctcgtgggctccagcgtggggcgcaacgacggcggcgtcgtcgccggcctcgtggcctgtgggatcgtgatggggaccatgtccaacgccaacaacctgatgcaggacctcaagacggggtacctgacgctgacctcgccgcacaccgtgttcatcagccaggccatcggcacggcgctcgggtgcgtcgtcaacccggtcatgttctgggccttctacagggtggtgcagaacggcgacaccgacgtcttcgacgcgccctacgcccgagtgtaccgcagcatcgccatgctgagcgccgggcaggacgggatacccatgcacagcctctggctctgcaagctcttcttcgcgctggcgctcgcgctcagcgtgttcagggaggtggccatgtggaagcgctggcgtgtggcacgctacattccgagcatcatctgtgtggccatcgcctttgtggtgccggcgcgcatacccatcgacatgttcgtcgggagcttggtgctgtacctgtggaggcgtgccgaccctagcaaggcgccgacgttctcgatggcggtggcgtcagggatgatctgtggggacgggctagggatgctcttgtcatccacgatggcactcatgcatgcgcgggcgcccatctgcatcaagttcatgtctcgtaccgataatgtaaagctagatgccttcttagctacactgcctgtgacatag

SEQ ID NO: 19383 - DNA, 261 bp, Zea mays
  Peptide Sequence Number=SeqID_61162
atggcgcattgtggggacatgctacctcttgatccagttacccttgagaagttctatgatggcacacaagcagctttcacatccggtgggcgtgggctcgtccccatcaacgacggctcctcaaacctccaacgggagcagctacaagaggtggttgggactataaatacccccaacgagcattctatatacacaagagatacaccaaacatccatacacctattgcaactactccaaaacatccaaagcctcccaagtga

SEQ ID NO: 19384 - DNA, 267 bp, Zea mays
  Peptide Sequence Number=SeqID_61163
atgacgaagctcaaagcttgccgaaggtggtcgagcacaagacgcagcctgggcaaaattacatttatgtccctgacatttactgttagccaaaagatgtcatcccggactcgtgctcatgatggggcgggtacatctcgcagcggggaggacactcccaatccatcacctgtacctcctgcactggctgaggctatcgctgccttggtcaacgccaccgccgacaagacgcgctttctgcgcgaaatggcgggaaaccaaatttaa

SEQ ID NO: 19385 - DNA, 251 bp, Zea mays
  Peptide Sequence Number=SeqID_61164
atgcgcacgatcctttcaccgtcgaccgttatccgcacgccaaggcgcacgaatcgcgacaccggtgaggattgcggcgtggagatcaccggcggtggtgcactgaacctggcgatcttcgtcagaatagaggtggggaagggcctcatcggcggtagccgcaacgtcacacttcgcccagccgctggctcacttagatctcaattgctcccgacggcggcggccaacctctctgatggccctggcggcag

SEQ ID NO: 19386 - DNA, 381 bp, Zea mays
  Peptide Sequence Number=SeqID_61165
atgcggagcttcctattgcgcctgaggctgaacttagctgttgttagcctcaccctggcgggtggcacagcagtcggagaggggcgagcggcgctgttttcctgtcaggtcggtcagtggaagggcgaagtgactgcggtcacttcgaccttgccgactaaggcacgtggtgatgaggatgatggttatgattatgcttatggtaatgctagtccactacagccaaacatgatatttgctgagtatgttgatgtgtactcacccttgctctacacaccaaaccccccttcctcaggttgtcctcattgcgaccacttctcaggagaagatgaagccgtggaggaagacttccaggagttccaggagtacgatgagttctag

SEQ ID NO: 19387 - DNA, 351 bp, Zea mays
  Peptide Sequence Number=SeqID_61166
atgtgggcccatcggccatccaccacatcgtgccgcaaccagctgcagtcaacaccaggcgccgacatcccgacctcacgcggcatactcacgtcgtccgcgcacctgaacaccccatcgttacctgtgggccagcctggtcatacaaccatcaggcccatcaccgacgctcggggatcgcggggtagacctccttccaatgtagttgttacaaccaacacctccgtatgcggcagcaccttggtcctccacccggagattccggcctcatgtcgcccgtctgtccggagtctggatccatgggctatatacaagccaatcgttcgcacatttcttcttccccaaccatag

SEQ ID NO: 19388 - DNA, 246 bp, Zea mays
  Peptide Sequence Number=SeqID_61167
atggccatgatggattcaacatcggaaaagaggtacctctgccaggtaccaagtttttgggttgaaatgattaagctgagaccgggcgggaagaagaaaagaagtggagagtggctgtgtgcagccaaaggctgtttcgggctggggcaccggactgtccggtgtgcaccggacagtgtccggtgcgccagaccagcatggagcaaaccagccgctctcgggtttttcttcggcgacttcggctaa

SEQ ID NO: 19389 - DNA, 836 bp, Zea mays
  Peptide Sequence Number=SeqID_61168
atggtgaaatcatttgaagtttcagaactgccagtgaggtcggcaaaatttatttcaaggaaacaatgggttgtagctggtgcagacgacatgttcattcgtgtctacaactacaataccatggacaaagtcaaagtttttgaggctcatactgattacattagatgtgttgcagtccatccaactctaccatatgtgctgtcatcatctgatgacatgttaataaaactgtgggactgggataaagggtggatgtgcactcaaatttttgagggacattcacactatgtgatgcaggttactttcaacccaaaggatattaacacttttgcaagtgcatctcttgatcgcactacaaagatatggagtttaggttctccagatccaaacttcacacttgatggacatcaaaagggtgtcaattgtgttgactacttcactggtggtgacaggccctatttgattactggttctgatgactccactgcaaagtattatgatggtgcgttttatggcaaactccctataatcattactggatccgaagatggtacagttcgtatatggcattcaacaacttacagagatgttgagcctgaaatcgtgcagggtgtgaaacaaaatgacagcgtcttagcaatggagcctggctcagttgctgggaggtgttacatgcactcccaccacccagacccaagtttgagtcctcttgaacttgaatctgggtgcctattccttatttacaatggccacctagttccttccagacttgagaacacactaaactatggccttgagagagtctgggctgttggatacatgaagggatcaagaag

SEQ ID NO: 19390 - DNA, 858 bp, Zea mays
  Peptide Sequence Number=SeqID_61169
atggcgtcgaccaccctcaccactgacgacctcctcaagcgggtcaagattacggtggggaaggctggttataccgtccacgtctcattgcgcccagagcgaggctatgtgtcactgagcagcagaagcggaggaaggacgaggataagaaatgagcccacaagaaaagggcggcttgtgatgcccttgagaagtgtcgtcgggacctggtccgagccgtccttggcacgcccgtctgttggtccggatgtgccggtgctcgggcttgaggtgtttgcacctctgcccgagacacaggcgtatgccgagctaggacccatcccagcagtcgaggaggaggcgatggcggtggagcgacctgtcgacccactccctgtgccaacctctgggacaaaaggcccaaggagccaagggccaagaaggatagacctgcctcggtccaggaaagttgtcgtgaggcttcagttcgcgggcgcaatctctccgcctcgcctgaccccgggtccaacctttgggtgttttctccacctcgcccgacgactggttcggcccttgagcgaattctacgcctcgctcgagctcggccttgaccacctactacgccgtgaatcccacagacggccactccgccccactatggcgcatgtcaagggatggctcgtccaaacgccttgggaagacttccgcctcgatcgagtaggggctctgatctcgataaacgcggcagggaatctcgacgtcatcccgtgcaaggacactgacgcaccccataacccctcgggttctgccttggctctctacgggaaactaatgaacggcagtggggtccctccaagggacatctggccaacaatctag

SEQ ID NO: 19391 - DNA, 135 bp, Zea mays
  Peptide Sequence Number=SeqID_61170
atggtgaaggcaagtgtccttagacctaccatgtcctatttactttataattcacggtcccgcattacattatttaacacggagtgcttctgggtaataactgggttcattactaaaatttggctctacttatag

SEQ ID NO: 19392 - DNA, 279 bp, Zea mays
  Peptide Sequence Number=SeqID_61171
atggggaaaatccccaccaacgagcaggaccgaagagcagccgagcagcagagcccgacgagcaggcgagcagcaggggacaaggccggccgaagagcaggtgagcagcagggacatggccggccgacgagcaggcggccaggagcactgaagcagccgaccgatgagtggatctgtggaagacgacttgacgagcaggactgcaggagtccgacgggcgacggaacagatggagctagagggctgctggacgcctggacgccggcctggtcgccttga

SEQ ID NO: 19393 - DNA, 1053 bp, Zea mays
  Peptide Sequence Number=SeqID_61172
atggatagcgctgacagctgccgtggagacggtggggcgagggcgatggtgggccgctggggggaggggcggaactgctacgcccaagcgggagggttagtcaggggtcgatggggctcgagcttcacggaaaggatgaatggagaggtgggagagactgacacgaccggcggacgcaagggatcagatgcagcgactcgtggacgtcggcgccgacgtggatcacggtgcagaacaggaaagtcagaacaagctccaacgaactgggcacggttggcgcggacatgggatgccgagtgcgaatccaccggcgagctacgtcgacgatggctcgacgacgctgttgctataacatatcacttcaacttactgggaggagagcttgttgctaggccaagaggttctaatagtactcgttcttctgcttctggtgctcagcttgctgcctcaacagttcctattgataatctaactgttgtcgcaacactgcaatctccatgtcctagacggaggatcgagaatgagacacctgcgaggacaagctccaaacgccgagccaatgcgtcgatcttcactgccaccaaggcggagccatctcagcatggtgctgaggtggctgtgcccacccctggggtgccggttgagcccgacacggctgtggccgaggttgcttccgtgcgtcccgtgtcaccggtggaggccatcgttgtctcctccaaggatgaggcagaggccgataatgctgcgccgcgcatagcatcgcccatggtctccgacctcctgcgcgccatccccgacacccctgaagttgcatctagctcgggggcgggatgcgccgaggaggccagttccacggtgccgccagaaaggatagtcagcgggacgctgctcggtgatgagacgatcatcaagccccctatctcaggggctagcagtgaccttgtccactccgggccgaacccctcgatatggggagggccacccctggcgtggacatccaccgagggcgacccgtacttcgtcctcgacaacatcgaggagcggaagttctag

SEQ ID NO: 19394 - DNA, 771 bp, Zea mays
  Peptide Sequence Number=SeqID_61173
atggcaccatggcataagtcaaattgtaatacagtatcagtaactttgaaacttcatgtggtgcctcttcaaatgtcctatacactcagcctagcatcaacgaaaactgtcattaatcatcacaaaaaatttcatagaaatgaacaaactctaggtccgaatgtagcatctggggaagtatctcgacggcacgctccacctgccctcccatggatccgcccctggccggccactacctcaactacaacacgctctagcggcatccagcaggagctggctgcggatcccgcaaacggtgccaagaccgtgcgcaagccggtcttcaccaccgtcaaccagttgcgcccccagatgcatggccacactcttgtcgtctgcgtcgtctccgcccacaccatcatcgacaaatcttccatgcacattggtcgcacctgcatcgccaagtgcctcgtcggatacaacaccgacaccgtcctcatcacacccgcaacaattaggcaaatttgtcatagatacactcacggaaaacagttaattcccgtcggccaggaaccgacgggaataagcactaaaccgacgggaataagtaattcccgtcggtttagcccttattcccgtcggttgtcagccgccaggcgtcccttgtcggggatacggttattcccgtcggccgccgacgggaatacgttatccccgtcggccataatcgagccgacgggaataagggctaattcctgtcggccactacaaccgacgggcgttactaattaa

SEQ ID NO: 19395 - DNA, 423 bp, Zea mays
  Peptide Sequence Number=SeqID_61174
atggacgcgacgggagcagacagatcaagcgagatcgatgtcgagggcgagggcggcgcgaggcagggaggacggggcggggaagagccgagcgggagcgagggcgggcgcccatgcgcgagcagtgggggatctagagaagctggcatggacgcaggcgggtgttggggggcatggctgcgcgagatggaggcgagtgcgggggtggctgcgcgcatggccggggggctgctgcgcacatggcgacgggggttggggcgggacgcgggggtggctgcgcacatggccgggtgcggctgcgggagctggagcgagagcgagacaatcagacgatttcggatggaggcggggttggcaatcggacggtcgagatggaggcgggggcatggttgtgctagtctacactattgccttaaggattag

SEQ ID NO: 19396 - DNA, 2928 bp, Zea mays
  Peptide Sequence Number=SeqID_61175
atggatcatgggcgttatgctccacaacatggatgggagaacaacagtgcaccaaatgggtatggtgtaattaatgagccagattttaggtctggtggatcctacaatgctaggagatctgtggatgaaggctttcctagagattcatatggaaggggtgcattctatcatgatacacatgatagaaatatgtatgcatcaccaccctctgccggtggaatgtggtctcagcctcgaaggaatcatgatgaggactatgcaactgcaagagaccatagaaggcatgacactgattatcgcaatgatggaaagcatcatgagtttgattcatacagaggagttgatagactccatgataattatcgtgctactgacaactattatgaatctggcagtcaccgtgattttggtgctgataggagcaaaaggattggaagcagagaacgggcggagtttcatggtgagtttgaagaccggtaccgcagttctcaccaaagcagggaggacagctatgagagagatcatgaatatggtcgttatggttatgattcggattatgaaagaggcaagagagatagtagctggagaagacgtgattcatgtgacagcgaacgtgaaaggagtggattaagtcgtgaaagagaggaaagcccgtacacgcgccatagccgttctcgatcacatgggcgcgatgaccgatcaagatcacggtctagatcaagatctcctcgtccgagaagtcatggtcgaaaccaaaggagatggcctgctccatctgccactgttgttgtcaagggactgtccctgaagactaatgatgatgacctatataagattcttgtacaagttcctcttcatcacttgttgcaccggttgaaggctcagtggggacctctacgcagtgtgcgtgtgatcagggaacggaattctggcatgtctcgtggatttgcttttattgacttccccactgtggaagcagcccgtagaatgatggaagctacaggagagaatggtctcgaaattgatggcaggaatgtgttctttcagtacaggacctcctgctttcagactgtactgttcgcagagtggagtttgaatataggtatgggtaagctgctggagacagtcttagtggcaggacaaggtccaactcatgttttagttgttcgtggcttggatgaaaatgctgatgaggaaatgcttcggtacgaatttgctaagcacgcaccaataaaggacatccgccttgttcgggataagtttactcatgtgtctagaggttttgccttcgttcatttccattcggtggaagatgctacgaaagctctggaagctacaaacgggattacacttgagaaaaacggtcaggttttgcgtgtagcatatgctaaaagtacacatggacctgcatcagggggttctcagtcaaacagccttgctgcagctgccattgaggctgcatcatttgctcagcagtatgatgccataggttgggctccaaaagagtacaatcctgatgacaaacagaacaacaactctgaatctcaaaaagatggcagcacagcacagtcgggatttgtttgggatgaaaaatctggttactactatgattctgcatctggattctattatgatggaactactggcctttactatgacagcaactctggagtttggtattcatatgatcaacagactcaacaatatgtcccttgtaatgaccagagcaacactaaggcagccggggaggcggccagcgaaaacacgaaaacctcagatagtaatagtggcaaaaaggttgtgatctctgcgcctgctgccacaattaaacaaagtgagaaaacttcacttcctgacgctgttcaagctgctgcaaatgctgcactggctgcagaaaagagagaaaaggagaaggcaaaagagattaaattggcctcaaaaaatagtctcatagctaataagaagatgagcaatgtcctagctatgtggaagcaaaggaatcaagaagggcaggccgcacgaattgtccttgatgacaaagaaccagcaaattctgatgataaatttagtcattcacgtagtggaactggattctctttgaaaagcaagccaaattctgaccttgaaaatgctatgggcaattctcttggccaaggaatgacatcgactcaaacattggattctgttgtaaagcctagacctgtcagtaacagcttagggactacagttatgggtgtcataagaggttctgctagaggagtgatcaagtcagatactacgtttcacgcattatctgatgctggtagcactgattcccgcaccactataaccacaagagcaagtgggttaatgacaagttctgaggcacttataactcctgcacccttcaaaactgatgtgtctgccttagtctctaatactccatcgggagtttctgggagtggtaaacgtcggttttctgaggcaccgggacaatcccagtacagggatcgagctgcagaaagacgaaatctgtatggatcatctcatggcactgatactgttggattggattcaactggtgactatccgtcccgaaagggttcaagtgagatagggtcgatgccgtttcctcctggtgtgggtgaacgttccagtggtgaaattggcaacagcgaaaactatgaagttattaccgctgatagagcaatcgatgaaagcaatgtgggcaaccgcattctacgcaacatggggtggcaggagggactgggtctcggaaaggatgccagcggtatcaaggaaccagtcctggcaaaatccgtcgacgccagggctggactgggaagtcagcagcggaagcctgatccatcccttgaagcccaagccggggacagctacaaaaccatcatccagaagaaggccatggcaagattcaaggagatgtcttag

SEQ ID NO: 19397 - DNA, 180 bp, Zea mays
  Peptide Sequence Number=SeqID_61176
atggcgagagtagcgtgtacccttcgtggcaagaggctggacggtggtatatctgtgctctcggttggcgtgaacccggtgaggaaacaacagacttttgctgtttctgttcaaatgtggtacccaaggaagagccctagcagtgaagtcgtgggaggaagctggcctcccacattataa

SEQ ID NO: 19398 - DNA, 267 bp, Zea mays
  Peptide Sequence Number=SeqID_61177
atgggaagggaggctgtcggtggatggagcaggggccaacgacctcacgtggtcgagcaggatagcagaggaagagggagaggaggaatcccgttgctggtgaggtgcgctaggagggcggccatgggaggcaagctccagccggacttggggaaggagcgccgagcgccaaggagccagggagggagcgccgaggaagctggagccgaccttcatgcttgctgccgtggggagaagaagacagggaagaaagaagctggcggctag

SEQ ID NO: 19399 - DNA, 390 bp, Zea mays
  Peptide Sequence Number=SeqID_61178
atggcggtggcaggcgggcaggagcagcggtcacgtcgccagccaagcctacgtcccatccgggggcaacgagagaaccctctctcacggcgtgaagacaacgcgcccgtgtcccgttcctcgaacggctcgcgcacgcgcaacggccgccccgcgaaccactcgccctgtagcattaactccgcggcggggacgggcggcgcctctggcagagaaacgaacgacgcttccccttcgccatatgaccgcgacaaaaaagggaccgggaaaggggtatatcccgaaaggatccttccccgtgaaggaaccaggctccaaaatccccttgatggaacgttcgaaggctggcccctccgaaggttcgacagcgcctctgatacagtggcctaa

SEQ ID NO: 19400 - DNA, 261 bp, Zea mays
  Peptide Sequence Number=SeqID_61179
atgggaaccaaagttatcaacctcattcagctacgaacgctacgagaactgtcaactcatcaacctcattcggctaccaacgacatgcgacgaacttgggctagccgcataccgtcatacgcgttctttgaacaatacatgtctatcagacaaatagaaataacggccttgaacaagcttgcccttctcgagaatgggctgcaacagacaactctgaaagaaaaatacagactaccggtcctttttttcgtctggaactaa

SEQ ID NO: 19401 - DNA, 687 bp, Zea mays
  Peptide Sequence Number=SeqID_61180
atggcgaggctggcggtggccgcgagggcgttctccgctgcggcctccggcggcggcgtgtccttggtgcagggggcgtcccgggggatcggcctcgagttcgtgagtccaccccatctacccctcattgcatcgccccctccctccgtttcctccgggccgtcggtttgcgttctgatcagatgcccgctccacgcgctgggggatccggtgcaggtgcggcagctgctgcgcagaagcgatggaggccgcgtcgtcgctacgtgccgcacgccgggttccgcggccgagctccagaagctcagggaggagcacgcgcccgggcgcctcaccgtgctgccgctcgacgtcaccgacgagagcaccatagaggcagctgcggcctcaatcacggagacccacggttctcttgaccttctgatcaactccgccggcatcctctcgatcccgaacgtgatacagccagtgtcggtggagttcggcaggaaggacaacatcgcctgcgtcctgctgcatcctggaaccgtggacaccgacctctcgaggccgtttcagaggaatgtccccgagggtaaactcttcacgagggagttctctgtgcagaggcttctctccgtcatcgacagcgtcaagaaaggcgacaacggcaagttcttcgcgtgggatggccaagaaatcccttggtga

SEQ ID NO: 19402 - DNA, 243 bp, Zea mays
  Peptide Sequence Number=SeqID_61181
atggcggcacagtaccctgagcgcaacgaaggatacgccggtgaactcatatccggtgatcccgagcgcccattaccgattctactagcactaaatgaagtggacggccatgcgaacatggagggcgggtacttaccgaaggttaatgcgcagaaacttctagcgacggcgcgacgcggaatcgaggcgtcgcgcgaccgactacaagaaattggggcggagctggcgatcaatcacgggtag

SEQ ID NO: 19403 - DNA, 351 bp, Zea mays
  Peptide Sequence Number=SeqID_61182
atgaacatgaagcttattcccacaggtcaagaatctgcagatatcatgcaaaaggactcccaacagcagctttcgaagctcattctgttcaggatccaggcagcagagtttttcgggaacaagaccagttggcccgagttggttggccaggaaattaatgatgcaattgcagtaatagaacaagagcggccagatgtaacattatttgagtcactagatgtggatttgaacgagaccccgaggccttcgaaccaactggcacccggagctatacgtgttgtcatctacttcggcacggacccagtcactaatgaggaaattgttgaagaaactccatatatcaaggcataa

SEQ ID NO: 19404 - DNA, 330 bp, Zea mays
  Peptide Sequence Number=SeqID_61183
atggttacgggtctaaaatggctgaaccaaacagctcagatgtgtgacttgaaactcaagccgtcgatcgaccccctaaccgacggcgttgctgacaatctggtatcagaggttgtcgatctggatccgttcagcaccggagatttcgccgacgccaccacgcccagggtgcttgaagaaatgcagctgatggaagccagggtgctctgggcgctacgactcatgaattcacggtgcttgtcccggggtggagctggtggtggtggtgcaggtaaatcgattctgtcccccttcctggtattgaccatctgggttagaaacacatggtaa

SEQ ID NO: 19405 - DNA, 133 bp, Zea mays
  Peptide Sequence Number=SeqID_61184
atgcacacggtgcggctggcaatgtggccccctgatgtcggcgaacccagtgattctagtgcgcgcacggcagatgactgtggggcccaggtgtcgggccacagtgcgggagcaagagctggctgcgcgcgtg

SEQ ID NO: 19406 - DNA, 336 bp, Zea mays
  Peptide Sequence Number=SeqID_61185
atgggctcgacgcggcctccggtggacggtggttttgggcgagagagagacgagagcgacgaagttgggcaagaactggcgagaggtgcaggcatggggaagagggagaggtcgagcatgactaggcacgaatatgggtggcgtgcggggcggtttgacggggttttagcgacgtgggcatctcagacgggagggagaggttggggaagagaaacagtgggcgggggcgccactgacaggcgggcccagcggctggggtcagggacgccacacgactatggtttggggaggcgctgggttgtgcgtgcgctggcgagcgcgggcgccgcgcgctag

SEQ ID NO: 19407 - DNA, 228 bp, Zea mays
  Peptide Sequence Number=SeqID_61186
atggctgggaaaaaaagcgcgaggggctctggcgcaaatgttactaagactcagaaaacccacaaggtggactgcgggttgatttccagagaggtgagggtctctttagaaaaattgaaccgcgaaggggcggactctgtggtggaatcaattccgagaatcgacgatgggtcaggccgaatcacggcagcattcaagtcgcggcagagatgcacgtcggtcaaatag

SEQ ID NO: 19408 - DNA, 525 bp, Zea mays
  Peptide Sequence Number=SeqID_61187
atggaagccatcaagccagcgcaccgctcaagggtggattcagaatctgatcacaccaggtggctcaactacccaaggcctgtatctgccactggctaccaacactcgacaaaggtcgttttacactcggtaaagcttttgccgagtgttacactcggcaaagaatcctcgagtgagactgacaggcagtcaggtcctgtcaaaggcaccataggaaactccgctccgcccgaccccagggctcggactcgggctaagtcccggaagacggcgaactccgctccgcccgaccccagggctcggactcgggctaagacccggaagatggcgaactccgctccgcccgaccccagggctcggactcgggctaagacccggaagacggcgaactccgcaccgcccgaccccagggctcggactcgggctaacacccggaagatggcgaactccgctccgcccgaccccagggttcggactcgggctaaaacccggaagatggcgaactccgttccgcccaaccccagg

SEQ ID NO: 19409 - DNA, 489 bp, Zea mays
  Peptide Sequence Number=SeqID_61188
atgtcgactcggatcctgcaaaatatgtattatgatttggagatacatgcaaggggcgtgggcgaggaagctggtgtgcgcatccacggcggaagtcccctgccgccaccagtgcgtggtcaacgtcctgtttggcgttgggaatcggcgggcgcaacgcgaggaaccgttcggtggcaggcgattgggcggaggcggcttcgtgcgggcggaatttctcgccgtcgctacatggacaccgcggaacctcgccccggcgtggtcgtacctccctgcggcagaatacttggtatgaggacccttgccctgtccgccttcgtcccctctatgcgttgccctagtgtgctgggatacttggatcaattgggttgtaggatgccgaaaaactatctgaccgacgtgcatctctgccgcgacttgaatgctgccgtgattcggcctgacccatcgtcgattcacggaattgattccaccacagagtccgcctga

SEQ ID NO: 19410 - DNA, 357 bp, Zea mays
  Peptide Sequence Number=SeqID_61189
atgcgcgccggggccaagccacgccacgccgggcacaagccgcgtcgtgcgagcgcagggcgccgcgggcaagccagccacgcgggcgaggtggccgcgccctgcgtgggccgcaggccgctgctgcgagcgcgctgcgggcaggttggccgcgcaccacgcacgccaccgcgggccaagccgcgccacgctgggcactggccgcccgccaggccacaccaggtcgtaccaggtttcctgagcatcgactacgacctggacgccgactccagcgggtacacggacaaggtcaccgacatcgtgtacatctccgacggctcctatgtcgacgccggtgacggaatttatgcaaattga

SEQ ID NO: 19411 - DNA, 195 bp, Zea mays
  Peptide Sequence Number=SeqID_61190
atggcgggggagcccgggattgcttgccgcagctccatggccgtcgcgggtcacgcgtctccgtgggcaggctttgtccgtgccctaaatcctggtatgtcgaactggtactgttcactaggacgtccgcatcgtgtagccgtttttgttggtgatatgggtgctttggtgccgttcggccatgctcgccggtga

SEQ ID NO: 19412 - DNA, 306 bp, Zea mays
  Peptide Sequence Number=SeqID_61191
atggtggcggtgctccggatgcgtggggaaagctctggagagcacagagaaccagagggggagagagcaaatggaggcacgtctcgagttgcggacaccaaggcagaactcaccgaggcaatgggcccgacgaggcctcaacggcgacggtggaacggacgtgcgggtgtggtgaacggcggtggtccttcgagctcggggaagaggcagcacatgagcgaaggtgggctgggaggtgtatgggagtggaggaaatcgcagagcgggcagaaggggggtttgagtaggtgccgggcgcgtgggtag

SEQ ID NO: 19413 - DNA, 126 bp, Zea mays
  Peptide Sequence Number=SeqID_61192
atggacatgaacagcttcaacaagatgggggatgatcccatctgcagcgggtggaagggcacatacggcatgagaggcggcaaaatggacggcaatgagatggccgacagttcatccgtagagtga

SEQ ID NO: 19414 - DNA, 2019 bp, Zea mays
  Peptide Sequence Number=SeqID_61193
atgaaccaggtgcaaggaaactggacaaatgcaaaacatgcgacgaagttggacagcatgatcccaactgtggctggcattggcgaacgttcatttgccctgctgtgccatgatgatgagtgtcgcgcgtcgggctatacgccggccgtcttgatcgcggctctgctggggctggggctctgcgtcgccgtcgttgcggcggagaagaggcggcggctagtcggcgtcggcgccaccggcgacgaccacgcggcggcgtcggccggactaagccagggaactgtccaagtccaagatcacggcgggcactggtgcagcaatagcaaccgggtccaagtccaagaaatgagctcgcggggtcccgacccggcgccgcccggggaggagcaggagacggcggaggagctgctggagcgcgtccggggcatggtgccggcggcggcggccgcagcgcgggcggcgggcgggttcccgggccggtggaaggcgatcgccgcgaagctggacgcgctgccggcgtgcctgtccgacctgtccagccacccttgcttcgccaggaactcgctgtgccgggagctgctgcagtcggtggccgccacgctggccgacgcggccgagctcgcggcgcggtgccgggagcccgccggcggacgggaagctgagggcgcagagcgccgtcgacgcgctctccggggaggctcgacctcggcctccgggactgcgcgctgctcgtcaagaccggcgtcctgtcggacgccgccggcccgtcaccgccgccggaggaggcgcccgacgtccgggagctgctcgcgcggctgcagatcgggcacgccgaggcccaggggccgggccgtggacgcgctgctggacgcgctgcgcagggacgagcggggcgtgctggcggcgctcggccgcgccagcgtcgccgcgctggtgcagctgctcacggcgtcggcgcccgcggtccgggagaaggccgccacggccgtgtgccaggtcgcggggtcgggcgccgcctccgaggcgctgctcgtgtcggagggcgtcctgccgccgctcgtcaggctggcggagtccggcagcgccgtggggcgcgagaaggccgcggccacgctgcaccgcctgtccgcgtcgcccgacgtcgcgcgcgcggtcgtcgggcacggcggcgccggcccgctcgtcgagatctgccggacgggggactccgtctcccagcccgccgcggccggcgcgctcaggaacctctcggcggtgccggaggtgcgccaggcactggccgacgaaggagtcgtccgcgtcatggtcggcctgctggaccgcggcgccgtggtggcgggcgccaccaaggagcacgccgccgagtgcctgcagaacctcacgtccggcagcgacggcctgcgccgcgccgtcgtgtcggagggtgggctgcgcagcctgctgctctacctggacggcccggtgccgaaggagccggcggtgggcgcgctccggaacctcgtgggcgctgtctcgcccgacagcctcgtggcgctcggcgtgcttcctcggctggtccacgtgctcaaaatagggtcggttggcgcgcagcaggcggcggcggcggcagtctgccggatctccagctccgccgagatgaagcgcgccgtcggcgagcacggctgcgtagcgccgctggtgcgcatgctggaggccaagtcgaacggcgcgcgcgaggtggccgcgcaggcgctggcggccctggcgagctgccctgccaacgcccgagagatgaagaaggacgacaaatgcgtgcccagcctggtgcagctgctggacccgagccctgcgaacacggctaagaagtacgccatcgcctgcctcctcacgctctcggggaccaaacgatgcaggaaggtcatggtctcgcacggcgccatcggttacctgaagaagctctccgacatggacgtggccggcgccaagaagctgcacgagaggctggagcgcggcagtctacgcagcatgttcagtagatag

SEQ ID NO: 19415 - DNA, 1605 bp, Zea mays
  Peptide Sequence Number=SeqID_61194
atggcggcgagaggcgtgcaggcgccggcgccgcgacggccggtgacgctgcgggacttcctggagctcggctgcgactccagcagcgacggcttccgctcctacccgcgccgcctgctgcccctccctcccgacgccgtgctgcacctgcagcagcagcaggcgcccccgaccccgcgggcggaggccgcggccgcccagcggctgctcaggcggagctcgtcctcgctcgcgctcgcgctcttctcctcctccctccccggctccggctccggctccggcccagctggcgcgctcgccaggatctccagcatctccaggagcttctcgcggcggatcaaggaaggcttctggaggcgccgcgacgaggacgagggcgacggcgacggcgacgacgactacgacggcgactacttcgacgaccgggactcgtgcggcttcccctcgcctctcgtcagcagctgctccgcctccgactcggacgagtccgaggcggacgtgacgacggcgcccgagcgcaacaaagccaccgcttcctcctctacgtcgccgtcgccctccccaagctcggcggaccacgaccgcacgcgcacggacgccgccgttgctgacggggacaaggcggagacggcggcggtagaggacggcgactcgacgacgggtgcgcccagcacggtgggggacaagcagcaacagctcagccccgtgtccgttctggatttcgccttcgatgacaacgacggcgaggaggaagggagcgacgccggcaccagctgctcctgctcctcccccgccttccagttccagcgctgcacgccgccggcggtggacctccacgggacgaagccgcaggcgcagctgctgcacaagatcagacggtacgacggcgttgcgcagggaatcgaccccgtggacctcgacgcgcggttcacggcggccacctcggagtccggggagtccgccgacgccagcacgcgtctcgcaaccaccaccagcagctcgagcacggacaccagcagcagcagcagcagcagcgcggagacaacggcgccacagcacgacgacgaggaggcggagcaccagagcgccgagcgcgcgctctcgccctcgccctcgctccactaccaggcagaccaagaagagcccgacgacgagtaccgcctgctcgcgcggctgctggagcacgacgcggcggcggcgggagtgccctggacgacgaggtcgcacgggtgctcgtcctcgacttcttcgcggagggcgcccgaccgtcgtctcacccgttcggcggcggccggcggcaggccgctgcacgacgaccgaagcgagtcgctgctagtgagggccgccgccgcgtggctgcgtggcgcggggccgcggtggggcataggggacgtggcgcgctccggaaaggcggcgctggacgacatggagcgcagccggcggtggatgtgcgtgggcgaggaggagtgcgacgtcgccgcggacgtggagtgcgacgcggtcgacgccctcgtggacgagctggtcaccgagctagccatcgtgctgccccggtggccgcgctgtgacgtggccgtcgatgatgataatgtgctcgttgactga

SEQ ID NO: 19416 - DNA, 435 bp, Zea mays
  Peptide Sequence Number=SeqID_61195
atgaagaagaagatgatgaagaagaagaagaaaatgatcaagcctcgacatcatcctccaaggacgaagaaacagtctgacgcgttgaaaaggtcgaggatcttctctttaacattgataagaaaaagtaaagaaagagaggatgcttcgcatgtggggagaagggccactttcgagataattgctcaaattcagtcgaacccaaaaagaggagcaaaggcaagacacaagtgtcaagacttgggatggttcttcaaggacccgcagccaccactcatcaacatgttcttcacgttcatcacacaaatgccttatggcaagagcaaatggctcaacttaaaaactttgaaaaacaagttgcttagctcccaaaatgactacaaatgcttgctagagaaatttgaaacttttgcaaaatttgaaattgtgagctaa

SEQ ID NO: 19417 - DNA, 684 bp, Zea mays
  Peptide Sequence Number=SeqID_61196
atggcggtgcatgcccgcgccgctgaggctgggccgctatgccgaggctgccttgctgcggctggccgcgcgctgaggctggggccgcgtgcccacgctaccagagagccgcgctctggccgcctgcgccgccgggggactcgcccgcgtgcgcgtcggggcagcgcgcccgcgatgccaaggaggccgcgccatggacgcgcgcctgcaccgccgctggggccctgccgggtctgccccacggctggctgcctcgcccacaaccgccgggacgggagacgccggggccgaggccaccgcgcccgagtcgtctcgagcggatctgcctgtgcgcgccgccggggactgcgcaccgagccgttgaggctgggggccgccgcgcgctgccagggaagcgccccggcgccgccgtggccaaaccgcctgcaccgggacaggagccaccgggcccggggccgcgctcgtgtgtgtaggggctgcactcgcgcgtcgccggggcagcgcccaccggccaaggctgcgcgccgccgggatgccagcctttcccgagccgccagtgccccgatgcctgcgtcgcgcccatgcctgtgggttggcaccgccgccgccaggagatggaatggccggttagggttcaaccctaactgccagctccttgaggcttcgctaagatgggcctcatag

SEQ ID NO: 19418 - DNA, 486 bp, Zea mays
  Peptide Sequence Number=SeqID_61197
atgggcgcgacgcaggcatcggggcactggcggctcgggaaaggctggcatcccggcggcgcgcagccttggccggtgggcgctgccccggcgacgcgcgagtgcagcccctacacacacgagcgcggccccgggcccggtggctcctgtcccggtgcaggcggtttggccacggcggcgccggggcgcttccctggcagcgcgcggcggcccccagcctcaacggctcggtgcgcagtccccggcggcgcgcacaggcagatccgctcgagacgactcgggcgcggtggcctcggccccggcgtctcccgtcccggcggttgtgggcgaggcagccagccgtggggcagacccggcagggccccagcggcggtgcaggcgcgcgtccatggcgcggcctccttggcatcgcgggcgcgctgccccgacgcgcacgcgggcgagtcccccggcggcgcaggcggccagagcgcggctctctggtag

SEQ ID NO: 19419 - DNA, 1218 bp, Zea mays
  Peptide Sequence Number=SeqID_61198
atggccgcctcaggctactcgggctccgcgcccattactgatcaggggttcgaaggctggcccccgaaggaaggacagcgccgcctgcgccactccgactgcagtgccactcgacagagtgagtctgacaggcaattaggccttgccaaaggcgccacggcgaactccgctccgcccgaccccagggctcggactcgggctaggacccggaagacggcgaactccgctccgcccgaccccagggctcggactcgggctaagacccggaagacggcgaactccgctccgcccgaccccagggtacggactcgggctaggacccggaagacggcgaactaccgctccgcccgacccccagggctcggactcgggcttaagacccggaagacggcaaaactccgctccgcccgacccccagggctcggactcgggctaggacccagaagacggcgaactccgctccgcccgaccccagggctcggactcgggctagggcccggaagacggcgaactccgctccgcccgaccccagggctcggactcgggataagacccggaagacggcgaactccactccgcccgaccacagggctcggactcgggctaagacccggaagacgacgaaactccgcctcgcccgaccccagggctcggactccgccctggcctcggccggacgacttccgcctcgcccgaccccctggctcgggctcggccacggcagcagaaggcagactcaacctcggcttcggaggaaaccccacctccgccagaggggcaatgatggcgctccacgagctctatgacgacggcggcccccagctctcttacggcagcaggacaacgctccgccgcacctccgatagccacgacatcacgccagcaggatgcccagatctctccggctgccacatcggcatggccttctcagaggaggttggccgcgcgggaccgaggacgggacaggcgctctcttggggccgctcgcttccctcacccgcgtggacgcttgtaacccccctactgcaagcgcacccgacctgggcgcgggacgaacacgaaggccgcgggacttccacctctctcacgctcggctccggccgcctcgcctctcccccctccgcgctcgcccacgcgctcgacccatctgggctggggcacgcagcacactcactcgtcggcttagggacccccctgtctcgaaacgccgacaagtag

SEQ ID NO: 19420 - DNA, 147 bp, Zea mays
  Peptide Sequence Number=SeqID_61199
atggcagaggagagcgcgcggcatccggcggtgtggggcgagggtgaggacggagttggtggcggcagaatcaggcaagaggaggcaggggcgaatcgcgatgacttcggggcttgggcgtggatccaagaatgggagagcctctaa

SEQ ID NO: 19421 - DNA, 1047 bp, Zea mays
  Peptide Sequence Number=SeqID_61200
atggcatcacgctccttgctcaggaggattgggatccaaccggcctatcgtctttccggcgaccactgtggcccgcgactgctccgcttcagcgacagtgaggcactccatcgtttgattccactaacgggggatcgatcggtatgcggcaacacgtacgggtcgccaagcaagacggacagcaccaggagcatgtacaccaccatcgagtacatatctttaactgaaactggtcctacagttccatcggtcactactgtcagggtggagtatggtgacgacgcaattgcaactgactcgtcaggcgctcatatagacaaagaacatgagggtgaacagattggtcgggctgtgttgaagaatgtcttggatatttttgttgaaatcgggttgggtcaaatggagtgttatgagaatgactttgaagatttcttgctcaaggatactacagagtactactctgtcaaggctcaaagcaggatttttgaggactcataccaagattacatgattaaggctgaggatctttgtatgatgtacaggctcttctccaaaatctcccatgggtgggccgcacagccaaagctggtcaatctgggtgttcagaagcatgaagaggtcagtaaagtcgaggatgacattgttctcagcccaccgtcccagcgtgcagcccaccatgtggccgaccgtgttctcgcatttgacctaaccaccgccaccccactgctcgcgcagcctcctccaccgtgctccaactccggcggcctcccctccctctcctccaccccaccatcggactccacctcctcccccaccgcaccgtcggactccacctccccaaatggcgacctccaccaacccactgccatcctccaactccgcccccaccggctgccttcgccgaaccctctgcttcaacgcgcggcaccaccgtctcggggtcagtggactccccctacccccacctctgcgctccacttccgcgactcgcgctcgacacaatcaaggaaatgtgttcttcctccaggagccaacgtggatggctga

SEQ ID NO: 19422 - DNA, 492 bp, Zea mays
  Peptide Sequence Number=SeqID_61201
atggtgattgacgccgtactcccaggatacagaagggaaatgtggagtgttgtttacaagttcacctttgtcatcatcgacgaggcaagatactcggtggagtacatttcagaagctatttatgttagttggtccaacaacatcgctcggaccagagaaaaaatgtctgtgtttttatggacgcccttttcaggtaatcagccaattatatgcagcaacggagcctatgaagaagccctattttctgctgctgtttgccaactccaagcagatcgctcgctgaagaagcccaccctcctcgctatagaagcaagttcagaaggtttaattttcatttttagtgttggtatggactattggcatgaggctctttgtattgtggaggaggctaatatgatgtatgaagcgcctaccacatggacatatgctgcttctaccacaatgatgtatttgcctctactgtgggggatagatatcccctgggtccactaa

SEQ ID NO: 19423 - DNA, 774 bp, Zea mays
  Peptide Sequence Number=SeqID_61202
atgcagggtccttcggcgctgccagctccgacctgggcgccgccaccacatccgtttgctcctctcgacgcttgtcgacaattagaggctctcccattcttggatccactgaagcatttagaggtgctctattctactatcaaagtcgtccgatcctgcccacccaattttctacccccgtgtcctgatcccaccgcccaagccccgaagtcatcgcgattcgcccctgcctcctcttgcctgattctgccgccaccaactccgtcctcaccctcgccccacaccgccggatgccgcgcgctctcctctgccatctctctcaacgtcttgcctccagagaacacgatttgttctgttgttcccaatctccgccttcgctccggccgccgatcccaccgggtgcgcctactatggtgcacgcagttcgggtgcgcctactacggccagcgcgcgcagccggggccctgcccgtgcccgctgcaccaggcgtgggggtcgctcgacgcactcatcggccgcctgcacggcgtacgaggagagaggcaggacgaccgagtccaaccccttcgcgacacgcgccatgtggatctacctccgcgaagtgcacgactcgcaggccaaggcgtgcggcatcccctacgaaaagaagaagaagtgcaagcgcacgcagcagactacggagccttcgacgagctcgtctgctactgccgtcgggagcggcagggctacaacaacaactgttgcggcgtccgctgctcaggctggagggagtag

SEQ ID NO: 19424 - DNA, 144 bp, Zea mays
  Peptide Sequence Number=SeqID_61203
atggcgcggagggaggcgcggtcagcgggcatgcgcgggcgaggatggcgcggtcgcgagggtcacggaggcggcggcggagccacggcatatgtgcagcagctggagagcagtaagctgaagcttgcacaggtggagcagtaa

SEQ ID NO: 19425 - DNA, 1335 bp, Zea mays
  Peptide Sequence Number=SeqID_61204
atggctgcctgctcctccaggctcctatacctcactctgagctcctctttcctccgctcctgccgcctcgcgtccagctccctacttcccaccgcctcccgctgccacccggggtcgctccactccctccgcttctgctctgctgtccccgagtttgtcgatgtcgccgccgaccctgccgaggcggctgtatcctccggacacccgtggccggagtggggcaacttccttgataagctgcgggccaaggggtacttcgagcaaggtttgccctccagcgtgagttctggcgagggagccgccggagatggggatccagcaactgcatctgagaacgcagcaacggctgcttccggtaatacggtggtggatgcggaggatagcgcggtgacctcggaagatatctatcattttctcaaggacgagaacagggtgaagaatgcgtgcctcaaatttgggcgagaccgcttcgatctcctcagcttgcttcccaagcaggatattcaagctattgttatgtctggctgtcctaataacaatcggaagcccgtctattctgcaaaaaggttgagagagtacgtgcaggtcaaagaagaagatgcatgcagcatttgcaaatttaaggcatcttgtgatagagcttatgtcactccaaagggtgaggttgaagttaggactgttgatgttgttcgtatactgttaagttatgcaatggataaaaaccattcaggagataactctgttatcgaagaaagtgtgcaagaatctgcaaaaaagcttctctcaaagcttactgaatttagtgacacaacaatcgatccatctcttccgaaacctgcatttcaagttgctaggaaggctcagggctcagtggggaaggggagagaaacgactgcagttgaaatgaagaagggtgactggttgtgcactaaatgcgactttgttaacttccgacgcaacgctatctgcaagaagtgcaatcaggaccgccccgaggatgatacccgagatagtcagcggggactgagaaaaaccagaggggctggcaagtttagaagattcgactatattgatcagaagagcgatgacgatgatgacaatgcctggttccagaagcgtggggcaagcatgaggtcgaaaccggaccagagaaccaccactgccaagagcagaggctctgacggtctggatgatattcttgttaccaccaagcgtagaagcaccaagcaagacgaggacgacgaggtcttgccgtacgagggtgcgcgcaagcatgttgtgagcagaagggcaacgccttcccagaggaggttcacggctgcccgtaaccagtaa

SEQ ID NO: 19426 - DNA, 528 bp, Zea mays
  Peptide Sequence Number=SeqID_61205
atgacagcagcggcggcccctttccctccttccggtggatctgggcaggcgctgcctctcgggaagatcgttgtcgtccggggcggcaaggtccaacggtcgcgggtccgacacgcgcaccctagggctctgttctcctcggtggctctacgcatctcacggcggcatcgtggtggtgcagccaagagaggccttggcagggcttgccttcttcgccatggtggcacggcggtatgcttcgcgttgaagcgttccggcgacgtcgaggtggtgcttcgaccccccctatctcggttgcttagtggaggcagcgtcaatgaggaaggtgctgggcacgagtggagacatgcgccgcggcgtggacgttgcacattagtgagggctgcgctcagcaatgaggagctcggctcggctcgctgcggctcggctcgtccatctggcgagctcggaaaagcggctcggttcgctccgcggctcgccgagccaacgagcctagtcataaacgtaaatctactctctaaattataa

SEQ ID NO: 19427 - DNA, 156 bp, Zea mays
  Peptide Sequence Number=SeqID_61206
atgccgcctaaatccgatagcgttgaaggaatcgtcctgggtttcgtaaatgaggaagaacttggtatcgagtacgacgaagatgttgatgtgaacgtgcagtcttactctgacatgctagcaagtctcaacaaaaggcgaaaaatttcccgctga

SEQ ID NO: 19428 - DNA, 951 bp, Zea mays
  Peptide Sequence Number=SeqID_61207
atggcctcggaccaacaggccctctcggtcccggtccccgtccccgtcccgtccaaccctaacccgagcgcactagccgacccgaccccgccctcggcctccgccccgcgcaagctccctatcaagcgccggtccccgcggccgtcgtcctcgcccccatcctcctctccggactcctccgacccgctccgcgcgcccgcggccggcggcggtggcggcggatctgacaagcagcagcagccgcccttcaagttccagcgcatctggtccgagtccgacgagctccgcttcctgcagggcctcctcggctgcggcgcgcagggcctcgtcttcccacgcgacctcaacgtcttctacgaccgcttctccgagtccatgccccagccctacacccgcgcccagctctccgagaagctccgccgcctcaagaacaagttccgcagcatgtccgcgcgcgtcgcggagggcctagacccggctcgccttgcgccgcacgaccgcgacgtgctccacctctgctccaggctgtgggaccccgccaacgccgccacgtcgcccttcgtggccagcgccggaacgtccgggaacaagcgccgccgcgccaacctgcagggcacgtcactccctcccccagacgcgtctggggatagcaactcccatgactacaatgggattaactcctctgctccctgtttgtttccggatggttccaatggcgaggatatgttttaccttgagcaagaacctgggcacctgggcgaccatgaagcttcactacaacgtctacattcagcctgcaatacccatgatttatttgcaagcgcttcctcgcttgtctgcagcgcatccacacttccaccccaccacgccaccggcagcgcccgcctgctccaatggcttctcctcatccccgcctgcctgcaggctgcagccgccttccctctgggctaa

SEQ ID NO: 19429 - DNA, 531 bp, Zea mays
  Peptide Sequence Number=SeqID_61208
atgtggttctggagcaagcgaccttgcgcaccgtcgaggtcacggaacagcggcacacagcttggcgacgggataagcagcagggcggggtcgtcgaccggcaacggacatggcagcaaggcgacggtcaggccgagccagtcgagcaccggcgagactttgtgggtacagatcggcgctcgcaacggagttcgcgcgcacgcagagaggaaccttggctgggcgcgcacacaagggagcttcgcaagcttgaggggcacaacaccatgtggcgagctggaactggacagagcgcggacgggcgggattcgagcggaggccagagatgcgcgcgcacggaagctggagggcgagcagggaggatcttggggaggaaaccgcggccaaggagaggcggccgagctgaaggagcggcgcgccgaggaccgggaccaggggcgcagacggcggaactccggctgggcgcttctgctggtgagcagggagcaccagggagcagcggcgtcaggcgctgagcaagagctcgactag

SEQ ID NO: 19430 - DNA, 279 bp, Zea mays
  Peptide Sequence Number=SeqID_61209
atgccgcagctccgccacaaaattcgcgggtgtgggctgaccgggctagccccccagaccgggtacaaagagcgacccgtgcacttctacatgctcctttctcccctctcctcttaccttcttgcgccacacataagcatctgggacgccgctgcagggaccatgggggtgggcgaagttccgccgttgtgggccggcatcgaggctcccataccagtcccgggcgcttcacctactcaccggatggattgtgtggtcccagcgggcgggattggatga

SEQ ID NO: 19431 - DNA, 381 bp, Zea mays
  Peptide Sequence Number=SeqID_61210
atggactgcggaatcaattttaaaaagatccagggttggatttgcaaggatttggacctaataggtctcttttacaatttcacgctgccgaaggtgtatctcaagatctcagccataggatcaatattcgacggtcaccattatatcaagtcatgtaatgtaccgtcgaactggtacgatgtgatcaaatctggggcgtctagtcttggatcggcggtcagtactcaattcacccgatccccctactctctgactaaccccggcgcgacggcgcacattcacatggcgacgccatggctggtgcatcgcccactaagaacccgagcacaaaactctaacacaagggacgatacgtggagcggagatgaaggcaagaaataa

SEQ ID NO: 19432 - DNA, 165 bp, Zea mays
  Peptide Sequence Number=SeqID_61211
atgagtcaagcggacacggcggccgaggcggagcagtgccttaagctcatccttagtgcccgatttttcaccgaggagcgttatccttgttcgaccgggcgtgaattgcgacgccggtgtgaatctgggcgcgaggtcaccggcggaccatttgcagggcattaa

SEQ ID NO: 19433 - DNA, 177 bp, Zea mays
  Peptide Sequence Number=SeqID_61212
atggaggcaagaggaccggcgcggctcacccttcgccctcttcactacaagacgaaggcctacgacgaagtctctccatcccacatccccacccgacttggaggcccacggataatcaaggtgcctgagggcataagcgtccttacatcgggacgttgggcgctcgggcacctataa

SEQ ID NO: 19434 - DNA, 222 bp, Zea mays
  Peptide Sequence Number=SeqID_61213
atggcggccttcctcgactcgcacgacagcgaaatacgcccgtgccgccgagccatccccgtgaacaacaatgctgcggaatacgaccagcgtgacccggtgactctccaggaggggcaccgaggaccaaccgaatgcccaatcgcgccgttgactacggtggctacactgctttccttctgcgctttctcccaatggcggctattgcggtttgatggatga

SEQ ID NO: 19435 - DNA, 387 bp, Zea mays
  Peptide Sequence Number=SeqID_61214
atggagaaggagccggcttccatggggaagaagtggaggaggccatggctgctggccgagctccctgctgaccaccgtgaggaagaagacagggcgtcggctggagcagacctgcgcgagggagaaggaggaagagagtggcggctgaaaaatttagaggggtgggagtgcaaaattgccatgtgcaagggaagggatcccaggggtctatttggaatgtccaggggcttatttgtgaaatccgtgggcacaactgttaatgcaatagcacttgatgatcggcagattatttttgggaaacaacagggtcacttttgcaaaatggcttcagcgaaggggtatggagcgattaaagccgcacgatcagaggcgcacggtgcatattaa

SEQ ID NO: 19436 - DNA, 726 bp, Zea mays
  Peptide Sequence Number=SeqID_61215
atgtggaggttaaagatcggagagggaggagggccatggatgcagacggagcgccgcaaggtggagcagcttcgccgggcgttcacagagaaccgcttccaaagaagggaatcgcaggacctcctcatgcgcatgcagttcaccggacaaaaacatctgcatgcggacgacatgcctgcggcgttcgccaagatagaggagggcgacgaggtgacggaagaaagattgcgggagtcgctgaagcgagcgatggattggatgtctgctctccaagctgaagatggccactggcctggtgatttcagtgggattatgtacatgatgccgttctggattttcgcactgcacatcaccggaactgtcgatgctgtcctgtcgaaagagcatagacgtgagatatgccgccatatctacaaccatcagaacgaggacggcggatggggcttcaatatcatagacgagagcgccatgttttcgacgtgcttaaactacaccagcttgagacttctgggtgaggtgcagcaggaggagaacgatgggctagctaaaggtcgagaatggatcctatcccatggaactgcaactgcagcgccgcagtgggcaaagatactactctcggttattggtgtatatgattggcgtggcaataatccagttgtgcctgaactatggttggtaccacgtttcctcccgatccacccaggtttgaccctctttactttctaa

SEQ ID NO: 19437 - DNA, 408 bp, Zea mays
  Peptide Sequence Number=SeqID_61216
atggaggggtcgttaccggtgattgagctatgcagagtttggttcgtggtgatgagtgagtttgcggtagaggacaagctccgacgagcaattgtctatctcatggtgatccccaagcccaccatttgcacggacacaatcttggggtgcccgcgaactcccccggtctgcaccaggacccagaacgctggtgcattcgacaatcgagcaagcggccttctccctcctattctctctctgctctcactcctccactcggtttcaatggacctctcaatatgtcttggcgaagagattacggcgggcgcgacttacttatacgcccacagcggagtccggatgagggcgtcggtgaacggatcccctcggtttccacaggtttgttacgcacagccacacatgagatag

SEQ ID NO: 19438 - DNA, 378 bp, Zea mays
  Peptide Sequence Number=SeqID_61217
atggggtccatgaagtgttacaaagaggctgcctcaatggacagtgttgtggccacacgttgcagcgtgtgggactgtgggtttagagctgcgcctggcgacgcgcgagaggacggagccacatattgcaatgctagagactcaggggctgcctgtggtggcacagggatgtcgtggtcgtgcttggtagtgtgggagactccacaaccatttgttaaggtgcaggagactcaaggcccgcatgttgtagcacatgagacttcaaggctacatgtggttgtgtgggagacgatgatgccacacgaggcagtatgggggcgtcgggaacacacgaggcatgtgttgtcttctattgcgcttatcacctattatctatag

SEQ ID NO: 19439 - DNA, 399 bp, Zea mays
  Peptide Sequence Number=SeqID_61218
atgccgaggcgaaggggtacggggaactatgatccatccgatccaaaaccagtggcccggattagaagttgtctaaatcgaaccgggctcgatggtcaggatcggacgagcgaagaggtaaagcacgatcggatcctggtcactggatccgcgatcaacggcagtcgccctcccctcacctcacccacatcgcactatccccaagcagcggcgttatacagggccacggcggaggccatcgccgagggtcccgaccacgatgacgcatggttctgcggcggtggagtagcgccggccgagttcgacgcgaggttggagcacgggacgttcgtgcgtggcccggcaacaaggagtggcaatggcgacggcctggtgcaaggacgagcttgccggtgttga

SEQ ID NO: 19440 - DNA, 856 bp, Zea mays
  Peptide Sequence Number=SeqID_61219
atgaaccggctcgtgcggcgggtgcgcgtgcgcccggcgtcgttgcgcaactggttggcgggcccggtctggcagcccctttgtgcggtcacgttcttccaccctcgtgcctctaccacacggtcccatgcgtcagttcgcctatggatcttcctcacgcgcggacttcatcagctcagttccagtcaaccgccctccgagcatggcgggcgtgccgacgaagcggggatggctcgtggccaaacccgtccccacctcgccgctataagaccgcaacaaaccatagccaaccttccctttgtccatctctgcacgcaccaccagaagcaccgtgaagatagtgaaagggaggccgccattggtgactcgaatcctaggagaaatcccggccgcgattgtgacctggggcagagcgtctggccggcggggtggacttcacgtcgagccacagatggggatgctcctatgcgtcatgttgctccattccatcctcgtggtgttgctctggacgtcgccggcacatgtgtggtctcgctgcagactcgtgctcggtgtgaggatcatcagagcaagtccttcgttgtggagccgcagtcggcacggaccgcgacaccaccaccacctgttcgaggacttcatcgtcggctttcttcctccatcatagttgacgccttggcatgggtaggtctctacgctacactggtgaggtcgcctaccttccccttctgccttctgcttgccatagcagccgagtgcctcagcccccgcatgttcttatattgccagcgggacctccaccttagggaatggcggcgccgccgtgttcctgtgtctgagaaagaagattcagtttgtg

SEQ ID NO: 19441 - DNA, 282 bp, Zea mays
  Peptide Sequence Number=SeqID_61220
atagctctcgctactcctttctcctcaaccgcctcccactcccctcatctgcgcgagccgcaaccgtcgtccgccaagccgtcgacgctacaccaggcctccacgccgagcctccgcacgaggcgcgaccgcgcgaggcgcgaccacgcctccaagctccgtcgccctggaccgccggtgccggacaggcatgagctccgaccggacctgcccgcgcccaggctgaggcgccgcctacccgagctccgccaggccgcccgcccgctcggcgggacgacttga

SEQ ID NO: 19442 - DNA, 450 bp, Zea mays
  Peptide Sequence Number=SeqID_61221
atgggggcagcagcgtgcactgaggggcatttcgtcgagcagaccgagcaaagaggagagtggcttggggcttgctgttgtggtggggcggacagcgaggtagagcatgtcggcaacgtaggagctcgctgggtttcggcgcctagtcaggctagggtgaggcgagccgatgtggggctaggcgagggaggaacacatggtctagacactgcaggagccatggccaaacctacaggtgagctcgctggtgcgaacccaaggtccggggcgaggccaagcatggctctgttgacagatctcgccatggcatcgatgaaggagcatatggcgcgaaatctggatggagcaaggtccggtggcctgcaggtgcgcaaggaagaagacatagggggaaaacaagcgtcggtcttggagaagatgggtgcggcctactgcaacctagtggcctag

SEQ ID NO: 19443 - DNA, 1143 bp, Zea mays
  Peptide Sequence Number=SeqID_61222
atgaaacaaattggtccacagggaaagaatgtgattggcttcatgtttgctctcagtcgtctggcatccacactgtgcaccattgtgcttctcgcccccgaccacctccccactcccgcgctgatctcgcaccgtagacactgccccggcgcccccgcctcactgcgccccgaccagccacgtgatctccagcccccgccccgtgtgcctttgtcaatcctgtcctccgtgcccgtcgtgatctcctcccccattcccgatctgaaatctcctcaccctggctcccctcgtgcatgcaccatcgtgatcttctcccccatttctgatccaaaatctcttcgccctggctcccctcgtgcatggatccaagctgtgctgcgagtcggggaggcggtcgcagttaacctcacctacacactctcccacgtgctcgacgagagtgtctctctagccaacccccgcgacgggcgtgcaggcacggccgacgcggctccacggcgatgcgtccacattcagtattggtgcacggttctgtctgcacgccccgcggcaaccgccccctcctctgtctcccgcaatccccgcggtctctctcagatccgcgcccacgacatcctccgccccagatctcgcgttctccatggaaggcgacatcctccgcccagatccctcatccgcgacatcctccacccctggatcgccgtgctcggctctctccgcgtccgccctctccatggagccgtgcccccgccagccctcgcgcgagtgacccctcccttggtgcatcgtgcccccgcccgccctgctctctgtcgcacccttctagggatcctccatcgccgctcccgccatcaccgtgctcgcgctccatcgatggaaggtgccgcccctgccatccttgccccactccccacaatccccttccatcggcgatatacccacgcgacgcgcggcgccaggtactactccgccttctcgacctcggcctccatggtgcccacctggcctgctgcggtcgtcgttgccatgctcaaagcggatccaggaccccatcccaacatcttcctaaaatcctcggatccgcccccttcctccgcagcttgtgtcgcatcttctatctattcaccagcaaggatgatgtag

SEQ ID NO: 19444 - DNA, 168 bp, Zea mays
  Peptide Sequence Number=SeqID_61223
atggatggggtgaagctagaggcagaaggagaggaggcgagggagcggcctggcgcggtgctaggcgagatgggttgtggcagcggggaaacagaggacttaggcccccactccttgttgtcgccggtggagagggtggatctcgtcggaggcgctatgggtgtctga

SEQ ID NO: 19445 - DNA, 210 bp, Zea mays
  Peptide Sequence Number=SeqID_61224
atgctggagcagcaactaggcacgacatgggagaaacctgtgactagggacgtccatggatgggagagggagaatggcgtagaacggagaaagaggggcatgactcgatttaaaggggctggcggctacgtctggttggccaagagggggggcgtcaacgattggtgtaggccgagaccatgggagagctcctgcccagcgtcagcgtga

SEQ ID NO: 19446 - DNA, 540 bp, Zea mays
  Peptide Sequence Number=SeqID_61225
atggccgcacttgtatccaccatagctaccatgggagactccgtctcaggaccaatcaggaaaaagtctgtgggcaagttcaatcaggagtggggcatggtcttctgtgcaattgtatcatttttatatttttctcccatagggtgcgacttaggtgttcagggaaaaataaggttgttcaatgtatcccacttttggcttttctttttattttcgaaacataactgcaaaaatctagattcatttgtttatccgacttaccttggtgttctgaggtggaaagcttctcggatgctggggagacaattccctaagggaatttggctggggatagctatggacgcgggtacacgctcaccggcggaaccctggctctgcgagggtgattttgggtttcttgcaaagtggagctctggctggggttctggagagtttcggggagctcaggtggacagggtggaggctatagttggggtggcgcgtgttcgggtacggtggttcaccatgaccgaaccttggcagcaatggcagcgactgtga

SEQ ID NO: 19447 - DNA, 486 bp, Zea mays
  Peptide Sequence Number=SeqID_61226
atgacgacgtccgtgagcgctcgcgctcaccgcctcgccgtcttctctgaacgggctccctggcgcgccccggcagcacgctcgcccggcctcgggtgcacgcgtcgcgggcggctccctggcgcgccccggcagcacgcgctcgctcggcgcggcggctggcccggcgcggcagcggctcgcccggcgcggtgctcgcccggcgcgggagctcgccagcccggcgcggcggctggcgctgcagcgcgctcgcccggcgcggcagcggctcgcccggcgcggaggctggcccggcgcggcagcggctcgcccggcgcggtgctcgcccggcgcgggagcacacagcccggcgtggcggctcgtcgaggatgccctgcggctggccagcggcggctggtgacggcagtggttgtaaaccctaactgccatcacttaaatggaccacgcacgcccatagatgggccagtttgcttacccatgtcgtag

SEQ ID NO: 19448 - DNA, 687 bp, Zea mays
  Peptide Sequence Number=SeqID_61227
atggacagcggaagcgattccgacggcgctcccgaggagctcactgctgtgcagggtgttgcgaagcacgaagagaccagtaaagtcgagaaagacagtgttctcaggtcttttaacttctacactttctttgttttagatgtttatatagttttgtgtatgactcgtggtgtggttctgtggccatccagtccaatgataataatgccatatggccatgtgggatgtctttgcagagtaacacgggaaggaaaggaacggaggaaacgttgggcccaacgaagaacatcctctaaaccagataagaaggcgccaaaggaagtagaagatgaagatactaaaaaaagtgaggagcatgaggagacaaatactatgcctggcatgctccccactagtgtaattgaaattctagcagctcgtgagaagcaaaccttcgcatcagattccgaggaagaaaatgtaaagcagaaggtccagaggagaaagaagagaatgaaaactgatggttgttggtcggtcaggcctgaaactattctgctgaaagatgtccgttcaacgcaacacgtgaagaatgcccttgatttcttggagcataggaaaaatcgtgtcccaaggtcaaatgcagttttgaagaatgccagtaaggctttgcgtctcctgtcttcgaaagcatatccttttgtgtga

SEQ ID NO: 19449 - DNA, 324 bp, Zea mays
  Peptide Sequence Number=SeqID_61228
atggtgaagccccaggacgagcaatcagatctcgagcaacgagccttagaaatcgcggagtccggccataggaacagcaatagcggaaccacagtgtttgttggcgcaagctccggcgaagaggacgaacccgacatgcgggccccagccaccagtgaccccacagccacccaggcgcgcgagattatgactggagccgctgtcgcgtgggcctggtggctcagtgggcgcgacgtggagctgtcatgcaaggcccatccgtcagcgagccagcaggcgcgcgcgcggatccgtaagccaggcgggctaggttgggctagatga

SEQ ID NO: 19450 - DNA, 564 bp, Zea mays
  Peptide Sequence Number=SeqID_61229
atgacggagagagatacagcacagttctttctcccggtgggcacttgtaggccgcccagcgccgacgacaaccgcctccattgctcgctgtgttgctctgctgctgagcgggggggggggggtggaggatggggggaggcaaatgcactgaccggcgccgaggaggccactggcgcgttggtaagcacccaggggttgtcctcctcctcgcgggagcaggagccgcgcgaggccgcgacgcccggcggccccgagtccggggcgcgcaaggtgagggaagcaatgggaaaccgaagaacaggggagagagagagagagggccgcgcaggcggtgctagctggtggcggaaaaatgcagtgatcggcgccgaggaggccactggcgcgttggtaagcacccaggggttgtcttcctcctcctcttcgcgggagcaggagccgcgcgaggccgcgacgcccggcggctccgagtccgcggcgcgcaaggtgagggaggaggacagcgagtactaccggggaagtcggcgccgccgccgccgccaccgtgtctaccgtaaaccctaa

SEQ ID NO: 19451 - DNA, 429 bp, Zea mays
  Peptide Sequence Number=SeqID_61230
atgggcaagaacaataagcgcaagcgtgagcctactcctccatcggaagagtttggtgactcggagtactcagaggaggagttctcctctgagtctgaggggtctccggctcccatccccctgcgtgagtcgtctgacgactcagacgactcccaggggctcgcggcggaggtctggacgtacatccgggccgtcgagcgctccgggctcgagggctcggatgagtcggagtactcctcggatgaggaggactcggacggcggcggcgaggacgaggacgacgacgacgacgacgacgacggtggcgacggtgacggtgacggcagcggcagtggcggcggtggcggcaaggacggtgacggcggcggcagcagcaggggcagcaccaggggcggcaacggcggcggcagcaacagggccagtggctag

SEQ ID NO: 19452 - DNA, 591 bp, Zea mays
  Peptide Sequence Number=SeqID_61231
atggcagccatcgtggagaagctcgatacgcgcagagaacttgagggagagagagaagggagatgcgactggaggaagaagagcagagcaagaatactggatgccatgcaaaatgttgttaaaaatatctgtgacaaggccaaggcgctcacctttctcggccttcaacagccgcattgtggaggtcgccgtgccgctcgcctttctccagccgccggcttgcaggatcctcgcgcccaggctccagagaagctctccagagaagagggagatctggtgccttgcgtgaagaagaggagggagatccggtgcttgcgcgacgaagaagagtccgccatgcacgagaaaactccggtgtttcgccgagcgcgcggtgccagggagtgcccgtgctcagcgaaatcaccgagcgacgacggatccagtccaagggagtgcgaggcagtgagcggcggcagcttcgagagggagaccgggaggcggcggctttgcgagggagatagggaggaggaggcttcgcaagagcggacagggaagctcttcccgacctgttgtggtggggagcgaaatcaccgagctcccttgcggtga

SEQ ID NO: 19453 - DNA, 2103 bp, Zea mays
  Peptide Sequence Number=SeqID_61232
atgggcgaccccctcgccgccctccttcgcagcggcggcaatcctcactccgtacacggcgtggccatcaagcttggctgcattgtctccacctttctttgcaacaatcttctatatgcctacctgaggcgccaggtccccgcggacgcccgcaggctgttcgatgaaatgccccgccgcaacctggtgtcctggtccgtcgtcatatccggctccgcccaccatggcgtcctcgcggaagcgttcgcgttgttctcccacatgcttcacggcgcggggcacggaagctgggaccgcccggactcgttcacgctaggggccttggtcgccgggtgctcccgtgccagagatgtcgacgctggcatgcaggtgcacgcttgcgtggccaagttcggcgtcgacgaggatgatagcgtcgcggcggcgttggtggacatgtatgccaaatgcggttgggtggactcatcgtggcgggccttcacgctcgcaccacagcggagcgtcctaagctggacgagcatgattgcctgtctggtcaaccaaggttcgtcaggttactatgacacatcacttctgctgttcaagaaaatgctggcattaaaggtttggcctaccaatgcgacgtattcttgcatcctgaaggtgtttgatacgcccgatttgctatccgttggaatgcaacttcatggctgcttgctgaagatgggaacggaggttgacactgctttggggactgccttgatgacgatgtatggcaggtgtggtggagttgatgagatacctaggttggcttgtcgtataaggcatgatgcgctttcgaggactgccctgcttggcgcttatgcacgtactggatacaatgcagaggcaattggtgttttcaaggagatgatcatgaaaaatatggcaattgaccagtcagctatgactgatgtggtgatatcaatagtgctgaaactgaaaatgctccggaaagggttgggatctccagtattttgcatcactagtgtgctacgagccagttctagcatctcaaatcttgctgttgggttgcaaatccattcgaggactctgaagctaggtattgatgatgataattctgtacagaatgcactcgtaaccttgtatgctaattgtggaagtgttcaggttgcattgaagatatttaactcaatgagtaatagagacatcgtcacatggaatgcattactcacaagtttttcacagcatggcagtgaggtggcagccattcagctttttgatctgatgcaagaagaggggatctgcccagatgcttacacttttgttggcctgctatcatcttgcagcagaatgggccttgtaaaagaaggctgtgagtacttcaatgaaatgaaggaaaaatacaacttggaacccaagatggttcattatacctgcatggttgatctacttgctcgtgctggaagattttgtgatgcaatggacttcattgatgcaatgccttatgaaccagatcaaatattgtgggaagctttgctagcttcatgtaaggttcacggaaatttggggttaggaagaatagcagctaagaagattctggaaattacaccacatgattattctgcatacattatattatcaagcattcatgcttcagttgacatgtgggatgagaaatactggaatcgcactgtattcgacacccagcgtgcaagaaaggatactggaaggagttggattgatgcacaagaattatcagagaatatattcgatgcattacaaattggagtgacacgttcctcgtcttcctccgcgccatctacacaacccaccaccaccgctgtgcccctgaaccgacaccctctccaacgcaccgcaactgctgcacccgtaccccgcccaccaacatcaccaccaccagtcgacgccacttcagttccttcagccatgtcggcaccaactactgctgatgtggccaagatgatcgaggacctgtccaacacggtgacgaacctgcagatgaccatggtcacgttgcagaaggagaagtcatcttcttcgtcgactaccaacgggggcatcgacggccaacaccacaatgatcgtcccccgcggttctag

SEQ ID NO: 19454 - DNA, 147 bp, Zea mays
  Peptide Sequence Number=SeqID_61233
atggagaggaagcaagccgcctacagcaacctcgtaaggatcctcttcttccaccgtcgtggtctcctccattcccttgtcgatcacctatggtctcagctcaacggttgcattggggactgcaggatgagagtttttaaggtttga

SEQ ID NO: 19455 - DNA, 838 bp, Zea mays
  Peptide Sequence Number=SeqID_61234
tgcccccggcgagcaaaaaaaaagccccccgcccggcgtggctctcccgcgccccgcctcgtccctgccccacctcgtccctgccccgacacggtcgtggcgtcgtctggcccagccccggcgcccctgctcggcgcggtggcaggcccgcccgcccgcccgtggcacggcttcccctccccgcccgacctcgctcccggccccgacgcggcaggggcgcgcccgctcggcctcacccgtctctgctcgcggcgtgtctgccccggctggccccgacgtggccctccccgccccgccgtggtggctcccgtgcgcggccgcgtgccccctgcttgcccagctcgcggccgtggcgggccggcgcggcacgatcgcggatatggcgcggtcggccccggcacagccccacggctcgcgcagcgtgctcgaccccggtgcaccccccactgccttctcacggcgcgttagcgcggcgcgtgcgcggttcggccccagcatgtgtgcggctcgttcgcagagcgtcagcgcggccttgcgcgcgcgtgctcgagtgaggaaccggggtgtagttcgcttcgccatcgtgccattaatggggctcggtgtatgtgactcgctctgccaagtgataccctgctgggtcaccttggtagtgatcaatggagaggcacttgctttgtatgttgatgtgtactcacccttgctctacacacctgctggagatgttcggattataggtggtgatgagaatgatggttttggtattgactatggtaatggagaagatgaagccgtggaaggagacttccaggagttccaagattacgacgagttctag

SEQ ID NO: 19456 - DNA, 537 bp, Zea mays
  Peptide Sequence Number=SeqID_61235
atggctactgcttttggtagtcgagaaaaacgaaggttcaaccgggtaatggattccctaggcttcgattacccagactatgagagatttgagggagaagctaaagttggtggaaagaaaaaggcaagggttgtaagtattatgaagaggcaagcaatgagatctattgaggaagacaaaaataaaataatatcaaaaagactaaaggtttcggggactgaaatttctaaactaaaagtgaagtcctcgaaactcaagaaacggaagtctgtagaatcaagtcgtgccgaggaagaagagtccgctccaccgaagcaggtcaccgaaacccctttggcgtcttcgatttgcgtgacagaaatcctagagaaaagaactaccccttccattgctgatgaagtcgccgaagtgcctcaggaggccgaaagcagtggaggtccttttgggactactttgttagaaattgacaggattactgctaatgtggtacatgagagggagactgcggaagtggttgcagccgaaactttggtataa

SEQ ID NO: 19457 - DNA, 366 bp, Zea mays
  Peptide Sequence Number=SeqID_61236
atgtcggggtggcatgggttcacgagtaggggctctagggaactcgggagagggatctatggcatcgaggaagctcagaggacctccatcctctgcgaacgacaatggcagacggtgtgcgtgagtagggtgcaggagtgcatggagaaacaacaggaagcacgtgatgaagagctcaaaactcagggtgtggaacttcttatagggttcgaggcgggagtagaggaggcacatgagcccttaatgaagaacctacccttggatagtctcgaggctccgagcatagtatcgggcaaggcgaagctagaagggggggtcaggcgaatcgagaggaagtcactcgagtggattctgtgcctggcataa

SEQ ID NO: 19458 - DNA, 1707 bp, Zea mays
  Peptide Sequence Number=SeqID_61237
atgctgcacatgatgttggttttccatccacagttggacgaccagacgaaggtcgccaactgcgtcatcgtgatggggatgcgggtcgccgccgtcgccctggacatggaagctcgcgaggccttcctggctgatgcataccagcatctggctgatgtgcccgacttcatgtcgtgttccatgttggcgtgctcaagaagttcatcggcgcacctccgacctcgccaactagccggcagggccatccataacggcgtggtgattctagagccgctgcgtgtcgagcaagcttgcttggcgcatggggttcgtcaggtacttgtccgctggcgtggcgagccggcggagtctgcatcctcagaggacctcgacgagttccgcatcatgtaccccgactttcaactcaaggacgagctgggtctcgagggggaagagatgtcatgtgggggcgcacgtacaggcgccgccgtgacgaaagaatatgaaaaattgaggcgacagtgccaccatgttctgcattgcaatagaggaaatggtctgaatgttataaatgagttcctgaatgaggacttctctgatggggctgaaggttcagagtcaccatattccaatggtgctagtaagagggcttgtgtgatgcccagagaattgaaatctttaggcagtaaggcagaagagtcagagagttctaactgggatgttgtggaatccatagatgaagatacaagtgagttaacttctgttgatccatgcatgatagaatcagaatcttctgaatctgagtcttcatatgaagaggaccctgatagaacacctgtctctaccaatatggaagagagctgtgatcccaaacctagatttgtccggactgcttcagcaaagtcagacatttttctttcagacagaactcctgaggattttaccacatggcagcgcattatacgtgtagatgctattcgagcaaatacagaatgggttctatttgcccgtaaccaggctgaagtctctaaagagaaagcactgcagtctgcaatatctgttggattgaaagattttgaccatttggagccttacatgatttatcatgcggcacgattagttgcactgcttgaggcatatgcagtctatgatccagagatcgggtactgtcaaggaatgagcgatctcttgtcaccaatagttgcagtcatggaggaagatcatgaagcattttggtgctttgtgggtttcatgaggaaagccagacacaacttcagacttgatgaggttggaataagaagacagctgaaaaccgtctcgcagatcatcaagcttaaagattcacagctctacaggcacctgcagcaacttcaggccgaagactgcttctttctgtaccgaatggtggtggttctcttcaggagggagctcacttttgagcagactatgtgtctgtgggaggttatgtgggccgaccaggccgcgattcgagctgggattggaaggtccacttgggcaaggataaggcttcacgcccctccaacagacgacttgctgctctacgctatcgcagcctgtgtcctgcagaggaggaagctgataatcgagaagtacagtagcatggatgagatactgcgggagtgtaatagcatggccgggcagctagatgtctggaagctcctagatgatgcacaccacttggttgtcgaccttcatcacagaatctga

SEQ ID NO: 19459 - DNA, 207 bp, Zea mays
  Peptide Sequence Number=SeqID_61238
atgtggaggtacggtgctccaatcggaggtggagcactgacgaacgacgccactgccattgccaccgccgccatcaccgtcgggcaagaaggcttaaggatgcatgaaaccgttgatcagttttcaacttgtcatgcgacgttaacgcatgcacttattggccacgaaataaagcatttagctatagctttttctggatgtcagtga

SEQ ID NO: 19460 - DNA, 432 bp, Zea mays
  Peptide Sequence Number=SeqID_61239
atggcatatgcgcaggctgcggcagcatcagcgcgcgggggcgccagaggatggcgccgcgccaccgcccatcagtcccgactggcgtcgttccgcgcgcagctctacttcaaggagcagcacggtgacccgcccgtggcgtcgtcgacgcagctgccggcggtgcagaccggcagcgacaggtgggcgcaccctctaatgaagcccgagaaggggtgcctcttgatcgccacggagaagctggacggctcgcacatcttcgagcgcacggtgatcttgctgctgtcgtcgctgggccccgacggcgtgatcctgaaccgcccctcgctcatgtcgatcaaggaggcgtcagggtccatctgcgcggacgacgccgacatcgcgtgcgccttcgcgggccggccgctcttcttcggtgggaaggcagactga

SEQ ID NO: 19461 - DNA, 210 bp, Zea mays
  Peptide Sequence Number=SeqID_61240
atggtaaacaccgacaatgaaaaagatgggtcaaacaagaatcgagacaactcctgcgctgcgctaggactgtgtattgagcaacccaacatccagccacacccacaggccacagcctcccccagcaaggccgtggccgcaccgtccgcactagagatggcaacgggtacaaatccgccgggttttgatatcccaaactcgtacccgtga

SEQ ID NO: 19462 - DNA, 351 bp, Zea mays
  Peptide Sequence Number=SeqID_61241
atggtcctgaataattcagatacaagaagtgccgcctacagaatctatttgaatctgacaagaatatttctgcttttcaaaagagaaggattaagcacctttgaaatagctgttagtacagcacaatgtgagacggttccatggttgctcaggcatcgcaaaatataccgatgtgcatcactgagaaggcgtgatatcagtactatgatcttccttggtggattagaaaaacttgattgccagtcagctgcctgcaatacacaaggtaaaacaggtgatcaggcaaaattcaaccggaaaggtattaaacttggggcttatcatgcatcagaagtactgaaagggaattag

SEQ ID NO: 19463 - DNA, 189 bp, Zea mays
  Peptide Sequence Number=SeqID_61242
atggttaaaacttttggcagcaaaacagtgcaaatagcaatgaatgctgtggtaacttcacacctactcgcctgtttatatagtactgcagcgtttgagaacaagtccccaacaggggacgtgcgctacccaccgccggggacgaggaggtcttcgttggtatcgtgggctatgctgtggctggagtag

SEQ ID NO: 19464 - DNA, 186 bp, Zea mays
  Peptide Sequence Number=SeqID_61243
atggagtttcccaagcgagggcgagcttttctccaaggttccctgcgaaggagccccaaggcgacgatacctggagccgccacgggggccgacgagaacgcaagctctaagcatctcgtgccggtgggggccgcgtcgccgaagagaaagaagggcatcaaaaataaattaaactacaacagttaa

SEQ ID NO: 19465 - DNA, 234 bp, Zea mays
  Peptide Sequence Number=SeqID_61244
atggaggcaggcagccgcaccgcagaggcgagcggcacgaggagcacggccgcgtgctgggcctccccgcgcgaccggcgaaacgtgtcccgtggggcacggcacggcacgccgcgtggagctggcccgtccgttgcagccgatgaatcacgtgtattttcccctgattcaacctcgtgcgagagaaaatttgggacagtagatttatcgaatgcgcgcactagccttttatag

SEQ ID NO: 19466 - DNA, 669 bp, Zea mays
  Peptide Sequence Number=SeqID_61245
atgatgcttctcgccaagctcggggcgccgagcgttccagggaagcgtcgagttgaagaagatgctataagttgcagaatagaaacataccatggttgtgtcatggacagaaggaaactgctgttggtccctgcgattagtatggccattgcctcctttcagtacacttttgtcaagggaatagcaaaagctgaatttgctgataggttacatagcatctctagtatgccactagctatatgtaaaggaggtctgtttgccgtcgctggtgccatagctatggtgcctgcacttcgcggtaaagattatggaaagacaaaaatgcggtatccagattacactgaaacggaatcaggcctccagtacaaggattattttcatggcaaaatacaggacttgcgggttggtgatggcccttctccaaaaaaaggggagactgttgttgttgattgggatggctatacaattgggtactatggtcgtatctttgaagctcgaaacaagaccaaaggaggttcatttgagggtggtgacaaagacttcttcaagttcaaagttggatcaggacagggacaaagagctcttgattttgttctacgtaatcaaggcttaatagataaaactctcctgtttgacatcgagcttctcaagataattccaaatcagtag

SEQ ID NO: 19467 - DNA, 312 bp, Zea mays
  Peptide Sequence Number=SeqID_61246
atggaccgtctgccccagagtgcggaccatccggacaacatgcaaggaagaagccgcttccgccgccaggtcgtgaaccgtctggcccagagccgcggacagtctgcgcccccgcagcgagcatcgccaggcaacccgtcgcggaccaccgcgccatccacctcgcagagccaaacccaagtctcaaaggtgaatggaaagggaaatggtgaacttgaacaacgaacaagtcttccattgcataacggtatcatgttcaagttgcccttggtgttcattgccttcttgctcttaattcgcaatttttggtga

SEQ ID NO: 19468 - DNA, 210 bp, Zea mays
  Peptide Sequence Number=SeqID_61247
atggtgtcactgaggagaaggcggccgttccagctcatggtgctgaggcggctgcgggagctgaagaagatcgtgccagcgggcgctcgccgccggaaggcagacgtcgacgtggtgctccggcggaccgccgagtacatctgcgcgctggagctgaaggtggcactcctccggaggctctctcacatgtacggttatacgtggtcgtag

SEQ ID NO: 19469 - DNA, 569 bp, Zea mays
  Peptide Sequence Number=SeqID_61248
gcaccttcagcagtgcttgcttcaaccctaccgtgccgatgcggagcattcctctcacagacccctgcgccctcgtcaattgcggccagggaggtgactgcgagaagggcgccggctccagttaccagtgccgctgccagccgggcttgagaaacatgttcaacctcacctccatgccttgcatcggcggcaactgtaatcgctttctgaagcaacgatgtttgttttggcacgtttggggcagactgcgccaggctaggactggtaaacccggctgcaccagtcggaaatggtctttattagtactagcagaatgcaggattatccattgccatggaatccaacgtctagactactactggttactgcaatatagagatcttggtctccttatcctttttacagtaaatgagacttctaaacagcagactcttaaaccacaaggcaagctgagaaacatgaaggcaaatgaatatacaggtgggcaaagagaagaatcactagtgagggaagccatagataggatgaaggcggtgggtggaatgggcggtaggactatcaacttttag

SEQ ID NO: 19470 - DNA, 483 bp, Zea mays
  Peptide Sequence Number=SeqID_61249
atggaaccatattttccacttttcagtggtagacatgtaatatttgtaaagttcttctatccaaaatccactaaaaacaggcaccttcagcagtgcttgcttcaaccctaccgtgccgatgcggagcattcctctcacagaccgcacgtttggggcagactgcgccaggctaggactggtaaacccggctgcaccagtcggaaatggtctttattagtactagcagaatgcaggattatccattgccatggaatccaacgtctagactactactggttactgcaatatagagatcttggtctccttatcctttttacagtaaatgagacttctaaacagcagactcttaaaccacaaggcaagctgagaaacatgaaggcaaatgaatatacaggtgggcaaagagaagaatcactagtgagggaagccatagataggatgaaggcggtgggtggaatgggcggtaggactatcaacttttag

SEQ ID NO: 19471 - DNA, 402 bp, Zea mays
  Peptide Sequence Number=SeqID_61250
atgagtgagctagcgagatgctcggccgcgcggctgctgctgctgcttcccgtagtcttcctagtcctagctctgctcggcggcgcccgccacgcagggggcgcctcggtctgcgacacggccaactgcggcaagggaaactgcagcgagacgccggctccggcccttcttcctcccggctacgagtgcaactgcgaccctggctggttccttcgacagcgcctgcttgaagttaaacctcagccagacgccagcgccacccacggatggctctgtttcgacgccgagtcctgtgcagctgctactgctactgctggtctccgttgctacggttcaggtcgtgtgatcacgctacgtcccccgaagaagcaacagaaaattgtaataccagaatttatgtaa

SEQ ID NO: 19472 - DNA, 243 bp, Zea mays
  Peptide Sequence Number=SeqID_61251
atggagaataatggaggacatcctgttacgtctaaatcaactataagcatccactccgctcgtaaaggtatgggaaatgatgatatggacagactacggggcacgatgaaccgattgataatggcggtacgaaaataccattggtataacagggtaattgccgaaggacaccttcatttggagacggtgtgcggtcatcacaattgcaaagttgaagctacaagcttgagttcagtggcataa

SEQ ID NO: 19473 - DNA, 102 bp, Zea mays
  Peptide Sequence Number=SeqID_61252
atgcctgcgtccagggagctcgttccttatctggagggctgggtgaggacgctgcacaagagcccgttactgaggatcctggtgagcagcaggttgaagtag

SEQ ID NO: 19474 - DNA, 324 bp, Zea mays
  Peptide Sequence Number=SeqID_61253
atggcgccgccgccccctgcgctggatcttcggtgcagcgacgcaggaagtttggcgacgaagaatgcatggagtggcaagatcagcatggagggcgggtgcacagatgttggcacgagcagcggcggggtgccaagctccagtgccggcgaggtgctggcactagagctcggtggagaatcgagcacatcggcaagcagggcttccgtggggttctacgacgcgacaacaaagggtgtgcgcaacgcgaacgtaggagacaggagcggagctggcggcatccagaacgtggggaagaggagaagaacggcgcgagctttatag

SEQ ID NO: 19475 - DNA, 366 bp, Zea mays
  Peptide Sequence Number=SeqID_61254
atggctgggggcaaaggaggcaagggcaagtgtcattcgtttgagggaaagcgcaagcgccctccgagccctccatcggaggactttgggggctcgaagttctcggatgaggaattctcctcagagtatgacagctcgtctgccctggtgtcctccgcggtgtcgtccgacgactcggacgactctatggggctgtcggtggcggaccgagcctacatccggtccatcgatcgtgtagagctcgaagggtcgaatgactcagagggggacttctcggagaacttctcggaggaggaggaggactccgaggagggcggtggcggcgacgacggtgataacgccggtggcaaaatgccaccgacataa

SEQ ID NO: 19476 - DNA, 1221 bp, Zea mays
  Peptide Sequence Number=SeqID_61255
atgccagctgcctatatataccaggccagggagcgggagcctcacacacagtcacagcacacgcagccaccgaggactgcattgctagcatccatcgccatcagtcgccatatcgatctgcgcacgaagctagtagtccagatggatcgggtgccgccgccggtctccatgcaggtggctgcgatgcagcgacatcagcagcagcagcagttcgtccaccacctgcagcaggtccaccagcaaggtacgcagcacgagcaaccgccgccaccgcaccagaacggcagcagcagcagcggcaggaccggcggcggccgcaagtgctgcccgctgcggcggtcgcgcaaggggtgcatgaagggcaagggcgggccggacaaccagcagtgccccttccgcggcgtccggcagcgcacctggggcaagtgggtggccgagatccgcgagcccaaccgcggcgcgcgcctctggctcggcaccttcggcagcgcgctcgaggccgcgcgcgcctacgacgccgcggccaggacgctctacggcgactgcgctcgcctaaacctgcagctagtgcctccgtcggcggctgcggcagccgccggaggaggaggaccggcggtcgtcgcgtctccgtcccctgacaccgtggctggccctgctgctgctgctggtggtggtggacacaactgccatcaccagtacctgcagcagcagcacgccatggcggcgcctatgatgatgatgcactcctcctgctgctccgccgacgggtcgtcgtcaaactccgattccatttccaactcctgctcgtcaccggtgaccacggcggcctcgccagcctacagccaccaccagacgatgttccagacacctgcactgcagccgtcatgcggcgcaatgacgatggcggccgctgcgccgcatgtgcagggcttccacgtcggcgacgacgacactaccaccgcgatggcgatgcaccgtcatcagcagatgatgcgcgagctggcggaggcgcctctgcaccaggaggcagacgacttcgaggacttcgtgacgcggctgcccaaggcggaggacttcggcctgcagggcttccaggaggtggcccccgaggtgttcgacgacgccgccggcatctgggaccacgcggccgcctgggagccccccaccatgatgatcgactctggcgcccagccccagcagcagctcgtcgtccctctttga

SEQ ID NO: 19477 - DNA, 195 bp, Zea mays
  Peptide Sequence Number=SeqID_61256
atggacgagatcatgaacaaggtgggtgtttactggatggggccaccggccaacaaggagatctcggcaggcgacgaccttgaagtctgtttttaccctttgttccccctaattcagatggggggaacaaagggaaaaacgcttgtgcccttgtcttgtctcttctttgctgattgcgtcgctgatgtttcctag

SEQ ID NO: 19478 - DNA, 621 bp, Zea mays
  Peptide Sequence Number=SeqID_61257
atggattcaaataatgttttttaccccctctgcagtgatcctgacgacaggcttgctccaagacctgttttggccaggacaccagacgaagtaattgcagccaaaggtgtgaagccaacattatcaccaaatctcaatacacttgccttagtcgaggatttagtggtggggtatatgggagtaccgaaatatgctggggtctccatgacacagcatcctcagtacattacagtcaggaacgatcgtggacaggagatgctgaacctggtagctggccttctggaaagcacacctacaattagcagtggctccaggcaaccgtttgttatggagacagtgaaagctgacgatgccgcaaaactggggaaaggcccttcgaaaccagctcctagattcgtcggcgacattctggccttcctgctgaacttggttggacccaagggtctggagttcgcacgctactctctggactatcacaccattcggaattatctgcatgttaggcgggcatggggaaagcaaagagctgagcagcacatcccggggtatgccaagaagatcgtggaggcctacgacaaagacggacggatcgaggcaatggttacgcagtcaggtgactga

SEQ ID NO: 19479 - DNA, 318 bp, Zea mays
  Peptide Sequence Number=SeqID_61258
atgggcttggatttctgcctccagtcctccctgaccgccttggccctgatcttgcgcgttctctcggacctggaggacgaggaggaggcgagggagggtcggcggagtccaggagacgaggacgagggcgacgaggcgtgcaagcaaagggagagggaggtgctggaggccatggtggcggagatcgtctcacctcagtacctcaccggtgataagacggaggatcgagtggagatggaggagtcatgccttgagcctttaagagaaactactgttactgggccacctcatgaatttcggctcatgtccaccctttga

SEQ ID NO: 19480 - DNA, 768 bp, Zea mays
  Peptide Sequence Number=SeqID_61259
atgggtcggcgcgagacggagcgcgaaggggggaaaccagagggagacaggcgtaaaaggggaaacccgcggccttcgtgtttgtcccgcgcccaggtcgggtgcgcttgcagtagggggttacaagcgcccgcgtgggagggagcaagaggcatgcacgcgccgtcccgtcctccccgcgcggccaacctctcgtacgagtgccctgtcccttccttttatagacgtaaggagaggacccaggtcgggcgaggcggaggctcttccgaggtcgaggtcgagtccgagccctggggttgggcgaggcggagttcgtcgtcttccgaggccgaggccgagtttgagccctggggttgggcgaggcggagttcgtcgtcttccggggccgaggccgagtccgagccctggggtcgggcgacgcggagttcgtcatcttccggggccgaggccgagtccgagccctggggtcaggcgaggcggagttcgtcgtcttccggggccgaggccgagtccgagccctggggtcgggcgaggcggagttcgtcgtcttccggggccgaggccgagtccgagccctggggtcgggcgaggcggagtttcctatggcgcccgaggccggacttggctgctgtcagcctcactctgtcgagtggcacagcaatcagagcggcgcaggcggcgctgtccccttgtcaggccggtcagtggagcggcgaagtgactgcggtcacttcagctctgtcgactggagggcgcgcgtcaggataa

SEQ ID NO: 19481 - DNA, 585 bp, Zea mays
  Peptide Sequence Number=SeqID_61260
atggcagatattgtaatttgcagtaacataaccatgggtactgcaattgatataagtctgcttcttgagtttacaaatctcattatcagaactaagctttcaaattcttatggacttgtggtgaagtggatccatctatctggaagaatacctcgacagatacattcaatgcaagaacaaagttcagagacagattcaaactctaccaatccgattaacatatttgtcaaatcatttcttgatctcctctctgctgtccgcacccacgagacatggaaggacatcgagaatcccgatccttggccaagctctaaatggaaggagatcgaggaatccgcctccgctgcgccctggcaccctctgcgaccgccgcctctccctcgcctgcccgcccgcgagacagtcgccatcgtccccctgccccgcgccgctcgcgatgaccccctcccccgcgattccggggtcttcgcgacccatggcgtgacgctctacgccgacgatggaggggagctacatgaccacctcctccgtccggcacccaagggagccagccgtcgttctagagcaaagctgcaaaagaaataa

SEQ ID NO: 19482 - DNA, 1224 bp, Zea mays
  Peptide Sequence Number=SeqID_61261
atggcgacggcggctggtggaaaggagataggatggcctcgccttcatcaccgaccagacgtgcagcctctcttgcgacccgataccaggtgttacttactgcccaataaagcgcccgaaggggcgccccatgttctagtgatgagttcaaacttggagctttgctctgcctgtcttgacgggcgcgccaagttagaccacgtggtcagcagccaagtccaatttttcttgatccttatcattaggacgtcgacgacggcagtgttccagagcacactcccaaaggaggagttcggcgacctcgtggccgcgctgccgagcaggcagcagtccatcctggagctgcgcctgtaccagggcttctggctgccggagcactgggtgccagggactattgcggtccaggaacgtttcaccccgagccccgacgacgtgatcctcgcgagctacccccagtgcggcaccacgtggctgaaggcgctggccttcgccacggcggcgcgtacggcgtacccgcccggtggcgccaggcacccgctccgacggctcaacccgcacgactgcgtcccgttcatcgacgagatcttcgccagcggggaggaggcgaagctcgaggccctcccgtcgccgaggctgatgaacacgcacctgccctacgccctgctcccggcgcccgtcaccgccaccgccaccgggtgcagggtcgcgtacgtgtgcagggaccccaaggacatggtggtctcgctctggcacttcctccggcgcgccaagccggacctcttgttcgccgacacgttcgagtccgtctgcgacggcaccgtggtggtcggcccggtctgggaccacgtcctctcctactggcgtgcgagcgtggcggccccggacagggcgctcttcctcaggtacgaggacatgctgcgggaccccggcggcaacgtgcggcggctcgccgagttcatgggccgcccgttctcggccgccgaggaggccgccggcgacgtcgcggccgtcgtggagctctgcagcttcgacgagatgaaagggctggaggtgaacaggcctggtagcggcaccgcggggaggtaccgccccatgccgcgcgacgccttcttccggaagggtgtcgccggggactgggcgaaccacatgacgccggagatggcggcgcggctggacgggatcttccgtgaaaagctccaagggacggggcttatcttctcataa

SEQ ID NO: 19483 - DNA, 432 bp, Zea mays
  Peptide Sequence Number=SeqID_61262
atgggaggcgacgacgaagagacagcttcgcaatgtgcgcgatcagtcgagcgcattgaagttgaagagaacggtagcgaaatgcagaagctgaattgttgcttggtagtagtgagaacgtgcataagagtaccaaccctataccagagagcgagcgcgcttgacgacttgtttgattcatcactctccttcaagatcatgggagcagtgttctcactactggcggtggcggcggtggcggtggcggcggccatagtgtccttcgtggtgggtccagctgtgtcatctgtttgtcccttggtgacaatggttgcacccggcgtcgccgggcaggttatatcccgcgcggcgttccttgcgaacccgcagctttactttgcagtcctccacaaagacggcggattagctgctgttcgtatgtttgctggctag

SEQ ID NO: 19484 - DNA, 306 bp, Zea mays
  Peptide Sequence Number=SeqID_61263
atgggagcagtgttctcactactggcggtggcggtggcggcggccatagtgtccttcgtggtggatccagctgtgtcatctgtttgtcccttggtgacaatggttgcacccggcgtcgccgggcagaagctgcctgagaagctgagcgtttggcagtccgcaacagtttttggtggccagaagctgccagaagccgaaacaaacagggctatatcccgcgcggcgttccttgcgaacccgcagctttacttcgcagtcctccacaaggacggcgggttagctgctgttcgtatgtttgctggctag

SEQ ID NO: 19485 - DNA, 681 bp, Zea mays
  Peptide Sequence Number=SeqID_61264
atgggccgacactggacggcccggtcgttgaggtgcctagtcctcagcactaactcagaccggtctagtagtgtgcacgtaccagcagggatgttgaacagcggatcatgcttggccggcggacatgacggcaataacgaccagccgaacggagacggtggtggccagcagtatgaagggaccggcggcaagaagcagctcgagtcctcgaggctcaagaagagcagcggcaacaaagataaagccgacgccgcagaggacgactaccccaaccccaagtactgcaccaacaacaccagcggtggtaccagcgtagccggcgcgccctactgcgtcggcgtcggcgtcggcggaggcggaggcggatacgggaacagctctcgctgcggcggcggtggcgacggcgacagctatggcaacagctgtccctacggcaccggcggcaacgcaccatacaacaacgctcccgccgccttctgggctccccaggacggcgccaggtcgccgttgtacatcaatacccaggcggtgcacgtgtacggcatgccttgtgtgtccaacaacgataacagcaacgacgacgacaagaggacgaagagaggcaacgggttcttcggcccggtgttccatgccgccggccacttcttagatcgaaagttcggcttcgacggcagggactga

SEQ ID NO: 19486 - DNA, 399 bp, Zea mays
  Peptide Sequence Number=SeqID_61265
atggatttggcgtccctcggtggtggatggctccggcatggtacggagcaatattgctgctgcggtgaggttctaactagccctgtgaaaggccaaaggggctttggctttggcatcctccatgatgtgacaatggacgtcgcatgcctttgcgcgtgctccctcgtcaagagccttgccggctgcttcccgatcgagaacctgccgaagctgttgcattcgttgttgttcctctctgagcttggcgtgcaactcgtagagcttctcgaggcgaatagaaattacaacatgaccttagggtctcaaagcccaaagaagtccagggcagagcctagaccatcctcctccttggagtctgagcaccccaagggaagggaagaccagcgtacatgctggtga

SEQ ID NO: 19487 - DNA, 1671 bp, Zea mays
  Peptide Sequence Number=SeqID_61266
atggagcagctgcggacgatcgggcgggagctggcgatggggtcgcagggcgggtgggggcagtccaaggagttcctcgacctcgtcaagtccatcggcgaggcgcgctccaaggcggaggaggaccgcatcatcgcgcgcgagcttgagcacctcaagcgccgcctcgccgaccccgacgtgccacgccgcaagatgaaggagctcctcctccgcctcgtctacgccgagatgctcggccacgacgcctccttcggccacatccacgccgttaagatgacccacgacgagtcgctcccgctcaagcggaccggttacctcgctgtcgcgctctttctcgacgaacgccacgacctcgtcatcctcgtggtcaacaccatccagaaggacctcaggtcggacaattacctcgtcgtctgcgcagcgctcaccgccgcgtgccgccttatcggtgaggaggccatccctgccgtgctgccccaggttgtagagctgctcgcgcaccccaaggaggctgtgaggaagaaggccgtcatggcactacaccggttctaccagcgatccccctcctccgtctcccacctcgtctccaacttccgcaagaggctctgtgataatgatccaggggtgatgggtgcaactctttgccccctctatgacctgattttggaggaaccaaattcgtacaaggatttggttataaaactattgaagatacttgctgtacttggtagtggcgataaacaagcaagtgggcatatgtacactgtattgggtgacatattcaggaaaggtgacactgcaagcaacattggcaatgctatactgtatgaatgcatatgctgtatttcattcattttcccaaaccctaagatgctagaggctgcagctgaaacaacatcaaagtttctgaagagtgatagtcataatcttaagtacatgggtattgatgctcttggccggctaataaaaataaacccagatattgcagaagagcaccagctagctgtcattgattgcctagaggatccagatgacactttgaagcgcaagacctttgagcttctttataagatgacaaaatcaacaaatgttgaagtgattgttgataggatgattgaatacatgatcaacataactgatcatcattataagacagaaattgcatcacgttgtgttgaacttgcagagcaatttgcgcctagcaatcagtggttcatccagaccatgaacaaagtctttgagcatgccggagatcttgtcaacatcagagtggcgcacaatctgatgcggctaattgctgaaggctttggagaggaggatgaaggtgctgacagtcagctaagatcatcggctgtggattcatatctccgcattgtcggagagccaaagcttccttcttcgtttctgcagaggccccacctcactgatgacactgtcaagtgggactctatggacttaggtaccaccgatgccaagttgaaactctatgcccaatttaacattagaacatatacttggttccaaaaaggatgcaattttagaatagtgctaagtcaaagtatcccagtttatgcgctgttgttggcatatgcgatctcagcaattctgaagacatttgcgtttgaaatcactcttggaagaaagatcgatttgctgcctgagctttag

SEQ ID NO: 19488 - DNA, 171 bp, Zea mays
  Peptide Sequence Number=SeqID_61267
atgggcgcaccggtagtccggtgcgccaccggacaggtactgttccttgtccggggcactgtcaggcacaccctcaaggagtgcgacatgttccgacacttctacaacaggcccggtgcctcagcagaagatggcaagaagaagggatccgacaatagggaagacgactag

SEQ ID NO: 19489 - DNA, 501 bp, Zea mays
  Peptide Sequence Number=SeqID_61268
atggccaccaccttccccgcgcgccccgcgtcagaatactgcctgcgactaggtgcaaatccgaggggaattcaagatggaccaaccatcctcccgcttcgcgccagcgtgttagctgaagatgaaccgcgcccctttcagtcagcagcgttctgcacgcagcaacggcgaacagtgctcaagcgttatactgctaccaccgtcacgagcccagcatggcggaaaaagaaacatggagcagacgacatgagcagcccatcagaacacggctccgttgttgtgctccatcgacacgttcagacggcactggtgcaggcgcttggcggcacggacttcaacctgctcggacgcagcaacttatattcctttgcgccgaagacaaaccgcatgagatcccaacacaagctgctcgacctctgcgccgcacagccagtcgtcaccacgggttctgtgaatctgagaactttgagccagttcacgtctcagctcagcagcttgtga

SEQ ID NO: 19490 - DNA, 180 bp, Zea mays
  Peptide Sequence Number=SeqID_61269
atgaccagccaaactacctcctgcgcgacctcggccacagcaacgctcgctggcctctctattcgtgagaaggctgtgaacgtgaggttgaagaagatccatgtgactatgacgtgtgggcccagggctaagctccaatgctccaaatggattgaaatttttacagtagaccctgtgtga

SEQ ID NO: 19491 - DNA, 522 bp, Zea mays
  Peptide Sequence Number=SeqID_61270
atggctggggctttggatctgagcatcgccgtcgcgttggaagaacagtccaagtcactgaaggctcaagccaaatcactcgattccacccagaagctcctccagcacatctgcgaccgcttcgacgcccaggatgcttgctaccgcgtcctggaagcatccgtgactagcgaggcggcggatctggcgtcgctccatgccggggagggcgtcgtggtcaccagcttgcacgcggatctggagcaccaagtggcgtcgcggttagcgaagatcgagtcctccgtgtgggaccgcgtcgtcgccatcaccgcggacgccagcacctgggtcgtggcgctggagaacatccatgcagtgtttgacagttggcgcccccggatcaagaactccgtcgaccaaggtcgccaagctgctcgaacgtggcgtgctaacagagtcggaagcttctccagccgtcctcggtgcccatcaagcggcggcggggcgcccatctgcatctgcgacaaacgccgcaggccctaa

SEQ ID NO: 19492 - DNA, 174 bp, Zea mays
  Peptide Sequence Number=SeqID_61271
atggtggtcggagtaggtcggtccacgtgcacaggcgggggagctcgtcggcggcgaggaatccggactaaccaaggcggtactgttcaattgaatgggtctgagagcttcaccagagatcaaggaaggcttatgggtttcgctgacgggatcaagagatatggaggtgtgtag

SEQ ID NO: 19493 - DNA, 321 bp, Zea mays
  Peptide Sequence Number=SeqID_61272
atggacagggaaggtggaggtcggccatgggcgacggcgggccacctactcgagcttggaccagagaaggttcgtgccatggttggagcagaggggcccgcgaccaaggggagagcagcggcgagagaagctcgtccgcacctggggagaggtggacgaccgtcggcatgggggagaggcgccgagcgccatggctggccgaggggaggaaggggaggagctgagctccttgcttgccactcgccaggaggaggaagaaatgtgctagctgctgatgccgtgaaggagaaggagacagggaaaaaggaatgtggcggctag

SEQ ID NO: 19494 - DNA, 2298 bp, Zea mays
  Peptide Sequence Number=SeqID_61273
atgaaagagtccgaccagctcgcgacttctttcatcacacccttcggcatgtactgctatgttaccatgccgttcggcttgaggaatgcgggtgcaacgtaccaacggtgcatgaaccacgtgttcggcgaacacattggccggacggtcgaggcctacgtcgatgacatcatagtcaagacgaggaaagcctctgacctcctttccgaccttgaagtgacattccgatgtctcaaggcgaaaggcatgaagctcaatcccgaaaagtgtgtcttcggggttccccaaggcatgctcttggggttcatcgtctccgagcggggcattgaggccaacccggagaagatcatagccatcaccagcatggggcccatcaaggacttgaaaggcgtacagagagtcttgggatgccttgcggctctgagccgcttcatctcgcgcctcggcgaaagaggcctgcctctgtaccgcctcttaaggaaggccgagtgcttcacttggacccctgaggccgaggaagccctcgggaacctgaaggcgctccttacaaacgcgcccatcttggtgccccccgctgcaggagaagccctcttgatctacgtcgccgcgaccactcaggtggttagcgccgcgattgtggttgagagacgagaagaggggcatgcattgcccgtccagaggccagtctacttcattagcgaggtactgtccgagaccaagatctgctacccccaaattcagaagctgctatacgcggtgatcctgacgcggcggaagttgcgacactacttcgagtctcatccggtaactgtggtgtcatccttccccctgggggagatcatccagtgccgagaggcctcgagtagaattgcaaagtgggcggtggaaatcatgggtgaaacgatctcgtttgcccctcggaaggccgtcaagtcccaggtgttggcggacttcgtggctgaatgggtcgacacccagctcccaacagctccgatccaaccggaactctggaccatgttcttcgacgggtcgctgatgaagacaggagcaggcgcaggcctgctcttcatctcgcccctcggaaagcacctacgctacgtgctacgcctccatttcctggcgtccaacaatgtggctgagtacgaggctctggtcaacgggttgcgcatcgccctcgagctagaggtccgacgcctcgacgctcgcggtgactcgcagctcgtcatcgaccaagtcatgaagaactcccactgccgcgacccgaagatggaagcctactgcgttgaggttcgacgcctaaaagacaagttctacgggctcgagctcaaccacatcgcccggcgctacaacgagactgcggacgagctggctaaaatagcctcggggcgaacaacggttcccccggacgtcttctcccgagacctgcatcaaccctccgtcaagaccgacgacacgtccgagcccgagaaggcctcggccgagcctgagacaccctcggctcagtccgaggtaccctcggctcagcccgaggcaccctcggctcaacccgaggcaccctcagctcagcccgaggtaccctcagcccccgagggtgaggcactgcgcatcgaggaggagcgaggcggggtcacgcctaatcgaaactggcagaccccgtacctgcaatatctccaccgaggagagctacccctcgaccgagccgaagctcggcggttggcgcggcgcgccaagtcgtttgtcttgctgggggatgggaaggaactctaccaccgcagcccctcaggcatcctccagcgatgcatttccatcgccgaaggccaggagctcctacaagagatacactcgggggcttgcggccatcacgcagcacctcgagcccttgttggaaacgccttccgacaaggtttctactggccgacggcggtggccgacgccactagaattgtccgcacctgcgaagggtgtcagttctatgcaaggcagacccacctgcccgctcaggccctgcagacgatacccatcacctggccttttgctgtgtggggtctggacctcgtcggccccttgcagaaggcacccaggggctatacgcacctgttggtcgccatcgacaaattctccaagtggatcgaggtccgacccctaaacagcattaggtccgaacaggcggtggcgttcttcaccaacattatccatcgctttggggtcccgaactccatcatcaccgacaacggcacccagttcaccggcagaaagttcctggacttctgcgaggatcaccacatccgggtggactag

SEQ ID NO: 19495 - DNA, 2607 bp, Zea mays
  Peptide Sequence Number=SeqID_61274
atgtatcccagcggtcacgcacttcctgatgcaaacaggaaccacagtttggtatttggcggtacgagcaaggactgggacaacatccgtcagttcattgctagtctggaacgcgcctctgaaaactcctctgcgatagccagcaaaaccggaggtggcaaatcgaccaaccattccgtggagccagccgaacaaaaaggaaagggtgacataatagttctcgattcagatgatgaggatggagatggaaacagtccagaacacaataagttggcatctgagatgaacaaagaactcggaacatctgtattggctagtaatatcgcagaaaggatggcaactaatgggagccaaacatttgaaaccgtgcatgcttatggaggtagtaagaacacgcagattgttccgtatggccaaggttctgctctggtgaatcagtttcctttgcaaaccagttggcaaccatctattcagtttgagagagttgtgttgacgaaaaggcctgaggagcagcggatgcaagatcttgtggctgctaccatagcggagaagagggcagaaacacaaatgttcctatcacttcctacggagagaaagcgaaggagaacagaccatagtttgttgatgcttgactcatttgtccctaaacaaagaagaagaaaaggtgacacaggtctagcaccagctgatttgtcattggatttacatcaaactgctacatcacaagaacctgacatagctatagaggaagaagagaaacgtaaaaatgatggtgatggtcttgaggattattggaaagattttgcattggctgttgaaagcacaaagcttgacgatgttgacgaggcggcggcaaatgaaaaggaagataatggaaagatggaggacatcgactgcaaccatgacattcggattcatgaagatttgggccatgcttcaaggagaagaatgaatggctatggaggaaattcaaaggatgctgatgagatagactgtggtactgtcaaactgtctgaagatttcatagttgcagatattgctattcatcctagacacgctcaggcaatgaaaccacatcaggtggaaggtttcaactttttggttaagaatttgattggagacaagcctggaggttgcattcttgctcatgcccccaggttcagggaaaacatttttgcttataagcttcattcagagcttcatggcaaggatataccagtgtacgatttctactctgtaaaggttgaaaaaagagtagaacagttgcaaatcctcaaatcttgggaggacaagatgggtatactgtttcttggatacaagcagttctccacaatcgtcactgatgatgggggcagcaaggtaacagctgcatgccgggacaggctgcttaaggttcccaaccttctgatacttgacgagggtcatacacctagaaataaggagactgatgtactagagtcgctaagtagagtagaaacaccacgcaaagtggttctctcaggtacacttttccagaatcatgttgaggaagtgtttaatatcttgaatcttgtccgcccaaagtttcttaggatggaatcgtcacgccctattgccagacgtataatgagtcaggttgaaatatttggcagaagttcaaaagggcttgctgatggcgcattcactgaggcagttgaaggaaccttgttgaacgatgaaaacttcaagagaaaagttcatgttattagaggtcttagagaactaacaagggatgtgcttcactattataagggcgctatattagatgaactacctggcttagtagacttcagtgtgtttttgaagctcacacccaagcagaaggacattgttcacaagttggaaatgcatgataggttcaaaagaagtgcagtagggagtgcactgtacatccatccttgtctttcaggactttcagaggttaatgctgagaacagggctcacaccttgagagatgattcagttgatagtctgatggattccatcaatgtgagagacggcgtgaaggccaattttttcatgaatatcctgtcacttgctaattccgcaggagagaaagtacttgcttttagccaatatatacttcccatgaccttctttgaaaggctgctggttaagaagaagggctggcatgtggggagagagattttcatgatctctggcgacactagccaagaagacagagaagcggcagtggaccgtttcaacagctccgctgatgcgaaggttctgttcggttcgatcagggcatgtggagagggcatttccatcgtcggcgcgtcgagagtcgtcattctggacgttcacctgaacccatctgtcacccgtcaggcgatcgggcgcgcgttcaggcctggccagcagaagaaagtgttcgtgtacaggctcgtagctgccgactctgacgaggtgaaggtccacgagacggcgttcaagaaagaagtcatacagaagctgtggtttgaatggagcgagcagtgtaccacggaaaacttcaagcttggtcaagtcgatatcgacgactctggggacgagctattggataccagagcgatccgccaggatatcaaggcgctgtacagaaggtga

SEQ ID NO: 19496 - DNA, 1020 bp, Zea mays
  Peptide Sequence Number=SeqID_61275
atgaaaggagtgtccgaaggcctgatcatcgggaccacggtcggggtggtcataggcgtgctgctggctctcgggacgctgctgtgcctgaggcggcgtcggcgttcccagacgcagataaggagcagcagctcgaggagggcgtcgactgtccccatccgcaccaatggcgttaacgcctgcgccatgctctcgaactcgaccacggggcaggagtctccgactccgcgggagctcgaagagcgtgggagttctctgtggatccaagggccaggcgaagacagtgcgccactaaagtgggacttgagagtaagcatcgctctggatgtcgctcggggtctggagtacctgcacgacggggctgttcctccggtagtccaccgcgacatcaaatcccccaacattctgctggaccaggcgatgcatgctagggtcgccgacttcgggttgtcgagagaggagatggtcactcgcggcgacggcgccgccaacaacatacggggaacctacgggtacctcgacccggagtacgtgtccacgcggtcgttcaccaagaagagcgacgtgtacagctacggcgtcctgctgttcgagctgatcgccggcaggaacccacagcagggcctcatggagtacgccgagctcgccgccatcaacgccgacgacgggaggaggaccgggtgggaggagatcgcggacgcgcggctaggaggcgcgttcgacgcggacgagctcaacgacgtcgccgccgtggcctaccgctgcgtcagccgcgcgtcccgcaagcgccccgcgatgcgggacgtcgtgcaggccctggcccgcgtggcgaggcgcggccgcggccgcggcaggaagcagcagcaccacccgccgcaggccagcagtgccgccgcgggcgacgagtccgccgtcgacctggaggcggaggaggggtccgaggcaggccggtcgtcgttctctggccttcttcagagagaggagtcggtcggcagcgtctctgatctaccagatgtctga

SEQ ID NO: 19497 - DNA, 1083 bp, Zea mays
  Peptide Sequence Number=SeqID_61276
atggaggcccgggcccacgggtcatgcaaccggcgcgccggttgctacgtgcgagcaactgcaccgccactcgcaccactatcacgcctcctcgactgcggaaccagtaccgcgactcgaggcaaccctgcgtatgacccagcagtgccagccaggcgcgacgacggcgcgcccgtgttccgttcctcgaacggctcgcgcacgcgcaacggccgcctcacgaaccactcgcccgtcgcattaactccgcggcgggacaagcggcgcctcaggcaggagaagcgagcgacgcttcgccttcgccataatgaccgcgtcaaaaaaggaaacaggccccgagcctccctactgatcagaggttcaaaggctggcccctcggaggggttcaacagccgccttagagcgcttgggttccacgcccactactggtcagaggttcgaaggccggcccctcggaagggttcaacggccgcctcaggccactcgggctccgcgcccactactgatcaggggttcgtaggctggccctcgaaggcggccaagcctggccctaggcgccatgggaaactccgcttcgcccgaccccatggctcggactcgggctcagccccggaagatggcgaactccgctccgtccgaccccagggctcggactcgggctcatccccggaagacgcgaactccgctccgtccgaccccagggctcgggctcggactcagccccggaagacgacgaactccgctccgcccgaccccagagctcggactcgggctcagccccggaagacggcgaactccgctccgcccgaccccagggctcggactcagccctggcctcagccgacggtctccgcctcgcccgacccgggggctcggactcgacctcggcctcggaagacagactcgacctcgacctcggaggagcctccacatcgcccaacccagggcacggaccgaccacgtcaacaggaggcgccatcattaccctaccccaagctgactcatgctacggggaacaagatcggcgtcccgtctggctcgctccgccagacaagtaatgatggcgccccgcacgccctatga

SEQ ID NO: 19498 - DNA, 2655 bp, Zea mays
  Peptide Sequence Number=SeqID_61277
atgatccaggaggctatacatcagctgaaggaagagaaaccagctgacaagaaacaagaaacagatgtctcgggtggtcagggttcaaccgcagcagctcctagacaagaaaaccccgacgagaagaaggcccagccggacactactggtagtagttcagctcagcagggttcaagtcagggagctaaagctagtactgttgatgaagccacgaagaagaccggagaactcctggttcctattattaaacaaaccacagagaagatgggagatctccagaggaagatcaaaaggcagctggatatcaacggaattgtggccaagattagaagtcatctgactggtcaagagaccatgatcatcctcagagtagattaccagcatgtggacgagtgggagaagaccaggagtgccttgagcctgctgcctcgtgtcgctgtcatgatgatcctgaccaaaacagacaggaatctagaaagagccaggacagaatactgccatccacaaggggagcccatggactacacctatctcgcagcgttctaccaccacatcgcgctggagattacaggcctgcatcagaagagcacatccagcgatgacgacgccgcgcagcagatccggctcctgcgcgccatcttcgataagtgcgagccatacttcatgtgcatgaagatatttgcccaaactctgtacgccaggcccaggagaagcaaacaagagctgcagaagctgtacagcaccctggaggggctccagcagagatcgtaccgcagcattgctatgaagatgctcaagttctcctacagggacgtgaagaaagagtaccagtcctccttgctgtacctagctatcttccccccggggcacaggatccggcggtcgaccttgatcgcgcggtgggttgtggaacggatggtgaccacggaagactggcgctggtccagtgccgtgagcatcgctgagcaatgcttcgacgcgctcgtcatcagggggcttgtccatcccactgagatcagcgcgacagggagggtcaagagctgcatggtgggcgatgtcacctacgacttcattaccaagatggccaagaagcggcgcattctggagccacgcctgtcgcaccacctggcctgccacttctccgttttcagcgacctccatctcagtgtgtctgacaatatcagcaatttcctgaacaggctgtctgaatcatctcagtggcctcggctcaaggtgcttgatctggaaggctgcaggggcttcagggaaaaccggcactacctaccgaatatctgcaacaagatagtgctgctcaagtatctcagcctgaggagaacagatgttgacaagctcccccatgagatcaacaaccttcgcgagctggaggtgctggatatccagcagacggaggtgcctgcgtcatgcacaatggatctcctgctcctgaagctgaagcgtctgcttgctggaaacagaaatccaagtccacgcacccacggccatgtcctggttcctgggaagatcgacaaaatgtcagacatggaggtgctatccaatgtcagggtgaagagtgacaaagacttggaaggcatcggaaggctatggcagctgagaaagctcggggtggttatcaatgtcaaggacaaggacacactgcttaaggctgtcactaacctgcatgagtgcctccggtctctatcgattactcttgacgccaccaccagccacaaggggactttcagtaccatcagaggtcgaagagagctggaaggctcttccacgggccgcgatgagaagaagatcatgaaagagcatcccaaggttcttgagagcctcagcatcagtggagacgtacacataacaccgaagcggattcttccgtcagagctgaccgacaagagcactccactgatcaagttaactctgagtaacaccttgctcacgcaggacgacctggtggccctcgccaatttgcacatgctacggtgcctgaagcttcggcacaacacatatcccggcaacaaactcgcattcaagcaggttcggttccagaaacttgagtacttacttgttgagggctccaactggattgagatcagcttcgaagaagatacagcagctccagagctggtgaaggttgttctgtgctttgaaatcatagaatcgatcgctggagtggatcgccttaagaaactagaggagcttgagctgaataaatgtaacaaggacagcgacaagactgaccctgctactgctgctggtgtcaccaacgcccccgtcccctccaccgcaacagccccttatcctgcaccctctgccccaactgccgcttccgctgtcgccaccgaccatgtcccctcctccacccccacaatccgtaaccctgccccttcccgcactaccaccactgctagcgctgccaatcctacccaaaccaccacctccaccaaccaggtgttgcttcccgaattgctttccagtgccaaacaagtgtccaaggtgactcttcacggtacaatgctgaagcaaggtgatctgcgggcactcgcaaggatggaaaacatacgctgcttggtgctctcacatggatcctacgatggaaagccaactcgacgtcaacaggacgagttcccaagactcaatgtcttgttgtga

SEQ ID NO: 19499 - DNA, 1551 bp, Zea mays
  Peptide Sequence Number=SeqID_61278
atggctgagctcgcgtcgggcgccgtgacctcgttgcttggcgtcatccgcagcgagtggcggctgctggggcgcgtcggcggcgacgtccacttcatccgggaggagatggagagcatgaacagcttcctgatgcacctggccaggacgacgcccccaggcggcgagcacgacgagcaggtgcagacctggatgaaccaggtccgcgtgctcgccaacgactgcaacaactgcatcgacctgtacctgtaccgcgggaaccccgacatccacctgggcagggaccggctccggcgctacctccgctgggtcccgtggttcctgcagaagacggtggcgcagcaccgggcagccctggagctcagcgtgctcaaggagcgggcgcgcgacgtcggcaagcgccggctgaggtacggcgtggaggtcccaaagaaggcggccgtcgctcctgcaagtcctggggcggcggcgggcgcacagggcggcaatgaagctgctgctgctgctctcttccacgccgacgacgtggaagacggcggcgggcacgatcaggcgtgggaaagggcgactgccgcttccagccggatcagaagagccctctttggaatttacgtccgggaggactacttgagcgacctgctcgccgagtggatacagcaggtccgagcacagccacagtggagcgcacctgacgaccaaggccgccatgacacccggtgcggcgcctttctggtgcccaaggaggagtctgttgctattgcacggcaagcttcggctgtggcggagaagcatgtcaagaacaccatcttgctcgacatcccatcgttgcacagatggagggcgctggggcccaagaatgtcctctactacatcctgagggagatcgagctcaagcagcagaagactcaggctgatgccaaatcacaggggtggcggcccatccgcgaggaaaaaaggagaaggattgaagaaatcaagaatgagattgaaaaactgaaagcgatggataagattcaagagatcaagaacctgattgaaaacgtgaaggacaacaaccagaagctgcagccgtacctgagcaaaccaaagcggaaggaagaccacatcacgaaagagaagatcaggaacaaaaaccatgcattacctgagctcctcgtcctgctgctcatgtcatctgctgctgcggacaaaacggacgagaagatccaatggaaggcattggaagatcactacgatgtcatactccagaatgcagccaagagtctcaaagagcatatggatcaagtaaacaaaggagcagccaaggggcaagggatcattcacaacgttgcccagtacgctcgcatcctgcaagatgtgttcccaagtgtgagcagcagcagcaacaacaacagcacgaggcagccccaggacgcccaggagcaagaagccactgccgaagctacaacaggcaagattcagatcatcatcgacaaggtgaaacaagacatcctgagtgaggtgttcgaggcggtcggtggtgccaagggcccaggaagccaccaagactga

SEQ ID NO: 19500 - DNA, 615 bp, Zea mays
  Peptide Sequence Number=SeqID_61279
atggagcaacacatcggcaacacagatctgggggtagtcatacaacgtgcctccacgcaaccaaactggaatcgaacacccaatgtcgacgatgaatccttggtatgcctaatagcctcagcgtcgatccaggatttatccttgctccttcgtgtaggggaacaacaaactacgaaagtagcttgtgcactgctacaaacttggagacgagtgccagagccagccgccggtcgtgcagtgctagccagtaggaacgatcagacgtcatatgccaccagcgactgggaacgggacctcgatctcgtgcgggacgatggggttggagaagggatgacagcgaggaagggacgcaatccctgccgtcgtgcgcgcatcaccaatggaggagcggtgacgctatcctttctccgatgcccaccggccgaccagagcctgggtggcgacatacgacgacgcagctcggtcgacactaatgcacggaggaaagggcttggacgcgagtggtttggagaggcaggagggcacggcgccgggcgtgctccatgttcgcagctcggccaacagggaggggcgaatggagcggggctggcagtttgggaaaggaggaggggataa

SEQ ID NO: 19501 - DNA, 207 bp, Zea mays
  Peptide Sequence Number=SeqID_61280
atggagtctattgcgccaatgtggtctcagaaacgatctaatgcttgcaagagccaagaacgtcatgtcatgcttgggctgcagttgctgccgtctaccaggcgccctacgcggctacactcagtggcccaggccgagcggctgaccactgaggtgctggctgctgatggacgtggccgcgtggtgctgaccggctcaggcgctgag

SEQ ID NO: 19502 - DNA, 2880 bp, Zea mays
  Peptide Sequence Number=SeqID_61281
atggcccgcccggctgccggagcgcacgacgtggggatggcgctgcgcaaggccgaggaagccgctgcgcggaggtgcgaggcggcgcgatggctgcggcagatggagcccgccgcagcagagtccctgccggagaggccttccgaggaggacttctgcgcggcactgcgcaacggcctcgtcctctgcaaggttctcaaccgcgtcaatcctggcgccgtccccaaggtcgtggagaatcctgtcatcacggtccagacgttcgatgggccggcacagtctgcgatacagtacttcgagaacatgaggaacttccttgtcgcagttagtgcgatgaacctgttgacgtttgaaacctctgatatagagaagatcaaacttatggcttacctcactggtcactacattgcttacagggagggataccacgagtggaagatctcaggtggcattggtatatggcggtatggtggcatcgtgaaaattgcatcctccagtaaaaggcctgcttcacatttaaacagaggtggaggctcagaccaacaaatgctggaatttgtgcatcttctctctgaggtctctcttgaggaatcaagagttgaagaagcccagcattctctttttcagcgctttgttcttcaagttgtacgagcattccttctggaatggggtgaagctgaagatttgcctcttgatgatatggtcatcgaaacagtactcgaacaagcttgtaaagaatttaccattttgcttgcttctcacagaaatcaggtgaggtcacttctaaggaagatgatgaaggatgacaatggaactctttctaaaatggatttgatcgaaactattacaaaatgtcttaaggagaatggtgagtgcatgtcctcttcattgcgattgcctcgtggcagccatggacacttggatgatgtgggattacttgaaaaccaacaagaaggactggagaagttaaagatgtcattcaatgaaatgaagcttcaagttgaatcgactcgtgctgagtgggaggaagacttgaggaggctagaaagctactttgaggctcagaatcataatgcttaccaaaagttgctggaggaaaatcgtaagctctataatcaagtacaagatcttaaagctgaagtttttgctgatacccaaccattaattagatctgtcatggatggatataatgtatgcatatttgcatatggtcaaacgggatctgggaaaacttacacaatgagtggtccagatgtaacagcagaggaaacctggggtgtaaactacaggtcgttgaatgatctgtttgaaatttctcaaacaagagcagattccattacatatgatgttaaagttcagatgattgaaatatacaatgagcaaatacgcaataattctcatgtaaatggactcaacatcccagatgccaatattgtgccagtcaagtgcgcacaagatgttttggatctgatgaaagttggccagagaaaccgagcagttggatcaactgctcttaatgaacgaagtagccgctcacacagtgtgttgacagttcatgtacaaggaaaggaggtaatttcaggctcaactctaagagggtgtcttcatctagtggatctcgcgggaagtgagagggtagacaaatctgaagcgactggagaaagactaactgaagccaagcacataaacaaatctctgtcagcacttggtgatgttatatctgcacttgcccaaaagagttcccatgttccatatagaaatagcaagttaacacaagtgctgcaggatgccttaggtggtcaagcaaaaacattgatgtttgtgcatgtgaaccctgaaacagactcttttagtgaaacaatgagcactctcaaattcgctgagcgtgtagctacaatagaacttggtgccgcccgtgcaaacaaggaagcaggccaggtcaaagacctaaaggaagagatcgccaagcttaaattggcattagatgaaaaggaaaatgaagtggcacagtttaaagatcttgctaaccgtgtgacttctgagatgagaaatgcaagaacaagatcacctttaaccgccagcatgtccttgaaacctgaagtcagtcaagaatccagtgtagacacctgtacaagtgagataagaagttcatcatctggcaagcaaagaaggttccgttcaccgttgtcagtgagagagctagacgataagtcacctgtcatcagcagggaactgtacctgagtgcgcgaaagtacaagactccctctcctccggttagaagctcactctctgtcgagagaggcagctttgccaaaatcgtggagaacactggaagcatcgactgcacaccgatatccaaggtcgaagtgcctccaaaagtgtggtccagcaactcgaagaccacaccttcatctgtcctgacagctcagagcctacggaaattccgggactccgaggagaacagaaccaaaattccgcccgctgtccggcagagcatggcgaagaacaggtctgagagtacgccaaagactcacaatgaagagaaaccggcgaacaggcaccactcgggtaccaaagcgaggtcagaggccaggaacacgagggactcgtccgaaatcgagaacgagtttgcgggcgatgaacctactttccacttcaaccgaactgcgaagaagttaccgacaaaggtgatgtcaagacagtcccagaacatagatgtcagtgtcagggcctctgtccggggggagatggagcctctgaccgaaggaaggcaacgccggaactggagcaagccgccgcacgccgagaggaccaatatgccgttgccggacatccggcgcagtgtctccctgccgcgcgggaagaaccctcttgtgtga

SEQ ID NO: 19503 - DNA, 2022 bp, Zea mays
  Peptide Sequence Number=SeqID_61282
atggcggaagccctcgagagaagctgcggggacgcgtgcgggaggccgcatccgtggggtggacctggagatgagcggcgtcacgagcgcgcgccctggagagacgccttcgagctcgaccgcgctgatgtacgctgcctcaaactccgcgaccccgccgagcggttcgccgccctgcagctcggcctcggtggctgccccttccgatgggggaccctggcaagaaataatcagcactgtttgccaaaggcagctcctgacgcatggctagtacttaaggatactttatgtgcagtgcagaccatgaagatagatgacgaaaggccttaccaaactcatatttttcatgatcttgcatctaacggcagtcctaaattagactgtgaggctgaaagacaaagtaatcacaaggttgaggcagataaaatggttgagcaaaccaatcaatctgaagttagctttgtgaaggctgagcatctgaatggaggtaaaattcggaagacacgcattgaggattactcctatgacaaggatgttgtagagatcaaactgccagacacagatctttcttctgattacggtgtccattttgtcaaggatgtctgcattgatgaaggagttcttccagatcaaaagatttcatcagaaaagcaagtagaccaaaaggtgtctataaactttgattcctcggaatatacaaacggggacctaagggaagatataagtgctgactctacaaaaactgcacatgaattaaaaacagaaatagttgtcctacctgtcctgtgtgatactcataacaataatactgtggaacagaactcctcatgcaaaaagcaggatcttgaagataacaatactacagatgtatctaccgattctcacgatgagggattaaatcccaaacaattaccatttcatgaagttgcacaagattaccaggaggttgacagtgtcattccggagagcaatgaaaatcaggaccggcttttcactggagatgcaacccatcaggtttcatcgaatgattgttatgaagctggaattggtatcgcgtcagaggccagtaacatcattcacaatgatttaccagaagaatcagccgctgctgatttcccggtggtgatacctgaggaagttgctgtcactgctgcattgggtatggaagtatccaaccaagttaatcactataacccttttattgcctatggatcgctagacgagacatgggaacccaatctctctctccctactactgtggatgccgcttctatagcacccatatgtcctgtcgaaaagacagatagttttagtgatcttgtcaacaggccactggaaggatttgatcctattgaactagacgaagctataattgaagagaacaggtcagattcagttgaagaaagctcaagcacattggacgtgcaagcatctgaacaacgcgatgatcagagagagagtctcactaataatgacgtgaaaactgatgcagcacatgaaacgggcaccgctatatctctatccaccagcaatggagagcacagtggcgtcaagggtgagaaatgtcagaaacatgagactgatggtcgagatacagatgatttcaacccaagagatgtggagcctggcacaaaagtaagcgaggacacaacggatgttaagagctcagctcatgtgcagacagaatctgtggttcaacaaaacggacctgatagcgcgaaagtgactactgcacagactgttattcgcaaccccttcgagtccagcttctctggacctagcattacgtcaggtcctctaacgccctctggtcacataccatattctggcaacatttctcttcgatcagagagcagcacaacgagtactcgatccttcgcgtttccagtactacagaacgagtggaacagcagccccgtgaagatggccaaggccgaccgcaggcgtcagaaggaagaccgaggctggggttacagaatcctttgcttctgggctaaacaggatgtccagcttgaaggctag

SEQ ID NO: 19504 - DNA, 447 bp, Zea mays
  Peptide Sequence Number=SeqID_61283
atgaatcttgttgtagttaccttgctcatcgtttccttgctcactgttcacctccccgccgtcgcctgtgcccggcaagttgccgtgctaaacccatacaagaatgaactggacaacagaggaaataagaacctcggcgcggcgttggcggccaccgcgtcaaccgacgacgacgatggtttagctgccagcggcaaggtgttcccagggcggaagctcggtgcgccgaacaaagagggaaccaaagccaccgtgggagcgacaacgacgacttcggcagcaggctcacggccgcggacggtgaagatgcgcgcagcggcgaggcacggcggcgacgaggccaccgagatgtacgacatgctcaggagggactacacatccaaggcgaaccgccgccggcccatcaacaacggggccacgccgctgcaggtgaataagaagccctag

SEQ ID NO: 19505 - DNA, 309 bp, Zea mays
  Peptide Sequence Number=SeqID_61284
atggatggtccgcatggcctggcagagagggtcctgccatgcgcgcaggaccaagcagagccatcctgtacactctgcgcgagcgaactctacggggaagatggctctggcaagtcggacccacgagccagcgacagaaaacggcgacgcgccccgttcgggaatgggcgactggcgctgggcccatttgatggcgcggtgagttcgtatcgcctgcgtccagctgcggcgccgcaccccagcgacgatctcgggaggaagacatcagacaagtgggcccgccagcacagcatcacggcgcgcgagtag

SEQ ID NO: 19506 - DNA, 3618 bp, Zea mays
  Peptide Sequence Number=SeqID_61285
atgcctcggagctcgcgtcacaggtcgcaccggtcccacaggcgaggagggtccgctgaccggtcggagtcagatggcgaggagtcggctccggtcgccggcgcgcgcgaggaggccgcggcggctagggtttccagagatcccgagcctgagaggcgccgctcgtcctcgggacaggaggccgtgagatcagggaacgggtacgctgagcacgggaagaagaggaaggagagggttgaggaggccgtggttgatgtggtcagcgaccggtggaacagtggcgtctgtgacgatcacctggtcgacaagaggtccaagagcgagacctttgggcatgctgaagtggagaagctggccgacaggtccaggggatcaggggatgagtccaagaggtcaagcagacgagcagtggctgtggatgacagggctgaggaggttctgtctaagagtgactctgggaaacggaggtcagagaaacagaaggatgtggggaggaaggagagtaccgggcattataaggataacagagatagggagaacgaaagggaaaggggggaagaatgggagcggcagaaggagcgagataggggaaggagtagggatagagagcgtgagaaggaaagagcacgagagaaggagagggagagagaacgggagcgtgagaaagatagggaccgagagcgggacagggagcatgagagggagcgtgataggcagaaggagcgggagtgggacaagaaagatcatgattccaagcacgagaggtatgaggatggcgggagcaggaagagtggcttgaagatgagtaggacggaacaggaggcctactcatataggagagatacagatgtcaatgaaatttcagcgaaagagaagtacaataatcctgatatgcaagctgaaaaacacagccgaagaaaagatgattctgaagatacagataagtggtccactgacaatagagacagtgatgacagaaagaccctgtccagatatgaacatggtaaatctaggagctctaaggaacaaaggtttgatgacgacaagtataaggaaaagtacaaggatgattacgtaagggataagaggcaacatgacgacaagttttctaatgagcgagtggcccgtagtcatgaaagtgatagagctgaatataagagtgctaaagatggacgcagaagctcagagagccattacagaaaggatgcagttcaagatgttgatcattatgaggattacaacaataggtacaaggaaagtagagggaaaaaacgacctcctgaggaaaatgatgaccaatatgatttaaagcctccaagcacacgtgatcaacgtgtgcatttggaaaaatcttcaggcagtgggcgtctggattctctgactgagagagcaagacctgatcgtagttctagtccaagtaaaatccactcaagaagttcacctagcccaagttcttatcatgacaaagatcagagccggcatgggtctaaagtggtggatcatggaaagagagaaattccatatgatgagagaaataatcgtccaagagcatcttctggtagagaaaggacacctgcttctagacttcgtgacagggatgcagaaaattggtcgtctgaaaggcttaaacagaaggatgattaccaacctcgtgatgtaacattggaaatttctacatcacactatgaccgcacacctagcaaagataagcatacttcaccaaaacaactgtctgaaaaatctccatcttcaggtgaccataggttttcaggtaggcttagtggtgggcgtagtcttgataataaaggagaaagaaagagccttacgaaatacagagatagagatggtgacatagctcaagagcgatcacatcatcaagatcgaatgccagctaaggttccattcagggagccaacaccgtcaaattcatccataagtagaggtggtcattttttgggcagttcaccaaataatcctttgccacctgcacggaacggtgacccttccttccagggtccacatgatgatgaccgtaggcctcaaaatggagataggaggttccatggtcatcaaaaaaggaatgacatgaattctgttcgtggacatggacatggctggaacagccagccaaactggccttctccagtttctaatggtttcgtccccatccaacatggtggtgctcctggttttcatccacctgtccatcagtttccaggcccacctatgtttaaccttagacctcaaatgaaattaaaccaacctggagtttcatatcctatgcatgatgctgttgataggttttcgacccacatgcgcccatttgggtggcctaatcatctggatgaatcatgcccacctcatatgcaagtttggaatggaggtagtggtgtatttcctggtgaaccctatatctatggtagacaagagtgggatcagaatagacctcatgctggtagcagaggttgggagctgactggtgatgtatccaagggaccaaatgatgtgccggatgctgaacttctggtagctaagaaggatcctgactctgcaataactgctgtttctgattctggtggacaacacaatcttcaacctgaggctgaccaaaaggaaattggacgcttgactgctgaaaactttgaagcgaagaatcatactaaaagttcaaaaagtttggaagctcctcaaggagcacaacttgtgacttctatgctgtcaaagaatagcgtggtcttttgtaaaaactatctatccagaatcagtgtttcacatgatcttgttgagcctgagttgtacaaaaggtgtatatccttgctgggagatttggacgtaacaaaaacctctcatttggttaggaatgaaattcagagagctttggcccttcataagaaccagactcaaaagggtttaactactgcctctgcatctgtaaaaatggaagagaagatggctgtaccagaagatgaccatgacatggaattgcttgaaccagtggtgagcaatcctgctccacaacgtcacactgatgtcatggaggaaggatcagtatcaaaacatgaacttggtgatggcatagggagaactattgctgcaactataggatctggggttctggatgcacctccagaaatttcacttccccaacctgaggtggtggtggcaacaacagtaatcacacagccgaacaagcacatggaggatgtgttgcctccagcaattgaggatggtgcactacaagcaaccctcgaacatgctgttggcataccggaagttacacccgctgatgtcttgctggatgttgcaccttctgctgttggagaatcaggtgatgacatggagatcataccctctgctatggcagaacctcaactaggcaaggagcctgctcctgttgctagtcctgacagtcaagagaagcccttcatgcttgattctgagacaggtatggaggttgaggttaaggttatcgatgataatcctggggatggtagggtgagctctatactcggcaccaaacttgattttgctgcaattgatggggattctgaagctttgttggtggaaagtagggtaaatttaagtcggatacctaattccccagaaagtacacattga

SEQ ID NO: 19507 - DNA, 969 bp, Zea mays
  Peptide Sequence Number=SeqID_61286
atggcggcccggccgtggcgcgcccccggctcgccggcgtgcggccgtggcgccccctcccctgacgtccccgcgcagccccctgccgccctcggcgcgcggcttcacgcccgcgcgcccgaccgtggtgcggccccgtcgtcggccatggcggctcggccccgcccgcctggtgcggccttgccccgacgccccgccttgcctcggccatggcgcggccccagcagcctgcccgccttggcgtgccccgcccctgcccggcgcgaccgcgacatgccggcccggcgcgaccttgagctcggcccgacatgcctatggcacgcggccttgagctcggccagcacgcggccccgcgcggtcggcctcggcatggcctcgttgtcgctcgcggcgcgcaacgcagcgcgtgcgcagctcggacctggcgtggcaatgagattgagggttcttggttttgactctgggaatggcagcaacaagaagacttcgccaggaactgaaggacaggacgactacctcttcaacatccgcctcctcaagcagagaagcactagcagtcaagctcctctttcgcggttccgccccgacttctacctccacggctccacgccgtcaagcaggttcaacgcgctcaactctggcgaggactcgcccgactggccgcgcaggaagccagccgccagcccaccaggaacaatcatcttgttgttgccttgtgagtgtgggaaccgggaaagtgggaagccgaacgatcggagagaagttggaacagccgtcgggctcgggcgtcacgtcggccgaacgggatggccggatggggtccccggtgggcttggcttagggtgtgatagggcccacccagacccccctatgggtccacccctgtctgtcgggatgcgtgaggacagcgagacaacaagcaactcccacaatgagcattttactagttgtaacttgcaaagtaaatga

SEQ ID NO: 19508 - DNA, 216 bp, Zea mays
  Peptide Sequence Number=SeqID_61287
atggagatgaacagcttcaacaagatgatgggggatgatcccatctttcagcgcgggtggggaagggcacagacacagcatgggaggcggtacaatggtcggcaatgggatcacaggaaagagcacatgttcagcctgcgcgctgcaattccagcttatacggctattcttgaagacgggcgattagtaattcttttgagatgcctcgacaactaa

SEQ ID NO: 19509 - DNA, 666 bp, Zea mays
  Peptide Sequence Number=SeqID_61288
atggcgcaccggacagtcccggtgcacaccggacagtccgggtgccccctgcccacgtcatcactgccattggattcgaccgttgaagcttctgacttgtgggcccgcctgggtgtccggtgcacaccggacagctactgtaccttgtccggtgtgccagtatgggcgcgcctgacttctgcgcgcgcagagcgcgcattaaatgcgcggcagagagccgttggcgcggagaagaccgttgctccggagtcgcaccggacagtccggtgcacaccggacagtccggtgaattatagtggactagccgttggagtttcccgaagctggcgagttcctgaggccgacctcccttggcgcaccggacactgtccgggctcagactcgggctcagccccagaagacgacgaactccgcctcgcccgacccagggctcggactcgggctcagccccggaagacggcgaactccgcctcgcccgacccagggctcggactcgggctcagccccggaagacggcgaactccgcctcgcccgacccagggctcggactcgacctcgacctcggaagacagactcgacctcgacctcggaggagcctccgcctcgccctacccagggctcggaccgaccacgtcacaggaggggccatcattaccctacccctag

SEQ ID NO: 19510 - DNA, 285 bp, Zea mays
  Peptide Sequence Number=SeqID_61289
atggctggagctggccgctgggcgctgccgaccggaaccggcggcctcgggcctcggctagcgctcggcgcttgggcttggccgtcgggcacttggtggtcggcacacagcgcactcgagcagtcgggcgagggcgactgggcgagtgacgactcgtggtggcctggtggggtcacggtcatggcccatctggcatttgcggatctggccatcatcccgagtctcagctctcgagccaggctcgatggtacaacgagcctgcagaacaggctcggctcgatatga

SEQ ID NO: 19511 - DNA, 228 bp, Zea mays
  Peptide Sequence Number=SeqID_61290
atggatgatgatgatctgcgtgtaattgaattaaagaattgtgctgatctttctacaacactgttccacatcactcgttgcccgccagctgctaccagtgttatcaggcattgcatccgagaacttgttcttcagtttgctggcaccttctacattcttagattcttcggagaacgaggtatggattccaatccagcagcaaaaatgcacaaaaactatgctgtttag

SEQ ID NO: 19512 - DNA, 255 bp, Zea mays
  Peptide Sequence Number=SeqID_61291
atgcactctttctacagtcatgttgtgcgccttcagggtctaagggaaaggttttcacattgcaactcaaacatgggcgcgagccaggaatccactggtgtatcagatggtgattttgtttcttatgtaaatgaatggtgcatagatggggctacgcttatcgggagctgctacaggacaactccaaacactatcagagccatacacaggactctaaaccaaggctccaacgagcagcagttacctctagcatag

SEQ ID NO: 19513 - DNA, 354 bp, Zea mays
  Peptide Sequence Number=SeqID_61292
atggctggagcacgaccaccatgctccgcgtcgctgccgcgcaaggaagatggcatcgcaaggcgggatgcagtcggggcatgtggggcacaacggctgggagccaggccgcaacgcaggctgccgcgccataaagaaaacgaagaaggatgtgccagacttctcacctcacgacacagcctgacggagagagctcgtggatgcctcctggtgaagctccggcacgcggtgctcaacgacggcctggccgacgacaacttgcggaggaaaggcaagcgggacccacggcctgatgtagaagcgaggaaggctcttgtgcggctgataagtggagcccaaagcgcaacaacctag

SEQ ID NO: 19514 - DNA, 408 bp, Zea mays
  Peptide Sequence Number=SeqID_61293
atgagcagcgacggcggcgtggagaggggcagggccacatgcgtggggaggagcaggatcgctaacaagaccggtggcatggggtcgagcagggcggcgccgtggagacgagaaggcagggcgtcggccgctcgtcgggagcacgcacagaagtgcagaacgacgcacggccgctcgtcgagagcggcgcgtccacgcctccacggtcagcaacgactctgtctcgtcgaggtgagcgttcgccgccagcaacgactctgcctcctcccgaggtacggcctgctcgccacgagcaaaagcagcgcgcccacggccagcaacaacttcgccttatcgaggtgttcccgccgcagatccatgttagtgcgcctagccgtcattgtccgagcggctcctcttcaactctag

SEQ ID NO: 19515 - DNA, 153 bp, Zea mays
  Peptide Sequence Number=SeqID_61294
atggggaccctccctggtgggttcttcgccgagtgtcccgggtggcactcgacaaagattgattctttgccgagtgctgctgggcagacactcggcaaagatatttttaaccttgctatagcagtttgtggagttgtaacttattacatataa

SEQ ID NO: 19516 - DNA, 582 bp, Zea mays
  Peptide Sequence Number=SeqID_61295
atggctctaagtcgtaggaatgaagctgcagcagcgaggattcgtgcgaagctgaaaaatctgcaaagcaggccacaactgatgtcaaaagttaataaggctgcaaatttggagactatgaactggaagaagcgtcttgataacttcaagaacgcttcgaaactgaaacctgtaaatatatctttgaaggcaggagagtctggttatgaccctttctcgaggatgtggacaagatcaagaaactattatgcatcaaagccaggaggagataatgttgaagaaactaccaacaagtccagtagtattgtagagcctagcaatgaagatataaagagcaaggctcaaactgaatttggtggagccgagggcctatttaatggttacatggcaaggaggcagaagatagaagctacaacggggtacaaagggtctgacaatgatggaaagaggcatgctttaaccttgagtgtgagtgattacaaaaggcggcgagtctcctctgaagggtatctgttattgtgctgggtgctcaacagattcaactatgttcctggctttcagcacctctgtgcattgttgtga

SEQ ID NO: 19517 - DNA, 498 bp, Zea mays
  Peptide Sequence Number=SeqID_61296
atgccagtgccactcccacgaaccggtgaccgctcgtcggctcgtgaacctgacgccgctgcccaccgtcagctcgcaaagccgccggcgtcggcgcacgcggcgaggccgtcgggttggtcgcgtgcattgcccggcggcagggccggtgatcgctgctgtacagctacagcgcgcagatggcgtttcggtgccggtgctttccgctgctcggcggcgccaccgttcacgaccaaagcacctgcttcttcgcaatctcggcagccaacagtaactccgaagagtcttgctcttgcacgctcgctcgaaatggtcatcgggaacgcagcacacgaagagagtaaggttactgggaaaaataaaaaagtcagcgcatcgcatcacattgcatatccggatctcggaacacgagaagaggatttttggcgttttgcaccgggtttgctcggtctcagtcacgactcacgagatcaccagggcaccagccttgcggcttag

SEQ ID NO: 19518 - DNA, 345 bp, Zea mays
  Peptide Sequence Number=SeqID_61297
atgtcggggctgcaggcgacaccgcggccctacgtccacgcggcggccggcgactcgtcgggcccctgcctcgacccatcacatcgccatcaagacgtgaccctcgggcgcaacagggagctccgcctcgcccgaccccaggcctcgacctcagcctcggcctcggaagaaggtctccgcctcgcccgaccccaggcctcggcctcaggagaagtcaccgcctcgcccgacctcggccttggaccgactatgccacagggggcaaagaaacgtcagcaggacccagggccgcaccgtcagctacgcttctacagggctcaaacacttctccgcctgccacgttag

SEQ ID NO: 19519 - DNA, 228 bp, Zea mays
  Peptide Sequence Number=SeqID_61298
atggccactccccgacatttagcatctggcatcctaaacaaactcaacgctggatggaaggtgcgatattgcctcaatataagtgaagatgagtacaggaagaccattaaagtaaatgtgataagaccttggttcctaatgaagattattggtgctgagagaggattatatccaggtgctacaacatatggtaacagcttgggagccaccaaacctgtatacacttag

SEQ ID NO: 19520 - DNA, 2262 bp, Zea mays
  Peptide Sequence Number=SeqID_61299
atgaagccaagcattctcaaaccgaaagcaatgtttttttggaagggacttcggaaggcgacgcttttactggcgtaccagagcttcggcgtcgtgtatggcgatctctgcatttcgcccgtctacgtgtacaagaacaccttttccgggaagctgcggctgcacgaggaggacgaggagatcctcggggtgctgtccctcgtcttctggagcctgacgctcataccgcttctcaaatacatcatccttgttcttggagcagatgacgatggagaaggtggcacatttgcgttgtactcgttgatgtgcaggcgctcaaggatgggcctcctgatgaacagtataaacgacgggtgtttatcggtgtacagccaggaggaggaacctcgcgaggaggagctgaagagtagtctggcgataaagtctttcatcgagaggcattactcgctccgtgtcctgctgctgctcttcgtcctgatgggtactagcatggttattggggatggcgtcttcaccccaactatgtcagttctatcagcagtttctggactcagaatcaagtttccagagctacatgaaaattacactgtgcttctcgcctgtttcattttggttgtccttttcgcgctgcaacactacggaacccaccgcgttgggttcctgttcgctcctattctgcttgcctggcttggctgcatcggcggcatcggcatatacaacatattcaggtggaaccctagtgtcgtccgtgctctgtccccgtactacatatacaacttcttcaggaaggccggcaaggatggctggagctcgctaggagggattgttctatgcatcacaggtgctgaagcaatgttcgctgatcttgggcatttctccaaactttcactgaggcttggattcacaatagttgtgtatccatgcttagtcctggcttacatgggtgaggctgcttatctatctaaacatagagaggacctacagagcagcttttacaaagctctcccagacagagtgttctggcctgtcctgatcatcgcaacactagccacagtcgttgggagccaggccatcatctcagctacgttctcgatcataagccagtccagggctttggggtgcttcccgcggataaagatcgtgcacacatccagccacgtccacggccagatctacataccggaggtgaactgggccctcatgttcctgtgcctggccgtcaccgtcggcttccgcgacaccgaaatgatcggaaacgcctacgggctcgccgtgatcctggtgatgttcgcgaccacatgcctgatgttcctcgtcatcacggtcgtgtggagccggagcgtggcgctggcggcgctcttcacggcggggttcgggtccgtggagctgacgtacctgtcggcgtgcctcgccaaggtgccgcacggcgggtggctgccgctgctgctgtcgctgggcacgctgctggccatgtcgacgtggcactacggcacgaagaggaagcgggagcacgaggcgcagagcaaggtgcgcctggaccggttcctgggcctgagcgccggcatgggcctggtgcgcgtcccgggggtgggcttcgtctacgccgccagcgccgccgctggcggcgtgccccccgtgttcgcgcacttcgtcaccaacttcccggcgttccaccgggtgctggtcttcgtgtccctgcagacgctggcggtgccccgtgtgccccccggcgagcggttcctggtggggcgggtcggcgcgccggcgcaccggatgttccgctgcgtcgtgcgctacgggtacaaggaagggcggcgggaccacttcaacttcgagaaccagctgctgatgaaggtggtggagttcctgcagctgcaggacgccgccgccgccgccaaggcgggaggatgcgtgtccgggtccggggagctgtcggtgatcccggcgcacgtggacgcgggctcggcgccgccgtcgtgcagcgagatcgacgccggcaggagggtccggttcgaggagccgagcggggccgccgccggcagcgaggaggaggtgaagacgctgctggaggagctggagtccggcgtgtcgtacatgatcgggcacacgtgcgtgcaggcccacgagtcgtcgcccgccgtgaagaagttcgccatcaacgtggtgtacgggttcctccggcgcaactcgcggcggcccgccgtggagctcggcatccccaacacctccctcatcgaggtgggcatgacgtacaagatctga

SEQ ID NO: 19521 - DNA, 267 bp, Zea mays
  Peptide Sequence Number=SeqID_61300
atgaccggggataagcaaaagccatcaagcaaaatctccaacacctacatcgacaagggggcccaacattttagggcctgggcgatcgccctgctcgaccaccccaggtccagcccgccctgccctgccccagtctgtagtggagtttggccggggaagacggagacagtgctagcagagccaggctgccagagggcggggtcgtcgcgtcacggatcatggaggcaggtcgtggggtcgtctaatccaccgatcgccgtcgtctaa

SEQ ID NO: 19522 - DNA, 334 bp, Zea mays
  Peptide Sequence Number=SeqID_61301
cttcgtcgtcgccgaccaggccgacgccgggcccggcgcactgctgctggactgcctcagcccgcgctcccagtccgggttcttcttctccccacacagcgctggacacagtcattcctctcaactccgtcagctacgaggtcttcctgctactgctactgatctggttcctatacagtggcacccgggcggcggtgagcgcgcatgctggcacgcacactacgccgtcgtcgacctcgcgctcgacacgctcgccgccgcacgctccttcggagtggaggagctcctgctgctcacccaggtaatcctattcttcctcctctcaactggatga

SEQ ID NO: 19523 - DNA, 177 bp, Zea mays
  Peptide Sequence Number=SeqID_61302
atggcaccaagcggtagcaagagttatcaacgtccaacttaccactcaaagagatacgttcttttggtccttacagaaacatgggagattcacagtagtcttcagaggaacccactggatacgacaatggtccatgttgcaaaaataggaaaacatgacaaaatcaagtggggatga

SEQ ID NO: 19524 - DNA, 3249 bp, Zea mays
  Peptide Sequence Number=SeqID_61303
atggaggctgcaaagccaggtttcaagaaagttgagaaatgcagtgaaaatgctctgcggagtgtatctgagcttcatgtaggcgatgagaagcagactggttctaacaaatttgatatggaaaaggtactgaaagggtttggagctcgtgatgcttttgtggcttctgggctcaacggccctaatggacaagttggtggtactgtgtcgaagccttcagacatatgcccttctaagatcactgttcctggggaaaaagctcctctggattttaccttaaagactagtttgcagtttgtttcatcgtcatctgtgaagtggtggggcgtttgcttttctatgcctctttgcagcactgaagtggagcaggctactgaggacgaccttattgaactttcagaaatcgaaaggcgcaatgtcggacaggcactccatttggatgctttatctgacgtggataacaccacgcagtcgctgctttcgtttactggcaacgagaacgttcatggcctatacgacgttctattgaattacaagtccttgctgaattcattatctgctgtggatgtcccagtcttgtattcaccccagccatttcaaaatggctgtctacacatcccagaggtgaagtgtagggagatgaggagagcagacatgtcatccggcgggttcgacacagaacagggatccgcatttgcgtcgacggcaggcaacgtatgctacagcatggaagtaaaggacgcggttctgccgccatgggtggtctctgggctgtgcgccgccatgagcttggacgcgaccagctttgatctgacgtacgtacgcgcaaccactcccccgccggacactgactctagttctgcgctgagcttttgtcgtgggttctctcgcaggatcgccacggagccgtcgtcgatgggcttgaacgtggctctcgactccatgggcaccaccaccacggatgtccagcctgaaggatccaccccctccagctgctctgcgcccacgacgcccttggtgggtgccgttcctgacgcggccctcgtccctgccctgcactccgcctcgctgcgccgcctcacctacacggacggcggcggggtcgaggctctgccgctctgctatgctgctgccgccactcgctcggaaaaagcttcgtccttttctctcgctccctcccctcacattcgttcctcgcacccttccactttccgcgtctgcgctcggccgcccatgagcgcctgcgggggcaccatccccgcgtcgcgcttcctgcgccgccgcgccgccgtgcgggacctgggcggggacgcggccgccggcgacaccgacgccttctgggccgccccgccccgcctctacgacttctcccagcagcagcagcagcagcacacggcccaggccgcgcggcgatcgccctcgccggcgccgaccagcccgtgcctcctcgcccggaagcggcaccagcagtccccgtcgcctcctccatccccgcggcgctcgccttcgtcgcccgggacctgcctgctctccgccctgcaccgcacctgcgtgggctggggcgtcaccaggcgcgccgagtaccccagacggcaccgcccggtttctcccgcggcttgtgggcaggttacggggatgcacacgcacgggcgggcggcggctcggtgcgtggacgaggacgaggagagcaccagcaagaacagcaagtgcctgttggccgtgggcaagaacgagctggaggaggaggtgggtcaagaccacgagagctgcctgcaccgccgccgccgcgccaagaaggccccgtgggccgtcaaggaggagcaggagacgtcaggtgaggcggcggaggagggcgccaagcgcgccaagaggaccccactgaagcatgaggcggcggcggcggcggagagcaagcccgccggcgccgccaccgccaccgccactcccgactccggctcgccacgcggcaacggcaaggtcgaccggtgggcggcgtggcggtacgcggcgggcgaggcggcgctggccaacatcctgcgcgagcgcggcgccaccgccggcaatcccacgccgcgggccgtcctgcgggcgcaggcgcgccgcttcatcagcgacaccggcctgctcgacaacctcctccgccacgtcgccgacaaggtccccgccggcaccgctgaccgcgtccgccgccggtataacccggccggaggcatggagtactggatcgagccggccgggctggcggccgcgcggcgggaggccggcgtcgaggacacgtactgggtgccgccgcccgggtggaagcccggagaccccgtgtcgccggaggcccgcacgctcgaggtgcagaagcaggtggaggtgctcgccggggagcttgccgtcgggtatgactgtatggtcaaggccaatggcaagctggaaaaagaggtgctgtccttggaggagaagtatgagactgcggcacaggtgaatggggagctgaaagagctgctgctgctactgaaggataagtatgatactgtgcttgagaagaatgagaaactggagggccagatggttgctctgtccacttctttccagtccatgaaggaagagttgctcctgcagagaatggaagaacaccctctgctgatgctagcgcaagagccttgggaaggtgacaagcgagaagccggtggtgcgaacaaggctttggtggtgtgtgcaggcgaccagctggccggcgctgatgccttcgatggcagcttcagcagcaaccacagtgcctatggtgacgagaagatggtgctgaggaaacgtatctgcgtgcgggagggagcatgccagtggcctaggtctgctacttccagtggcgctacggctggcagccctggggacctgccggagccgctgacaccgggtgcggatctgatcgtcactgacttcgacaccatgatcgatagcctcgcgctaccgtccatggaggagtacctacaggtcgatggtctccccacgccgacgtctgcctcgtccaccaccgcatctcccaagctccagctcctcccctcaccagcctcgccgagccaggtccagcctctgccgtcaacaaccatggtcgtgggcgacttcaacatgcagctccggcacatggacacgtcgtcgtcgtcgtcatcaggaccgtgcggtgccaaggcgctgaagctcgacgccggagctggaggtggcgaggttggcactgagctggtcctggcgacccccacctactga

SEQ ID NO: 19525 - DNA, 699 bp, Zea mays
  Peptide Sequence Number=SeqID_61304
atgccgcgcgcattggatctgaatccactttacataacacaatcacgcttacgccaaatcagtggcgaaaccaagaatgtgcgcggcattgaggagatgaaggcgcatttgcctcgttcagcaatgccagacgagtcgacaaactccccgacccggcgccggcgcggcggaagagggctcagccgccgcaacggggcttgcgaaccgggagtgaagctagggtttggagggagactgctacagtggaaggaagaggagggcgacggggctgagggtgggggcggggatgcggagggcggcggcggcggatcggggccggcggtggcgatgcgggtgggggccgacagcgacgggtggaggagtaagagatgggcgggtgccacgcgaccgacgaggcacgggacggcactgactgacctggcggcggcgcggcgggcgaccgaagctaccagaagcagccacccatgtagcccgtccctccgaccgtccaccttcttgaagcttccgggagcgggggcgacggggcggattaggtggcgagaagggagggagggaactgccgaactgggaaggaagtggaactgtggaaggcgggatttgaaaaggcagagacgcgcctgctcgcgccgccacggtgcggatcgggtgctggtctggtttggtttgctcgggcccggcccacaggacgaagacaactag

SEQ ID NO: 19526 - DNA, 1137 bp, Zea mays
  Peptide Sequence Number=SeqID_61305
agttcatttgtgcaaggagttgtgacggtcttaaattgctttgtgatgttatttgttatcatagccggtagctacatcggcttccaaacaggatgggttggctacaaggttgctggcggatttttcccttatggagcgaatggaatgcttgccgggtcagcaactgtcttcttcgcctacataggatttgattcagttgccagcacggctgaggaggtgaaaaatccacaacgagatctgccactgggaatcggaacagcattgtcgatttgctgttccttgtacatgttggtttcagttgttattgttggtctggtaccatactttgctatggacccagacacccctatttcatctgcttttgccaaacatgggatgcactgggcaatgtatcttgtaacaactggtgctgttcttgctctctgctcaaccttgatgggatctatattgccacagccaagaatattgatggccatggcacgagatggcctgctaccatcattcttctctgatgtccataagacgacacaagttccagtcaaaagcacagtagtgactggcatctgtgcagctgctcttgctttcttcatggatgtctctcaactggctggaatggttagtgtaggcacgctactcgcgttcactatagttgctgtgtccatcttgattcttagatacgttcctccagatgaggtacccctcccatcttccctgcaagcatcattccgcttgagccaagaaaatgacgaggaaaagctgaggggtacccttggagatgatgatcatgagcaaggctcagctgaaataagtgatgttgtagtagaaccaatcactgaccccctgatcgagaagcagctatacgcaagcaatttgagtgaggcaaaacggcgtaagaccgcggcatgcagcatcacatctgtttgcataggggttctgatcctcacgacgtcagcctcggcaacattcttgccctttggcggcacgtggatgcgagtgggggtgtggctagtgatgggggtgttcgtctacattttctatggccgcacccacagctcgttgacggatgtcgtgtatgtccctgtggccgaggcgaatgagatatacgggtcatcctcttcgttagggtttgtggcgtaa

SEQ ID NO: 19527 - DNA, 312 bp, Zea mays
  Peptide Sequence Number=SeqID_61306
atggctggcgcaccagacagtgtccggtggcgcaccggactgtccggccaccaccaccaccaaggctgcacggtaaaccaagtggatgacaaatgggagaaatttctttaccagagagtgctttctgcttgggagctaacgaaagttccacctgaagccaagtcgtctggtggagttcttgcctttgggagaggtgtttcaagagggaaacagatcagtcaaactcatagctttacaagtgctacagatggtaaaaaaagattctacatgaaaacaatctggaaaataatagcatggttcaatgcattgtag

SEQ ID NO: 19528 - DNA, 599 bp, Zea mays
  Peptide Sequence Number=SeqID_61307
atggaggctgccactcggtacttcgacctcgccgagttcaacgagtccagggtctgtccccacggcgccacgttcgcggtggccacgtccggcgcactccgtgtcgcggcggcttgcgtgctggtcgtggccatgggccacagagtggtgcgacccacgctagcggggcttaagagcgccagggtggttggcctcggcgtcgcgttcttcgccaccatggaggccctcgagatcttcagctcgttgtcgaagacgctgaacaagctcaaggcgaaacgaatgactacgaagctggagatgtaccgaaagttgaaaaacgccttgatcattgcggtggccgtgtcacttggttggatcacatttgagctctggcgagctccacgggctccggcgagctccacgggctccggcgacggcgtggtgaactccggcgacggcggcggtggctctaacggcgaggagcttgagagagaggccgggtcgctcggcggagtccctggcgcgtcgggcggggctctggcggcgcgcgaggttgggaagaggaagcgagggggcgtgggcgtcgcgggtgtccgcggcggcttcctagcggcgcacac

SEQ ID NO: 19529 - DNA, 291 bp, Zea mays
  Peptide Sequence Number=SeqID_61308
atgaagttgaccggtaggattggtccgactgggcactacgaatttctcaccaggaggcatggatttcagctgcgccgccgcggtgccgctgtccgttgcgcaccaacctcaccaccacgtcttccctgcgtgtgcgccgccgaggggattcctacgccgccgtgccccgctcagctccagggctggtcggtggtgaatgtgagaagaatggctttgtccgtcgatcaacggatggacgacagagatcgagtattgaatacctatttagctcagggacttgtgcgccgttga
